United States Patent Application Publication US 2024/0131193 A1 - sequence listing, part 12

SEQ ID NO: 22561 - DNA, 5220 bp, synthetic construct
  source 1..5220: mol_type = other DNA; note = Synthetic coding sequence
atgatggagggcaatggaacagagaacagctgcagcaggacccggggctggctgcagcaggacaatgatgccaagccctggctgtggaagttcagcaactgcttcagcaggcctgagcagaccctgccccacagcccccagaccaaggagtacatggagaacaagaaggtggccgtggagctgaaggatgtgcccagccccctgcacgccggcagcaagctgtttcctgctgtgcccctgcctgacatccgcagcctgcagcagcccaagatccagctgagctctgtgcccaaggtgtcctgctgtgcccactgccccaatgagcccagcaccagccccatgagatttggaggcggcggcggcggcagcggcggcaccagcagcctcatccaccctggggccctgctggacagccagagcaccaggaccatcacctgccaggtgggcagcggctttgccttccagagcgccagcagcctgcagaatgccagcgccaggaacaacctggccggcatcgccagtgacttccccagcatgtgcctggagagcaacctgagcagctgcaagcacctgccctgctgcggcaagctgcacttccagagctgccacggcaatgtgcacaagctgcaccagttccccagcctgcagggctgcaccagcgctggctacttcccctgcagcgacttcaccagcggggcccctggccacctggaggagcacatcagccagagcgagctgaccccccacctgtgcaccaacagcctgcacctgaatgtggtgccccctgtgtgcctgaagggcagcctgtactgtgaggactgcctgaacaagccagccaggaacagcatcattgatgctgccaaggtgtggcccaacatccccccacccaacacccagcctgcccccctggccgtgcccctgtgcaatggctgcggcaccaagggcaccgggaaggagaccaccctgctgctggccaccagcctgggcaaggccgccagcaagtttgaggtggccgtggccggccaggtgctggagaacctgccccccatcggggtcttctgggacatcgagaactgcagcgtgcccagcggccgcagcgccacagctgtggtgcagaggatccgggagaagttcttcaagggccaccgggaggccgagttcatctgtgtgtgtgacatcagcaaggagaacaaggaggtgatccaggagctgaacaactgccaggtgacagtggcccacatcaatgccacagccaagaatgctgctgatgacaagctgcggcagagcctgcggagatttgccaacacccacacagccccagccaccgtggtgctggtgtccacagatgtgaactttgccctggagctgagtgacctgcggcacagacatggcttccacatcatcctggtgcacaagaaccaggccagcgaggccctgctgcaccacgccaatgagctgatccgctttgaggagttcatcagtgacctgcccccccggctgcccctgaagatgccccagtgccacaccctgctgtatgtgtacaacctgcctgccaacaaggatggcaagtctgtgagcaaccggctgcggcggctgagtgacaactgtggcggcaaggtgctgagcatcaccggctgcagcgccatcctgcgcttcatcaaccaggacagcgctgagcgggcccagaagaggatggagaatgaagatgtgtttggaaaccgcatcatcgtgtccttcacccccaagaaccgggagctgtgtgagaccaagagcagcaatgccatcgctgacaaggtgaagagccccaagaagctgaagaaccccaagctgtgcctgatcaaggatgccagcgagcagagcagcagcgccaaggccaccccaggcaagggcagccaggccaacagcggcagcgccaccaagaacaccaacgtgaagagcctgcaggagctgtgcaggatggagagcaagacaggccacaggaacagcgagcaccagcagggccacctgcggctggtggtgcccacccacggcaacagcagcgctgctgtgtccacccccaagaacagcggcgtggccgagcctgtgtacaagaccagccagaagaaggagaacctgagcgcccggtctgtgaccagcagccctgtggagaagaaggacaaggaggagaccgtcttccaggtgtcctaccccagcgccttcagcaagctggtggccagccggcaggtgagccccctgctggccagccagagctggagcagccgctccatgagccccaacctgctgaacagagccagccccctggccttcaacatcgccaacagcagcagcgaggccgactgcccagacccctttgccaacggggctgatgtgcaggtgagcaacatcgactaccgcctgagcaggaaggagctgcagcagctgctgcaggaggcctttgcccggcacggcaaggtgaagtctgtggagctgagcccccacacagactaccagctgaaggctgtggtgcagatggagaacctgcaggatgccatcggggctgtgaacagcctgcaccgctacaagattggcagcaagaagatcctggtgtccctggccaccggggccgccagcaagagcctgagcctgctgtctgctgagaccatgtctgtgctgcaggatgccccagcctgctgcctgcccctcttcaagttcacagacatctatgagaagaagtttggccacaagctgaatgtgtctgacctgtacaagctgacagacacagtggccatccgggagcagggcaatggccgcctggtgtgcctgctgcccagcagccaggcccggcagagccccctgggcagcagccagagccatgatggcagcagcaccaactgcagccccatcatctttgaggagctggagtaccacgagcctgtgtgccggcagcactgcagcaacaaggacttcagcgagcatgaatttgatcctgacagctacaagatccccttcgtcatcctgagcctgaagacctttgccccccaggtgcacagcctgctgcagacccatgagggcaccgtgcccctgctgtccttcccagactgctacatcgccgagtttggagacctggaggtggtgcaggagaaccagggcggcgtgcccctggagcacttcatcacctgtgtgcctggggtgaacatcgccacagcccagaatggcatcaaggtggtgaagtggatccacaacaagcccccaccacccaacacagacccctggctgctgcggagcaagagccctgtgggcaacccccagctgatccagttcagccgggaggtgattgacctgctgaagagccagcccagctgtgtgatccccatcagccacttcatccccagctaccaccaccactttgccaagcagtgccgggtgtctgactatggctacagcaagctgattgagctgctggaggccgtgccccacgtgctgcagatcctgggcatgggcagcaagaggctgctgaccctgacccaccgggcccaggtgaagcgcttcacccaggacctgctgaagctgctgaagagccaggccagcaagcaggtgattgtgcgggagttcagccaggcctaccactggtgcttcagcaaggactgggatgtgacagaatatggagtgtgtgagctgattgacatcgtgtctgagatcccagacaccaccatctgcctgagccagcaggacaatgagatggtgatctgcatccccaagcgggagaggacccaggatgaaattgaaagaaccaagcagttcagcaaggatgtggtggacctgctgcggcaccagccccacttcaggatgcccttcaacaagttcatccccagctaccaccaccacttcggccggcagtgcaagctggcctactacggcttcaccaagctgctggagctgtttgaggccatcccagacaccctgcaggtgctggagtgtggggaggagaagatcctgaccctgacagaggtggagcgcttcaaggccctggccgcccagtttgtgaagctgctgcggagccagaaggacaactgcctgatgatgacagacctgctgacagaatatgccaagaccttcggctacaccttccggctgcaggactatgatgtgagcagcatcagcgccctgacccagaagctgtgccacgtggtgaaggtggccgacattgaaagtggccggcagatccagctgatcaacaggaagagcctgcggagcctgacagcccagctgctggtgctgctgatgtcctgggagggcaccacccacctgtctgtggaggagctgaagaggcactatgagagcacccacaacacccccctgaacccctgtgaatatggcttcatgaccctgacagagctgctgaagagcctgccctacctggtggaggtgttcaccaatgacaagatggaggagtgtgtgaagctgaccagcctgtacctgtttgccaagaatgtgcgcagcctgctgcacacctaccactaccagcagatcttcctgcacgagttctccatggcctacaccaagtatgtgggggagaccctgcagcccaagacctacggccacagctctgtggaggagctgctgggcgccatcccccaggtggtgtggatcaagggccacggccacaagagaattgtggtgctgaagaatgacatgaagagccggctgagcagcctgagcctgagccctgccaaccacgagaaccagcccagcgagggggagcgcatcctggaggtgcctgagagccacacagccagcgagctgaagctgggcgcagatggcagcggccccagccacacagagcaggagctgctgcggctgacagatgacagccctgtggacctgctgtgtgcccctgtgcccagctgcctgcccagcccccagctgcggccagaccctgtgatcctgcagagcgctgacctgatccagtttgaggagcggccccaggagcccagcgagatcatgatcctgaaccaggaggagaagatggagatccccatccctgggaagagcaagaccctgaccagtgacagcagcagcagctgcatctctgctgctgtgcctgtgcccccctgccccagcagcgagaccagcgagagcctgctgagcaaggaccctgtggagagccctgccaagaagcagcccaagaacagagtgaagctggccgccaacttcagcctggcccccatcaccaagctgtag

SEQ ID NO: 22562 - DNA, 390 bp, synthetic construct; identical to SEQ ID NO: 19988
  source 1..390: mol_type = other DNA; note = Synthetic coding sequence

SEQ ID NO: 22563 - DNA, 432 bp, synthetic construct
  source 1..432: mol_type = other DNA; note = Synthetic coding sequence
atgaccctgcgctgcctggagcccagcggaaatggaggagagggcaccaggagccagtggggcacagctggcagcgctgaggagcccagcccccaggccgcccggctggccaaggccctgcgggagctgggccagacaggctggtactggggctccatgacagtgaatgaggccaaggagaagctgaaggaggcccctgagggcaccttcctgatccgggacagcagccacagcgactacctgctgaccatctctgtgaagaccagcgctggccccaccaacctgagaattgagtaccaggacggcaagttccggctggacagcatcatctgtgtgaagagcaagctgaagcagtttgattctgtggtgcacctgattgactactacgtgcagatgtgcaaggacaagaggacaggccctgaggccccctag

SEQ ID NO: 22564 - DNA, 156 bp, synthetic construct
  source 1..156: mol_type = other DNA; note = Synthetic coding sequence
atgagcagctccatgtggtacatcatgcagagcatccagagcaagtacagcctgtctgagcggctcatccgcaccatcgccgccatccgctccttcccccatgacaacgtggaggacctgatccggggcggcgcagatgtgaactgcacccactag

SEQ ID NO: 22565 - DNA, 1902 bp, synthetic construct
  source 1..1902: mol_type = other DNA; note = Synthetic coding sequence
atggaggagagccccctgagccgggcccccagcagaggaggagtgaacttcctgaatgtggcccggacctacatccccaacaccaaggtggagtgccactacaccctgcccccaggcaccatgcccagcgccagtgactggattggcatcttcaaggtggaggccgcctgtgtgcgggactaccacacctttgtgtggagctctgtgcctgagagcaccacagatggcagccccatccacacctctgtgcagttccaggccagctacctgcccaagccaggggcccagctgtaccagttccgctacgtgaaccggcagggccaggtgtgtggccagagcccccccttccagttccgggagccccggcccatggatgagctggtgaccctggaggaggctgatggcggcagtgacatcctgctggtggtgcccaaggccaccgtgctgcagaaccagctggatgagagccagcaggagagaaatgacctgatgcagctgaagctgcagctggagggccaggtgacagagctgcggagccgggtgcaggagctggagcgggccctggccacagcccggcaggagcacacagagctgatggagcagtacaagggcatcagccgcagccatggagagatcacagaggagcgggacatcctgagccggcagcagggcgaccacgtggcccgcatcctggagctggaggatgacatccagaccatcagcgagaaggtgctgaccaaggaggtggagctggaccggctgcgggacacagtgaaggccctgacccgggagcaggagaagctgctgggccagctgaaggaggtgcaggccgacaaggagcagagcgaggccgagctgcaggtggcccagcaggagaaccaccacctgaacctggacctgaaggaggccaagtcctggcaggaggagcagagcgcccaggcccagaggctgaaggacaaggtggcccagatgaaggacaccctgggccaggcccagcagagggtggccgagctggagcccctgaaggagcagctgcggggggcccaggagctggccgccagcagccagcagaaggccaccctgctgggggaggagctggccagcgctgctgctgcccgggacaggaccatcgccgagctgcacaggagccggctggaggtggccgaggtgaatggccgcctggccgagctgggcctgcacctgaaggaggagaagtgccagtggagcaaggagagagctggcctgctgcagagcgtggaggccgagaaggacaagatcctgaagctgtctgctgagatcctgcggctggagaaggctgtgcaggaggagaggacccagaaccaggtgttcaagacagagctggcccgggagaaggacagcagcctggtgcagctgtctgagagcaagcgggagctgacagagctgcggagcgccctgcgggtgctgcagaaggagaaggagcagctgcaggaggagaagcaggagctgctggagtacatgaggaagctggaggcccggctggagaaggtggctgatgagaagtggaatgaagatgccaccacagaagatgaggaggccgctgtgggcctgagctgcccagctgccctgacagattctgaagatgagagccctgaggacatgaggctgcccccctacggcctgtgtgagcggggggaccccggcagcagccctgctggcccccgggaggccagccccctggtggtgatcagccagcctgcccccatcagcccccacctgagcggccctgctgaggacagcagcagtgacagcgaggccgaggatgagaagtctgtgctgatggctgctgtgcagagcggcggggaggaggccaacctgctgctgcctgagctgggcagcgccttctatgacatggccaggtag

SEQ ID NO: 22566 - DNA, 810 bp, synthetic construct; identical to SEQ ID NO: 21274
  source 1..810: mol_type = other DNA; note = Synthetic coding sequence

SEQ ID NO: 22567 - DNA, 618 bp, synthetic construct
  source 1..618: mol_type = other DNA; note = Synthetic coding sequence
atggacaaggacagccagggcctgctggacagcagcctgatggccagcggcacagccagccgctcagaagatgaggagagcctggccggccagaagagggccagcagccaggccctgggcaccatccccaagagaagaagcagcagccgcttcatcaagaggaagaagtttgatgatgagctggtggagagcagcctggccaagagcagcacccgggccaagggggccagcggcgtggagcccggccgctgcagcggcagcgagcccagcagcagcgagaagaagaaggtgtccaaggcccccagcacccctgtgccccccagccctgccccagcccctggcctgaccaagagggtgaagaagagcaagcagcccctgcaggtgaccaaggacctgggccgctggaagccagcagatgacctgctgctgatcaatgctgtgctgcagaccaatgacctgacctctgtgcacctgggcgtgaagttcagctgccgcttcaccctgcgggaggtgcaggagcgctggtacgccctgctgtatgaccccgtcatcagcaagctggcctgccaggccatgaggcagctgcaccctgaggccatcgccgccatccagagctag

SEQ ID NO: 22568 - DNA, 540 bp, synthetic construct
  source 1..540: mol_type = other DNA; note = Synthetic coding sequence
atggactggaccccccggctgcccagccgccacatcatcagcgagctggagcacctgacctttgtgaacacagatgtgggccgctgccgggcctggctgcggctggccctgaatgatggcctgatggagtgctacctgaagctgctgctgcaggagcaggcccggctgcagctgcagaggaaggagagcctggacagcatcagccacagcagcggcagcgaggacatcgaggtgcaccacagcggccacaagatcagaagaaaccagaagctgacagccagcagcctgagcctggacacagccagcagcagccagctgagctgcagcctgaacagcgacagctgcctgctgcaggagaatggcagcaagagcccagaccactgtgaggagcccatgagctgtgacagcgacctgggcacagccaatgctgaggacagcgacaggagcctgcaggagaagacccgggccggcagccagaggatgaccagcacaggcctgcccggcagcaacccctggagggtgctgcagaccacccagtag

SEQ ID NO: 22569 - DNA, 735 bp, synthetic construct; identical to SEQ ID NO: 19104
  source 1..735: mol_type = other DNA; note = Synthetic coding sequence

SEQ ID NO: 22570 - DNA, 558 bp, synthetic construct
  source 1..558: mol_type = other DNA; note = Synthetic coding sequence
atggacaaggacagccagggcctgctggacagcagcctgatggccagcggcacagccagccgctcagaagatgaggagagcctggccggccagaagagggccagcagccaggccctgggcaccatccccaagagaagaagcagcagccgcttcatcaagaggaagaagtttgatgatgagctggtggagagcagcctggccaagagcagcacccgggccaagggggccagcggcgtggagcccggccgctgcagcggcagcgagcccagcagcagcgagaagaagaaggtgtccaaggcccccagcacccctgtgccccccagccctgccccagcccctggcctgaccaagagggtgaagaagagcaagcagcccctgcaggtgaccaaggacctgggccgctggaagccagcagatgacctgctgctgatcaatgctgtgctgcagaccaatgacctgacctctgtgcacctgggcgtgaagttcagctgccgcttcaccctgcgggaggtgcaggagcgctggtacgccctgctgtatgaccccgtcatctcctag

SEQ ID NO: 22571 - DNA, 3003 bp, synthetic construct
  source 1..3003: mol_type = other DNA; note = Synthetic coding sequence
atggtggagtgctttgaaagtggcggcacccggctgagcctgagcagcttcaacgtgtcctgtgacagcctgcgggagcagctgcgggagtggcgctgcttccagtggtggaggatggactggaccccccggctgcccagccgccacatcatcagcgagctggagcacctgacctttgtgaacacagatgtgggccgctgccgggcctggctgcggctggccctgaatgatggcctgatggagtgctacctgaagctgctgctgcaggagcaggcccggctgcacgagtactaccagcccacagccctgctgagagatgctgaggagggggagttcctgctgtccttcctgcagggcctgaccagcctgagctttgagctgagctacaagagcgccatcctgaatgagtggaccctgacccccctggccctgagcggcctgtgccccctgtctgagctggaccccctgagcaccagcggggctgagctgcagaggaaggagagcctggacagcatcagccacagcagcggctctgaagatattgaggtgcaccacagcggccacaagatcagaagaaaccagaagctgacagccagcagcctgagcctggacacagccagcagcagccagctgagctgcagcctgaacagcgacagctgcctgctgcaggagaatggcagcaagagcccagaccactgtgaggagcccatgagctgtgacagcgacctgggcacagccaatgcagaagattctgacaggagcctgcaggaggtgctgctggagttcagcaaggcccaggtgaacagcgtgcccaccaacggcctgagccaggagacagagatccccaccccccaggccagcctgagcctgcacggcctgaacaccagcacctacctgcactgtgaggccccagctgagcccctgcctgcccaggccgccagcggcacccaggatggagtgcacgtgcaggagccccggccccaggcccccagccccctggacctgcagcagcctgtggagagcaccagcggccagcagcccagcagcacagtgtctgaaacagcccgggaggtgggccagggcaatggcctgcagaaggcccaggcccatgatggagctggcctgaagctggtggtgagcagccccaccagccccaagaacaagtcctggatcagtgaagatgacttctaccggcccagccgggagcagcccctggagagcgccagtgaccaccccatcgccagctaccggggcaccccaggcagccggcccggcctgcaccgccacttcagccaggagcccaggaagaactgcagcctgggcgccctggaccaggcctgtgtgcccagccctggaagacggcaggcccaggccgcccccagccagggccacaagagcttccgggtggtgcaccggcggcagatgggcctgagcaaccccttccggggcctgatgaagctgggcaccgtggagcggcggggggccatgggcatctggaaggagctgttctgtgagctgagccccctggagttccggctgtacctgagcaatgaggagcacacctgtgtggagaactgcagcctgctgcgctgtgagagcgtgggccctgcccacagtgatggccgctttgagctggtgttcagcggcaagaagctggccctgcgggccagcagccaggatgaagctgaggactggctggacagagtgcgggaggccctgcagaaggtgcggccccagcaggaggatgagtgggtgaatgtgcagtacccagaccagcctgaggagcccccagaggccccccagggctgcctgagccccagcgacctgctgtctgagcctgctgccctgcagggcacccagtttgactggagcagcgcccaggtgcctgagccagatgccatcaaggagagcctgctgtacctgtacatggacaggacctggatgccctacatcttcagcctgagcctggaggccctgaagtgcttccgcatcagaaataatgagaagatgctgagtgacagccatggagtggagaccatccgggacatcctgcctgacaccagcctgggcggccccagcttcttcaagatcatcacagccaaggctgtgctgaagctgcaggccggaaatgctgaggaggccgccctgtggagggacctggtgaggaaggtgctggccagctacctggagacagctgaggaggccgtgaccctgggcggcagcctggatgagaactgccaggaggtgctgaagtttgccacccgggagaatggcttcctgctgcagtacctggtggccatccccatggagaagggcctggacagccagggctgcttctgtgccggctgcagccggcagatcggcttctcctttgtgcggcccaagctgtgtgccttcagcggcctgtactactgtgacatctgccaccaggatgatgccagcgtcatcccagcccgcatcatccacaactgggacctgaccaagaggcccatctgccggcaggccctgaagttcctgacccagatccgggcccagcccctcatcaacctgcagatggtgaatgccagcctgtatgagcacgtggagaggatgcacctgattggaagaagaagagagcagctgaagctgctgggggactacctgggcctgtgccgcagcggggccctgaaggagctgagcaagaggctgaaccacaggaactacctgctggagagcccccaccgcttctctgtggccgacctgcagcagattgctgatggagtgtatgagggcttcagccccaaggtgcccagcgaggccgccggcctgcggccctggggcgcccggagccctgaggccgccagcgccttccgctgcatcgacagcagccacctgcccagcctgaggaaggtggtgcccaccctcttcctgaagtgctacttcatgcagtacacagtgcccagcgagcagggcagcggccctgaggagagcctgcagtgcatcgagggcattgctgctgtgtag

SEQ ID NO: 22572 - DNA, 525 bp, synthetic construct
  source 1..525: mol_type = other DNA; note = Synthetic coding sequence
atggacaccatgatgctgaatgtgaggaacctgtttgagcagctggtgagaagagtggagatcctgtctgagggcaatgaggtgcagttcatccagctggccaaggactttgaggacttcaggaagaagtggcagaggacagaccacgagctgggcaagtacaaggacctgctgatgaaggccgagacagagaggtctgccctggatgtgaagctgaagcacgccaggaaccaggtggatgtggagatcaagaggcggcagagagctgaggccgactgtgagaagctggagcggcagatccagctgatccgggagatgctgatgtgtgacaccagcggcagcatccagctgtctgaggagcagaagagcgccctggccttcctgaacagaggccagcccagcagcagcaatgccggcaacaagaggctgagcaccattgatgaaagtggcagcatcctgagtgacatcagctttgacaagacagatgagagcctggactgggacagcagcctggtgaagacctag

SEQ ID NO: 22573 - DNA, 2904 bp, synthetic construct
  source 1..2904: mol_type = other DNA; note = Synthetic coding sequence
atggactggaccccccggctgcccagccgccacatcatcagcgagctggagcacctgacctttgtgaacacagatgtgggccgctgccgggcctggctgcggctggccctgaatgatggcctgatggagtgctacctgaagctgctgctgcaggagcaggcccggctgcacgagtactaccagcccacagccctgctgagagatgctgaggagggggagttcctgctgtccttcctgcagggcctgaccagcctgagctttgagctgagctacaagagcgccatcctgaatgagtggaccctgacccccctggccctgagcggcctgtgccccctgtctgagctggaccccctgagcaccagcggggctgagctgcagaggaaggagagcctggacagcatcagccacagcagcggctctgaagatattgaggtgcaccacagcggccacaagatcagaagaaaccagaagctgacagccagcagcctgagcctggacacagccagcagcagccagctgagctgcagcctgaacagcgacagctgcctgctgcaggagaatggcagcaagagcccagaccactgtgaggagcccatgagctgtgacagcgacctgggcacagccaatgcagaagattctgacaggagcctgcaggaggtgctgctggagttcagcaaggcccaggtgaacagcgtgcccaccaacggcctgagccaggagacagagatccccaccccccaggccagcctgagcctgcacggcctgaacaccagcacctacctgcactgtgaggccccagctgagcccctgcctgcccaggccgccagcggcacccaggatggagtgcacgtgcaggagccccggccccaggcccccagccccctggacctgcagcagcctgtggagagcaccagcggccagcagcccagcagcacagtgtctgaaacagcccgggaggtgggccagggcaatggcctgcagaaggcccaggcccatgatggagctggcctgaagctggtggtgagcagccccaccagccccaagaacaagtcctggatcagtgaagatgacttctaccggcccagccgggagcagcccctggagagcgccagtgaccaccccatcgccagctaccggggcaccccaggcagccggcccggcctgcaccgccacttcagccaggagcccaggaagaactgcagcctgggcgccctggaccaggcctgtgtgcccagccctggaagacggcaggcccaggccgcccccagccagggccacaagagcttccgggtggtgcaccggcggcagatgggcctgagcaaccccttccggggcctgatgaagctgggcaccgtggagcggcggggggccatgggcatctggaaggagctgttctgtgagctgagccccctggagttccggctgtacctgagcaatgaggagcacacctgtgtggagaactgcagcctgctgcgctgtgagagcgtgggccctgcccacagtgatggccgctttgagctggtgttcagcggcaagaagctggccctgcgggccagcagccaggatgaagctgaggactggctggacagagtgcgggaggccctgcagaaggtgcggccccagcaggaggatgagtgggtgaatgtgcagtacccagaccagcctgaggagcccccagaggccccccagggctgcctgagccccagcgacctgctgtctgagcctgctgccctgcagggcacccagtttgactggagcagcgcccaggtgcctgagccagatgccatcaaggagagcctgctgtacctgtacatggacaggacctggatgccctacatcttcagcctgagcctggaggccctgaagtgcttccgcatcagaaataatgagaagatgctgagtgacagccatggagtggagaccatccgggacatcctgcctgacaccagcctgggcggccccagcttcttcaagatcatcacagccaaggctgtgctgaagctgcaggccggaaatgctgaggaggccgccctgtggagggacctggtgaggaaggtgctggccagctacctggagacagctgaggaggccgtgaccctgggcggcagcctggatgagaactgccaggaggtgctgaagtttgccacccgggagaatggcttcctgctgcagtacctggtggccatccccatggagaagggcctggacagccagggctgcttctgtgccggctgcagccggcagatcggcttctcctttgtgcggcccaagctgtgtgccttcagcggcctgtactactgtgacatctgccaccaggatgatgccagcgtcatcccagcccgcatcatccacaactgggacctgaccaagaggcccatctgccggcaggccctgaagttcctgacccagatccgggcccagcccctcatcaacctgcagatggtgaatgccagcctgtatgagcacgtggagaggatgcacctgattggaagaagaagagagcagctgaagctgctgggggactacctgggcctgtgccgcagcggggccctgaaggagctgagcaagaggctgaaccacaggaactacctgctggagagcccccaccgcttctctgtggccgacctgcagcagattgctgatggagtgtatgagggcttcctgaaggccctgattgaatttgccagccagcacgtgtaccactgtgacctgtgcacccagaggggcttcatctgccagatctgccagcaccacgacatcatcttcccctttgaatttgacaccaccgtgcgctgtgccgagtgcaagacagtgttccaccagagctgccaggccgtggtgaagaagggctgcccccgctgtgcccggcggaggaagtaccaggagcagaacatctttgcctag

SEQ ID NO: 22574 - DNA, 1446 bp, synthetic construct; identical to SEQ ID NO: 20055
  source 1..1446: mol_type = other DNA; note = Synthetic coding sequence

SEQ ID NO: 22575 - DNA, 462 bp, synthetic construct
  source 1..462: mol_type = other DNA; note = Synthetic coding sequence
atggcccctggcagcagaggagagaggagcagcttccgcagcagaagaggccctggggtgcccagcccccagccagatgtgaccatgctgagccggctgctgaaggagcaccaggccaagcagaatgaaaggaaggagctgcaggagaagagaagaagagaggccatcacagctgccacctgcctgacagaggccctggtggaccacctgaatgtgggcgtggcccaggcctacatgaaccagaggaagctggaccacgaggtgaagaccctgcaggtgcaggccgcccagtttgccaagcagacaggccagtggattggcatggtggagaacttcaaccaggccctgaaggagattggagatgtggagaactgggcccggagcattgagctggacatgaggaccatcgccacagccctggagtatgtgtacaagggccagctgcagagcgcccccagctag

SEQ ID NO: 22576 - DNA, 1311 bp, synthetic construct
  source 1..1311: mol_type = other DNA; note = Synthetic coding sequence
atgctgtggaacttcaagccccacgcccgggcctaccgctacgtgggccacaaggatgtggtgacctctgtgcagttcagcccccacggcaacctgctggccagcgccagccgggacagaacagtgcggctgtggatcccagacaagaggggcaagttcagcgagttcaaggcccacacagcccctgtgcgctctgtggacttcagcgcagatggccagttcctggccacagccagcgaggacaagagcatcaaggtgtggagcatgtaccggcagcgcttcctgtacagcctgtaccgccacacccactgggtgcgctgtgccaagttctccccagatggccgcctgattgtgtcctgcagcgaggacaagaccatcaagatctgggacaccaccaacaagcagtgtgtgaacaacttcagtgacagcgtgggctttgccaactttgtggacttcaaccccagcggcacctgcatcgccagcgctggcagtgaccagacagtgaaggtgtgggatgtgcgggtgaacaagctgctgcagcactaccaggtgcacagcggcggcgtgaactgcatctccttccaccccagcggcaactacctgatcacagccagcagtgatggcaccctgaagatcctggacctgctggagggccgcctcatctacaccctgcagggccacacaggccctgtgttcaccgtgtccttcagcaagggcggggagctgtttgccagcggcggcgctgacacccaggtgctgctgtggaggaccaactttgatgagctgcactgcaagggcctgaccaagaggaacctgaagaggctgcactttgacagccccccccacctgctggacatctaccccaggaccccccacccccatgaggagaaggtggagaccgtggagatcaaccccaagctggaggtgattgacctgcagatcagcaccccacctgtgatggacatcctgagctttgacagcaccaccaccacagagaccagcggccgcaccctgcctgacaagggggaggaggcctgtggctacttcctgaaccccagcctgatgagccctgagtgcctgcccaccaccaccaagaagaagacagaggacatgtctgacctgccctgtgagagccagaggagcatccccctggccgtgacagatgccctggagcacatcatggagcagctgaatgtgctgacccagacagtgtccatcctggagcagaggctgaccctgacagaggacaagctgaaggactgcctggagaaccagcagaagctgttctctgctgtgcagcagaagagctag

SEQ ID NO: 22577 - DNA, 597 bp, synthetic construct; identical to SEQ ID NO: 19257
  source 1..597: mol_type = other DNA; note = Synthetic coding sequence

SEQ ID NO: 22578 - DNA, 597 bp, synthetic construct; identical to SEQ ID NO: 19257
  source 1..597: mol_type = other DNA; note = Synthetic coding sequence

SEQ ID NO: 22579 - DNA, 495 bp, synthetic construct
  source 1..495: mol_type = other DNA; note = Synthetic coding sequence
atgatggagggcaatggaacagagaacagctgcagcaggacccggggctggctgcagcaggacaatgatgccaagccctggctgtggaagttcagcaactgcttcagcaggcctgagcagaccctgccccacagcccccagaccaaggagtacatggagaacaagaaggtggccgtggagctgaaggatgtgcccagccccctgcacgccggcagcaagctgtttcctgctgtgcccctgcctgacatccgcagcctgcagcagcccaagatccagctgagctctgtgcccaaggtgtcctgctgtgcccactgccccaatgagcccagcaccagccccatgagatttggaggcggcggcggcggcagcggcggcaccagcagcctcatccaccctggggccctgctggacagccagagcaccaggaccatcacctgccaggtgggcagcggctttgccttccagagcgccagcagcctgcagaatgccagctag

SEQ ID NO: 22580 - DNA, 855 bp, synthetic construct
  source 1..855: mol_type = other DNA; note = Synthetic coding sequence
atgctgtctgtggtggagaatggcctggacccccaggccgccatccctgtgatcaagaagaagctggtgggctctgtgaaggccctgcagaagcagtatgtgtccctggacacagtggtgaccagtgaagatggagatgccaacaccatgtgcagcgccctggaggccgtgttcatccacggcctgcacgccaagcacatccgggcagaggccggcggcaagaggaagaagagcgcccaccagaagcccctgccccagcctgtgttctggcccctgctgaaggctgtgacccacaagcacatcatcagcgagctggagcacctgacctttgtgaacacagatgtgggccgctgccgggcctggctgcggctggccctgaatgatggcctgatggagtgctacctgaagctgctgctgcaggagcaggcccggctgcagctgcagaggaaggagagcctggacagcatcagccacagcagcggctctgaagatattgaggtgcaccacagcggccacaagatcagaagaaaccagaagctgacagccagcagcctgagcctggacacagccagcagcagccagctgagctgcagcctgaacagcgacagctgcctgctgcaggagaatggcagcaagagcccagaccactgtgaggagcccatgagctgtgacagcgacctgggcacagccaatgcagaagattctgacaggagcctgcaggacatcaagatcttctcctgggcccagtggctgacccctgtgatcccagccctgtgggaggccgaggccggcggcagccagaggcagcagatcgagaccttcctggccaacacagtgaagccccacctgtactag

SEQ ID NO: 22581 - DNA, 3282 bp, synthetic construct
  source 1..3282: mol_type = other DNA; note = Synthetic coding sequence
atgggcggcaaggcctggccccggcgggctgtgggcacagctgggggcccctgtgccgagcagatcagcgcccccttccagaccctgctgatgccccacctgcccctggccagcttccggccccccttctggggcctgcggcacagccggggcctgccccgcttccacagcgtgtccacccagagcgagccccacggcagccccatcagcagaagaaaccgggaggccaagcagaagaggctgcgggagaagcaggccaccctggaggccgagattgctggggagagcaagagccctgctgagagcatcaaggcctggaggcccaaggagctggtgctgtatgagatccccaccaagccaggagagaagaaggatgtgtctggccccctgcccccagcctacagcccccgctacgtggaggccgcctggtacccctggtgggtgcgggagggcttcttcaagccagagtaccaggcccggctgccccaggccactggagagaccttctccatgtgcatccccccaccaaatgtgacaggcagcctgcacatcggccacgccctgactgtggccatccaggatgccctggtgcgctggcacaggatgagaggagaccaggtgctgtgggtgcccggcagtgaccacgccggcatcgccacccaggccgtggtggagaagcagctgtggaaggagcggggcgtgagaagacatgagctgagccgggaggccttcctgcgggaggtgtggcagtggaaggaggccaagggcggggagatctgtgagcagctgcgggccctgggcgccagcctggactgggaccgggagtgcttcaccatggatgtgggcagctctgtggccgtgacagaggcctttgtgcggctgtacaaggccggcctgctgtacagaaaccaccagctggtgaactggagctgtgccctgcggagcgccatcagtgacatcgaggtggagaaccggcccctgcccggccacacccagctgcggctgcccggctgccccacccctgtgtcctttggcctgctcttctctgtggccttccctgtggatggagagccagatgctgaggtggtggtgggcaccaccaggcctgagaccctgcctggagatgtggccgtggccgtgcacccagatgacagccgctacacccacctgcacggccggcagctgcggcaccccctgatgggccagcccctgcccctcatcacagattatgctgtgcagccccacgtgggcaccggggctgtgaaggtgaccccagcccacagccctgcagatgctgagatgggcgcccggcacggcctgagccccctgaatgtgattgctgaagatggcaccatgaccagcctgtgtggggactggctgcagggcctgcacagatttgtggcccgggagaagatcatgtctgtgctgtctgagcggggcctcttccggggcctgcagaaccaccccatggtgctgcccatctgcagccgctctggagatgtgattgagtacctgctgaagaaccagtggtttgtgcgctgccaggagatgggcgcccgggccgccaaggctgtggagagcggggccctggagctgagccccagcttccaccagaagaactggcagcactggttcagccacatcggggactggtgtgtgtcccggcagctgtggtggggccaccagatcccagcctacctggtggtggaggaccacgcccagggcgaggaggactgctgggtggtgggccgctctgaggccgaggcccgggaggtggccgctgagctgaccggccggcctggagctgagctgaccctggagcgggaccctgatgtgctggacacctggttcagcagcgccctcttccccttcagcgccctgggctggccccaggagaccccagacctggcccgcttctaccccctgagcctgctggagactggaagtgacctgctgctcttctgggtgggccgcatggtgatgctgggcacccagctgaccggccagctgcccttcagcaaggtgctgctgcaccccatggtgcgggaccggcagggcaggaagatgagcaagagcctgggcaatgtgctggacccccgggacatcatcagcggcgtggagatgcagctgctgcaggagaagctgcggagcggcaacctggaccctgctgagctggccatcgtggccgccgcccagaagaaggacttcccccacggcatcccagaatgtggcacagatgccctgcgcttcaccctgtgcagccatggagtgcaggccggggacctgcacctgtctgtgtctgaggtgcagagctgccgccacttctgcaacaagatctggaatgccctgcgcttcatcctgaatgccctgggggagaagtttgtgccccagcctgctgaggagctgagccccagcagccccatggatgcctggatcctgagccggctggccctggccgcccaggagtgtgagcggggcttcctgacccgggagctgagcctggtgacccacgccctgcaccacttctggctgcacaacctgtgtgatgtgtacctggaggccgtgaagcctgtgctgtggcacagcccccggcccctgggccccccccaggtgctcttcagctgtgccgacctgggcctgcggctgctggcccccctgatgcccttcctggccgaggagctgtggcagaggctgcccccccggcccggctgccccccagcccccagcatctctgtggccccctaccccagcgcctgcagcctggagcactggaggcagcctgagctggagcggcgcttcagccgggtgcaggaggtggtgcaggtgctgcgggccctgcgggccacctaccagctgaccaaggcccggccccgggtgctgctgcagagcagcgagcccggggaccagggcctgtttgaggccttcctggagcccctgggcaccctgggctactgtggggctgtgggcctgctgcccccaggcacagctgcccccagcggctgggcccaggcccccctgagtgacacagcccaggtgtacatggagctgcagggcctggtggacccccagatccagctgcccctgctggccgcccggcgctacaagctgcagaagcagctggacagcctgacagcccggaccccatctgagggggaggccggcacccagaggcagcagaagctgagcagcctgcagctggagctgagcaagctggacaaggccgccagccacctgcggcagctgatggatgagcccccagcccctggcagccctgagctgtag

SEQ ID NO: 22582 - DNA, 3621 bp, synthetic construct
  source 1..3621: mol_type = other DNA; note = Synthetic coding sequence
atgaccagcgctgctgagatcaagaagccccctgtggcccccaagcccaagtttgtggtggccaacaacaagccagcccccccacccatcgcccccaagccagacatcgtcatcagctctgtgccccagagcaccaagaagatgaagccagccatcgcccccaagcccaaggtgctgaagaccagccctgtgcgggagatcggccagagccccagcaggaagatcatgctgaacctggagggccacaagcaggagctggccgagagcacagacaacttcaactgcaagtatgagggcaaccagagcaatgactacatcagccccatgtgcagctgcagcagcgagtgcatccacaagctgggccaccgggagaacctgtgtgtgaagcagctggtgctggagcccctggagatgaatgaaaacctggagaacagcaagattgatgagaccctgaccatcaagaccaggagcaaatgtgacctgtatggagagaaggccaagaaccagggcggcgtggtgctgaaggcctctgtgctggaggaggagctgaaggatgccctgatccaccagatgccacccttcatcagcgcccagaagcaccggcccacagacagccctgagatgaatggaggctgcaacagcaatggccagttccgcatcgagtttgctgacctgagccccagccccagcagctttgagaaggtgcctgaccaccacagctgccacctgcagctgcccagtgatgaatgtgagcactttgagacctgccaggatgacagcgagaagagcaacaactgcttccagagcagcgagctggaggccctggagaatggcaagaggagcaccctcatcagcagtgatggagtgtccaagaagtctgaggtgaaggacctgggccccctggagatccacctggtgccctacacccccaagttccccacccccaagcccaggaagaccaggacagcccggctgctgcggcagaagtgtgtggacaccccatctgagagcacagaggagcccggcaacagcgacagcagcagcagctgcctgacagagaacagcctgaagatcaacaagatctctgtgctgcaccagaatgtgctgtgcaagcaggagcaggtggacaagatgaagctgggcaacaagtctgagctgaacatggagagcaacagtgatgcccaggacctggtgaacagccagaaggccatgtgcaatgagaccaccagctttgagaagatggcccccagctttgacaaggacagcaacctgagcagtgacagcaccaccgtggatggcagctccatgagcctggccgtggatgagggcaccggcttcatccgctgcaccgtgtccatgagcctgcccaagcagctgaagctgacctgcaatgagcacctgcagagcggcaggaacctgggcgtgtctgccccccagatgcagaaggagagcgtcatcaaggaggagaacagcctgcgcatcgtgcccaagaagccccagaggcacagcctgcctgccactggagtgctgaagaaggccgccagcgaggagctgctggagaagagcagctaccccagcagcgaggagaagagcagcgagaagagcctggagaggaaccacctgcagcacctgtgtgcccagaacagaggagtgagcagcagctttgacatgcccaagagggccagcgagaagcctgtgtggaagctgccccaccccatcctgcccttcagcggcaaccctgagttcctgaagtctgtgacagtgagcagcaacagcgagcccagcacagccctgaccaagccccgggccaagagcctgagcgccatggatgtggagaagtgcaccaagccctgcaaggacagcaccaagaagaacagcttcaagaagctgctgtccatgaagctgagcatctgcttcatgaagagtgacttccagaagttctggagcaagagcagccagctgggggacaccaccaccggccacctgagcagcggggagcagaagggcatcgagagtgactggcagggcctgctggtgggggaggagaagaggagcaagcccatcaaggcctacagcacagagaactacagcctggagagccagaagaagaggaagaagagccggggccagaccagcgctgccaacggcctgcgggcagagagcctggatgaccagatgctgagccgggagagcagcagccaggccccctacaagtctgtgaccagcctgtgtgccccagaatatgagaacatccgccactatgaggagatcccagaatatgagaacctgcccttcatcatggccatcaggaagacccaggagctggagtggcagaacagcagctccatggaggatgctgatgccaacgtgtatgaggtggaggagccctatgaggccccagatggccagctgcagctgggccccaggcaccagcacagcagcagcggggccagccaggaggagcagaatgacctgggcctgggggacctgcccagtgatgaggaggagatcatcaacagcagtgatgaagatgatgtgagcagcgagagcagcaagggggagccagaccccctggaggacaagcaggatgaggacaatggcatgaagagcaaggtgcaccacatcgccaaggagatcatgagcagcgagaaggtgtttgtggatgtgctgaagctgctgcacatcgacttcagagatgctgtggcccacgccagccggcagctgggcaagcctgtgattgaggaccgcatcctgaaccagatcctgtactacctgccccagctgtatgagctgaacagagacctgctgaaggagctggaggagaggatgctgcactggacagagcagcagagaattgctgacatctttgtgaagaagggcccctacctgaagatgtacagcacctacatcaaggagtttgacaagaacatcgccctgctggatgagcagtgcaagaagaaccctggctttgctgctgtggtgcgggagtttgagatgagcccccgctgtgccaacctggccctgaagcactacctgctgaagcctgtgcagaggatcccccagtaccgcctgctgctgacagactacctgaagaacctgattgaagatgctggggactacagagacacccaggatgccctggccgtggtgattgaggtggccaaccacgccaatgacaccatgaagcagggcgacaacttccagaagctgatgcagatccagtacagcctgaatggccaccatgaaattgtgcagcccggccgggtcttcctgaaggagggcatcctgatgaagctgagcaggaaggtgatgcagcccaggatgttcttcctgttcaatgatgccctgctgtacaccacccctgtgcagagcggcatgtacaagctgaacaacatgctgagcctggccggcatgaaggtgaggaagcccacccaggaggcctaccagaatgagctgaagattgagagcgtggagaggagcttcatcctgagcgccagcagcgccacagaaagagatgagtggctggaggccatcagccgggccatcgaggagtatgccaagaagaggatcaccttctgccccagccgcagcctggatgaagctgacagcgagaacaagtag

SEQ ID NO: 22583 - DNA, 435 bp, synthetic construct
  source 1..435: mol_type = other DNA; note = Synthetic coding sequence
atggacaaggacagccagggcctgctggacagcagcctgatggccagcggcacagccagccgctcagaagatgaggagagcctggccggccagaagagggccagcagccaggccctgggcaccatccccaagagaagaagcagcagcaggaccctgtaccgcttcatcaagaggaagaagtttgatgatgagctggtggagagcagcctggccaagagcagcacccgggccaagggggccagcggcgtggagcccggccgctgcagcggcagcgagcccagcagcagcgagaagaagaaggtgtccaaggcccccagcacccctgtgccccccagccctgccccagcccctggcctgaccaagagggtgaagaagagcaagcagcccctgcaggtgaccaaggacctgggccgctggaagccagcagatgactag

SEQ ID NO: 22584 - DNA, 810 bp, synthetic construct; identical to SEQ ID NO: 21274
  source 1..810: mol_type = other DNA; note = Synthetic coding sequence

SEQ ID NO: 22585 - DNA, 501 bp, synthetic construct
  source 1..501: mol_type = other DNA; note = Synthetic coding sequence
atggccaatgaccccctggagggcttccacgaggtgaacctggccagccccaccagcccagacctgctgggcgtgtatgagagcggcacccaggagcagaccaccagccccagcgtcatctaccggccccaccccagcgccctgagctctgtgcccatccaggccaatgccctggatgtgtctgagctgcccacccagcctgtgtacagcagcccccggcggctgaactgtgccgagatcagcagcatctccttccacgtgacagatcctgccccctgcagcaccagcggcgtgacagctggcctgaccaagctgaccaccaggaaggacaactacaatgctgagcgggagttcctgcagggcgccaccatcacagaggcctgtgatggcagtgatgacatcttcggcctgagcacagacagcctgagccggctgcggagccccagcgtgctggaggtgcgggagaagggctatgaaaggctgaaggaggagctggcctag

SEQ ID NO: 22586 - DNA, 390 bp, synthetic construct
  source 1..390: mol_type = other DNA; note = Synthetic coding sequence
atggacaccatgatgctgaatgtgaggaacctgtttgagcagctggtgagaagagtggagatcctgtctgagggcaatgaggtgcagttcatccagctggccaaggactttgaggacttcaggaagaagtggcagaggacagaccacgagctgggcaagtacaaggacctgctgatgaaggccgagacagagaggtctgccctggatgtgaagctgaagcacgccaggaaccaggtggatgtggagatcaagaggcggcagagagctgaggccgactgtgagaagctggagcggcagatccagctgatccgggagatgctgatgtgtgacaccagcggcagcatccagctgtctgaggagcagaagagcgccctggccttcctgaactag

SEQ ID NO: 22587 - DNA, 486 bp, synthetic construct
  source 1..486: mol_type = other DNA; note = Synthetic coding sequence
atgaccctgcgctgcctggagcccagcggaaatggaggagagggcaccaggagccagtggggcacagctggcagcgctgaggagcccagcccccaggccgcccggctggccaaggccctgcgggagctgggccagacaggctggtactggggctccatgacagtgaatgaggccaaggagaagctgaaggaggcccctgagggcaccttcctgatccgggacagcagccacagcgactacctgctgaccatctctgtgaagaccagcgctggccccaccaacctgagaattgagtaccaggacggcaagttccggctggacagcatcatctgtgtgaagagcaagctgaagcagtttgattctgtggtgcacctgattgactactacgtgcagatgtgcaaggacaagaggacaggccctgaggcccccagaaatggaacagtgcacctgtacctgaccaagcccctgtacaccagcgccccctag

SEQ ID NO: 22588 - DNA, 1389 bp, synthetic construct; identical to SEQ ID NO: 19306
  source 1..1389: mol_type = other DNA; note = Synthetic coding sequence

SEQ ID NO: 22589 - DNA, 576 bp, synthetic construct; identical to SEQ ID NO: 18243
  source 1..576: mol_type = other DNA; note = Synthetic coding sequence

SEQ ID NO: 22590 - DNA, 1212 bp, synthetic construct
  source 1..1212: mol_type = other DNA; note = Synthetic coding sequence
atggccagcagctctgtgcccccagccaccgtgtctgctgccacagctggccctggccctggcttcggctttgccagcaagaccaagaagaagcactttgtgcagcagaaggtgaaggtgttccgggctgctgaccccctggtgggcgtcttcctgtggggcgtggcccacagcatcaatgagctgagccaggtgcccccacctgtgatgctgctgcctgatgacttcaaggccagcagcaagatcaaggagtactgcccccaggtgttcaggaacctgcgggacagatttggaattgatgaccaggactacctggtgtccctgaccaggaacccccccagcgagagcgagggcagtgatggccgcttcctgatctcctatgacaggaccctggtgatcaaggaggtgtccagtgaagatattgctgacatgcacagcaacctgagcaactaccaccagtacatcgtgaagtgccacggcaacaccctgctgccccagttcctgggcatgtacagagtgtctgtggacaatgaagacagctacatgctggtgatgaggaacatgttcagccaccggctgcctgtgcacaggaaatatgacctgaagggcagcctggtgtcccgggaggccagtgacaaggagaaggtgaaggagctgcccaccctgaaggacatggacttcctgaacaagaaccagaaggtgtacatcggggaggaggagaagaagatcttcctggagaagctgaagagagatgtggagttcctggtgcagctgaagatcatggactacagcctgctgctgggcatccatgacatcatccggggcagcgagcctgaggaggaggcccctgtgcgggaggatgaaagtgaggtggatggagactgcagcctgaccggccccccagccctggtgggcagctatggcaccagccctgagggcatcggcggctacatccacagccaccggcccctgggccctggagaatttgagagcttcattgatgtgtatgccatccgctctgctgagggcgccccccagaaggaggtgtacttcatgggcctgattgacatcctgacccagtatgatgccaagaagaaggccgcccacgccgccaagacagtgaagcacggggccggggctgagatcagcacagtgcaccctgagcagtatgccaagcgcttcctggacttcatcaccaacatctttgcctag

SEQ ID NO: 22591 - DNA, 576 bp, synthetic construct
  source 1..576: mol_type = other DNA; note = Synthetic coding sequence
aagattgaggtgattgagatcatgacagaccggggcagcggcaagaagaggggctttgcctttgtgacctttgatgaccatgattctgtggacaagatcgtcatccagaagtaccacacagtgaatggccacaactgtgaggtgaggaaggccctgagcaagcaggagatggccagcgccagcagcagccagaggggccgcagcggcagcggcaactttggaggcggccggggcggcggctttggaggaaatgacaactttggccggggcggcaacttcagcggccggggcggctttggaggcagccggggcggcggcggctacggcggcagcggagatggctacaacggctttggaaatgatggcagcaactttggaggcggcggcagctacaatgactttggaaactacaacaaccagagcagcaactttggccccatgaagggcggcaactttggaggccgcagcagcggcccctacggcggcggcggccagtactttgccaagcccaggaaccagggcggctacggcggcagcagcagcagcagcagctatggcagcggccgccgcttctag

SEQ ID NO: 22592 - DNA, 543 bp, synthetic construct
  source 1..543: mol_type = other DNA; note = Synthetic coding sequence
atggagctgaccatcttcatcctgcggctggccatctacatcctgaccttccccctgtacctgctgaacttcctgggcctgtggagctggatctgcaagaagtggttcccctacttcctggtgcgcttcaccgtcatctacaatgagcagatggccagcaagaagcgggagctgttcagcaacctgcaggagtttgctggccccagcggcaagctgagcctgctggaggtgggctgcggcactggagccaacttcaagttctacccacctggctgccgggtgacctgcatcgaccccaaccccaactttgagaagttcctgatcaagagcattgctgaaaatagacacctgcagtttgaaagatttgtggtggccgccggggagaacatgcaccaggtggctgatggctctgtggatgtggtggtgtgcaccctggtgctgtgcagcgtgaagaaccaggagcgcatcctgcgggaggtgtgccgggtgctgcggcctgggggcgccttctacttcatggagcacgtggccgcagaatgttag

SEQ ID NO: 22593 - DNA, 1431 bp, synthetic construct
  source 1..1431: mol_type = other DNA; note = Synthetic coding sequence
atgggcctgaagaagatgaagggcctgtcctatgatgaggcctttgccatggccaatgaccccctggagggcttccacgaggtgaacctggccagccccaccagcccagacctgctgggcgtgtatgagagcggcacccaggagcagaccaccagccccagcgtcatctaccggccccaccccagcgccctgagctctgtgcccatccaggccaatgccctggatgtgtctgagctgcccacccagcctgtgtacagcagcccccggcggctgaactgtgccgagatcagcagcatctccttccacgtgacagatcctgccccctgcagcaccagcggcgtgacagctggcctgaccaagctgaccaccaggaaggacaactacaatgctgagcgggagttcctgcagggcgccaccatcacagaggcctgtgatggcagtgatgacatcttcggcctgagcacagacagcctgagccggctgcggagccccagcgtgctggaggtgcgggagaagggctatgaaaggctgaaggaggagctggccaaggcccagcgggagctgaagctgaaggatgaggagtgtgagcggctgagcaaggtgcgggaccagctgggccaggagctggaggagctgacagccagcctgtttgaggaggcccacaagatggtgcgggaggccaacatcaagcaggccacagctgagaagcagctgaaggaggcccagggcaagattgatgtgctgcaggccgaggtggccgccctgaagaccctggtgctgagcagcagccccaccagccccacccaggagcccctgcccggcggcaagacccccttcaagaagggccacaccaggaacaagagcaccagcagcgccatgagcggcagccaccaggacctgagcgtcatccagcccatcgtgaaggactgcaaggaggccgacctgagcctgtacaatgagttccggctgtggaaggatgagcccaccatggacaggacctgccccttcctggacaagatctaccaggaggacatcttcccctgcctgaccttcagcaagtctgagctggccagcgctgtgctggaggccgtggagaacaacaccctgagcattgagcctgtgggcctgcagcccatccgctttgtgaaggccagcgctgtggagtgtggcggccccaagaagtgtgccctgaccggccagagcaagagctgcaagcaccgcatcaagctgggggacagcagcaactactactacatcagccccttctgccgctaccgcatcacctctgtgtgcaacttcttcacctacatccgctacatccagcagggcctggtgaagcagcaggatgtggaccagatgttctgggaggtgatgcagctgaggaaggagatgagcctggccaagctgggctacttcaaggaggagctgtag

SEQ ID NO: 22594 - DNA, 336 bp, synthetic construct
  source 1..336: mol_type = other DNA; note = Synthetic coding sequence
atggacaccatgatgctgaatgtgaggaacctgtttgagcagctggtgagaagagtggagatcctgtctgagggcaatgaggtgcagttcatccagctggccaaggactttgaggacttcaggaagaagtggcagaggacagaccacgagctgggcaagtacaaggacctgctgatgaaggccgagacagagaggtctgccctggatgtgaagctgaagcacgccaggaaccaggtggatgtggagatcaagaggcggcagagagctgaggccgactgtgagaagctggagcggcagatccagctgatccgggagatgctgatgtgtgacacctag

SEQ ID NO: 22595 - DNA, 324 bp, synthetic construct
  source 1..324: mol_type = other DNA; note = Synthetic coding sequence
atgatcaagaacctggaggtgcagctgcggcgggccacagatgagatgaaggcctacatcagcagtgaccagcaggagaagaggaaggccatccgggagcagtacaccaagaacacagctgagcaggagaacctgggcaagaagctgcgggagaagcagaaggtgatccgggagagccacggccccaacatgaagcaggccaagatgtggagggacctggagcagctgatggagtgcaagaagcagtgcttcctgaagcagcagagccagaccagcatcggccaggtgatccaggagggcggggaggacaggctcatcctgtag

SEQ ID NO: 22596 - DNA, 2772 bp, synthetic construct
  source 1..2772: mol_type = other DNA; note = Synthetic coding sequence
atgtgcatccccccaccaaatgtgacaggcagcctgcacatcggccacgccctgactgtggccatccaggatgccctggtgcgctggcacaggatgagaggagaccaggtgctgtgggtgcccggcagtgaccacgccggcatcgccacccaggccgtggtggagaagcagctgtggaaggagcggggcgtgagaagacatgagctgagccgggaggccttcctgcgggaggtgtggcagtggaaggaggccaagggcggggagatctgtgagcagctgcgggccctgggcgccagcctggactgggaccgggagtgcttcaccatggatgtgggcagctctgtggccgtgacagaggcctttgtgcggctgtacaaggccggcctgctgtacagaaaccaccagctggtgaactggagctgtgccctgcggagcgccatcagtgacatcgaggtggagaaccggcccctgcccggccacacccagctgcggctgcccggctgccccacccctgtgtcctttggcctgctcttctctgtggccttccctgtggatggagagccagatgctgaggtggtggtgggcaccaccaggcctgagaccctgcctggagatgtggccgtggccgtgcacccagatgacagccgctacacccacctgcacggccggcagctgcggcaccccctgatgggccagcccctgcccctcatcacagattatgctgtgcagccccacgtgggcaccggggctgtgaaggtgaccccagcccacagccctgcagatgctgagatgggcgcccggcacggcctgagccccctgaatgtgattgctgaagatggcaccatgaccagcctgtgtggggactggctgcagggcctgcacagatttgtggcccgggagaagatcatgtctgtgctgtctgagcggggcctcttccggggcctgcagaaccaccccatggtgctgcccatctgcagccgctctggagatgtgattgagtacctgctgaagaaccagtggtttgtgcgctgccaggagatgggcgcccgggccgccaaggctgtggagagcggggccctggagctgagccccagcttccaccagaagaactggcagcactggttcagccacatcggggactggtgtgtgtcccggcagctgtggtggggccaccagatcccagcctacctggtggtggaggaccacgcccagggcgaggaggactgctgggtggtgggccgctctgaggccgaggcccgggaggtggccgctgagctgaccggccggcctggagctgagctgaccctggagcgggaccctgatgtgctggacacctggttcagcagcgccctcttccccttcagcgccctgggctggccccaggagaccccagacctggcccgcttctaccccctgagcctgctggagactggaagtgacctgctgctcttctgggtgggccgcatggtgatgctgggcacccagctgaccggccagctgcccttcagcaaggtgctgctgcaccccatggtgcgggaccggcagggcaggaagatgagcaagagcctgggcaatgtgctggacccccgggacatcatcagcggcgtggagatgcagctgctgcaggagaagctgcggagcggcaacctggaccctgctgagctggccatcgtggccgccgcccagaagaaggacttcccccacggcatcccagaatgtggcacagatgccctgcgcttcaccctgtgcagccatggagtgcaggccggggacctgcacctgtctgtgtctgaggtgcagagctgccgccacttctgcaacaagatctggaatgccctgcgcttcatcctgaatgccctgggggagaagtttgtgccccagcctgctgaggagctgagccccagcagccccatggatgcctggatcctgagccggctggccctggccgcccaggagtgtgagcggggcttcctgacccgggagctgagcctggtgacccacgccctgcaccacttctggctgcacaacctgtgtgatgtgtacctggaggccgtgaagcctgtgctgtggcacagcccccggcccctgggccccccccaggtgctcttcagctgtgccgacctgggcctgcggctgctggcccccctgatgcccttcctggccgaggagctgtggcagaggctgcccccccggcccggctgccccccagcccccagcatctctgtggccccctaccccagcgcctgcagcctggagcactggaggcagcctgagctggagcggcgcttcagccgggtgcaggaggtggtgcaggtgctgcgggccctgcgggccacctaccagctgaccaaggcccggccccgggtgctgctgcagagcagcgagcccggggaccagggcctgtttgaggccttcctggagcccctgggcaccctgggctactgtggggctgtgggcctgctgcccccaggcacagctgcccccagcggctgggcccaggcccccctgagtgacacagcccaggtgtacatggagctgcagggcctggtggacccccagatccagctgcccctgctggccgcccggcgctacaagctgcagaagcagctggacagcctgacagcccggaccccatctgagggggaggccggcacccagaggcagcagaagctgagcagcctgcagctggagctgagcaagctggacaaggccgccagccacctgcggcagctgatggatgagcccccagcccctggcagccctgagctgtag

SEQ ID NO: 22597 - DNA, 2076 bp, synthetic construct
  source 1..2076: mol_type = other DNA; note = Synthetic coding sequence
atggaggagagccccctgagccgggcccccagcagaggaggagtgaacttcctgaatgtggcccggacctacatccccaacaccaaggtggagtgccactacaccctgcccccaggcaccatgcccagcgccagtgactggattggcatcttcaaggtggaggccgcctgtgtgcgggactaccacacctttgtgtggagctctgtgcctgagagcaccacagatggcagccccatccacacctctgtgcagttccaggccagctacctgcccaagccaggggcccagctgtaccagttccgctacgtgaaccggcagggccaggtgtgtggccagagcccccccttccagttccgggagccccggcccatggatgagctggtgaccctggaggaggctgatggcggcagtgacatcctgctggtggtgcccaaggccaccgtgctgcagaaccagctggatgagagccagcaggagagaaatgacctgatgcagctgaagctgcagctggagggccaggtgacagagctgcggagccgggtgcaggagctggagcgggccctggccacagcccggcaggagcacacagagctgatggagcagtacaagggcatcagccgcagccatggagagatcacagaggagcgggacatcctgagccggcagcagggcgaccacgtggcccgcatcctggagctggaggatgacatccagaccatcagcgagaaggtgctgaccaaggaggtggagctggaccggctgcgggacacagtgaaggccctgacccgggagcaggagaagctgctgggccagctgaaggaggtgcaggccgacaaggagcagagcgaggccgagctgcaggtggcccagcaggagaaccaccacctgaacctggacctgaaggaggccaagtcctggcaggaggagcagagcgcccaggcccagaggctgaaggacaaggtggcccagatgaaggacaccctgggccaggcccagcagagggtggccgagctggagcccctgaaggagcagctgcggggggcccaggagctggccgccagcagccagcagaaggccaccctgctgggggaggagctggccagcgctgctgctgcccgggacaggaccatcgccgagctgcacaggagccggctggaggtggccgaggtgaatggccgcctggccgagctgggcctgcacctgaaggaggagaagtgccagtggagcaaggagagagctggcctgctgcagagcgtggaggccgagaaggacaagatcctgaagctgtctgctgagatcctgcggctggagaaggctgtgcaggaggagaggacccagaaccaggtgttcaagacagagctggcccgggagaaggacagcagcctggtgcagctgtctgagagcaagcgggagctgacagagctgcggagcgccctgcgggtgctgcagaaggagaaggagcagctgcaggaggagaagcaggagctgctggagtacatgaggaagctggaggcccggctggagaaggtggctgatgagaagtggaatgaagatgccaccacagaagatgaggaggccgctgtgggcctgagctgcccagctgccctgacagattctgaagatgagagccctgaggacatgaggctgcccccctacggcctgtgtgagcggggggaccccggcagcagccctgctggcccccgggaggccagccccctggtggtgatcagccagcctgcccccatcagcccccacctgagcggccctgctgaggacagcagcagtgacagcgaggccgaggatgagaagtctgtgctgatggctgctgtgcagagcggcggggaggaggccaacctgctgctgcctgagctgggcagcgccttctatgacatggccagcggcttcaccgtgggcaccctgtctgagaccagcactggaggccctgccacccccacctggaaggaatgtcccatctgcaaggagcgcttccctgctgagagtgacaaggatgccctggaggaccacatggatggccacttcttcttcagcacccaggaccccttcacctttgaatag

SEQ ID NO: 22598 - DNA, 366 bp, synthetic construct
  source 1..366: mol_type = other DNA; note = Synthetic coding sequence
atgaatgaaagcaagccaggggacagccagaacctggcctgtgtgttctgcaggaagcatgatgactgccccaacaagtatggagagaagaagaccaaggagaagtggaacctgactgtgcactactactgcctgctgatgagcagcggcatctggcagaggggcaaggaggaggagggcgtgtatggcttcctgattgaggacatcaggaaggaggtgaacagagccagcaagctgaagtgctgcgtgtgcaagaagaatggagccagcatcggctgtgtggccccccgctgcaagaggagctaccacttcccctgtggcctgcagcgggagtgcatcttccagttcaccggcaactttgcctag

SEQ ID NO: 22599 - DNA, 657 bp, synthetic construct; identical to SEQ ID NO: 19199
  source 1..657: mol_type = other DNA; note = Synthetic coding sequence

SEQ ID NO: 22600 - DNA, 1899 bp, synthetic construct; identical to SEQ ID NO: 18887
  source 1..1899: mol_type = other DNA; note = Synthetic coding sequence

SEQ ID NO: 22601 - DNA, 1134 bp, synthetic construct; identical to SEQ ID NO: 20043
  source 1..1134: mol_type = other DNA; note = Synthetic coding sequence

SEQ ID NO: 22602 - DNA, 1134 bp, synthetic construct; identical to SEQ ID NO: 20043
  source 1..1134: mol_type = other DNA; note = Synthetic coding sequence

SEQ ID NO: 22603 - DNA, 774 bp, synthetic construct; identical to SEQ ID NO: 22553
  source 1..774: mol_type = other DNA; note = Synthetic coding sequence

SEQ ID NO: 22604 - DNA, 1446 bp, synthetic construct; identical to SEQ ID NO: 20055
  source 1..1446: mol_type = other DNA; note = Synthetic coding sequence

SEQ ID NO: 22605 - DNA, 597 bp, synthetic construct; identical to SEQ ID NO: 19257
  source 1..597: mol_type = other DNA; note = Synthetic coding sequence

SEQ ID NO: 22606 - DNA, 345 bp, synthetic construct
  source 1..345: mol_type = other DNA; note = Synthetic coding sequence
atgaccacccggcaggccaccaaggaccccctgctgcggggcgtgagccccacccccagcaagatccctgtgcgcagccagaagaggacccccttccccaccgtgaccagctgtgctgtggaccaggagaaccaggacccccggcgctgggtgcagaagccacccctgaacatccagaggcccctggtggacagcgctggcccccggcccaaggcccggcaccaggccgagaccagccagaggctggtgggcatcagccagcccaggaaccccctggaggagctgcggcccagcccccggggccagaatgtgggccctggccccccagcccagacagaggcctag

SEQ ID NO: 22607 - DNA, 1446 bp, synthetic construct; identical to SEQ ID NO: 20055
  source 1..1446: mol_type = other DNA; note = Synthetic coding sequence

SEQ ID NO: 22608 - DNA, 396 bp, synthetic construct; identical to SEQ ID NO: 20854
  source 1..396: mol_type = other DNA; note = Synthetic coding sequence

SEQ ID NO: 22609 - DNA, 765 bp, synthetic construct; identical to SEQ ID NO: 19033
  source 1..765: mol_type = other DNA; note = Synthetic coding sequence

SEQ ID NO: 22610 - DNA, 2772 bp, synthetic construct
  source 1..2772: mol_type = other DNA; note = Synthetic coding sequence
atgtgcatccccccaccaaatgtgacaggcagcctgcacatcggccacgccctgactgtggccatccaggatgccctggtgcgctggcacaggatgagaggagaccaggtgctgtgggtgcccggcagtgaccacgccggcatcgccacccaggccgtggtggagaagcagctgtggaaggagcggggcgtgagaagacatgagctgagccgggaggccttcctgcgggaggtgtggcagtggaaggaggccaagggcggggagatctgtgagcagctgcgggccctgggcgccagcctggactgggaccgggagtgcttcaccatggatgtgggcagctctgtggccgtgacagaggcctttgtgcggctgtacaaggccggcctgctgtacagaaaccaccagctggtgaactggagctgtgccctgcggagcgccatcagtgacatcgaggtggagaaccggcccctgcccggccacacccagctgcggctgcccggctgccccacccctgtgtcctttggcctgctcttctctgtggccttccctgtggatggagagccagatgctgaggtggtggtgggcaccaccaggcctgagaccctgcctggagatgtggccgtggccgtgcacccagatgacagccgctacacccacctgcacggccggcagctgcggcaccccctgatgggccagcccctgcccctcatcacagattatgctgtgcagccccacgtgggcaccggggctgtgaaggtgaccccagcccacagccctgcagatgctgagatgggcgcccggcacggcctgagccccctgaatgtgattgctgaagatggcaccatgaccagcctgtgtggggactggctgcagggcctgcacagatttgtggcccgggagaagatcatgtctgtgctgtctgagtggggcctcttccggggcctgcagaaccaccccatggtgctgcccatctgcagccgctctggagatgtgattgagtacctgctgaagaaccagtggtttgtgcgctgccaggagatgggcgcccgggccgccaaggctgtggagagcggggccctggagctgagccccagcttccaccagaagaactggcagcactggttcagccacatcggggactggtgtgtgtcccggcagctgtggtggggccaccagatcccagcctacctggtggtggaggaccacgcccagggcgaggaggactgctgggtggtgggccgctctgaggccgaggcccgggaggtggccgctgagctgaccggccggcctggagctgagctgaccctggagcgggaccctgatgtgctggacacctggttcagcagcgccctcttccccttcagcgccctgggctggccccaggagaccccagacctggcccgcttctaccccctgagcctgctggagactggaagtgacctgctgctcttctgggtgggccgcatggtgatgctgggcacccagctgaccggccagctgcccttcagcaaggtgctgctgcaccccatggtgcgggaccggcagggcaggaagatgagcaagagcctgggcaatgtgctggacccccgggacatcatcagcggcgtggagatgcaggtgctgcaggagaagctgcggagcggcaacctggaccctgctgagctggccatcgtggccgccgcccagaagaaggacttcccccacggcatcccagaatgtggcacagatgccctgcgcttcaccctgtgcagccatggagtgcaggccggggacctgcacctgtctgtgtctgaggtgcagagctgccgccacttctgcaacaagatctggaatgccctgcgcttcatcctgaatgccctgggggagaagtttgtgccccagcctgctgaggagctgagccccagcagccccatggatgcctggatcctgagccggctggccctggccgcccaggagtgtgagcggggcttcctgacccgggagctgagcctggtgacccacgccctgcaccacttctggctgcacaacctgtgtgatgtgtacctggaggccgtgaagcctgtgctgtggcacagcccccggcccctgggccccccccaggtgctcttcagctgtgccgacctgggcctgcggctgctggcccccctgatgcccttcctggccgaggagctgtggcagaggctgcccccccggcccggctgccccccagcccccagcatctctgtggccccctaccccagcgcctgcagcctggagcactggaggcagcctgagctggagcggcgcttcagccgggtgcaggaggtggtgcaggtgctgcgggccctgcgggccacctaccagctgaccaaggcccggccccgggtgctgctgcagagcagcgagcccggggaccagggcctgtttgaggccttcctggagcccctgggcaccctgggctactgtggggctgtgggcctgctgcccccaggagctgctgcccccagcggctgggcccaggcccccctgagtgacacagcccaggtgtacatggagctgcagggcctggtggacccccagatccagctgcccctgctggccgcccggcgctacaagctgcagaagcagctggacagcctgacagcccggaccccatctgagggggaggccggcacccagaggcagcagaagctgagcagcctgcagctggagctgagcaagctggacaaggccgccagccacctgcggcagctgatggatgagcccccagcccctggcagccctgagctgtag

SEQ ID NO: 22611 - DNA, 5229 bp, synthetic construct
  source 1..5229: mol_type = other DNA; note = Synthetic coding sequence
atgatggagggcaatggaacagagaacagctgcagcaggacccggggctggctgcagcaggacaatgatgccaagccctggctgtggaagttcagcaactgcttcagcaggcctgagcagaccctgccccacagcccccagaccaaggagtacatggagaacaagaaggtggccgtggagctgaaggatgtgcccagccccctgcacgccggcagcaagctgtttcctgctgtgcccctgcctgacatccgcagcctgcagcagcccaagatccagctgagctctgtgcccaaggtgtcctgctgtgcccactgccccaatgagcccagcaccagccccatgagatttggaggcggcggcggcggcagcggcggcaccagcagcctcatccaccctggggccctgctggacagccagagcaccaggaccatcacctgccaggtgggcagcggctttgccttccagagcgccagcagcctgcagaatgccagcgccaggaacaacctggccggcatcgccagtgacttccccagcatgtgcctggagagcaacctgagcagctgcaagcacctgccctgctgcggcaagctgcacttccagagctgccacggcaatgtgcacaagctgcaccagttccccagcctgcagggctgcaccagcgctggctacttcccctgcagcgacttcaccagcggggcccctggccacctggaggagcacatcagccagagcgagctgaccccccacctgtgcaccaacagcctgcacctgaatgtggtgccccctgtgtgcctgaagggcagcctgtactgtgaggactgcctgaacaagccagccaggaacagcatcattgatgctgccaaggtgtggcccaacatccccccacccaacacccagcctgcccccctggccgtgcccctgtgcaatggctgcggcaccaagggcaccgggaaggagaccaccctgctgctggccaccagcctgggcaaggccgccagcaagtttggcagccctgaggtggccgtggccggccaggtgctggagaacctgccccccatcggggtcttctgggacatcgagaactgcagcgtgcccagcggccgcagcgccacagctgtggtgcagaggatccgggagaagttcttcaagggccaccgggaggccgagttcatctgtgtgtgtgacatcagcaaagaaaacaaggaggtgatccaggagctgaacaactgccaggtgacagtggcccacatcaatgccacagccaagaatgctgctgatgacaagctgcggcagagcctgcggagatttgccaacacccacacagccccagccaccgtggtgctggtgtccacagatgtgaactttgccctggagctgagtgacctgcggcaccgccacggcttccacatcatcctggtgcacaagaaccaggccagcgaggccctgctgcaccacgccaatgaactcatccgctttgaggagttcatcagtgacctgcccccccggctgcccctgaagatgccctgccacaccctgctgtatgtgtacaacctgcctgccaacaaggatggcaagtctgtgagcaaccggctgcggcggctgagtgacaactgtggcggcaaggtgctgagcatcaccggctgcagcgccatcctgcgcttcatcaaccaggacagcgctgagcgggcccagaagaggatggagaatgaagatgtgtttggaaaccgcatcatcgtgtccttcacccccaagaaccgggagctgtgtgagaccaagagcagcaatgccatcgctgacaaggtgaagagccccaagaagctgaagaaccccaagctgtgcctgatcaaggatgccagcgagcagagcagcagcgccaaggccaccccaggcaagggcagccaggccaacagcggcagcgccaccaagaacaccaacgtgaagagcctgcaggagctgtgcaggatggagagcaagacaggccacaggaacagcgagcaccagcagggccacctgcggctggtggtgcccacccacggcaacagcagcgctgctgtgtccacccccaagaacagcggcgtggccgagcctgtgtacaagaccagccagaagaaggagaacctgagcgcccggtctgtgaccagcagccctgtggagaagaaggacaaggaggagaccgtcttccaggtgtcctaccccagcgccttcagcaagctggtggccagccggcaggtgagccccctgctggccagccagagctggagcagcagccgctccatgagccccaacctgctgaacagagccagccccctggccttcaacatcgccaacagcagcagcgaggccgactgcccagacccctttgccaatggagcagatgtgcaggtgagcaacatcgactaccgcctgagcaggaaggagctgcagcagctgctgcaggaggcctttgcccggcacggcaaggtgaagtctgtggagctgagcccccacacagactaccagctgaaggctgtggtgcagatggagaacctgcaggatgccatcggggctgtgaacagcctgcaccgctacaagattggcagcaagaagatcctggtgtccctggccactggagctgccagcaagagcctgagcctgctgtctgctgagaccatgtctgtgctgcaggatgccccagcctgctgcctgcccctcttcaagttcacagacatctatgagaagaagtttggccacaagctgaatgtgtctgacctgtacaagctgacagacacagtggccatccgggagcagggcaatggccgcctggtgtgcctgctgcccagcagccaggcccggcagagccccctgggcagcagccagagccatgatggcagcagcaccaactgcagccccatcatctttgaggagctggagtaccacgagcctgtgtgccggcagcactgcagcaacaaggacttcagcgagcacgagtttgatcctgacagctacaagatcccctttgtgatcctgagcctgaagacctttgccccccaggtgcacagcctgctgcagacccatgagggcaccgtgcccctgctgtccttcccagactgctacatcgccgagtttggagacctggaggtggtgcaggagaaccagggcggcgtgcccctggagcacttcatcacctgtgtgcctggggtgaacatcgccacagcccagaatggcatcaaggtggtgaagtggatccacaacaagcccccaccacccaacacagacccctggctgctgcggagcaagagccctgtgggcaacccccagctgatccagttcagccgggaggtgattgacctgctgaagagccagcccagctgtgtgatccccatcagccacttcatccccagctaccaccaccactttgccaagcagtgccgggtgtctgactatggctacagcaagctgattgagctgctggaggccgtgccccacgtgctgcagatcctgggcatgggcagcaagaggctgctgaccctgacccaccgggcccaggtgaagcgcttcacccaggacctgctgaagctgctgaagagccaggccagcaagcaggtgattgtgcgggagttcagccaggcctaccactggtgcttcagcaaggactgggatgtgacagaatatggagtgtgtgagctgattgatattgtgtctgagatcccagacaccaccatctgcctgagccagcaggacaatgagatggtgatctgcatccccaagcgggagaggacccaggatgaaattgaaagaaccaagcagttcagcaaggatgtggtggacctgctgcggcaccagccccacttcaggatgcccttcaacaagttcatccccagctaccaccaccacttcggccggcagtgcaagctggcctactacggcttcaccaagctgctggagctgtttgaggccatcccagacaccctgcaggtgctggagtgtggggaggagaagatcctgaccctgacagaggtggagcgcttcaaggccctggccgcccagtttgtgaagctgctgcggagccagaaggacaactgcctgatgatgacagacctgctgacagaatatgccaagaccttcggctacaccttccggctgcaggactatgatgtgagcagcatcagcgccctgacccagaagctgtgccacgtggtgaaggtggccgacatcgagagcggccggcagatccagctgatcaacaggaagagcctgcggagcctgacagcccagctgctggtgctgctgatgtcctgggagggcaccacccacctgtctgtggaggagctgaagaggcactatgagagcacccacaacacccccctgaacccctgtgaatatggcttcatgaccctgacagagctgctgaagagcctgccctacctggtggaggtgttcaccaatgacaagatggaggagtgtgtgaagctgaccagcctgtacctgtttgccaagaatgtgcgcagcctgctgcacacctaccactaccagcagatcttcctgcacgagttctccatggcctacaccaagtatgtgggggagaccctgcagcccaagacctacggccacagctctgtggaggagctgctgggcgccatcccccaggtggtgtggatcaagggccacggccacaagagaattgtggtgctgaagaatgacatgaagagccggctgagcagcctgagcctgagccctgccaaccacgagaaccagcccagcgagggggagcgcatcctggaggtgcctgagagccacacagccagcgagctgaagctgggcgcagatggcagcggccccagccacacagagcaggagctgctgcggctgacagatgacagccctgtggacctgctgtgtgcccctgtgcccagctgcctgcccagcccccagctgcggccagaccccgtcatcctgcagagcgctgacctgatccagtttgaggagcggccccaggagcccagcgagatcatgatcctgaaccaggaggagaagatggagatccccatccctgggaagagcaagaccctgaccagtgacagcagcagcagctgcatctctgctgctgtgcctgtgcccccctgccccagcagcgagaccagcgagagcctgctgagcaaggaccctgtggagagccctgccaagaagcagcccaagaacagagtgaagctggccgccaacttcagcctggcccccatcaccaagctgtag

SEQ ID NO: 22612 - DNA, 774 bp, synthetic construct; identical to SEQ ID NO: 22553
  source 1..774: mol_type = other DNA; note = Synthetic coding sequence

SEQ ID NO: 22613 - DNA, 1134 bp, synthetic construct; identical to SEQ ID NO: 20043
  source 1..1134: mol_type = other DNA; note = Synthetic coding sequence

SEQ ID NO: 22614 - DNA, 495 bp, synthetic construct; identical to SEQ ID NO: 22255
  source 1..495: mol_type = other DNA; note = Synthetic coding sequence

SEQ ID NO: 22615 - DNA, 393 bp, synthetic construct
  source 1..393: mol_type = other DNA; note = Synthetic coding sequence
atggacaccatgatgctgaatgtgaggaacctgtttgagcagctggtgagaagagtggagatcctgtctgagggcaatgaggtgcagttcatccagctggccaaggactttgaggacttcaggaagaagtggcagaggacagaccacgagctgggcaagtacaaggacctgctgatgaaggccgagacagagaggtctgccctggatgtgaagctgaagcacgccaggaaccaggtggatgtggagatcaagaggcggcagagagctgaggccgactgtgagaagctggagcggcagatccagctgatccgggagatgctgatgtgtgacaccagcggcagcatccagctgtctgaggagcagaagagcgccctggccttcctgaacagatag

SEQ ID NO: 22616 - DNA, 324 bp, synthetic construct
  source 1..324: mol_type = other DNA; note = Synthetic coding sequence
atggacaccatgatgctgaatgtgaggaacctgtttgagcagctggtgagaagagtggagatcctgtctgagggcaatgaggtgcagttcatccagctggccaaggactttgaggacttcaggaagaagtggcagaggacagaccacgagctgggcaagtacaaggacctgctgatgaaggccgagacagagaggtctgccctggatgtgaagctgaagcacgccaggaaccaggtggatgtggagatcaagaggcggcagagagctgaggccgactgtgagaagctggagcggcagatccagctgatccgggagatgctgtag

SEQ ID NO: 22617 - DNA, 885 bp, synthetic construct
  source 1..885: mol_type = other DNA; note = Synthetic coding sequence
atggacaccatgatgctgaatgtgaggaacctgtttgagcagctggtgagaagagtggagatcctgtctgagggcaatgaggtgcagttcatccagctggccaaggactttgaggacttcaggaagaagtggcagaggacagaccacgagctgggcaagtacaaggacctgctgatgaaggccgagacagagaggtctgccctggatgtgaagctgaagcacgccaggaaccaggtggatgtggagatcaagaggcggcagagagctgaggccgactgtgagaagctggagcggcagatccagctgatccgggagatgctgatgtgtgacaccagcggcagcatccagctgtctgaggagcagaagagcgccctggccttcctgaacagaggccagcccagcagcagcaatgccggcaacaagaggctgagcaccattgatgaaagtggcagcatcctgagtgacatcagctttgacaagacagatgagagcctggactgggacagcagcctggtgaagaccttcaagctgaagaagcgggagaagagaagaagcaccagccggcagtttgtggatggccccccaggccctgtgaagaagaccaggagcatcggcagcgctgtggaccagggcaatgaaagcatcgtggccaagaccaccgtgacagtgcccaatgatggcggccccatcgaggccgtgtccaccatcgagaccgtgccctactggaccaggagcaggaggaagacaggcaccctgcagccctggaacagcgacagcaccctgaacagccggcagctggagcccaggacagaaacagacagcgtgggcaccccccagagcaatggaggcatgaggctgcatgactttgtgtccaagacagtgtag

SEQ ID NO: 22618 - DNA, 504 bp, synthetic construct; identical to SEQ ID NO: 18805
  source 1..504: mol_type = other DNA; note = Synthetic coding sequence

SEQ ID NO: 22619 - DNA, 882 bp, synthetic construct
  source 1..882: mol_type = other DNA; note = Synthetic coding sequence
atgctgcgggagcccaggaagcagggcctggccggccgggcccacctgctgagccctggcaccaccggctccatgaagacccctgtggagctggccgtgtctggcatgcagaccctgggcctgcagcaccgctgccggggcggctacagagtgaaggcccggaccagctatgtggatgagaccctgtttggcagccctgctggcacccggcccaccccaccagactttgaccccccctgggtggagaaggccaacagaacccggggcgtgggcaaggaggccagcaaggccctgggcgccaagggcagctgtgagaccacccccagccggggcagcacccccaccctgacccccaggaagaagaacaagtaccggcccatcagccacacccccagctactgtgatgagagcctgtttggcagccgctctgagggcgccagctttggagcccccaggatggccaagggagatgctgccaagctgcgggccctgctgtggaccccaccacccaccccccggggcagccacagcccccggccccgggaggcccccctgcgggccatccaccctgctggccccagcaagacagagcccggccctgctgctgacagccagaagctgtccatgggcggcctgcacagcagccggcccctgaagaggggcctgagccacagcctgacccacctgaatgtgcccagcacaggccacccagccaccagcgccccccacaccaacggcccccaggacctgcggcccagcaccagcggcgtgaccttccgcagccccctggtgaccagccgggcccggtctgtgtccatctctgtgcccagcaccccccggcggggcggggccacccagaagcccaagccaccctggaagtag

SEQ ID NO: 22620 - DNA, 3282 bp, synthetic construct; identical to SEQ ID NO: 22581
  source 1..3282: mol_type = other DNA; note = Synthetic coding sequence

SEQ ID NO: 22621 - DNA, 276 bp, synthetic construct
  source 1..276: mol_type = other DNA; note = Synthetic coding sequence
atgggcaagaagaccaagaggacagctgacagcagcagcagtgaagatgaggaggagtatgtggtggagaaggtgctggaccggcgggtggtgaagggccaggtggagtacctgctgaagtggaagggcttcagcgaggagcacaacacctgggagcctgagaagaacctggactgcccagagctgatcagcgagttcatgaagaagtacaagaagatgaaggagggggagaacaacaagccccgggagaagtctgagagcaacaagaggaagtag

SEQ ID NO: 22622 - DNA, 390 bp, synthetic construct; identical to SEQ ID NO: 19988
  source 1..390: mol_type = other DNA; note = Synthetic coding sequence

SEQ ID NO: 22623 - DNA, 1134 bp, synthetic construct; identical to SEQ ID NO: 20043
  source 1..1134: mol_type = other DNA; note = Synthetic coding sequence

SEQ ID NO: 22624 - DNA, 2031 bp, synthetic construct; identical to SEQ ID NO: 18328
  source 1..2031: mol_type = other DNA; note = Synthetic coding sequence

SEQ ID NO: 22625 - DNA, 456 bp, synthetic construct
  source 1..456: mol_type = other DNA; note = Synthetic coding sequence
atggacaccatgatgctgaatgtgaggaacctgtttgagcagctggtgagaagagtggagatcctgtctgagggcaatgaggtgcagttcatccagctggccaaggactttgaggacttcaggaagaagtggcagaggacagaccacgagctgggcaagtacaaggacctgctgatgaaggccgagacagagaggtctgccctggatgtgaagctgaagcacgccaggaaccaggtggatgtggagatcaagaggcggcagagagctgaggccgactgtgagaagctggagcggcagatccagctgatccgggagatgctgatgtgtgacaccagcggcagcatccagctgtctgaggagcagaagagcgccctggccttcctgaacagaggccagcccagcagcagcaatgccggcaacaagaggctgagcaccattgatgaaagtggcagctag

SEQ ID NO: 22626 - DNA, 1446 bp, synthetic construct; identical to SEQ ID NO: 20055
  source 1..1446: mol_type = other DNA; note = Synthetic coding sequence

SEQ ID NO: 22627 - DNA, 765 bp, synthetic construct; identical to SEQ ID NO: 19033
  source 1..765: mol_type = other DNA; note = Synthetic coding sequence

SEQ ID NO: 22628 - DNA, 1446 bp, synthetic construct; identical to SEQ ID NO: 20055
  source 1..1446: mol_type = other DNA; note = Synthetic coding sequence

SEQ ID NO: 22629 - DNA, 1974 bp, synthetic construct
  source 1..1974: mol_type = other DNA; note = Synthetic coding sequence
atgctgggccccagctgggatggagatgaagctgagagcactggagagatcatccggctgggggacacagcccacaccttcagcctgcggagcaatggagcccagtgccccaatgagatgctgagcaagaaggccctggccagccccagcagcaagagccatgaggacatgctgtacccacccagcgtgctgagcaagagcaggaccagctttgtggaggacacagagaccctgtctgtgtctggcatccccaatgccaggaagctgggggagcccatccgggccgccatccccctgcaccccccctaccaccccagcgagccccgggccccctgccccatcggcaaggagtacctgcacagcagccactgcagccctgctgtgaacagcactggagagcacacagagttcagcggggacctggatgatggcctcttcctgatcagcaagctgcccaagggcagcaagtgggaggtgtacccagcccaggtgcagggccccaggaccaggaagccacccaagggcaagagaaatgaaaatagagccacagccagcagctgcaacagccccttcccccagaggcccaggaagaggctgacagagcaggagctgcatgatgtgtctgagaagctgagccagaggctgtctgagctggactggatgctgaagagcgccctgggggaccgcatcaaggagaagacagaccacaaggaggagaacacaggaaatgaggaggtggaggatggaacagaggagaccctgagccagcacagtgatggcatcgtggagtatggccccaagaagagcaggcctggcctgtccatgaggaggaagccaccctaccgcagccacagcctgagccccagccctgtgaacaagcacaagcagttccacctggagaggaagaggcagaggaagccccgggagacagatgtgcggcagttccaggcccaggccttcacagaggcctttgagcgggagctgcggcggcacaaggtgcaggagaacatcggccccctgcgcatccacgagaaggaggaggagacagagaagatctacagaggagaggccgtgaggaagggcaccccagagtgcagccagccctggaagatctacagcaggaagaccaccacccagagcctgcggggcggcctgcccaagcccaacaaggctgtgcccatgaaggtgtctgagcacagcctgctgcccctgatgctggagcagttccccttcctgtatgtgtctggccccaccctgagcaagatgtggaagcagcagatcgcccaggtggagcagctgaagaaggaggcctgccgggagaacagaagcaagaagaagctgcaggatgaaattgaggaggccctgcggagacatgacctgctgaccaccctggtgaagaaggagtatgagcacaacaagaggctgcaggacttcaaggactgcatccggcggcagaggctgacccagagcaagatcaaggagaaccggcagcagatcgtgcgggccaggaagtactatgatgactacagagtgcagctgtgtgccaagatgatgaggatgaggacccgggaggagatgatcttcaagaagctgtttgaggagggcctgaacatccagaagcagaggctgcgggacctgagaaattatgccaaggagaagagagatgagcagaggagaagacaccaggatgagctggacagcatggagaactactacaaggaccagttcagcctgctggccgaggccatcagccaggagcaccaggagctgaaggcccgggagaagagccaggcccagaccctgcacaaggtgaagcgggagctgcggagcaagatggagaaggagatccagcagctgcaggacatgatcacccagaatgatgatgatgtgttcttccgggagctggaggccgagcgcttccgcagccggctgcagctggccagcttccagtacagcaagagccccagcctgtag

SEQ ID NO: 22630 - DNA, 507 bp, synthetic construct
  source 1..507: mol_type = other DNA; note = Synthetic coding sequence
atgcagaccttcctgaagggcaagagggtgggctactggctgtctgagaagaagatcaagaagctgaacttccaggcctttgctgagctgtgcaggaagaggggcatggaggtggtgcagctgaacctgagccggcccatcgaggagcagggccccctggatgtgatcatccacaagctgacagatgtgatcctggaggccgaccagaatgacagccagagcctggagctggtgcaccgcttccaggagtacattgatgcccaccctgagaccatcgtgctggaccccctgcctgccatccgcaccctgctggacaggagcaagagctatgagctgatcaggaagattgaggcctacatggaggatgaccgcatctgcagcccccccttcatggagctgaccagcctgtgtggagatgacaccatgaggctgctggagaagaatggcctgaccttccccttcatctgcaagaccagggtggcccacggcaccaacagccatgaatag

SEQ ID NO: 22631 - DNA, 2211 bp, synthetic construct
  source 1..2211: mol_type = other DNA; note = Synthetic coding sequence
atgctgatcccagccctgcagatcagtgacagcgagagcgtgggcctggaggatggcatcgagcagagcgcctacctgacagagagcaagatgaatgaaagcaagccaggggacagccagaacctggcctgtgtgttctgcaggaagcatgatgactgccccaacaagtatggagagaagaagaccaaggagaagtggaacctgactgtgcactactactgcctgctgatgagcagcggcatctggcagaggggcaaggaggaggagggcgtgtatggcttcctgattgaggacatcaggaaggaggtgaacagagccagcaagctgaagtgctgcgtgtgcaagaagaatggagccagcatcggctgtgtggccccccgctgcaagaggagctaccacttcccctgtggcctgcagcgggagtgcatcttccagttcaccggcaactttgccagcttctgctgggaccacaggcctgtgcagatcatcaccagcaacaactaccgggagagcctgccctgcaccatctgcctggagttcatcgagcccatccccagctacaacatcctgcggagcccctgctgcaagaatgcctggttccaccgggactgcctgcaggtgcaggccatcaatgctggggtcttcttcttccgctgcaccatctgcaacaacagcgacatcttccagaaggagatgctgaggatgggcatccacatccctgagaaggatgcctcctgggagctggaggagaatgcctaccaggagctgctgcagcactatgaaagatgtgatgtgcggcgctgccgctgcaaggagggccgggactacaatgccccagacagcaagtgggagatcaagcgctgccagtgctgcggcagcagcggcacccacctggcctgcagcagcctgcgctcctgggagcagaactgggagtgcctggagtgccggggcatcatctacaacagcggggagttccagaaggccaagaagcacgtgctgcccaacagcaacaacgtgggcatcacagactgcctgctggaggagagcagccccaagctgccccggcagagccctggcagccagagcaaggacctgctgcggcagggcagcaagttcagaagaaatgtgtccaccctgctgattgagctgggcttccagatcaagaagaagaccaagaggctgtacatcaacaaggccaacatctggaacagcgccctggatgccttcaggaacagaaacttcaaccccagctatgccatcgaggtggcctacgtgattgaaaatgacaactttggaagtgagcaccctggcagcaagcaggagttcctgagcctgctgatgcagcacctggagaacagcagcctgtttgagggcagcctgagcaagaacctgagcctgaacagccaggccctgaaggaaaatctctactatgaagctgggaagatgctggccatcagcctggtgcatggaggccccagccctggcttcttcagcaagaccctcttcaactgcctggtgtatggccctgagaacacccagcccatcctggatgatgtgtctgactttgatgtggcccagatcatcatccgcatcaacacagccaccaccgtggccgacctgaagagcatcatcaatgaatgctacaactacctggagctgattggctgcctgcggctcatcaccaccctgagtgacaagtacatgctggtgaaggacatcctgggctaccacgtgatccagagggtgcacaccccatttgagagcttcaagcagggcctgaagaccctgggcgtgctggagaagatccaggcctacccagaggccttctgcagcatcctgtgccacaagccagagagcctgagcgccaagatcctgtctgagctgttcaccgtgcacaccctgcctgatgtgaaggccctgggcttctggaacagctacctgcaggccgtggaggatggcaagagcaccaccaccatggaggacatcctgatctttgccaccggctgcagcagcatccccccagctggcttcaagcccacccccagcattgagtgcctgcacgtggacttccctgtgggcaacaagtgcaacaactgcctggccatccccatcaccaacacctacaaggagttccaggagaacatggacttcaccatccggaacaccctgcggctggagaaggaggagagcagccactacatcggccactag

SEQ ID NO: 22632 - DNA, 1131 bp, synthetic construct
  source 1..1131: mol_type = other DNA; note = Synthetic coding sequence
atggccaacagcgccaacaccaacacagtgcccaagctgtacagatctgtgattgaagatgtgatcaatgatgtgcgggacatcttcctggatgatggagtggatgagcaggtgctgatggagctgaagaccctgtgggagaacaagctgatgcagagcagagctgtggatggcttccacagcgaggagcagcagctgctgctgcaggtgcagcagcagcaccagccccagcagcagcagcaccaccaccaccaccaccaccagcaggcccagccccagcagacagtgccccagcaggcccagacccagcaggtgctgatcccagccagccagcaggccacagccccccaggtgattgtgcctgacagcaagctgatccagcacatgaatgccagcaacatgtctgctgctgccacagctgccaccctggccctgcctgctggggtgacccctgtgcagcagatcctgaccaacagcggccagctgctgcaggtggtgcgggccgccaacggggcccagtacatcttccagccccagcagagcgtggtgctgcagcagcaggtgatcccccagatgcagcccggcggcgtgcaggcccctgtgatccagcaggtgctggcccccctgcccggcggcatcagcccccagacaggagtcatcatccagccccagcagatcctcttcaccggcaacaagacccaggtgatccccaccaccgtggccgcccccaccccagcccaggcccagatcacagccaccggccagcagcagccccaggcccagcctgcccagacccaggcccccctggtgctgcaggtggatggcaccggggacaccagcagtgaagaagatgaagatgaggaggaggactatgatgatgatgaggaggaggacaaggagaaggatggagcagaagatggccaggtggaggaggagcccctgaacagtgaagatgatgtgtctgatgaggagggccaggagctgtttgacacagaaaatgtggtggtgtgccagtatgacaagatccacaggagcaagaacaagtggaagttccacctgaaggatggcatcatgaacctgaatggccgggactacatcttcagcaaggccatcggagatgctgagtggtag

SEQ ID NO: 22633 - DNA, 237 bp, synthetic construct
  source 1..237: mol_type = other DNA; note = Synthetic coding sequence
atggagacagactgcaaccccatggagctgagctccatgagcggctttgaggagggcagcgagctgaatggatttgagggcacagacatgaaggacatgaggctggaggccgaggccgtggtgaatgatgtgctgtttgctgtgaacaacatgtttgtgtccaagagcctgcgctgtgctgatgatgtggcctacatcaacgtggagaccaaggagaggaaccgctactgcctgtag

SEQ ID NO: 22634 - DNA, 747 bp, synthetic construct; identical to SEQ ID NO: 21508
  source 1..747: mol_type = other DNA; note = Synthetic coding sequence

SEQ ID NO: 22635 - DNA, 2370 bp, synthetic construct
  source 1..2370: mol_type = other DNA; note = Synthetic coding sequence
atgtctgcccagaccagccctgctgagaagggcctgaaccctggcctgatgtgccaggagagctatgcctgcagcggcacagatgaggccatctttgaatgtgatgagtgctgcagcctgcagtgcctgcgctgtgaggaggagctgcaccggcaggagcggctgaggaaccacgagcgcatccggctgaagccaggccacgtgccctactgtgacctgtgcaagggcctgagcggccacctgcccggggtgcggcagagggccatcgtgcgctgccagacctgcaagatcaacctgtgcctggagtgccagaagaggacccacagcggcggcaacaagaggaggcaccctgtgacagtgtacaacgtgagcaacctgcaggagagcctggaggccgaggagatggatgaggagaccaagaggaagaagatgacagagaaggtggtgtccttcctgctggtggatgaaaatgaggagatccaggtgaccaatgaggaggacttcatcaggaagctggactgcaagccagaccagcacctgaaggtggtgtccatcttcggcaacacaggagatggcaagagccacaccctgaaccacaccttcttctacggccgggaggtgttcaagaccagccccacccaggagagctgcaccgtgggcgtgtgggccgcctatgaccctgtgcacaaggtggccgtcatcgacacagagggcctgctgggcgccaccgtgaacctgagccagaggacccggctgctgctgaaggtgctggccatcagtgacctggtgatctaccgcacccatgctgaccggctgcacaatgacctcttcaagttcctgggagatgccagcgaggcctacctgaagcacttcaccaaggagctgaaggccaccacagcccgctgtggcctggatgtgcccctgagcaccctgggccctgctgtgatcatcttccatgaaacagtgcacacccagctgctgggcagtgaccaccccagcgaggtgcctgagaagctgatccaggaccgcttcaggaagctgggccgcttccctgaggccttcagcagcatccactacaagggcaccaggacctacaaccccccaacagacttcagcggcctgcggcgggccctggagcagctgctggagaacaacaccaccaggagccccaggcaccctggggtcatcttcaaggccctgaaggccctgagtgaccgcttcagcggggagatcccagatgaccagatggcccacagcagcttcttcccagatgagtacttcacctgcagcagcctgtgcctgagctgtggggtgggctgcaagaagtccatgaaccacggcaaggagggcgtgccccatgaggccaagagccgctgccgctacagccaccagtatgacaacagagtgtacacctgcaaggcctgctatgaaagaggagaggaggtgtctgtggtgcccaagaccagcgccagcacagacagcccctggatgggcctggccaagtatgcctggagcggctacgtgattgagtgccccaactgtggggtggtgtaccgcagccggcagtactggtttggaaaccaggaccctgtggacacagtggtgaggacagaaattgtgcacgtgtggccaggcacagatggcttcctgaaggacaacaacaatgctgcccagaggctgctggatggcatgaacttcatggcccagagcgtgtctgagctgagcctgggccccaccaaggctgtgacctcctggctgacagaccagatcgccccagcctactggaggcccaacagccagatcctgagctgcaacaagtgtgccaccagcttcaaggacaatgacaccaagcaccactgccgggcctgtggggagggcttctgtgacagctgcagcagcaagaccaggcctgtgcctgagcggggctggggccctgcccctgtgcgggtgtgtgacaactgctatgaggccagaaatgtgcagctggccgtgacagaggcccaggtggatgatgaaggaggcaccctgattgccaggaaggtgggggaggccgtgcagaacaccctgggcgctgtggtgacagccatcgacatccccctgggcctggtgaaggatgctgcccggcctgcctactgggtgcctgaccacgagatcctgcactgccacaactgcaggaaggagttcagcatcaagctgagcaagcaccactgccgggcctgtggccagggcttctgtgatgaatgttctcatgaccggcgggctgtgcccagccggggctgggaccaccctgtgcgggtgtgcttcaactgcaacaagaagccagcctggaccagcctgtctgtgatgaccgggaagggccccctgtgctag

SEQ ID NO: 22636 - DNA, 2271 bp, synthetic construct
  source 1..2271: mol_type = other DNA; note = Synthetic coding sequence
ctggccggaaatgaaacagagtgggtgaccatcgccaacaacctgctcttcaagtgccacatccacctgcgcatccacgagctgcaggactgtgatgccaacgtgttcatcgccctgtaccagagcatcctgggggagaaggtgcctgacctgattgtcatccccaggagccaggaggatgatgcccacaacgtgcaggccgtgattgacagcctggccctggactacctgcaggtgtccctgagccacatcacagccctgtacagcgtgtccaggaggaagtacagcgagaggaggatgctgggccccagctgggatggagatgaggccgagagcactggagagatcatccggctgggggacacagcccacaccttcagcctgcggagcaatggagcccagtgccccaatgagatgctgagcaagaaggccctggccagccccagcagcaagagccatgaggacatgctgtacccaccttctgtgctgagcaagagcaggaccagctttgtggaggacacagagaccctgtctgtgtctggcatccccaatgccaggaagctgggggagcccatccgggccgccatccccctgcaccccccctaccaccccagcgagccccgggccccctgccccatcggcaaggagtacctgcacagcagccactgcagccctgctgtgaacagcactggagagcacacagagttcagcggggacctggatgatggcctcttcctgatcagcaagctgcccaagggcagcaagtgggaggtgtacccagcccaggtgcagggccccaggaccaggaagccacccaagggcaagagaaatgaaaatagagccacagccagcagctgcaacagccccttcccccagaggcccaggaagaggctgacagagcaggagctgcatgatgtgtctgagaagctgagccagaggctgtctgagctggactggatgctgaagagcgccctgggggaccgcatcaaggagaagacagaccacaaggaggagaacacaggaaatgaggaggtggaggatggaacagaggagaccctgagccagcacagtgatggcatcgtggagtatggccccaagaagagccggcccggcctgtccatgaggaggaagccaccctaccgcagccacagcctgagccccagccctgtgaacaagcacaagcagttccacctggagaggaagaggcagaggaagccccgggagacagatgtgcggcagttccaggcccaggccttcacagaggcctttgagcgggagctgcggcggcacaaggtgcaggagaacatcggccccctgcgcatccacgagaaggaggaggagaccgtgggcaagaacatccagaggaggagctttgtgaaggagctgcagaatgtggtgtccccaggccgcttcaccctggagaagccccagaggagagtgcggggcggcctgcccaagcccaacaaggctgtgcccatgaaggtgtctgagcacagcctgctgcccctgatgctggagcagttccccttcctgtatgtgtctggccccaccctgagcaagatgtggaagcagcagatcgcccaggtggagcagctgaagaaggaggcctgcagagaaaatagaagcaagaagaagctgcaggatgaaattgaggaggccctgcggagacatgacctgctgaccaccctggtgaagaaggagtatgagcacaacaagaggctgcaggacttcaaggactgcatccggcggcagaggctgacccagagcaagatcaaggaaaatcggcagcagatcgtgcgggccaggaagtactatgatgactacagagtgcagctgtgtgccaagatgatgaggatgaggacccgggaggagatgatcttcaagaagctgtttgaggagggcctgaacatccagaagcagaggctgcgggacctgaggaactatgccaaggagaagagagatgagcagaggcggcggcaccaggatgagctggacagcatggagaactactacaaggaccagttcagcctgctggccgaggccatcagccaggagcaccaggagctgaaggcccgggagaagagccaggcccagaccctgcacaaggtgaagcgggagctgcggagcaagatggagaaggagatccagcagctgcaggacatgatcacccagaatgatgatgatgtgttcttccgggagctggaggccgagcgcttccgcagccggctgcagctggccagcttccagtacagcaagagccccagcctgtag

SEQ ID NO: 22637 - DNA, 420 bp, synthetic construct; identical to SEQ ID NO: 21325
  source 1..420: mol_type = other DNA; note = Synthetic coding sequence

SEQ ID NO: 22638 - DNA, 300 bp, synthetic construct
  source 1..300: mol_type = other DNA; note = Synthetic coding sequence
atgacagacacccggcggcgggtgaaggtgtacaccctgaatgaagatcggcagtgggatgaccggggcaccggccacgtgagcagcggctacgtggagcggctgaagggcatgagcctgctggtgcgggcagagagtgatggcagcctgctgctggagagcaagatcaaccccaacacagcctaccagaagcagcaggacaccctcatcgtgtggagcgaggccgagaactatgacctggccctgtccttccaggagaaggccggctgtgatgagatctgggagaagatctgccagtag

SEQ ID NO: 22639 - DNA, 2463 bp, synthetic construct; identical to SEQ ID NO: 19206
  source 1..2463: mol_type = other DNA; note = Synthetic coding sequence

SEQ ID NO: 22640 - DNA, 396 bp, synthetic construct
  source 1..396: mol_type = other DNA; note = Synthetic coding sequence
atgaatgaaagcaagccaggggacagccagaacctggcctgtgtgttctgcaggaagcatgatgactgccccaacaagtatggagagaagaagaccaaggagaagtggaacctgactgtgcactactactgcctgctgatgagcagcggcatctggcagaggggcaaggaggaggagggcgtgtatggcttcctgattgaggacatcaggaaggaggtgaacagagccagcaagctgaagtgctgcgtgtgcaagaagaatggagccagcatcggctgtgtggccccccgctgcaagaggagctaccacttcccctgtggcctgcagcgggagtgcatcttccagttcaccggcaactttgccagcttctgctgggaccacaggcctgtgcagtag

SEQ ID NO: 22641 - DNA, 5934 bp, synthetic construct
  source 1..5934: mol_type = other DNA; note = Synthetic coding sequence
atggccgcccggagcgcccccagctgccacctgcggctggagtgggtgtatggctaccggggccaccagtgcaggaacaacctgtactacacagctgccaaggagatcgtgtactttgtggccggcgtgggcgtggtgtacagcccccgggagcaccggcagaagttctaccggggccacagtgatgacatcatcagcctggccctgcaccctgagcgggtgctggtggccaccggccaggtgggcaaggagccctacatctgcatctgggacagctacacagtgcagaccatctctgtgctgaaggatgtgcacacccatggaattgcctgcctggcctttgacctggatggccagaggctggtgtctgtgggcctggacagcaagaatgctgtgtgtgtgtgggactggaagaggggcaagatgctgtccatggcccctggccacacagaccgcatctttgacatctcctgggacctgtaccagcccaacaagctggtgtcctgtggggtgaagcacatcaagttctggagcctgtgtggaaatgccctgacccccaagaggggcgtgtttgggaagacaggagacctgcagaccatcctgtgcctggcctgtgccagagatgagctgacctacagcggggccctgaatggagacatctacgtgtggaagggcatcaacctgatccgcaccatccagggcgcccatgctgctggcatcttctccatgaatgcctgtgaggagggctttgccaccggcggcagagatggctgcatccggctgtgggacctgaccttcaagcccatcaccgtcatcgacctgcgggagacagaccagggctacaagggcctgtctgtgcgctctgtgtgctggaggggggaccacatcctggtgggcacccaggacagcgagatctttgagatcgtggtgcaggagaggaacaagcccttcctgatcatgcagggccactgtgagggggagctgtgggccctggccgtgcaccccaccaagcccctggccgtgacaggcagtgatgacagatctgtgcgcatctggagcctggtggaccacgccctgattgcccgctgcaacatggaggagcccatccgctgtgccgctgtgaatgctgatggcatccacctggccctgggcatgaaggatggcagcttcaccgtgctgcgggtgcgggacatgacagaggtggtgcacatcaaggacaggaaggaggccatccacgagctgaagtacagcccagatggcacctacctggccgtgggctgcaatgacagctctgtggacatctatggagtggcccagcgctacaagaaggtgggggagtgcctgggcagcctgtccttcatcacccacctggactggagcagtgacagccgctacctgcagaccaatgatggaaatggcaagaggctcttctacaggatgcctgggggcaaggaggtgaccagcacagaggagatcaagggcgtgcactgggcctcctggacctgtgtgtctggcctggaggtgaatggcatctggcccaagtacagcgacatcaatgacatcaacagcgtggatggcaactacatcggccaggtgctggtgacagcagatgattatggcatcatcaagctgttccgctacccctgcctgaggaagggggccaagttcaggaagtacatcggccacagcgcccacgtgaccaacgtgcgctggagccatgactaccagtgggtgatcagcattggaggagctgaccacagcgtcttccagtggaagttcatccctgagaggaagctgaaggatgctgtgcacatcgccccccaggagagcctggccgacagccacagtgatgaaagtgacagcgacctgagtgatgtgcctgagctggacagcgagattgagcaggagacccagctgacctaccgccggcaggtgtacaaggaggacctgccccagctgaaggagcagtgcaaggagaagcagaagagcgccaccagcaagaggcgggagcgggcccctggcaacagcatccggctgcactttgtgcacggctaccggggctatgactgccgcagcaacctcttctacacccagattggagagatcgtgtaccacgtggccgctgtgggcgtcatctacaaccggcagcagaacacccagcgcttctacctgggccatgatgatgacatcctgtgcctgaccatccaccccctgaaggactatgtggccaccggccaggtgggccgggaccccagcatccacatctgggacacagagaccatcaagcccctgagcatcctgaagggccaccaccagtatggagtgtctgctgtggacttcagcgcagatggcaagaggctggcctctgtgggcattgatgacagccacacagtggtgctgtgggactggaagaagggggagaagctgagcatcgcccggggcagcaaggacaagatctttgtggtgaagatgaacccctacgtgcctgacaagctgatcacagctggcatcaagcacatgaagttctggaggaaggccggcggcggcctgattggaaggaagggctacatcggcaccctgggcaagaatgacaccatgatgtgtgctgtgtatggctggacagaggagatggccttcagcggcaccagcactggagatgtgtgcatctggagggacatcttcctggtgaagacagtgaaggcccatgatggccctgtgttctccatgcacgccctggagaagggctttgtgactggaggcaaggatggcatcgtggccctgtgggatgacagctttgagcgctgcctgaagacctacgccatcaagagagctgccctggcccctggcagcaagggcctgctgctggaggacaaccccagcatccgggccatcagcctgggccacggccacatcctggtgggcaccaagaatggagagatcctggaggtggacaagagcggccccatcaccctgctggtgcagggccacatggagggggaggtgtggggcctggccacccacccctacctgcccatctgtgccaccgtgtctgatgacaagaccctgcgcatctgggacctgagccccagccactgcatgctggccgtgaggaagctgaagaagggcggccgctgctgctgcttctccccagatggcaaggccctggccgtgggcctgaatgatggcagcttcctgatggccaatgctgacaccctggaggacctggtgtccttccaccacaggaaggacatgatcagtgacatccgcttcagccctggcagcggcaagtacctggccgtggccagccatgacagcttcatcgacatctacaacgtgatgagcagcaagagggtgggcatctgcaagggggccaccagctacatcacccacatcgactgggacatccggggcaagctgctgcaggtgaacacaggagccaaggagcagctgttctttgaggccccccggggcaagaagcagaccatccccagcgtggaggtggagaagatcgcctgggcctcctggacctctgtgctgggcctgtgctgtgagggcatctggcctgtgattggagaggtgacagatgtgacagccagctgcctgaccagtgacaagatggtgctggccactggagatgacctgggctttgtgaagctgttccgctaccccaccaagggcaagtttgggaagttcaagcgctacgtggcccacagcacccacgtgaccaacgtgcgctggacctatgatgacagcatgctggtgaccctgggcggcacagacatgagcctgatggtgtggaccaatgagatggagggctaccgggagaagaggccctgtgacagcgaggagagtgacatcgacagcgaggaggatggcggctatgacagtgatgtgaccagagaaaatgagatctcctacaccatccgggccctgagcaccaacatccggcccatgctgggcatcaagccccacctgcagcagaaggagcccagcattgatgagcggcagggcgtggtgcggggcagccggccccctgtgtcccgggccccaccccagcctgagaagctgcagaccaacaacgtgggcaagaagaagaggcccatcgaggacctggtgctggagctgatcttcggctaccggggccgggactgcagaaataatgtgcactacctgaatgatggagatgacatcatctaccacacagcctctgtgggcatcctgcacaacgtggccaccggcagccagagcttctaccaggagcacaatgatgacatcctgtgcctgactgtgaaccagcaccccaagttcatcaacatcgtggccaccggccaggtgggggacagcgctgacatgtctgccacagcccccagcatccacatctgggatgccatgaacaagcagaccctgagcatcctgcgctgctaccacagcaagggcgtgtgcagcgtgtccttcagcgccaccgggaagctgctgctgtctgtgggcctggaccctgagcacaccatcaccatctggcgctggcaggagggcgccaagatcgccagccgggccggccacaaccagaggatctttgtggccgagttccggccagacagcgacacccagtttgtgtctgtgggcgtgaagcacgtgaagttctggaccctggccggccgggccctgctgagcaagaagggcctgctgagcaccctggaggatgccaggatgcagaccatgctggccatcgccttcggggccaacaacctgaccttcaccggcaccatctctggagatgtgtgtgtgtggaaggaccacatcctgtgccgcatcgtggcccgggcccacaacggccctgtgtttgccatgtacaccaccctgagagatggcctgattgtgactggaggcaaggagcggcccagcaaggagggcggcgctgtgaagctgtgggaccaggagctgcggcgctgccgggccttccggctggagaccggccaggccacagactgtgtgcgctctgtgtgccggggcaagggcaagatcctggtgggcaccagaaatgctgagatcatcgaggtgggggagaagaatgctgcctgcaacatcctggtgaatggccacgtggatggccccatctggggcctggccacccaccccagccgggacttcttcctgtctgctgctgaagatggcaccgtgcggctgtgggacattgctgacaagaagatgctgaacaaggtgaacctgggccatgctgccaggacagtgtgctacagccctgagggggacatggtggccatcggcatgaagaatggagagttcatcatcctgctggtgagcagcctgaagatctggggcaagaagagggaccggcgctgtgccatccatgacatccgcttctccccagacagccgctacctggccgtgggcagcagcgagaacagcgtggacttctatgacctgaccctgggccccaccctgaaccgcatctcctactgcaaggacatccccagctttgtgatccagatggacttctctgctgacagcagctacctgcaggtgagcagcggctgctacaagagacatgtgtatgaggtgcccagcggcaagcacctgatggaccatgctgccatcgaccgcatcacctgggccacctggaccagcatcctgggagatgaggtgctgggcatctggagcagacatgctgagaaggcagatgtgaactgtgcctgtgtgagccacagcggcatcagcctggtgactggagatgactttggcatggtgaagctgtttgacttcccctgcccagagaagtttgccaagcacaagcgcttcctgggccacagcccccacgtgaccaacatccgcttcaccagcggggacagacatgtggtgtctgctggaggagatgactgcagcctgtttgtgtggaagtgtgtgcacaccccccactag

SEQ ID NO: 22642 - DNA, 2502 bp, synthetic construct
  source 1..2502: mol_type = other DNA; note = Synthetic coding sequence
atgacagacacccggcggcgggtgaaggtgtacaccctgaatgaagatcggcagtgggatgaccggggcaccggccacgtgagcagcggctacgtggagcggctgaagggcatgagcctgctggtgcgggcagagagtgatggcagcctgctgctggagagcaagatcaaccccaacacagcctaccagaagcagcaggacaccctcatcgtgtggagcgaggccgagaactatgacctggccctgtccttccaggagaaggccggctgtgatgagatctgggagaagatctgccaggtgcagggcaaggaccccagcgtggacatcacccaggacctggtggatgaaagtgaggaggagagatttgatgacatgagcagccctggcctggagctgcccagctgtgagctgagccggctggaggagattgctgagctggtggccagcagcctgcccagccccctgcggcgggagaagctggccctggccctggagaatgaaggctacatcaagaagctgctggagctgttccacgtgtgtgaggacctggagaacatcgagggcctgcaccacctgtatgagatcatcaagggcatcttcctgctgaacagaacagccctgtttgaggtgatgttttctgaggagtgcatcatggatgtgattggctgcctggagtatgaccctgccctgagccagcccaggaagcaccgggagttcctgaccaagacagccaagttcaaggaggtgatccccatcagtgaccctgagctgaagcagaagatccaccagacctacagagtgcagtacatccaggacatggtgctgcccaccccatctgtgtttgaggagaacatgctgagcaccctgcacagcttcatcttcttcaacaaggtggagatcgtgggcatgctgcaggaggatgagaagttcctgacagacctgtttgcccagctgacagatgaggccacagatgaggagaagaggcaggagctggtgaacttcctgaaggagttctgtgccttcagccagaccctgcagccccagaacagagatgccttcttcaagaccctgagcaacatgggcatcctgcctgccctggaggtgatcctgggcatggatgacacccaggtgcgctctgctgccacagacatcttctcctacctggtggagtacaaccccagcatggtgcgggagtttgtgatgcaggaggcccagcagaatgatgatgtgtccaagaagctgacagagcagaagatcaccagcaaggacatcctgctgatcaacctgatcatcgagcacatgatctgtgacacagatcctgagctgggcggcgctgtgcagctgatgggcctgctgcggaccctggtggaccctgagaacatgctggccacagccaacaagacagagaagacagagttcctgggcttcttctacaagcactgcatgcacgtgctgacagcccccctgctggccaacaccacagaggacaagcccagcaaggatgacttccagacagcccagctgctggccctggtgctggagctgctgaccttctgtgtggagcaccacacctaccacatcaagaactacatcatcaacaaggacatcctgcggcgggtgctggtgctgatggccagcaagcacgccttcctggccctgtgtgccctgcgcttcaagaggaagatcatcggcctgaaggatgagttctacaaccgctacatcatgaagagcttcctgtttgagcctgtggtgaaggccttcctgaacaacggcagccgctacaacctgatgaacagcgccatcatcgagatgtttgagttcatccgggtggaggacatcaagagcctgacagcccacgtgattgagaactactggaaggccctggaggatgtggactatgtgcagaccttcaagggcctgaagctgcgctttgagcagcagcgggagcggcaggacaaccccaagctggacagcatgaggagcatcctgaggaaccaccgctacagaagagatgcccggaccctggaggatgaggaggagatgtggttcaacacagatgaagatgacatggaggatggagaggccgtggtgagccccagcgacaagaccaagaatgatgatgacatcatggaccccatcagcaagttcatggagaggaagaagctgaaggagagcgaggagaaggaggtgctgctgaagaccaacctgagcggccggcagagccccagcttcaagctgagcctgagcagcggcaccaagaccaacctgaccagccagagcagcaccaccaacctgcccggcagccctggcagccctggcagccctggcagccctggcagccctggctctgtgcccaagaacaccagccagacagctgccatcaccaccaagggcggcctggtgggcctggtggactacccagatgatgatgaagatgatgatgaagatgaggacaaggaggacaccctgcccctgagcaagaaggccaagtttgacagctag

SEQ ID NO: 22643 - DNA, 3987 bp, synthetic construct
  source 1..3987: mol_type = other DNA; note = Synthetic coding sequence
atgtggaggaggaagcaccccaggaccagcggcggcacccggggcgtgctgagcggcaacagaggagtggagtatggcagcggccggggccacctgggcacctttgagggccgctggaggaagctgcccaagatgcctgaggccgtgggcacagaccccagcaccagcaggaagatggccgagctggaggaggtgaccctggatggcaagcccctgcaggccctgcgggtgacagacctgaaggccgccctggagcagaggggcctggccaagagcggccagaagagcgccctggtgaagaggctgaagggggccctgatgctggagaacctgcagaagcacagcacccctcatgctgccttccagcccaacagccagattggagaggagatgagccagaacagcttcatcaagcagtacctggagaagcagcaggagctgctgcggcagaggctggagcgggaggcccgggaggccgctgagctggaggaggccagcgctgagagtgaagatgagatgatccaccctgagggcgtggccagcctgctgcccccagacttccagagcagcctggagaggcctgagctggagctgagccgccacagccccaggaagagcagcagcatcagcgaggagaagggggacagtgatgatgagaagcccaggaaaggagagcggcgcagcagccgggtgcggcaggcccgggccgccaagctgtctgagggcagccagcctgctgaggaggaggaggaccaggagacccccagcaggaacctgcgggtgcgggctgacaggaacctgaagacagaggaggaggaggaggaggaggaggaggaggaggaggatgatgaggaggaggagggagatgatgagggccagaagagccgggaggcccccatcctgaaggagttcaaggaggagggggaggagatcccccgggtgaagccagaggagatgatggatgagcggcccaagaccaggagccaggagcaggaggtgctggagcggggcggccgcttcaccaggagccaggaggaggccaggaagagccacctggcccggcagcagcaggagaaggagatgaagaccaccagccccctggaggaggaggagcgggagatcaagagcagccagggcctgaaggagaagagcaagagccccagccccccccggctgacagaggacaggaagaaggccagcctggtggccctgcctgagcagacagccagcgaggaggagaccccaccacccctgctgaccaaggaggccagcagccccccaccccacccccagctgcacagcgaggaggagattgagcccatggagggccctgccccagctgtgctgatccagctgagcccccccaacacagatgctgacacccgggagctgctggtgtcccagcacacagtgcagctggtgggcggcctgagccccctgagcagccccagcgacaccaaggccgagagccctgctgagaaggtgcctgaggagagcgtgctgcccctggtgcagaagagcaccctggccgactacagcgcccagaaggacctggagcctgagagtgacagaagtgcccagcccctgcccctgaagattgaggagctggccctggccaagggcatcacagaagaatgtctgaagcagcccagcctggagcagaaggagggccggcgggccagccacaccctgctgcccagccaccggctgaagcagagcgctgacagcagcagcagccgcagcagcagcagcagcagcagcagcagccgcagccgcagccgcagcccagacagcagcggcagccgcagccacagccccctgcggagcaagcagagagatgtggcccaggcccggacccacgccaacccccggggccggcccaagatgggcagccgcagcaccagcgagagccgcagccgcagccgcagccgcagccgcagcgccagcagcaacagcaggaagagcctgagccctggggtgtcccgggacagcagcaccagctacacagagaccaaggaccccagcagcggccaggaggtggccaccccacctgtgccccagctgcaggtgtgtgagcccaaggagaggaccagcaccagcagcagctctgtgcaggcccggcggctgagccagcctgagagcgctgagaagcacgtgacccagaggctgcagcctgagcggggcagccccaagaagtgtgaggccgaggaggccgagcccccagctgccacccagccccagaccagcgagacccagaccagccacctgcctgagagcgagcgcatccaccacacagtggaggagaaggaggaggtgaccatggacaccagcgagaacagaccagaaaatgatgtgcctgagccccccatgcccatcgctgaccaggtgtccaatgatgacaggcctgagggctctgtggaggatgaggagaagaaggagagcagcctgcccaagagcttcaagaggaagatctctgtggtgtccaccaagggcgtgcctgctggcaacagcgacacagaaggaggccagcccggcaggaagaggcgctggggcgccagcacagccaccacccagaagaagcccagcatcagcatcaccacagagagcctgaaggaggccgtggtggacctgcatgctgatgacagccgcatcagtgaagatgaaacagaaagaaatggagatgatggcacccatgacaagggcctgaagatctgcaggacagtgacccaggtggtgcctgctgagggccaggagaatggccagcgggaggaggaggaggaggagaaggagcctgaggccgagccccctgtgcccccccaggtgtctgtggaggtggccctgcccccacctgctgagcacgaggtgaagaaggtgaccctgggggacaccctgacccggcgcagcatcagccagcagaagagcggcgtgtccatcaccattgatgatcctgtgaggacagcccaggtgcccagccccccccggggcaagatcagcaacatcgtgcacatcagcaacctggtgcggcccttcaccctgggccagctgaaggagctgctgggccgcacaggcaccctggtggaggaggccttctggattgacaagatcaagagccactgctttgtgacctacagcacagtggaggaggccgtggccaccaggacagccctgcatggagtgaagtggccccagagcaaccccaagttcctgtgtgccgactatgcagagcaggatgagctggactaccaccggggcctgctggtggaccggcccagcgagaccaagacagaggagcagggcatcccccggcccctgcaccccccacctcctcctcctgtgcagcccccccagcaccccagggctgagcagcgggagcaggagagagctgtgcgggagcagtgggccgagcgggagcgggagatggagcggcgggagaggaccaggtctgagcgggagtgggaccgggacaaggtgcgggagggccccaggagccgcagccgcagccgggacagaagaaggaaggagcgggccaagagcaaggagaagaagtctgagaagaaggagaaggcccaggaggagcccccagccaagctgctggatgacctcttcaggaagaccaaggccgccccctgcatctactggctgcccctgacagacagccagatcgtgcagaaggaggccgagagagctgagcgggccaaggagcgggagaagaggaggaaggagcaggaggaggaggagcagaaggagcgggagaaggaggccgagcgggagaggaaccggcagctggagcgggagaagagaagagagcacagccgggagcgggaccgggagcgggagcgggagcgggagcgggacagaggagaccgggaccgggaccgggagcgggaccgggagcggggccgggagcgggacagaagagacaccaagaggcacagccgcagccgcagccgcagcacccctgtgcgggacagaggaggaagaagatag

SEQ ID NO: 22644 - DNA, 1089 bp, synthetic construct; identical to SEQ ID NO: 20401
  source 1..1089: mol_type = other DNA; note = Synthetic coding sequence

SEQ ID NO: 22645 - DNA, 420 bp, synthetic construct; identical to SEQ ID NO: 21325
  source 1..420: mol_type = other DNA; note = Synthetic coding sequence

SEQ ID NO: 22646 - DNA, 2256 bp, synthetic construct
  source 1..2256: mol_type = other DNA; note = Synthetic coding sequence
atgtctgaggaggagctgaccaaggccatggagggcctgggcatggatgaaggagatggagagggcaacatcctgcccatcatgcagagcatcatgcagaacctgctgagcaaggatgtgctgtaccccagcctgaaggagatcacagagaagtacccagagtggctgcagagccaccgggagagcctgcccccagagcagtttgagaagtaccaggagcagcacagcgtgatgtgcaagatctgtgagcagtttgaagctgagacccccacagattctgagaccacccagaaggccaggtttgagatggtgctggacctgatgcagcagctgcaggacctgggccacccccccaaggagctggccggggagatgctgacctggctgttcttctgtggcagccagtgggtgtatggcccctggctgacctacgtgggctggctgcagcagaccagcttcaagatgagcagcaagggcagcagcacagatggccgcacagacctggccaacggcagcctgagcagcagccctgaggagatgtctggagctgaggagggccgggagaccagcagcggcatcgaggtggaggccagtgacctgagcctgagcctgactggagatgatggcggccccaacagaaccagcacagagagccggggcacagacacagagagcagcggggaggacaaggacagcgacagcatggaggacaccggccactacagcatcaatgatgagaacagagtgcatgacagaagtgaggaggaggaggaggaggaggaggaggaggaggaggagcagccccggcggcgggtgcagaggaagagggccaacagagaccaggacagcagtgatgatgagcgggccctggaggactgggtgagcagcgagaccagcgccctgccccggccccgctggcaggccctgcctgccctgcgggagcgggagctgggcagcagcgccaggtttgtgtatgaggcctgtggggcccgggtgtttgtgcagcgcttccggctgcagcacggcctggagggccacacaggctgtgtgaacaccctgcacttcaaccagaggggcacctggctggccagcggcagtgatgacctgaaggtggtggtgtgggactgggtgcggcggcagcctgtgctggactttgaaagtggccacaagagcaatgtgttccaggccaagttcctgcccaacagcggggacagcaccctggccatgtgtgccagagatggccaggtgcgggtggccgagctgagcgccacccagtgctgcaagaacaccaagagggtggcccagcacaagggggccagccacaagctggccctggagccagacagcccctgcaccttcctgtctgctggggaggatgctgtggtgttcaccatcgacctgcggcaggacaggcctgccagcaagctggtggtgaccaaggagaaggagaagaaggtgggcctgtacaccatctacgtgaacccagccaacacccaccagtttgctgtgggcggccgggaccagtttgtgcgcatctatgaccagaggaagattgatgaaaatgaaaacaacggggtgctgaagaagttctgcccccaccacctggtgaacagcgagagcaaggccaacatcacctgcctggtgtacagccatgatggaacagagctgctggccagctacaatgatgaggacatctacctgttcaacagcagccacagtgatggagcccagtatgtgaagcgctacaagggccacaggaacaatgccaccgtgaagggcgtgaacttctacggccccaagtcagaatttgtggtgtctggcagtgactgtggccacatcttcctgtgggagaagagcagctgccagatcatccagttcatggagggggacaagggcggcgtggtgaactgcctggagccccacccccacctgcctgtgctggccaccagcggcctggaccatgatgtgaagatctgggcccccacagctgaggccagcacagagctgaccggcctgaaggatgtgatcaagaagaacaagcgggagagagatgaggacagcctgcaccagacagacctgtttgacagccacatgctgtggttcctgatgcaccacctgcggcagaggaggcaccaccggcgctggagggagcccggggtgggcgccacagatgctgacagtgatgagagccccagcagcagtgacaccagtgatgaggaggagggccctgacagagtgcagtgcatgcccagctag

SEQ ID NO: 22647 - DNA, 1056 bp, synthetic construct; identical to SEQ ID NO: 18539
  source 1..1056: mol_type = other DNA; note = Synthetic coding sequence

SEQ ID NO: 22648 - DNA, 588 bp, synthetic construct
  source 1..588: mol_type = other DNA; note = Synthetic coding sequence
atgcccctgcccttcggcctgaagctgaagaggacccggcgctacacagtgagcagcaagagctgcctggtggcccgcatccagctgctgaacaatgaatttgtggagttcaccctgtctgtggagagcacaggccaggagagcctggaggccgtggcccagaggctggagctgcgggaggtgacctacttcagcctgtggtactacaacaagcagaaccagaggcgctgggtggacctggagaagcccctgaagaagcagctggacaagtatgccctggagcccaccgtgtactttggagtggtgttctacgtgcccagcgtgtcccagctgcagcaggagatcacccgctaccagtactacctgcagctgaagaaggacatcctggagggcagcatcccctgcaccctggagcaggccatccagctggccggcctggccgtgcaggccgactttggagactttgaccagtatgagagccaggacttcctgcagaagtttgccctcttccctgtgggctggctgcaggatgagaaggtgctggaggaggccacccagaaggtggccctgctgcaccagaagtactag

SEQ ID NO: 22649 - DNA, 354 bp, synthetic construct
  source 1..354: mol_type = other DNA; note = Synthetic coding sequence
atgggagacaagaagagccccacccggcccaagaggcagcccaagcccagcagtgatgagggctactgggactgcagcgtgtgcaccttcagaaattctgctgaggccttcaagtgcatgatgtgtgatgtgaggaagggcaccagcacccgggacagcaaggagggcggcaagctggtgtcctacagcacagccagcctgggcgtgcggggcaccctgaggaacagagtgggcggcggcagcagcgaggagaagaagcaggccgagtacctggcccctggaagaagaagaaatattgtgcacagaggagtgggccctggccagaggagcggccccagcctgaaggaggcctag

SEQ ID NO: 22650 - DNA, 3285 bp, synthetic construct; identical to SEQ ID NO: 18609
  source 1..3285: mol_type = other DNA; note = Synthetic coding sequence

SEQ ID NO: 22651 - DNA, 1353 bp, synthetic construct
  source 1..1353: mol_type = other DNA; note = Synthetic coding sequence
atgagggagatcgtgcacatccaggccggccagtgtggcaaccagatcggggccaagttctgggaggtgatcagtgatgagcacggcatcgaccccagcggcaactacgtgggggacagcgacctgcagctggagcgcatctctgtgtactacaatgaggccagcagccacaagtatgtgccccgggccatcctggtggacctggagcccggcaccatggattctgtgcgcagcggggccttcggccacctgttccggccagacaacttcatcttcggccagagcggggccggcaacaactgggccaagggccactacacagaaggagctgagctggtggacagcgtgctggatgtggtgaggaaagaatgtgagaactgtgactgcctgcagggcttccagctgacccacagcctgggcggcggcactggaagtggcatgggcaccctgctgatcagcaaggtgcgggaggagtacccagaccgcatcatgaacaccttctctgtggtgcccagccccaaggtgtctgacacagtggtggagccctacaatgccaccctgagcatccaccagctggtggagaacacagatgagacctactgcatcgacaatgaggccctgtatgacatctgcttccgcaccctgaagctggccacccccacctacggggacctgaaccacctggtgtctgccaccatgtctggagtgaccaccagcctgcgcttccctggccagctgaatgctgacctgaggaagctggccgtgaacatggtgcccttcccccggctgcacttcttcatgcctggctttgcccccctgacagcccggggcagccagcagtaccgggccctgactgtgcctgagctgacccagcagatgtttgatgccaagaacatgatggccgcctgtgaccccaggcatggccgctacctgactgtggccaccgtcttccggggccgcatgtccatgaaggaggtggatgagcagatgctggccatccagagcaagaacagcagctactttgtggagtggatccccaacaacgtgaaggtggccgtgtgtgacatccccccccggggcctgaagatgagcagcaccttcatcggcaacagcacagccatccaggagctgttcaagaggatcagcgagcagttcaccgccatgttccggaggaaggccttcctgcactggtacacaggagagggcatggatgagatggagttcacagaagctgagagcaacatgaatgacctggtgtctgagtaccagcagtaccaggatgccacagctgaggaggagggggagatgtatgaagatgatgaggaggagagcgaggcccagggccccaagtag

SEQ ID NO: 22652 - DNA, 240 bp, synthetic construct
  source 1..240: mol_type = other DNA; note = Synthetic coding sequence
atgaatgaaagcaagccaggggacagccagaacctggcctgtgtgttctgcaggaagcatgatgactgccccaacaagtatggagagaagaagaccaaggagaagtggaacctgactgtgcactactactgcctgctgatgagcagcggcatctggcagaggggcaaggaggaggagggcgtgtatggcttcctgattgaggacatcaggaaggaggtgaacagagccagcaagctgtag

SEQ ID NO: 22653 - DNA, 1785 bp, synthetic construct; identical to SEQ ID NO: 21127
  source 1..1785: mol_type = other DNA; note = Synthetic coding sequence

SEQ ID NO: 22654 - DNA, 540 bp, synthetic construct
  source 1..540: mol_type = other DNA; note = Synthetic coding sequence
atggccgagagcagcagcgagagtgaccacttccgctgccgggaccggctgagcccctgggccgcccggagcacccaccggggcaccaggagcctgcccaccgtggaggtgacagagaaggtgaacaccatcaccagcaccctgcaggacaccagcaggaacctgcggcaggtggaccagatgctgggccgctaccgggagtacagcaatggccaggccggggccatcgagcacctgaaggagagcctggagcagagcattgaccagctgcggagccagaggctgctgagaaattctgggggccgcagcatctctgtgaccagcctgagcgccagtgacctggatggcggcaccggcagcgagctgcaccacttcccccccaccagccccctgaaggactatggagacccccagggcatcaagaggatgaggagcaggactggagtgcgctttgtgcaggagacagatgacatgacccagctgcacggcttccaccagagcctgcgggacctgagcagcgagcagatccggctgggctag

SEQ ID NO: 22655 - DNA, 1056 bp, synthetic construct; identical to SEQ ID NO: 18539
  source 1..1056: mol_type = other DNA; note = Synthetic coding sequence

SEQ ID NO: 22656 - DNA, 330 bp, synthetic construct
  source 1..330: mol_type = other DNA; note = Synthetic coding sequence
atggagacagactgcaaccccatggagctgagctccatgagcggctttgaggagggcagcgagctgaatggatttgagggcacagacatgaaggacatgaggctggaggccgaggccgtggtgaatgatgtgctgtttgctgtgaacaacatgtttgtgtccaagagcctgcgctgtgctgatgatgtggcctacatcaacgtggagaccaaggagaggaaccgctactgcctggagctgacagaagctggcctgaaggtggtgggctacgcctttgaccaggtggatgaccacctgcagaccccctaccacgagaccgtgtacagctag

SEQ ID NO: 22657 - DNA, 387 bp, synthetic construct
  source 1..387: mol_type = other DNA; note = Synthetic coding sequence
atggccgagagcagcagcgagagtgaccacttccgctgccgggaccggctgagcccctgggccgcccggagcacccaccggggcaccaggagcctgcccaccgtggaggtgacagagaaggtgaacaccatcaccagcaccctgcaggacaccagcaggaacctgcggcaggtggaccagatgctgggccgctaccgggagtacagcaatggccaggccggggccatcgagcacctgaaggagagcctggagcagagcattgaccagctgcggagccagaggctgctgagaaattctgggggccgcagcatctctgtgaccagcctgagcgccagtgacctggatggcggcaccggcagcgagctgcaccacttcccccccacctag

SEQ ID NO: 22658 - DNA, 369 bp, synthetic construct; identical to SEQ ID NO: 19201
  source 1..369: mol_type = other DNA; note = Synthetic coding sequence

SEQ ID NO: 22659 - DNA, 420 bp, synthetic construct; identical to SEQ ID NO: 21325
  source 1..420: mol_type = other DNA; note = Synthetic coding sequence

SEQ ID NO: 22660 - DNA, 4602 bp, synthetic construct
  source 1..4602: mol_type = other DNA; note = Synthetic coding sequence
atgcctgtgaagaggctgcgggaggtggtgtcccagaaccacggggaccacctggtgctgctgaaggatgagctgccctgtgtgcccccagccctgagcgccaacaagaggctgcctgtgggcaccggcaccagcctgaatggcaccagccggggcagcagtgacctgaccagcgccaggaactgctaccagcccctgctggagaaccccatggtgtctgagagtgacttcagcaaggatgtggccgtgcaggtgctgcccctggacaagattgaggagaacaacaagcagaaggccaatgacatcttcatcagccagtacaccatgggccagaaggatgccctgaggacagtgctgaagcagaaggcccagagcatgcctgtgttcaaggaggtgaaggtgcacctgctggaggatgctggcatcgagaaggatgctgtgacccaggagacccgcatcagccccagcggcatcgacagcgccaccaccgtggccgccgccacagctgctgccatcgccacagctgcccccctcatcaaggtgcagagcgacctggaggccaaggtgaacagcgtgacagagctgctgagcaagctgcaggagacagacaagcacctgcagagggtgacagagcagcagaccagcatccagaggaagcaggagaagctgcactgccacgaccacgagaagcagatgaatgtgttcatggagcagcacatccgccacctggagaagctgcagcagcagcagattgacatccagacccacttcatctctgctgccctgaagaccagcagcttccagcctgtgtccatgcccagcagcagagctgtggagaagtacagcgtgaagccagagcaccccaacctgggcagctgcaaccccagcctgtacaacacctttgccagcaagcaggcccccctgaaggaggtggaggacaccagctttgacaagcagaagagccccctggagaccccagcccccaggagatttgcccctgtgcctgtgtccagagatgatgagctgagcaagcgggagaacctgctggaggagaaggagaacatggaggtgtcctgccacagaggaaatgtgcggctgctggagcagatcctgaacaacaatgacagcctgaccaggaagtctgagagcagcaacaccaccagcctgaccaggagcaagattggctggaccccagagaagaccaaccgcttccccagctgtgaggagctggagaccaccaaggtgaccatgcagaagagtgatgatgtgctgcatgacctgggccagaaggagaaggagaccaacagcatggtgcagcccaaggagagcctgtccatgctgaagctgcctgacctgccccagaacagcgtgaagctgcagaccaccaacaccaccaggtctgtgctgaaggatgctgagaagatcctgcggggcgtgcagaacaacaagaaggtgctggaggagaacctggaggccatcatccgggccaaggatggagctgccatgtacagcctcatcaatgccctgagcaccaaccgggagatgtctgagaagatccgcatcaggaagacagtggatgagtggatcaagaccatctctgctgagatccaggatgagctgagcaggacagattatgagcagaagagatttgaccagaagaaccagaggaccaagaagggccagaacatgaccaaggacatccgcaccaacacccaggacaagacagtgaacaagagcgtcatccccaggaagcacagccagaagcagatcgaggagcacttcaggaacctgcccatgaggggcatgcctgccagcagcctgcagaaggagaggaaggagggcctgctgaaggccaccaccgtcatccaggatgaggactacatgctgcaggtgtatggcaagcctgtgtaccagggccacaggagcaccctgaagaagggcccctacctgcgcttcaacagccccagccccaagagccggccccagaggcccaaggtgattgagcgggtgaagggcaccaaggtgaagagcatccgcacccagacagacttctacgccaccaagcccaagaagatggacagcaagatgaagcacagcgtgcctgtgctgccccatggagaccagcagtacctgttcagccccagccgggagatgcccaccttcagcggcaccctggagggccacctgatccccatggccatcctgctgggccagacccagagcaacagcgacaccatgcctcctgctggggtcatcgtgtccaagccccaccctgtgacagtgaccaccagcatcccccccagcagcaggaaggtggagaccggggtgaagaagcccaacatcgccatcgtggagatgaagtctgagaagaaggaccccccccagctgactgtgcaggtgctgcccagcgtggacatcgacagcatcagcaacagcagcgcagatgtgctgagccccctgagcagccccaaggaggccagcctgccccctgtgcagacctggatcaagaccccagagatcatgaaggtggatgaggaggaggtgaagtttcctggcaccaactttgatgagatcattgatgtgatccaggaggaggagaagtgtgatgagatcccagacagcgagcccatcctggagttcaacagatctgtgaaggctgacagcaccaagtacaacggcccccccttcccccctgtggccagcaccttccagcccacagctgacatcctggacaaggtgattgaaaggaaggagaccctggagaacagcctcatccagtgggtggagcaggagatcatgagccgcatcatcagcggcctcttccctgtgcagcagcagatcgcccccagcatctctgtgtctgtgtctgagaccagcgagcccctgaccagtgacatcgtggagggcaccagcagcggggccctgcagctgtttgtggatgctggggtgcctgtgaacagcaatgtcatcaagcactttgtgaatgaggccctggccgagaccatcgctgtgatgctgggggaccgggaggccaagaagcagggccctgtggccactggagtgtctggagatgccagcaccaatgagacctacctgcctgcccgggtgtgcacccccctgcccaccccccagcccaccccaccctgcagccccagcagccctgccaaggaatgtgtgctggtgaagaccccagacagcagcccctgtgacagcgaccatgacatggccttccctgtgaaggagatctgtgccgagaagggagatgacatgcctgccatcatgctggtgaacacccccaccgtgacccccaccaccaccccacctcctgctgctgctgtgttcacccccaccctgagtgacatcagcattgacaagctgaaggtgagcagccctgagctgcccaagccctggggagatggagacctgcccctggaggaggagaaccccaacagcccccaggaggagctgcacccccgggccatcgtgatgtctgtggccaaggatgaggagcctgagagcatggacttccctgcccagcccccacctcctgagcctgtgcccttcatgcccttccctgctggcaccaaggcccccagccccagccagatgcctggcagtgacagcagcaccctggagagcaccctgtctgtgacagtgacagaaacagagaccctggacaagcccatcagcgagggggagatcctcttcagctgtggccagaagctggcccccaagatcctggaggacatcggcctgtacctgaccaacctgaatgacagcctgagcagcaccctgcatgatgctgtggagatggaggatgatcctccttctgagggccaggtgatccgcatgagccacaagaagttccacgcagatgccatcctgagctttgccaagcagaaccaggagagcgctgtgtcccagcaggccgtgtaccacagcgaggacctggagaacagcgtgggggagctgtctgagggccagaggccccagctgacagctgctgctgagaacatcctgatgggccacagcctgtacatgcagccccctgtgaccaacacccagagcctggaccagcagtgtgaccccaagcccctgagccggcagtttgacacagtgtctggcagcatctatgaggacagctgtgccagccacggccccatgagcctgggggagctggagctggagcccaacagcaagctggtgctgcccaccaccctgctgacagcccaggagaatgatgtgaacctgcctgtggccgctgaggacttcagccagtaccagctgaagcagaaccaggatgtgaagcaggtggagcacaagcccagccagagctacctgcgggtgaggaacaagagtgacatcgcccccagccagcagcaggtgtcccctggggacatggacaggacccagatcgagctgaacccctacctgacctgtgtgttttctgggggcaaggctgtgcccctgagcgccagccagatgcccccagccaagatgtctgtgatgctgcccagcgtgaacctggaggactgcagccagagcctgagcctgagcaccatgcaggaggacatggagagcagcggggctgacaccttctag

SEQ ID NO: 22661 - DNA, 2334 bp, synthetic construct
  source 1..2334: mol_type = other DNA; note = Synthetic coding sequence
atgtctgcccagaccagccctgctgagaagggcctgaaccctggcctgatgtgccaggagagctatgcctgcagcggcacagatgaggccatctttgaatgtgatgagtgctgcagcctgcagtgcctgcgctgtgaggaggagctgcaccggcaggagcggctgaggaaccacgagcgcatccggctgaagccaggccacgtgccctactgtgacctgtgcaagggcctgagcggccacctgcccggggtgcggcagagggccatcgtgcgctgccagacctgcaagatcaacctgtgcctggagtgccagaagaggacccacagcggcggcaacaagaggaggcaccctgtgacagtgtacaacgtgagcaacctgcaggagagcctggaggccgaggagatggatgaggagaccaagaggaagaagatgacagagaaggtggtgtccttcctgctggtggatgaaaatgaggagatccaggtgaccaatgaggaggacttcatcaggaagctggactgcaagccagaccagcacctgaaggtggtgtccatcttcggcaacacaggagatggcaagagccacaccctgaaccacaccttcttctacggccgggaggtgttcaagaccagccccacccaggagagctgcaccgtgggcgtgtgggccgcctatgaccctgtgcacaaggtggccgtcatcgacacagagggcctgctgggcgccaccgtgaacctgagccagaggacccggctgctgctgaaggtgctggccatcagtgacctggtgatctaccgcacccatgctgaccggctgcacaatgacctcttcaagttcctgggagatgccagcgaggcctacctgaagcacttcaccaaggagctgaaggccaccacagcccgctgtggcctggatgtgcccctgagcaccctgggccctgctgtgatcatcttccatgaaacagtgcacacccagctgctgggcagtgaccaccccagcgaggtgcctgagaagctgatccaggaccgcttcaggaagctgggccgcttccctgaggccttcagcagcatccactacaagggcaccaggacctacaaccccccaacagacttcagcggcctgcggcgggccctggagcagctgctggagaacaacaccaccaggagccccaggcaccctggggtcatcttcaaggccctgaaggccctgagtgaccgcttcagcggggagatcccagatgaccagatggcccacagcagcttcttcccagatgagtacttcacctgcagcagcctgtgcctgagctgtggggtgggctgcaagaagtccatgaaccacggcaaggagggcgtgccccatgaggccaagagccgctgccgctacagccaccagtatgacaacagagtgtacacctgcaaggcctgctatgaaagaggagaggaggtgtctgtggtgcccaagaccagcgccagcacagacagcccctggatgggcctggccaagtatgcctggagcggctacgtgattgagtgccccaactgtggggtggtgtaccgcagccggcagtactggtttggaaaccaggaccctgtggacacagtggtgaggacagaaattgtgcacgtgtggccaggcacagatggcttcctgaaggacaacaacaatgctgcccagaggctgctggatggcatgaacttcatggcccagagcgtgtctgagctgagcctgggccccaccaaggctgtgacctcctggctgacagaccagatcgccccagcctactggaggcccaacagccagatcctgagctgcaacaagtgtgccaccagcttcaaggacaatgacaccaagcaccactgccgggcctgtggggagggcttctgtgacagctgcagcagcaagaccaggcctgtgcctgagcggggctggggccctgcccctgtgcgggtgtgtgacaactgctatgaggccagaaatgtgcagctggccgtgacagaggcccaggtggatgatgaaggaggcaccctgattgccaggaaggtgggggaggccgtgcagaacaccctgggcgctgtggtgacagccatcgacatccccctgggcctggtgaaggatgctgcccggcctgcctactgggtgcctgaccacgagatcctgcactgccacaactgcaggaaggagttcagcatcaagctgagcaagcaccactgccgggcctgtggccagggcttctgtgatgaatgttctcatgaccggcgggctgtgcccagccggggctgggaccaccctgtgcgggtgtgcttcaactgcaacaagaagccaggggacctgtag

SEQ ID NO: 22662 - DNA, 867 bp, synthetic construct
  source 1..867: mol_type = other DNA; note = Synthetic coding sequence
atggagaagctgagcgccctgcaggagcagaagggggagctgaggaagaggctgagctacaccacccacaagctggagaagctggagacagaatttgacagcaccaggcactacctggagattgagctgcggcgggcccaggaggagctggagaaggtgacagagaagctgcggcgcatccagagcaactacatggccctgcagaggatcaaccaggagctggaggacaagctgtacaggatgggccagcactatgaggaggagaagagggccctgagccatgagatcgtggccctgaacagccacctgctggaggccaaggtgaccatcgacaagctgtctgaagataatgagctgtacaggaaggactgcaacctggccgcccagctgctgcagtgcagccagacctacggccgggtgcacaaggtgtctgagctgcccagcgacttccaggagcgggtgtccctgcacatggagaagcacggctgcagcctgcccagccccctgtgccacccagcctatgctgacagcgtgcccacctgtgtgattgccaaggtgctggagaagccagaccctgccagcctgagcagccggctgagtgatgccagcgcccgggacctggccttctgtgatggagtggagaagccaggcccccggcccccctacaagggggacatctactgcagcgacacagccctgtactgcccagaggagcggcggcgggacagaagacccagcgtggatgcccctgtgacagatgtgggcttcctgcgggcccagaacagcacagattctgctgctgaggaggaggaggaggccgaggccgccgccttccctgctggcttccagcacgaggccttcccctag

SEQ ID NO: 22663 - DNA, 1263 bp, synthetic construct
  source 1..1263: mol_type = other DNA; note = Synthetic coding sequence
tgaacccaggccatggccctggagacccccaccccaggccccccccgggagggccagagccctgccagccaggccggcacccagcaccccccagcccaggccacagcccacagccagagcagccctgagttcaagggcagcctggccagcctgagtgacagcctgggcgtgtctgtgatggccacagaccaggacagctacagcaccagcagcacagaggaggagctggagcagttcagcagccccagcgtgaagaagaagcccagcatgatcctgggcaaggcccggcaccggctgagctttgccagcttcagctccatgtttcatgccttcctgagcaacaacaggaagctgtacaagaaggtggtggagctggcccaggacaagggcagctacttcggcagcctggtgcaggactacaaggtgtacagcctggagatgatggcccggcagaccagcagcacagagatgctgcaggagatccgcaccatgatgacccagctgaagagctacctgctgcagagcacagagctgaaggccctggtggaccctgccctgcacagcgaggaggagctggaggccatcgtggagagcgccctgtacaagtgtgtgctgaagcccctgaaggaggccatcaacagctgcctgcaccagatccacagcaaggatggcagcctgcagcagctgaaggagaaccagctggtgatcctggccaccaccaccacagacctgggcgtgaccacctctgtgcctgaggtgcccatgatggagaagatcctgcagaagttcacctccatgcacaaggcctacagccctgagaagaagatcagcatcctgctgaagacctgcaagctgatctatgacagcatggccctgggcaaccctgggaagccctatggagcagatgacttcctgcctgtgctgatgtatgtgctggcccggagcaacctgacagagatgctgctgaatgtggagtacatgatggagctgatggaccctgccctgcagctgggggagggcagctactacctgaccaccacctacggggccctggagcacatcaagagctatgacaagatcaccgtgacccggcagctgtctgtggaggtgcaggacagcatccaccgctgggagaggaggaggaccctgaacaaggcccgggccagccgcagctctgtgcaggtgcggcctgagagcggccggggccctgtgggcccctgccccaggcaccacccctgctgcctgctggccaaggagccctag

SEQ ID NO: 22664 - DNA, 2466 bp, synthetic construct
  source 1..2466: mol_type = other DNA; note = Synthetic coding sequence
atggccggcagtgatgctgagtgggtgaccatcgccaacaacctgctcttcaagtgccacatccacctgcgcatccacgagctgcaggactgtgatgccaacgtgttcatcgccctgtaccagagcatcctgggggagaaggtgcctgacctgattgtcatccccaggagccaggaggatgatgcccacaacgtgcaggccgtgattgacagcctggccctggactacctgcaggtgtccctgagccacatcactggagaaaatattgtgaagggggacaaggagagcatcaagaacctgctggagatctttgatggcctgctggagtacctgacagagcgcatcagcgagaccagccatgagaagtcagaaacagagcagtacttcaaggagagtgacagaggagagcggctggaggagcctgagagcaccaaggagagcaagagctcctggaagagggtgtcctttggccgctgcagcctgagcagcgagatgctgggccccagctgggatggagatgaagctgagagcactggagagatcatccggctgggggacacagcccacaccttcagcctgcggagcaatggagcccagtgccccaatgagatgctgagcaagaaggccctggccagccccagcagcaagagccatgaggacatgctgtacccacccagcgtgctgagcaagagcaggaccagctttgtggaggacacagagaccctgtctgtgtctggcatccccaatgccaggaagctgggggagcccatccgggccgccatccccctgcaccccccctaccaccccagcgagccccgggccccctgccccatcggcaaggagtacctgcacagcagccactgcagccctgctgtgaacagcactggagagcacacagagttcagcggggacctggatgatggcctcttcctgatcagcaagctgcccaagggcagcaagtgggaggtgtacccagcccaggtgcagggccccaggaccaggaagccacccaagggcaagagaaatgaaaatagagccacagccagcagctgcaacagccccttcccccagaggcccaggaagaggctgacagagcaggagctgcatgatgtgtctgagaagctgagccagaggctgtctgagctggactggatgctgaagagcgccctgggggaccgcatcaaggagaagacagaccacaaggaggagaacacaggaaatgaggaggtggaggatggaacagaggagaccctgagccagcacagtgatggcatcgtggagtatggccccaagaagagcaggcctggcctgtccatgaggaggaagccaccctaccgcagccacagcctgagccccagccctgtgaacaagcacaagcagttccacctggagaggaagaggcagaggaagccccgggagacagatgtgcggcagttccaggcccaggccttcacagaggcctttgagcgggagctgcggcggcacaaggtgcaggagaacatcggccccctgcgcatccacgagaaggaggaggagacagagaagatctacagaggagaggccgtgaggaagggcaccccagagtgcagccagccctggaagatctacagcaggaagaccaccacccagagcctgcggggcggcctgcccaagcccaacaaggctgtgcccatgaaggtgtctgagcacagcctgctgcccctgatgctggagcagttccccttcctgtatgtgtctggccccaccctgagcaagatgtggaagcagcagatcgcccaggtggagcagctgaagaaggaggcctgccgggagaacagaagcaagaagaagctgcaggatgaaattgaggaggccctgcggagacatgacctgctgaccaccctggtgaagaaggagtatgagcacaacaagaggctgcaggacttcaaggactgcatccggcggcagaggctgacccagagcaagatcaaggagaaccggcagcagatcgtgcgggccaggaagtactatgatgactacagagtgcagctgtgtgccaagatgatgaggatgaggacccgggaggagatgatcttcaagaagctgtttgaggagggcctgaacatccagaagcagaggctgcgggacctgagaaattatgccaaggagaagagagatgagcagaggagaagacaccaggatgagctggacagcatggagaactactacaaggaccagttcagcctgctggccgaggccatcagccaggagcaccaggagctgaaggcccgggagaagagccaggcccagaccctgcacaaggtgaagcgggagctgcggagcaagatggagaaggagatccagcagctgcaggacatgatcacccagaatgatgatgatgtgttcttccgggagctggaggccgagcgcttccgcagccggctgcagctggccagcttccagtacagcaagagccccagcctgtag

SEQ ID NO: 22665 - DNA, 4560 bp, synthetic construct
  source 1..4560: mol_type = other DNA; note = Synthetic coding sequence
atgaggatcccagaccagaagtatgtgaccctgaagctgaatgatgtgatccgcttcggctatgacagcaacatgtatgtgctggagcgggtgcagcaccgggtgcctgaggaggccctgaagcatgagaagtacaccagccagctgcaggtgtctgtgaagggcctggcccccaagaggtctgaggccctgcctgagcacaccccctactgtgaggccagcaaccccaggcctgagaagggggacagaagacctggaacagaagctgccagctaccgcacccccctgtatggccagcccagctggtggggagaagatgatggcagcaccctgcctgatgcccagaggcagggcgagccctacccagagcggcccaagggccctgtgcagcaggatggagagctgcacggcttccgggccccagctgagccccagggctgcagcttccggcgggagcccagctactttgagatccccaccaaggagaccccccagcccagccagcccccagaggtgcctgcccacgagatgcccaccaaggatgctgaggccggcggcggcggggccgcccctgtggtgcagagccacgccagcttcaccattgaatttgatgactgcagccctgggaagatgaagatcaaggaccacatcaccaagttcagcctgcggcagaggaggcctcctgggaaggaggccaccccaggagagatggtgtctgctgagaccaaggtggccgactggctggtgcagaatgaccccagcctgctgcaccgggtgggccctggagatgacagacacagcaccaagagtgacctgcctgtgcacaccaggaccctgaagggccacaagcatgaagatggcacccagagcgacagcgaggaccccctggccaaggccgccagcgctgctggggtgcccctggaggccagcggggagcaggtgcggctgcagaggcagatcaagagggacccccaggagctgctgcacaaccagcaggccttcgtcatcgagttctttgatgaggacacccccaggaagaagaggagccagagcttcacccacagccccagcggggaccccaaggctgacaagagaagaggccccaccccagctgaccgggaccggcccagcgtgcctgcccctgtgcaggccggcggccgcagcagcggcccccagagagctggcagcctgaagcgggagaagacagaggagcggctgggcagccccagccctgccagcaggaccccagcccggcccttcggctctgtgggcagaagaagccggctggcccaggacttcatggcccagtgcctgcgggagagcagccctgctgcccggcccagccctgagaaggtgccccctgtgctgcctgcccccctgacccctcatggcaccagccctgtgggcccccccaccccacctccagcccccacagacccccagctgaccaaggccaggaagcaggaggaggatgacagcctgagtgatgctggcacctacaccatcgagacagaggcccaggacacagaggtggaggaggccaggaagatgattgaccaggtgtttggagtgctggagagccctgagctgagccgggccagcagcgccaccttccggcctgtgatccggggggacagagatgaaagtgatgatggaggagtggcccagaggatggccctgctgcaggagtttgccagccggcccctgggcgccgccccccaggccgagcaccagggcctgcctgtgcccggcagccctgggggccagaagtgggtgagccgctgggccagcctggccgacagctacagcgaccccggcctgacagaagatggcctgggccggcggggcggggagcctgagggcagcctgcctgtgaggatgagaagaaggctgccccagctgcccagcgagagagctgacagccctgctggccctgagagcagcagaagaagtggccctggccccccagagctggacagcgagcagcccagccggctgtttggccaggaggagctggaccctgacagcctgagtgatgccagcggcagtgatggcggccggggccctgagcccggggtggagccccaggacagcagaagaagaagcccccaggagggccccacctggagccggggcagaagaagcccccgggcccctggagagcccaccccagccagcttcttcatcggggaccagaatggagatgctgtgctgagcaggaagcccctggccgcccctggagatggagagggcctgggccagacagcccagcccagccccccagccagagatggagtgtatgtgtctgccaatggaaggatggtgatccagctgcggcccggccgcagccctgagccagatggccctgccccagccttcctgcggcaggagagcttcaccaaggagcccgccagcggccccccagcccctgggaagccaccccacatcagcagccaccccctgctgcaggacctggccgccacccgggccgccaggatggacttccacagccaggacacccacctgatcctgaaggagacagaaacagccctggccgccctggaggcccggctgctgagcaacagcgtggatgctgaatgtgagggcggcagcaccccccggcccccagaagatgccctgagcggggacagtgatgtggacacagccagcacagtgtccctgcggagcggcaagagcggccccagccccaccaccccccagcccctgcgggcccagaaggagatgagccccagccccccagctgcccaggaccccggcggcacagccctggtgtctgcccgggagcagagcagcgagcggcagcaccaccccctgggccccacagacatgggccgcggggagcctgtgagaagaagtgccatccggcggggccaccggccccggggcagcctggactggcccagcgaggagcggggccctgtgctggcccacctgcccagcagtgatgtgatggccagcaaccacgagaccccagaggccactggagctggccgcctgggcagcaggaggaagccagctgcccccccacccagccctgctgcccgggaggagcagagccgcagcagcgccagcagccagaagggcccccaggccctgaccaggagcaacagcctgagcaccccccggcccacccgggccagccggctgcggcgggcccggctgggagatgccagtgacacagaagctgctgatggagagcggggcagcctgggcaaccctgagcctgtgggccggcctgctgctgagcaggccaagaagctgagccggctggacatcctggccatgcccaggaagagagctggcagcttcaccggcaccagtgaccctgaggccgccccagcccggaccagcttcagcggccgctctgtggagctgtgctgtgccagcaggaagcccaccatggccgaggcccgggctgtgtccaggaaggccgccaacacagccaccaccaccggcccccggcagcccttcagccgggcccggagcggcagcgcccgctacaccagcaacacccggcggcggcagcagggcagtgactacaccagcaccagcgaggaggagtatggcagcagacatggcagccccaagcacaccaggagccacaccagcacagccacccagaccccccgggccggcagcagcagccgggcccggagccgggcccctggcccccgggacacagatgatgatgaggaggagccagacccctacggcttcatcgtgcagacagctgagattgctgagatcgcccggctgagccagaccctggtgaaggatgtggccatcctggcccaggagatccatgatgtggccggagatggagacaccctgggcagcagcgagcccgcccacagcgccagcctgagcaacatgcccagcaccccagccagcaccatcagcgcccgggaggagctggtgcagagaattcctgaggccagcctgaacttccagaaggtgcccccaggcagcctgaacagccgggactttgaccagaacatgaatgacagctgtgaagatgccctggccaacaagacccggcccaggaaccgggaggaggtgatctttgacaacctgatgctgaaccctgtgtcccagctgagccaggccatcagagaaaatacagagcacctggccgagaagatgaagatcctcttccagaacacaggccgggcctgggaggacctggaggcccgcatcaatgcagaaaatgaggtgcccatcctgaagaccagcaacaaggagatcagcagcatcctgaaggagctgcggcgggtgcagaagcagctggaggtgatcaatgccatcgtggaccccagcggcagcctggacctgctgactggaaacagaagcctggccagcagcgcccagcccggcctgggcaagggccgggtggccgcccagagcccccccagccctgccagcgctgaggccctgctgcctgccctgcccctgaggaacttcccccagagggccagctgtggcccccccagcctgcctgaccccaccttcctgcctgatgctgagcgcttcctgatctag

SEQ ID NO: 22666 - DNA, 378 bp, synthetic construct; identical to SEQ ID NO: 18822
  source 1..378: mol_type = other DNA; note = Synthetic coding sequence

SEQ ID NO: 22667 - DNA, 3525 bp, synthetic construct; identical to SEQ ID NO: 19066
  source 1..3525: mol_type = other DNA; note = Synthetic coding sequence

SEQ ID NO: 22668 - DNA, 1245 bp, synthetic construct; identical to SEQ ID NO: 18541
  source 1..1245: mol_type = other DNA; note = Synthetic coding sequence

SEQ ID NO: 22669 - DNA, 2256 bp, synthetic construct; identical to SEQ ID NO: 22646
  source 1..2256: mol_type = other DNA; note = Synthetic coding sequence

SEQ ID NO: 22670 - DNA, 1056 bp, synthetic construct; identical to SEQ ID NO: 18734
  source 1..1056: mol_type = other DNA; note = Synthetic coding sequence

SEQ ID NO: 22671 - DNA, 2394 bp, synthetic construct
  source 1..2394: mol_type = other DNA; note = Synthetic coding sequence
atggctgtgcagggcagccagaggcggctgctgggcagcctgaacagcacccccacagccatcccccagctgggcctggccgccaaccagacaggagcccgctgcctggaggtgtccatcagtgatggcctcttcctgagcctgggcctggtgtccctggtggagaatgccctggtggtggccaccatcgccaagaacagaaacctgcacagccccatgtactgcttcatctgctgcctggccctgagtgacctgctggtgtctggcagcaatgtgctggagacagctgtgatcctgctgctggaggccggggccctggtggcccgggctgctgtgctgcagcagctggacaacgtgattgatgtgatcacctgcagctccatgctgagcagcctgtgcttcctgggcgccatcgctgtggaccgctacatcagcatcttctacgccctgcgctaccacagcatcgtgaccctgccccgggcccggcgggctgtggccgccatctgggtggcctctgtggtgttcagcaccctcttcatcgcctactatgaccacgtggccgtgctgctgtgcctggtggtgttcttcctggccatgctggtgctgatggctgtgctgtatgtgcacatgctggcccgggcctgccagcacgcccagggcatcgcccggctgcacaagaggcagaggcctgtgcaccagggcttcggcctgaagggagctgtgaccctgaccatcctgctgggcatcttcttcctgtgctggggccccttcttcctgcacctgaccctcatcgtgctgtgcccagagcaccccacctgtggctgcatcttcaagaacttcaacctcttcctggccctgatcatctgcaatgccatcatcgaccccctcatctatgccttccacagccaggagctgcggaggaccctgaaggaggtgctgacctgcagctgcagccaggaccgggccctggtgtcctgggatgtgaagagcctgggcggctctgtgtgccaggagctgctgccccagcagccccaggagaagggcctgtgtgaccagaaggccagcagcacagccctgcagaggctgctgcagaaggagttctgggaggtgatcagtgatgaacatggaattgaccccagcggcaactacgtgggggacagcgacctgcagctggagcgcatctctgtgtactacaatgaggccagcagccacaagtatgtgccccgggccatcctggtggacctggagcccggcaccatggacagcgtgcgcagcggggccttcggccacctgttccggccagacaacttcatcttcggccagagcggggccggcaacaactgggccaagggccactacacagagggcgctgagctggtggacagcgtgctggatgtggtgaggaaagaatgtgagaactgtgactgcctgcagggcttccagctgacccacagcctgggcggcggcaccggcagcggcatgggcaccctgctgatcagcaaggtgcgggaggagtacccagaccgcatcatgaacaccttctctgtggtgcccagccccaaggtgtctgacacagtggtggagccctacaatgccaccctgagcatccaccagctggtggagaacacagatgagacctactgcatcgacaatgaggccctgtatgacatctgcttccgcaccctgaagctggccacccccacctatggagacctgaaccacctggtgtctgccaccatgtctggagtgaccaccagcctgcgcttccctggccagctgaatgctgacctgaggaagctggccgtgaacatggtgcccttcccccggctgcacttcttcatgcctggctttgcccccctgacagcccggggcagccagcagtaccgggccctgactgtgcctgagctgacccagcagatgtttgatgccaagaacatgatggccgcctgtgaccccaggcatggccgctacctgactgtggccaccgtcttccggggccgcatgtccatgaaggaggtggatgagcagatgctggccatccagagcaagaacagcagctactttgtggagtggatccccaacaacgtgaaggtggccgtgtgtgacatccccccccggggcctgaagatgagcagcaccttcatcggcaacagcacagccatccaggagctgttcaagaggatcagcgagcagttcaccgccatgttccggaggaaggccttcctgcactggtacaccggggagggcatggatgagatggagttcacagaggccgagagcaacatgaatgacctggtgtctgagtaccagcagtaccaggatgccacagctgaggaggagggggagatgtatgaagatgatgaggaggagagcgaggcccagggccccaagtag

SEQ ID NO: 22672 - DNA, 99 bp, synthetic construct
  source 1..99: mol_type = other DNA; note = Synthetic coding sequence
atggccgagagcagcagcgagagtgaccacttccgctgccgggaccggctgagcccctgggccgcccggagcacccaccggggcaccaggagcctgtag

SEQ ID NO: 22673 - DNA, 453 bp, synthetic construct
  source 1..453: mol_type = other DNA; note = Synthetic coding sequence
atgacagacacccggcggcgggtgaaggtgtacaccctgaatgaagatcggcagtgggatgaccggggcaccggccacgtgagcagcggctacgtggagcggctgaagggcatgagcctgctggtgcgggcagagagtgatggcagcctgctgctggagagcaagatcaaccccaacacagcctaccagaagcagcaggacaccctcatcgtgtggagcgaggccgagaactatgacctggccctgtccttccaggagaaggccggctgtgatgagatctgggagaagatctgccaggtgcagggcaaggaccccagcgtggacatcacccaggacctggtggatgaaagtgaggaggagagatttgatgacatgagcagccctggcctggagctgcccagctgtgagctgagccggctggaggagattgctgagctggtggccagcagctag

SEQ ID NO: 22674 - DNA, 504 bp, synthetic construct
  source 1..504: mol_type = other DNA; note = Synthetic coding sequence
atggactggaaggaggtgctgcggcggcggctggccacccccaacacctgccccaacaagaagaagtctgagcaggagctgaaggatgaggagatggacctcttcaccaagtactacagcgagtggaagggcggcaggaagaacaccaatgagttctacaagaccatcccccgcttctactaccgcctgcctgcagaagatgaggtgctgctgcagaagctgcgggaggagagcagagctgtgttcctgcagaggaagagccgggagctgctggacaatgaggagctgcagaacctgtggttcctgctggacaagcaccagaccccacccatgattggagaggaggccatgatcaactatgagaacttcctgaaggtgggggagaaggccggggccaagtgcaagcagttcttcaccgccaaggtgtttgccaagctgctgcacacagacagctatggccgcatcagcatcatgcagttcttcaactacgtgatgaggaagtag

SEQ ID NO: 22675 - DNA, 507 bp, synthetic construct; identical to SEQ ID NO: 22630
  source 1..507: mol_type = other DNA; note = Synthetic coding sequence

SEQ ID NO: 22676 - DNA, 822 bp, synthetic construct
  source 1..822: mol_type = other DNA; note = Synthetic coding sequence
atgcctggcctgagctgccgcttctaccagcacaagtttcctgaggtggaggatgtggtgatggtgaatgtgcgcagcattgctgagatgggcgcctacgtgtccctgctggagtacaacaacatcgagggcatgatcctgctgtctgagctgagcagaagacgcatccgcagcatcaacaagctgatcagaattggaagaaatgaatgtgtggtggtgatccgggtggacaaggagaagggctacatcgacctgagcaagagaagagtgtccccagaggaggccatcaagtgtgaggacaagttcaccaagagcaagacagtgtacagcatcctgcggcacgtggccgaggtgctggagtacaccaaggatgagcagctggagagcctcttccagaggacagcctgggtgtttgatgacaagtacaagaggcctggctatggagcctatgatgccttcaagcatgctgtgtctgaccccagcatcctggacagcctggacctgaatgaagatgagcgggaggtgctgatcaacaacatcaacagaaggctgaccccccaggccgtgaagatccgggctgacatcgaggtggcctgctacggctatgagggcattgatgctgtgaaggaggccctgcgggccggcctgaactgcagcacagagaacatgcccatcaagatcaacctgattgccccacccaggtatgtgatgaccaccaccaccctggagaggacagagggcctgtctgtgctgagccaggccatggccgtcatcaaggagaagattgaggagaagaggggcgtcttcaacgtgcagatgtag

SEQ ID NO: 22677 - DNA, 2757 bp, synthetic construct
  source 1..2757: mol_type = other DNA; note = Synthetic coding sequence
tgaagaaccaacagcagatttgtgaaggtggtgctgatgtctgccaccatcagctgcaaggagtttgctgactactttgctgtgcctgtgcagaacaagatgaacccagcctacatctttgaggtggagggcaagccccacagcgtggaggagtactacctgaatgacctggagcacatccaccacagcaagctgagcccccacctgctggaggagcctgtgatcaccaaggacatctatgaggtggccgtgtccctcatccagatgtttgatgacctggacatgaaggagagcggcaacaaggcctggagcggggcccagtttgtgctggagaggagctctgtgctggtgttcctgcccggcctgggggagatcaactacatgcatgagctgctgaccagcctggtgcacaagaggctgcaggtgtaccccctgcacagctctgtggccctggaggagcagaacaacgtgttcctgagccctgtgcccggctacaggaagatcatcctgagcaccaacattgctgagagctctgtgacagtgcctgatgtgaagtatgtgattgacttctgcctgaccaggaccctggtgtgtgatgaggacaccaactaccagagcctgcggctgtcctgggccagcaagaccagctgcaaccagaggaagggccgggccggccgggtgtcccggggctactgctaccgcctggtgcacaaggacttctgggacaacagcatcccagaccacgtggtgcctgagatgctgcgctgccccctgggcagcaccatcctgaaggtgaagctgctggacatgggagagccccgggccctgctggccacagccctgagccccccaggcctgagtgacattgaaagaaccatcctgctgctgaaggaggtgggcgccctggccgtgtctggccagagagaagatgagaacccccatgatggagagctgaccttcctgggccgggtgctggcccagctgcctgtgaaccagcagctgggcaagctgattgtgctgggccacgtgtttggctgcctggatgaatgtctcatcatcgctgctgccctgagcctgaagaacttctttgccatgcccttccggcagcacctggatggctacagaaacaaggtgaacttcagcggcagcagcaagagtgactgcatcgccctggtggaggccttcaagacctggaaggcctgccggcagacaggagagctgcgctaccccaaggatgagctgaactggggccgcctgaactacatccagatcaagaggatccgggaggtggccgagctgtatgaggagctgaagacccgcatcagccagttcaacatgcacgtggacagcagaagacctgtgatggaccaggagtacatctacaagcagcgcttcatcctgcaggtggtgctggccggggccttctaccccaactacttcaccttcggccagccagatgaggagatggctgtgcgggagctggccggcaaggaccccaagaccaccgtggtgctgaagcacatccccccctacggcttcctgtactacaagcagctgcagagcctcttccggcagtgtggccaggtgaagagcatcgtgtttgatggagccaaggcctttgtggagttcagcaggaaccccacagagcgcttcaagaccctgcctgctgtgtacatggccatcaagatgagccagctgaaggtgtccctggagctgtctgtgcacagcgctgaggagattgagggcaaggtgcagggcatgaatgtgtccaagctgaggaacaccagggtgaatgtggacttccagaagcagacagtggaccccatgcaggtgtccttcaacaccagtgacaggagccagacagtgacagacctgctgctgaccattgatgtgacagaggtggtggaggtgggccacttctggggctacagaattgatgagaacaacagcgagatcctgaagaagctgacagctgagatcaaccagctgaccctggtgcccctgcccacccacccccacccagacctggtgtgcctggccccctttgctgactttgacaagcagcgctacttccgggcccaggtgctgtatgtgtctggcaacagcgctgaggtgttctttgtggactatggcaacaagagccacgtggacctgcacctgctgatggagatcccctgccagttcctggagctgcccttccaggccctggagttcaagatctgcaagatgaggcccagcgccaagagcctggtgtgtgggaagcactggagcgatggagccagccagtggtttgccagcctggtgtctggctgcaccctgctggtgaaggtgttttctgtggtgcacagcgtgctgcacgtggatgtgtaccagtacagcggcgtgcaggatgccatcaacatcagagatgtgctgatccagcagggctatgcagagctgacagaggagagctatgagagcaaggtgaacatcctgcgggccgccatcaacaagctggtgtgtgatggccccaacggctgcaagtgcctgggccctgagcgggtggcccagctgcaggacatcgcccggcagaagctgctgggcctcttctgccagagcaagccccgggagaagatcgtgcccaagtggcatgagaagccctatgagtggaaccaggtggaccccaagctggtgatggagcaggccgaccgggagagcagccggggcaagaacaccttcctgtaccagctgcacaagctggtggtgctgggcacctag

SEQ ID NO: 22678 - DNA, 507 bp, synthetic construct
  source 1..507: mol_type = other DNA; note = Synthetic coding sequence
atggagaagctgagcgccctgcaggagcagaagggggagctgaggaagaggctgagctacaccacccacaagctggagaagctggagacagaatttgacagcaccaggcactacctggagattgagctgcggcgggcccaggaggagctggagaaggtgacagagaagctgcggcgcatccagagcaactacatggccctgcagaggatcaaccaggagctggaggacaagctgtacaggatgggccagcactatgaggaggagaagagggccctgagccatgagatcgtggccctgaacagccacctgctggaggccaaggtgaccatcgacaagctgtctgaagataatgagctgtacaggaaggactgcaacctggccgcccagctgctgcagtgcagccagacctacggccgggtgcacaaggtgtctgagctgcccagcgacttccaggagcgggtgtccctgcacatggagaagcacggctgcagcctgcccagcccctag

SEQ ID NO: 22679 - DNA, 636 bp, synthetic construct
  source 1..636: mol_type = other DNA; note = Synthetic coding sequence
atggacatgggcaaccagcaccccagcatcagccggctgcaggagatccagaaggaggtgaagtctgtggagcagcaggtgattggcttcagcggcctgagtgatgacaagaactacaagaagctggagcgcatcctgaccaagcagctgtttgaaattgattctgtggacacagagggcaaaggagacatccagcaggccaggaagagagctgcccaggagacagagcggctgctgaaggagctggagcagaatgccaaccacccccaccgcatcgagatccagaacatctttgaggaggcccagagcctggtgcgggagaagatcgtgcccttctacaacggcggcaactgtgtgacagatgaatttgaggagggcatccaggacatcatcctgcggctgacccacgtgaagacaggaggcaagatcagcctgaggaaggcccgctaccacaccctgaccaagatctgtgctgtgcaggagatcatcgaggactgcatgaagaagcagcccagcctgcccctgtctgaagatgcccaccccagcgtggccaagatcaactttgtgatgtgtgaggtgaacaaggcccggggcgtgctgattgccctgctgatgggcgtgaacaacaatgaatag

SEQ ID NO: 22680 - DNA, 2985 bp, synthetic construct
  source 1..2985: mol_type = other DNA; note = Synthetic coding sequence
atgagccagtggaccccagagtacaatgagctgtacaccctgaaggtggacatgaagtctgagatccccagtgatgcccccaagacccaggagagcctgaagggcatcctgctgcaccctgagcccatcggggccgccaagagcttccctgctggggtggagatgatcaacagcaaggtgggcaatgagttcagccacctgtgtgatgacagccagaagcaggagaaggagatgaatggaaaccagcaggagcaggagaagagcctggtggtgaggaagaagaggaagagccagcaggccggccccagctatgtgcagaactgtgtgaaggagaaccagggcatcctgggcctgcggcagcacctgggcacccccagtgatgaggacaatgacagcagcttcagtgactgcctgagcagccccagcagcagcctgcactttggagacagcgacacagtgaccagtgatgaggacaaggaggtgtctgtgcgccacagccagaccatcctgaatgccaagagccgcagccacagcgcccggagccacaagtggcccaggacagaaacagaatctgtgtctggcctgctgatgaagaggccctgcctgcacggcagcagcctgcggcggctgccctgcaggaagagatttgtgaagaacaacagcagccagaggacccagaagcagaaggagcgcatcctgatgcagaggaagaagcgggaggtgctggcccggaggaaatatgccctgctgcccagcagcagcagcagcagtgaaaatgacctgagcagcgagagcagcagcagcagcagcacagaaggagaggaggacctgtttgtgtctgccagcgagaaccaccagaacaacccagctgtgcccagcggcagcattgatgaagatgtggtggtgattgaggccagcagcaccccccaggtgacagccaatgaggagatcaacgtgaccagcacagacagcgaggtggagatcgtgacagtgggggagagctaccgcagccgcagcaccctgggccacagccgcagccactggagccagggcagcagcagccacgccagccggccccaggagcccaggaacagaagccgcatcagcaccgtcatccagcccctgcggcagaatgctgctgaggtggtggacctgactgtggatgaagatgagcccaccgtggtgcccaccaccagcgccaggatggagagccaggccaccagcgccagcatcaacaacagcaaccccagcaccagcgagcaggccagtgacacagccagcgctgtgaccagcagccagcccagcacagtgtctgagaccagcgccaccctgaccagcaacagcaccaccggcaccagcattggagatgacagcaggaggaccaccagcagcgctgtgacagaaacaggccccccagccatgccccggctgcccagctgctgcccccagcacagcccctgtggcggcagcagccagaaccaccacgccctgggccacccccacaccagctgcttccagcagcacggccaccacttccagcaccaccaccaccaccaccacaccccccaccctgctgtgcctgtgagccccagcttcagtgaccctgcctgccctgtggagcggcccccccaggtgcaggccccctgtggggccaacagcagcagcggcaccagctaccacgagcagcaggccctgcctgtggacctgagcaacagcggcatccgcagccacggcagcggcagcttccatggagccagcgcctttgacccctgctgccctgtgagcagcagcagagctgccatcttcggccaccaggccgctgctgctgcccccagccagcccctgagcagcattgatggctacggcagctccatggtggcccagccccagccccagcccccaccccagcccagcctgagcagctgccgccactacatgcccccaccctatgccagcctgacccggcccctgcaccaccaggccagcgcctgcccccacagccacggcaaccccccaccccagacccagcccccaccccaggtggactatgtgatcccccaccctgtgcacgccttccacagccagatcagcagccacgccaccagccaccctgtggcccctcctccacccacccacctggccagcacagctgcccccatcccccagcacctgccccccacccaccagcccatcagccaccacatcccagccacagcccccccagcccagaggctgcacccccatgaggtgatgcagaggatggaggtgcagaggaggaggatgatgcagcaccccacccgggcccacgagcggcccccaccccacccccacaggatgcaccccaactacggccacggccaccacatccacgtgccccagaccatgagcagccacccccggcaggcccctgagaggtctgcctgggagctgggcatcgaggccggcgtgacagctgccacctacacccctggggccctgcacccccacctggcccactaccacgccccaccccggctgcaccacctgcagctgggcgccctgcccctgatggtgcctgacatggccggctacccccacatccgctacatcagcagcggcctggatggcaccagcttccggggccccttccggggcaactttgaggagctgatccacctggaggagcggctgggcaatgtgaacagaggagccagccagggcaccatcgagcgctgcacctacccccacaagtacaagaaggtgaccacagactggttcagccagaggaagctgcactgcaagcaggatggagaggagggcacagaggaggacacagaggagaagtgcaccatctgcctgagcatcctggaggagggagaagatgtgcggcggctgccctgcatgcacctgttccaccaggtgtgtgtggaccagtggctgatcaccaacaagaagtgccccatctgccgggtggacatcgaggcccagctgcccagcgagagctag

SEQ ID NO: 22681 - DNA, 1158 bp, synthetic construct; identical to SEQ ID NO: 19077
  source 1..1158: mol_type = other DNA; note = Synthetic coding sequence

SEQ ID NO: 22682 - DNA, 7464 bp, synthetic construct
  source 1..7464: mol_type = other DNA; note = Synthetic coding sequence
tgagaagaggaggaggatgatgatgatgaggaggaggaggtgtctgaggtggagagcttcatcctggaccaggatgacctggagaaccccatgctggagacagccagcaagctgctgctgtctggaacagcagatggagctgacctgaggacagtggaccctgagacccaggcccggctggaggccctgctggaggccgccggcatcggcaagctgagcacagcagatggcaaggcctttgctgaccctgaggtgctgcggcggctgaccagctctgtgtcctgtgccctggatgaggccgccgccgccctgaccaggatgagagctgagagcacagccaatgccggccagagcgacaacagaagcctggccgaggcctgcagtgaaggagatgtgaatgctgtgaggaagctgctgattgagggccgctctgtgaatgagcacacagaggagggggagagcctgctgtgcctggcctgcagcgctggctactatgagctggcccaggtgctgctggccatgcacgccaacgtggaggaccggggcatcaagggggacatcacccccctgatggctgctgccaatggaggccacgtgaagatcgtgaagctgctgctggcccacaaggcagatgtgaatgcccagagcagcacaggcaacacagccctgacctacgcctgtgccggcggctacgtggatgtggtgaaggtgctgctggagagcggggccagcattgaggaccacaatgaaaatggccacacccccctgatggaggccggcagcgctggccacgtggaggtggcccggctgctgctggagaatggagctggcatcaacacccacagcaatgagttcaaggagagcgccctgaccctggcctgctacaagggccacctggagatggtgcgcttcctgctggaggccggggctgaccaggagcacaagacagatgagatgcacacagccctgatggaggcctgcatggatggccacgtggaggtggcccggctgctgctggacagcggggcccaggtgaacatgcctgctgacagctttgagagccccctgaccctggccgcctgtggcggccacgtggagctggccgccctgctgattgaaagaggagccagcctggaggaggtgaatgatgagggctacacccccctgatggaggccgcccgggagggccacgaggagatggtggccctgctgctgggccagggcgccaacatcaatgcccagacagaggagacccaggagacagccctgaccctggcctgctgcggcggcttcctggaggtggccgacttcctgatcaaggccggggctgacatcgagctgggctgcagcacccccctgatggaggccgcccaggagggccacctggagctggtgaagtacctgctggccgccggggccaacgtgcacgccaccacagccactggagacacagccctgacctacgcctgtgaaaatggccacacagatgtggctgatgtgctgctgcaggccggggctgacctggagcacgagagcgagggcggccgcacccccctgatgaaggccgcccgggccggccacgtgtgcaccgtgcagttcctgatcagcaaaggagccaacgtgaacagaaccacagccaacaatgaccacacagtgctgagcctggcctgtgccggcggccacctggccgtggtggagctgctgctggcccatggagctgaccccacccaccggctgaaggatggcagcaccatgctgattgaagctgccaagggcggccacacctctgtggtgtgctacctgctggactaccccaacaacctgctgagcgcccctcctccagatgtgacccagctgaccccacccagccatgacctgaacagagccccccgggtgcctgtgcaggccctgcccatggtggtgcccccccaggagccagacaagcccccagccaacgtggccaccaccctgcccatccggaacaaggccgccagcaagcagaagagcagcagccacctgcctgccaacagccaggatgtgcagggctacatcaccaaccagagccctgagagcatcgtggaggaggcccagggcaagctgacagagctggagcagaggatcaaggaggccatcgagaagaatgcccagctgcagagcctggagctggcccatgctgaccagctgaccaaggagaagattgaggagctgaacaagacccgggaggagcagatccagaagaagcagaagatcctggaggagctgcagaaggtggagcgggagctgcagctgaagacccagcagcagctgaagaagcagtacctggaggtgaaggcccagaggatccagctgcagcagcagcagcagcagagctgccagcacctgggcctgctgacccctgtgggcgtgggggagcagctgtctgagggggactatgcccggctgcagcaggtggaccctgtgctgctgaaggatgagccccagcagacagctgcccagatgggctttgcccccatccagcccctggccatgccccaggccctgcccctggccgccggccccctgcccccaggcagcatcgccaacctgacagagctgcagggcgtgattgtgggccagcctgtgctgggccaggcccagctggccggcctgggccagggcatcctgacagagacccagcagggcctgatggtggccagccctgcccagaccctgaatgacaccctggatgacatcatggctgtgtctggccgggccagcgccatgagcaacacccccacccacagcattgctgccagcatcagccagccccagacccccacccccagccccatcatcagccccagcgccatgctgcccatctacccagccattgatattgatgcccagacagagagcaaccacgacacagccctgaccctggcctgtgccggcggccacgaggagctggtgcagaccctgctggagcggggggccagcattgagcaccgggacaagaagggcttcacccccctcatcctggccgccacagctggccacgtgggcgtggtggagatcctgctggacaacggggctgacatcgaggcccagagcgagaggaccaaggacacccccctgagcctggcctgcagcggcggccggcaggaggtggtggagctgctgctggcccggggggccaacaaggagcacagaaatgtgtctgactacacccccctgagcctggccgccagcggcggctacgtgaacatcatcaagatcctgctgaatgctggagctgagatcaacagcaggacaggcagcaagctgggcatcagccccctgatgctggccgccatgaatggccacacagctgctgtgaagctgctgctggacatgggcagtgacatcaatgcccagatcgagaccaacagaaacacagccctgaccctggcctgcttccagggccgcacagaggtggtgtccctgctgctggacaggaaggccaacgtggagcaccgggccaagacaggcctgacccccctgatggaggccgccagcggcggctacgccgaggtgggccgggtgctgctggacaagggagcagatgtgaatgcccctcctgtgcccagcagccgggacacagccctgaccatcgctgctgacaagggccactacaagttctgtgagctgctgattggccgcggggcccacattgatgtgaggaacaagaagggcaacacccccctgtggctggccgccaacggcggccacctggatgtggtgcagctgctggtgcaggccggggctgatgtggatgctgctgacaacaggaagatcacccccctgatggccgccttcaggaagggccacgtgaaggtggtgcgctacctggtgaaggaggtgaaccagttccccagcgacagcgagtgcatgagatacatcgccaccatcacagacaaggagatgctgaagaagtgccacctgtgcatggagagcatcgtgcaggccaaggaccggcaggccgctgaggccaacaagaatgccagcatcctgctggaggagctggacctggagaagctgcgggaggagagccggcggctggccctggccgccaagcgggagaagaggaaggagaagaggaggaagaagaaggaggagcagaggaggaagctggaggagattgaggccaagaacaaggagaactttgagctgcaggccgcccaggagaaggagaagctgaaggtggaggatgagcctgaggtgctgacagagcccccatctgccaccaccaccaccaccatcggcatcagcgccacctggaccaccctggccggcagccacggcaagaggaacaacaccatcaccaccaccagcagcaagaggaagaacaggaagaacaagatcaccccagaaaatgtgcagatcatctttgatgaccccctgcccatctcctacagccagcctgagaaggtgaatggagagagcaagagcagcagcaccagcgagagcggggacagcgacaacatgaggatcagcagctgcagtgatgagagcagcaacagcaacagcagcaggaagagtgacaaccacagccctgctgtggtgaccaccaccgtgagcagcaagaagcagcccagcgtgctggtgaccttccccaaggaggagaggaagtctgtgtctgggaaggccagcatcaagctgtctgagaccatcagcgagggcaccagcaacagcctgagcacctgcaccaagagcggccccagccccctgagcagccccaacgggaagctgactgtggccagccccaagaggggccagaagcgggaggagggctggaaggaggtggtgagaagaagcaagaaggtgtctgtgcccagcaccgtcatcagccgggtgattggccggggcggctgcaacatcaatgccatccgggagttcaccggggcccacattgatattgacaagcagaaggacaagacaggagaccgcatcatcaccatccggggcggcacagagagcacccggcaggccacccagctgatcaatgccctgatcaaggaccctgacaaggagattgatgagctgatccccaagaaccggctgaagagcagcagcgccaacagcaagattggcagcagcgcccccaccaccacagctgccaacaccagcctgatgggcatcaagatgaccaccgtggccctgagcagcaccagccagacagccacagccctgactgtgcctgccatcagcagcgccagcacccacaagaccatcaagaaccctgtgaacaacgtgcggcccggcttccctgtgtccctgcccctggcctaccccccaccccagtttgcccacgccctgctggccgcccagaccttccagcagatccggcccccccggctgcccatgacccactttggaggcaccttccccccagcccagagcacctggggccccttccctgtgcggcccctgagccctgcccgggccaccaacagccccaagccccacatggtgcccaggcacagcaaccagaacagcagcggcagccaggtgaacagcgctggcagcctgaccagcagccccaccaccaccaccagcagcagcgccagcacagtgcccggcaccagcaccaacggcagccccagcagccccagcgtgcggcggcagctgtttgtgacagtggtgaagaccagcaatgccaccaccaccaccgtgaccaccacagccagcaacaacaacacagcccccaccaatgccacctaccccatgcccacagccaaggagcactaccctgtgagcagccccagcagccccagccccccagcccagcccggcggcgtgtccaggaacagccccctggactgtggcagcgccagccccaacaaggtggccagcagcagcgagcaggaggccggcagcccccctgtggtggagaccaccaacacccggccccccaacagcagcagcagcagcggcagcagcagcgcccacagcaaccagcagcagcccccaggctctgtgtcccaggagcccaggcctcccctgcagcagagccaggtgcccccacctgaggtgaggatgacagtgccccccctggccaccagcagcgcccctgtggccgtgcccagcacagcccctgtgacctaccccatgccccagacccccatgggctgcccccagcccacccccaagatggagaccccagccatccggcccccacctcatggcaccacagccccccacaagaacagcgcctctgtgcagaacagctctgtggccgtgctgtctgtgaaccacatcaagaggccccacagcgtgcccagctctgtgcagctgcccagcaccctgagcacccagagcgcctgccagaacagcgtgcacccagccaacaagcccatcgcccccaacttcagcgcccccctgcccttcggccccttcagcaccctgtttgagaacagccccaccagcgcccacgccttctggggcggctctgtggtgagcagccagagcaccccagagagcatgctgagcggcaagagcagctacctgcccaacagcgaccccctgcaccagagcgacaccagcaaggcccctggcttccggccccccctgcagaggcctgcccccagccccagcggcatcgtgaacatggacagcccctacggctctgtgacccccagcagcacccacctgggcaactttgccagcaacatcagcggcggccagatgtatggccctggggcccccctgggcggggccccagctgctgccaacttcaaccggcagcacttcagccccctgagcctgctgaccccctgcagcagcgccagcaatgacagcagcgcccagagcgtgtcctctggagtgcgggcccccagccctgcccccagctctgtgcccctgggcagcgagaagcccagcaatgtgtcccaggacaggaaggtgcctgtgcccatcggcacagagaggtctgcccgcatccggcagacaggcaccagcgcccccagcgtcatcggcagcaacctgagcacctctgtgggccacagcggcatctggagctttgagggcattggaggcaaccaggacaaggtggactggtgcaaccctggcatgggcaaccccatgatccaccggcccatgtctgaccccggggtcttcagccagcaccaggccatggagcgggacagcactggaattgtgaccccatctggcaccttccaccagcacgtgcctgctggctacatggacttccccaaggtgggcggcatgcccttctctgtgtatggaaatgccatgatcccccctgtggcccccatcccagatggagctgggggccccatcttcaacggcccccatgctgctgaccccagctggaacagcctcatcaagatggtgagcagcagcacagagaacaacggcccccagacagtgtggacaggcccctgggccccccacatgaacagcgtgcacatgaaccagctgggctag

SEQ ID NO: 22683 - DNA, 33 bp, synthetic construct
  source 1..33: mol_type = other DNA; note = Synthetic coding sequence
atggccctgccccatgacagcaatgagacctag

SEQ ID NO: 22684 - DNA, 462 bp, synthetic construct
  source 1..462: mol_type = other DNA; note = Synthetic coding sequence
atggccaccatgatcccccctgtgaagctgaagtggctggagcacctgaacagctcctggatcacagaagattctgagagcatcgccacccgggagggcgtggccgtgctgtacagcaagctggtgagcaacaaggaggtggtgcccctgccccagcaggtgctgtgcctgaagggcccccagctgcctgactttgagcgggagagcctgagcagtgatgagcaggaccactacctggatgccctgctgagcagccagctggccctggccaagatggtgtgcagcgacagcccctttgctggggccctgaggaagaggctgctggtgctgcagagggtcttctacgccctgagcaacaagtaccatgacaagggcaaggtgaagcagcagcagcacagccctgagagcagcagcggcagcgcagatgtgcacagcgtgtctgagcggcccaggagcagctag

SEQ ID NO: 22685 - DNA, 111 bp, synthetic construct
  source 1..111: mol_type = other DNA; note = Synthetic coding sequence
atgctgccccccaagcacctgagcgccaccaagcccaagaagtcctgggcccccaacctgtatgagctggacagcgacctgaccaaggagccagatgtgatcattggatag

SEQ ID NO: 22686 - DNA, 315 bp, synthetic construct
  source 1..315: mol_type = other DNA; note = Synthetic coding sequence
atggcccagagcggcggggaggcccggcccggccccaagacagctgtgcagatccgggtggccatccaggaggccgaggatgtggatgagctggaggatgaggaggagggcgctgagaccagaggagctggggaccctgcccgctacctgagccctggctggggcagcgccagcgaggaggagcccagccggggccacaggacagcccagctgccctggctggagagccagcaggtgttcagcctgaagcccttcctgctgcccactggaattgagctgaccccagagaacccctggggcagctctgtgtcctag

SEQ ID NO: 22687 - DNA, 645 bp, synthetic construct
  source 1..645: mol_type = other DNA; note = Synthetic coding sequence
atggccctgccccatgacagcaatgagaccagctacctgctgccccccaacaatgaagactggggccggcagaccatcccagactttgtgtatggccagaaggacctgatggccgagggcatccagtggcccagaaatgcccctggcatcccagatgccctgccccagagcccctttgatgctgccctgtgcagcgcctggaagcagagggtggagctgggcctcttccgctaccgcctgcgggagctgcagacccagatcctgcctggagctgtgggctttgtggcccagctgaatgtggagcggggcgtgcagaggcggcccccccagaccatcaagtctgtgcggcaggcctttgatcctgtgcagttcaacttcaacaagatccggcctggagaggtgctcttccggctgcaccgggagccagacctgcccggcaccctgctgcaggaggacatcctggtggtgatcaacgtgagccccctggagtggggccacgtgctgctggtgcctgagcccgcccggcagctgccccagaggctgctgcccggggccctgcgggccggcatcgaggccgtgctgctgagcctgcaccctggcttccgggtgggcttcaacagcctgggcggcctggcctctgtgtag

SEQ ID NO: 22688 - DNA, 2988 bp, synthetic construct
  source 1..2988: mol_type = other DNA; note = Synthetic coding sequence
atgagccagtggaccccagagtacaatgagctgtacaccctgaaggtggacatgaagtctgagatccccagtgatgcccccaagacccaggagagcctgaagggcatcctgctgcaccctgagcccatcggggccgccaagagcttccctgctggggtggagatgatcaacagcaaggtgggcaatgagttcagccacctgtgtgatgacagccagaagcaggagaaggagatgaatggaaaccagcaggagcaggagaagagcctggtggtgaggaagaagaggaagagccagcaggccggccccagctatgtgcagaactgtgtgaaggagaaccagggcatcctgggcctgcggcagcacctgggcacccccagtgatgaggacaatgacagcagcttcagtgactgcctgagcagccccagcagcagcctgcactttggagacagcgacacagtgaccagtgatgaggacaaggaggtgtctgtgcgccacagccagaccatcctgaatgccaagagccgcagccacagcgcccggagccacaagtggcccaggacagaaacagaatctgtgtctggcctgctgatgaagaggccctgcctgcacggcagcagcctgcggcggctgccctgcaggaagagatttgtgaagaacaacagcagccagaggacccagaagcagaaggagcgcatcctgatgcagaggaagaagcgggaggtgctggcccggaggaaatatgccctgctgcccagcagcagcagcagcagtgaaaatgacctgagcagcgagagcagcagcagcagcagcacagaaggagaggaggacctgtttgtgtctgccagcgagaaccaccagaacaacccagctgtgcccagcggcagcattgatgaagatgtggtggtgattgaggccagcagcaccccccaggtgacagccaatgaggagatcaacgtgaccagcacagacagcgaggtggagatcgtgacagtgggggagagctaccgcagccgcagcaccctgggccacagccgcagccactggagccagggcagcagcagccacgccagccggccccaggagcccaggaacagaagccgcatcagcaccgtcatccagcccctgcggcagaatgctgctgaggtggtggacctgactgtggatgaagatgagcccaccgtggtgcccaccaccagcgccaggatggagagccaggccaccagcgccagcatcaacaacagcaaccccagcaccagcgagcaggccagtgacacagccagcgctgtgaccagcagccagcccagcacagtgtctgagaccagcgccaccctgaccagcaacagcaccaccggcaccagcattggagatgacagcaggaggaccaccagcagcgctgtgacagaaacaggccccccagccatgccccggctgcccagctgctgcccccagcacagcccctgtggcggcagcagccagaaccaccacgccctgggccacccccacaccagctgcttccagcagcacggccaccacttccagcaccaccaccaccaccaccacaccccccaccctgctgtgcctgtgagccccagcttcagtgaccctgcctgccctgtggagcggcccccccaggtgcaggccccctgtggggccaacagcagcagcggcaccagctaccacgagcagcaggccctgcctgtggacctgagcaacagcggcatccgcagccacggcagcggcagcttccatggagccagcgcctttgacccctgctgccctgtgagcagcagcagagctgccatcttcggccaccaggccgctgctgctgcccccagccagcccctgagcagcattgatggctacggcagctccatggtggcccagccccagccccagcccccaccccagcccagcctgagcagctgccgccactacatgcccccaccctatgccagcctgacccggcccctgcaccaccaggccagcgcctgcccccacagccacggcaaccccccaccccagacccagcccccaccccaggtggactatgtgatcccccaccctgtgcacgccttccacagccagatcagcagccacgccaccagccaccctgtggcccctcctccacccacccacctggccagcacagctgcccccatcccccagcacctgccccccacccaccagcccatcagccaccacatcccagccacagcccccccagcccagaggctgcacccccatgaggtgatgcagaggatggaggtgcagaggaggaggatgatgcagcaccccaccggcctgtttgtgttctgtgtgtccagaagagcccacgagcggcccccaccccacccccacaggatgcaccccaactacggccacggccaccacatccacgtgccccagaccatgagcagccacccccggcaggcccctgagaggtctgcctgggagctgggcattgaagctggggtgacagctgccacctacacccctggggccctgcacccccacctggcccactaccacgccccaccccggctgcaccacctgcagctgggcgccctgcccctgatggtgcctgacatggccggctacccccacatccgctacatcagcagcggcctggatggcaccagcttccggggccccttccggggcaactttgaggagctgatccacctggaggagcggctgggcaatgtgaacagaggagccagccagggcaccatcgagcgctgcacctacccccacaagtacaagaagaggaagctgcactgcaagcaggatggagaggagggcacagaggaggacacagaggagaagtgcaccatctgcctgagcatcctggaggagggggaggatgtgcggcggctgccctgcatgcacctgttccaccaggtgtgtgtggaccagtggctgatcaccaacaagaagtgccccatctgccgggtggacatcgaggcccagctgcccagcgagagctag

SEQ ID NO: 22689 - DNA, 1851 bp, synthetic construct
  source 1..1851: mol_type = other DNA; note = Synthetic coding sequence
atggccggcggccgcggggcccctggccggggcagagatgagcccccagagagctacccccagaggcaggaccacgagctgcaggccctggaggccatctacggggctgacttccaggacctgcggccagatgcctgtggccctgtgaaggagcccccagagatcaacctggtgctgtacccccagggcctgactggagaggaggtgtatgtgaaggtggacctgcgggtgaagtgcccccccacctacccagatgtggtgcctgagattgagctgaagaatgccaagggcctgagcaatgaatctgtgaacctgctgaagagccggctggaggagctggccaagaagcactgtggggaggtgatgatctttgagctggcctaccacgtgcagagcttcctgtctgagcacaacaagcccccacccaagagcttccacgaggagatgctggagcggcgggcccaggaggagcagcagaggctgctggaggccaagaggaaggaggagcaggagcagcgggagatcctgcacgagatccagaggaggaaggaggagatcaaggaggagaagaagaggaaggagatggccaagcaggagcggctggagatcgccagcctgagcaaccaggaccacaccagcaagaaggaccccggcggccacaggacagctgccatcctgcatggaggcagcccagactttgtgggcaatggcaagcaccgggccaacagcagcggccgcagccggcgggagcggcagtacagcgtgtgcaacagcgaggacagccctggcagctgtgagatcctgtacttcaacatgggcagcccagaccagctgatggtgcacaagggcaagtgcatcggcagtgatgagcagctgggcaagctggtgtacaatgccctggagacagccaccggcggctttgtgctgctgtatgagtgggtgctgcagtggcagaagaagatgggccccttcctgaccagccaggagaaggagaagattgacaagtgcaagaagcagatccagggcacagaaacagagttcaacagcctggtgaagctgagccaccccaacgtggtgcgctacctggccatgaacctgaaggagcaggatgacagcatcgtggtggacatcctggtggagcacatctctggagtgtccctggccgcccacctgagccacagcggccccatccctgtgcaccagctgcggcgctacacagcccagctgctgagcggcctggactacctgcacagcaacagcgtggtgcacaaggtgctgagcgccagcaatgtgctggtggatgctgagggcaccgtgaagatcacagactacagcatcagcaagaggctggccgacatctgcaaggaggatgtgtttgagcagaccagggtgcgcttcagtgacaatgccctgccctacaagacaggcaagaagggagatgtgtggaggctgggcctgctgctgctgagcctgagccagggccaggagtgtggggagtaccctgtgaccatccccagcgacctgcctgctgacttccaggacttcctgaagaagtgtgtgtgcctggatgacaaggagcgctggagcccccagcagctgctgaagcacagcttcatcaacccccagcccaagatgcccctggtggagcagagcccagaagattctgagggccaggactatgtggagaccgtcatccccagcaaccggctgcccagcgctgccttcttcagcgagacccagaggcagttcagccgctacttcatcgagtttgaggagctgcagctgctgggcaagggggcctttggagctgtgatcaaggtgtggtacagagtcatccccagccccctgtag

SEQ ID NO: 22690 - DNA, 396 bp, synthetic construct
  source 1..396: mol_type = other DNA; note = Synthetic coding sequence
atgagccagtggaccccagagtacaatgagctgtacaccctgaaggtggacatgaagtctgagatccccagtgatgcccccaagacccaggagagcctgaagggcatcctgctgcaccctgagcccatcggggccgccaagagcttccctgctggggtggagatgatcaacagcaaggtgggcaatgagttcagccacctgtgtgatgacagccagaagcaggagaaggagatgaatggaaaccagcaggagcaggagaagagcctggtggtgaggaagaagaggaagagccagcaggccggccccagctatgtgcagaactgtgtgaaggagaaccagggcatcctgggcctgcggcagcacctgggcacccccagtgatgaggacaatgactag

SEQ ID NO: 22691 - DNA, 1863 bp, synthetic construct
  source 1..1863: mol_type = other DNA; note = Synthetic coding sequence
atggccccagacagcgaccccttccctgagggccccctgctgaagctgctgcccctggatgcccgggaccggggcacccagcgctgccgcctgggccctgctgccctgcacgccctgggcgcccggctgggcagcgctgtgaagatcagcctgcctgatggcggcagctgcctgtgcacagcctggcccaggagagatggagcagatggctttgtgcagctggaccccctgtgtgccagccctggagctgctgtgggcgccagccgcagcagaagaagcctgagcctgaaccggctgctgctggtgccctgcccccccctgcggcgggtggccgtgtggcctgtgctgcgggagcgggccggggcccctggggccaggaacacagctgctgtgctggaggccgcccaggagctgctgaggaaccggcccatcagcctgggccacgtggtggtggcccctcctggggcccctggcctggtggccgccctgcacatcgtgggcggcacccccagcccagaccctgctggcctggtgacccccaggaccagggtgtccctgggcggggagccccccagcgaggcccagccccagcctgaggtgcccctgggcggcctgtctgaggccgctgacagcctgcgggagctgctgcggctgcccctgcgctacccccgggccctgacagccctgggcctggccgtgccccggggcgtgctgctggccggccccccaggagtgggcaagacccagctggtgcgggctgtggcccgggaggccggggctgagctgctggccgtgtctgccccagccctgcagggcagcaggcctggagaaacagaggagaatgtgagaagagtcttccagagggcccgggagctggccagccggggccccagcctgctcttcctggatgagatggatgccctgtgcccccagaggggcagccgggcccctgagagccgggtggtggcccaggtgctgaccctgctggatggagccagcggggaccgggaggtggtggtggtgggcgccaccaacagaccagatgccctggaccctgccctgcggcggcccggccgctttgaccgggaggtggtgattggcacccccaccctgaagcagaggaaggagatcctgcaggtgatcaccagcaagatgcccatcagcagccacgtggacctgggcctgctggccgagatgacagtgggctacgtgggcgctgacctgacagccctgtgccgggaggccgccatgcacgccctgctgcacagcgagaagaaccaggacaaccctgtgattgatgaaattgacttcctggaggccttcaagaacatccagcccagcagcttccgctctgtgattggcctgatggacatcaagcctgtggactgggaggagatcggcggcctggaggatgtgaagctgaagctgaagcagagcattgagtggcccctgaagttcccctgggagtttgtgaggatgggcctgacccagcccaagggcgtgctgctgtatggccccccaggctgtgccaagaccaccctggtgcgggccctggccaccagctgccactgcagctttgtgtctgtgtctggagctgacctcttcagcccctttgtgggggacagcgagaaggtgctgagccagatcttccggcaggcccgggccagcaccccagccatcctcttcctggatgaaattgacagcatcctgggcgcccggagcgccagcaagacaggctgtgatgtgcaggagcgggtgctgtctgtgctgctgaatgagctggatggagtgggcctgaagaccatcgagcggcggggcagcaagagcagccagcagggcaagtacaaggagctgaagaagtag

SEQ ID NO: 22692 - DNA, 4767 bp, synthetic construct; identical to SEQ ID NO: 19038
  source 1..4767: mol_type = other DNA; note = Synthetic coding sequence

SEQ ID NO: 22693 - DNA, 63 bp, synthetic construct
  source 1..63: mol_type = other DNA; note = Synthetic coding sequence
atggccaccatgatcccccctgtgaagctgaagtggctggagcacctgaacagctcctggtag

SEQ ID NO: 22694 - DNA, 4389 bp, synthetic construct
  source 1..4389: mol_type = other DNA; note = Synthetic coding sequence
atgtaccagccagaagatgacaacaacagtgatgtgaccagtgatgatgacatgaccaggaacagaagagagagcagccccccccacagcgtgcacagcttcagtgaccgggactgggacagaagaggccgcagccgggacatggagccccgggaccgctggagccacaccaggaaccccaggagcaggatgccaccccgggacctgagcctgcctgtggtggccaagaccagctttgagatggaccgggaggatgaccgggacagccgggcctatgagagccgcagccaggatgctgagagctaccagaatgtggtggacctggccgaggacaggaagccccacaacaccatccaggacaacatggagaactacaggaagctgctgagcctggtgcagctggccgaggatgatggccacagccacatgacccagggccacagcagccgcagcaagaggtctgcctaccccagcaccagccggggcctgaagaccatgcctgaggccaagaagagcacccacagaagaggcatctgtgaagatgagagcagccatggagtcatcatggagaagttcatcaaggatgtgagccgcagcagcaagagcggccgggcccgggagagcagtgacaggagccagcgcttccccaggatgtctgatgacaactggaaggacatcagcctgaacaagcgggagagcgtcatccagcagagggtgtatgagggcaatgccttccggggcggcttccgcttcaacagcaccctggtgtccaggaagagggtgctggagaggaagaggcgctaccactttgacacagatggcaagggcagcatccatgaccagaagggctgccccaggaagaagccctttgaatgtggcagcgagatgaggaaggccatgtctgtgagcagcctgagcagcctgagcagccccagcttcacagagagccagcccatcgactttggagccatgccctacgtgtgtgatgaatgtggccgctccttcagcgtcatcagcgagtttgtggagcaccagatcatgcacacccgggagaacctgtatgaatatggagagagcttcatccacagcgtggccgtgtctgaggtgcagaagagccaggtgggcggcaagagatttgagtgcaaggactgtggggagaccttcaacaagtctgctgccctggccgagcacaggaagatccacgcccggggctacctggtggagtgcaagaaccaggagtgtgaggaggccttcatgcccagccccaccttcagcgagctgcagaagatctacggcaaggacaagttctatgagtgccgggtgtgcaaggagaccttcctgcacagcagcgccctgattgagcaccagaagatccactttggagatgacaaggacaatgaaagagagcacgagcgggagcgggagcgggagcggggggagaccttccggcccagccctgccctgaatgagttccagaagatgtatggcaaggagaagatgtatgagtgcaaggtgtgtggggagaccttcctgcacagcagcagcctgaaggagcaccagaagatccacacccggggcaacccctttgagaacaagggcaaggtgtgtgaggagaccttcatccctggccagagcctgaagaggcggcagaagacctacaacaaggagaagctgtgtgacttcacagatggaagagatgccttcatgcagagcagcgagctgtctgagcaccagaagatccacagcaggaagaacctgtttgagggccggggctatgagaagagcgtcatccacagcggccccttcacagagagccagaagagccacaccatcacccggcccctggagagtgatgaagatgagaaggccttcaccatcagcagcaacccctatgagaaccagaagatccccaccaaggaaaatgtgtatgaggccaagagctatgaaagaagtgtcatccacagcctggcctctgtggaggcccagaagagccacagcgtggccggccccagcaagcccaaggtgatggccgagagcaccatccagagctttgatgccatcaaccaccagagggtgcgggccggcggcaacaccagcgagggccgggagtacagccgcagcgtcatccacagcctggtggccagcaagcccccaagaagccacaatggaaatgagctggtggagagcaatgagaagggggagagcagcatctacatcagtgacctgaatgacaagaggcagaagatcccagcccgggagaacccctgtgagggcggcagcaagaacagaaattatgaggacagcgtcatccagagcgtcttccgggccaagccccagaagtctgtgcctggagagggcagcggggagttcaagaaggatggagagttctctgtgcccagcagcaatgtgcgggagtaccagaaggcccgggccaagaagaagtacatcgagcacaggagcaatgagaccagcgtcatccacagcctgccctttggagagcagaccttccggccccggggcatgctgtatgagtgccaggagtgtggggagtgctttgcccacagcagtgacctgacagagcaccagaagatccatgaccgggagaagcccagcggcagcaggaactatgagtggagcgtcatccgcagcctggcccccacagacccccagaccagctatgcccaggagcagtatgccaaggagcaggccaggaacaagtgcaaggacttccggcagttctttgccaccagcgaggacctgaacaccaaccagaagatctatgaccaggagaagagccatggagaggagagccagggcgagaacacagatggagaggagacccacagcgaggagacccacggccaggagaccattgaagatcctgtgatccagggcagtgacatggaggacccccagaaggatgatcctgatgacaagatctatgaatgtgaggactgtggcctgggctttgtggacctgacagacctgacagaccaccagaaggtgcacagcaggaagtgcctggtggacagccgggagtacacccacagcgtcatccacacccacagcatcagcgagtaccagagggactacaccggggagcagctgtatgagtgccccaagtgtggggagagcttcatccacagcagcttcctgtttgagcaccagagaattcatgagcaggaccagctgtacagcatgaagggctgtgatgatggcttcatcgccctgctgcccatgaagcccaggaggaacagagctgctgagaggaacccagccctggccggcagcgccatccgctgcctgctgtgtggccagggcttcatccacagcagcgccctgaatgagcacatgaggctgcacagagaagatgacctgctggagcagagccagatggccgaggaggccatcatccctggcctggccctgacagagttccagaggagccagacagaggagcggctgtttgaatgtgctgtgtgtggggagagctttgtgaacccagctgagctggccgaccacgtgacagtgcacaagaatgagccctatgaatatggcagcagctacacccacaccagcttcctgacagagcccctgaagggggccatccccttctatgagtgcaaggactgtgggaagagcttcatccacagcacagtgctgaccaagcacaaggagctgcacctggaggaggaggaggaggatgaagctgctgctgctgctgctgctgctgcccaggaggtggaggccaacgtgcacgtgccccaggtggtgctgcgcatccagggcctgaatgtggaggccgctgagcctgaggtggaggccgctgagcctgaggtggaggccgctgagcctgaggtggaggccgctgagcccaatggagaggccgagggcccagatggagaggccgctgagcccatcggggaggccggccagcccaacggggaggccgagcagcccaatggagatgctgatgagccagatggagctggcattgaagatcctgaggagagagctgaggagcctgagggcaaggccgaggagccagaaggagatgctgatgagccagatggagtgggcatcgaggaccctgaggagggggaggaccaggagatccaggtggaggagccctactatgactgccatgaatgtacagagaccttcaccagcagcacagccttcagcgagcacctgaagacccacgcctccatgatcatctttgagcccgccaatgcctttggagaatgttctggctacatcgagcgggccagcaccagcactggaggagccaaccaggctgatgagaagtacttcaagtgtgatgtgtgtggccagctgttcaatgaccggctgagcctggcccggcaccagaacacccacactggatag

SEQ ID NO: 22695 - DNA, 438 bp, synthetic construct
  source 1..438: mol_type = other DNA; note = Synthetic coding sequence
atggccaccatgatcccccctgtgaagctgaagtggctggagcacctgaacagctcctggatcacagaagattctgagagcatcgccacccgggagggcgtggccgtgctgtacagcaagctggtgagcaacaaggaggtggtgcccctgccccagcaggtgctgtgcctgaagggcccccagctgcctgactttgagcgggagagcctgagcagtgatgagcaggaccactacctggatgccctgctgagcagccagctggccctggccaagatggtgtgcagcgacagcccctttgctggggccctgaggaagaggctgctggtgctgcagagggtcttctacgccctgagcaacaagtaccatgacaagggcaaggtgaagcagcagcagcacagccctgagagcagcagcggcagcgcagatgtgcacagctag

SEQ ID NO: 22696 - DNA, 4284 bp, synthetic construct
  source 1..4284: mol_type = other DNA; note = Synthetic coding sequence
tgagccaagcaggagcggctggagatcgccagcctgagcaaccaggaccacaccagcaagaaggaccccggcggccacaggacagctgccatcctgcatggaggcagcccagactttgtgggcaatggcaagcaccgggccaacagcagcggccgcagccggcgggagcggcagtacagcgtgtgcaacagcgaggacagccctggcagctgtgagatcctgtacttcaacatgggcagcccagaccagctgatggtgcacaagggcaagtgcatcggcagtgatgagcagctgggcaagctggtgtacaatgccctggagacagccaccggcggctttgtgctgctgtatgagtgggtgctgcagtggcagaagaagatgggccccttcctgaccagccaggagaaggagaagattgacaagtgcaagaagcagatccagggcacagaaacagagttcaacagcctggtgaagctgagccaccccaacgtggtgcgctacctggccatgaacctgaaggagcaggatgacagcatcgtggtggacatcctggtggagcacatctctggagtgtccctggccgcccacctgagccacagcggccccatccctgtgcaccagctgcggcgctacacagcccagctgctgagcggcctggactacctgcacagcaacagcgtggtgcacaaggtgctgagcgccagcaatgtgctggtggatgctgagggcaccgtgaagatcacagactacagcatcagcaagaggctggccgacatctgcaaggaggatgtgtttgagcagaccagggtgcgcttcagtgacaatgccctgccctacaagacaggcaagaagggagatgtgtggaggctgggcctgctgctgctgagcctgagccagggccaggagtgtggggagtaccctgtgaccatccccagcgacctgcctgctgacttccaggacttcctgaagaagtgtgtgtgcctggatgacaaggagcgctggagcccccagcagctgctgaagcacagcttcatcaacccccagcccaagatgcccctggtggagcagagcccagaagattctgagggccaggactatgtggagaccgtcatccccagcaaccggctgcccagcgctgccttcttcagcgagacccagaggcagttcagccgctacttcatcgagtttgaggagctgcagctgctgggcaagggggcctttggagctgtgatcaaggtgcagaacaagctggatggctgctgctatgctgtgaagaggatccccatcaacccagccagccggcagttccgccgcatcaagggggaggtgaccctgctgagccggctgcaccacgagaacatcgtgcgctactacaatgcctggattgaaagacatgagaggcctgctggccctggcaccccacctccagacagcggccccctggccaaggatgacagagctgcccggggccagcctgccagtgacacagatggcctggacagcgtggaggccgccgcccccccacccatcctgagcagctctgtggagtggagcaccagcggggagaggtctgccagcgcccgcttccctgccaccggccctggcagcagtgatgatgaagatgatgatgaagatgaacatggaggagtcttcagccagagcttcctgcctgccagtgacagcgagagtgacatcatctttgacaatgaagatgagaacagcaagagccagaaccagatggagtactgtgagaagagcaccctgcgggacaccatcgaccagggcctgtacagagacacagtgcggctgtggaggctcttccgggagatcctggatggcctggcctacatccacgagaagggcatgatccaccgggacctgaagcctgtgaacatcttcctggacagtgatgaccacgtgaagatcggggactttggcctggccacagaccacctggccttctctgctgacagcaagcaggatgaccagacaggagacctgatcaagagtgaccccagcggccacctgaccggcatggtgggcacagccctgtatgtgtccccagaggtgcagggcagcaccaagagcgcctacaaccagaaggtggacctcttcagcctgggcatcatcttctttgagatgagctaccaccccatggtgacagccagcgagcgcatctttgtgctgaaccagctgcgggaccccaccagccccaagtttcctgaggactttgatgatggagaacatgccaagcagaagagcgtcatctcctggctgctgaaccacgaccctgccaagaggcccacagccacagagctgctgaagtctgagctgctgcccccaccccagatggaggagagcgagctgcacgaggtgctgcaccacaccctgaccaacgtggatggcaaggcctaccgcaccatgatggcccagatcttcagccagaggatcagccctgccatcgactacacctatgacagcgacatcctgaagggcaacttcagcatcagaacagccaagatgcagcagcacgtgtgtgagaccatcatccgcatcttcaagagacatggagctgtgcagctgtgcacccccctgctgctgcccaggaaccggcagatctatgagcacaatgaagctgccctcttcatggaccacagcggcatgctggtgatgctgccctttgacctgcgcatcccctttgcccgctacgtggccaggaacaacatcctgaacctgaagcgctactgcatcgagagggtcttccggcccaggaagctggaccgcttccaccccaaggagctgctggagtgtgcctttgatattgtgaccagcaccaccaacagcttcctgcccacagctgagatcatctacaccatctatgagatcatccaggagttccctgccctgcaggagaggaactacagcatctacctgaaccacaccatgctgctgaaggccatcctgctgcactgcggcatccctgaggacaagctgagccaggtgtacatcatcctgtatgatgctgtgacagagaagctgacccggcgggaggtggaggccaagttctgcaacctgagcctgagcagcaacagcctgtgccgcctgtacaagttcatcgagcagaagggggacctgcaggacctgatgcccaccatcaacagcctcatcaagcagaagacaggcatcgcccagctggtgaagtatggcctgaaggacctggaggaggtggtgggcctgctgaagaagctgggcatcaagctgcaggtgctgatcaacctgggcctggtgtacaaggtgcagcagcacaacggcatcatcttccagtttgtggccttcatcaagaggcggcagagagctgtgcctgagatcctggccgccggcggccgctatgacctgctgatcccccagttccggggcccccaggccctgggccctgtgcccacagccatcggcgtgtccatcgccatcgacaagatctctgctgctgtgctgaacatggaggagagcgtgaccatcagcagctgtgacctgctggtggtgtctgtgggccagatgtccatgagccgggccatcaacctgacccagaagctgtggacagctggcatcacagctgagatcatgtatgactggagccagagccaggaggagctgcaggagtactgccgccaccacgagatcacctacgtggccctggtgtctgacaaggagggcagccacgtgaaggtgaagagctttgagaaggagcggcagacagagaagagggtgctggagacagagctggtggaccacgtgctgcagaagctgcggaccaaggtgacagatgaaagaaatggccgggaggccagtgacaacctggccgtgcagaacctgaagggcagcttcagcaatgccagcggcctgtttgagatccacggggccaccgtggtgcccatcgtgtctgtgctggcccctgagaagctgagcgccagcacccggcggcgctatgagacccaggtgcagacccggctgcagaccagcctggccaacctgcaccagaagagcagcgagattgagatcctggccgtggacctgcccaaggagaccatcctgcagttcctgagcctggagtgggatgctgatgagcaggccttcaacaccaccgtgaagcagctgctgagccggctgcccaagcagcgctacctgaagctggtgtgtgatgagatctacaacatcaaggtggagaagaaggtgtctgtgctcttcctgtacagctacagagatgactactaccgcatcctcttctag

SEQ ID NO: 22697 - DNA, 4767 bp, synthetic construct; identical to SEQ ID NO: 19038
  source 1..4767: mol_type = other DNA; note = Synthetic coding sequence

SEQ ID NO: 22698 - DNA, 3012 bp, synthetic construct; identical to SEQ ID NO: 21236
  source 1..3012: mol_type = other DNA; note = Synthetic coding sequence

SEQ ID NO: 22699 - DNA, 150 bp, synthetic construct
  source 1..150: mol_type = other DNA; note = Synthetic coding sequence
atggccctgccccatgacagcaatgagaccagctacctgctgccccccaacaatgaagactggggccggcagaccatcccagactttgtgtatggccagaaggacctgatggccgagggcatccagtggcccagaaatgcccctggatag

SEQ ID NO: 22700 - DNA, 375 bp, synthetic construct; identical to SEQ ID NO: 19268
  source 1..375: mol_type = other DNA; note = Synthetic coding sequence

SEQ ID NO: 22701 - DNA, 93 bp, synthetic construct
  source 1..93: mol_type = other DNA; note = Synthetic coding sequence
atggccacagacagctgggccctggccgtggatgagcaggaggccgctgctgagagcaggacagagctgcccagcccctacagcaccagctag

SEQ ID NO: 22702 - DNA, 804 bp, synthetic construct; identical to SEQ ID NO: 21120
  source 1..804: mol_type = other DNA; note = Synthetic coding sequence

SEQ ID NO: 22703 - DNA, 1113 bp, synthetic construct; identical to SEQ ID NO: 20376
  source 1..1113: mol_type = other DNA; note = Synthetic coding sequence

SEQ ID NO: 22704 - DNA, 2712 bp, synthetic construct
  source 1..2712: mol_type = other DNA; note = Synthetic coding sequence
atggccaccagcgctgacagccccagcagccccctgggcgctgaggacctgctgagtgacagcagcgagcccccaggcctgaaccaggtgagcagcgaggtgaccagccagctgtatgccagcctgcggctgagccggcaggccgaggccacagcccgggcccagctgtacctgcccagcaccagcccccctcatgagggcctggatggctttgcccaggagctgagccgcagcctgtctgtgggcctggagaagaacctgaagaagaaggatggcagcaagcacatctttgagatggagagcgtgcggggccagctgcagaccatgctgcagaccagccgggacacagcctacagagaccccctcatccctggggccggcagcgagcggcgggaggaggacagctttgacagcgacagcacagccaccctgctgaacacccggcccctgcaggacctgagccccagcagcagcgcccaggccctggaggagctgttcccccgctacaccagcctgcggcccggcccccccctgaaccccccagacttccagggcctgagagatgccctggacagcgagcacaccaggaggaagcactgtgagcggcacatccagagcctgcagaccagggtgctggagctgcagcagcagctggccgtggccgtggccgctgacaggaagaaggacaccatgattgagcagctggacaagaccctggcccgggtggtggagggctggaacagacatgaagctgagaggacagaggtgctgcggggcctgcaggaggagcaccaggccgctgagctgaccaggagcaagcagcaggagaccgtgacccggctggagcagagcctgtctgaggccatggaggccctgaaccgggagcaggagagcgcccggctgcagcagcgggagcgggagaccctggaggaggagcggcaggccctgaccctgcggctggaggccgagcagcagcgctgctgcgtgctgcaggaggagagagatgctgcccgggccggccagctgtctgagcaccgggagctggagaccctgcgggccgccctggaggaggagcggcagacctgggcccagcaggagcaccagctgaaggagcactaccaggccctgcaggaggagagccaggcccagctggagcgggagaaggagaagagccagcgggaggcccaggccgcctgggagacccagcaccagctggccctggtgcagagcgaggtgcggcggctggagggggagctggacacagcccggcgggagagagatgccctgcagctggagatgagcctggtgcaggcccgctatgagagccagaggatccagctggagagcgagctggccgtgcagctggagcagagggtgacagagcggctggcccaggcccaggagagcagcctgcggcaggccgccagcctgcgggagcaccacaggaagcagctgcaggacctgagcggccagcaccagcaggagctggccagccagctggcccagttcaaggtggagatggccgagcgggaggagcggcagcagcaggtggctgaagattatgagctgcggctggcccgggagcaggcccgggtgtgtgagctgcagagcggcaaccagcagctggaggagcagagggtggagctggtggagcggctgcaggccatgctgcaggcccactgggatgaggccaaccagctgctgagcaccaccctgcccccacccaaccccccagcccccccagctggccccagcagccctggcccccaggagcctgagaaggaggagaggagagtgtggaccatgccacccatggctgtggccctgaagcctgtgctgcagcagagccgggaggccagagatgagctgcccggggcccctcctgtgctgtgcagcagcagcagtgacctgagcctgctgctgggccccagcttccagagccagcacagcttccagcccctggagcccaagccagacctgaccagcagcacagctggggccttcagcgccctgggcgccttccacccagaccacagagctgagcggcccttcccagaagaagatcctggcccagatggagagggcctgctgaagcagggcctgcccccagcccagctggagggcctgaagaacttcctgcaccagctgctggagaccgtgccccagaacaatgaaaaccccagcgtggacctgctgccccccaagagcggccccctgactgtgcccagctgggaggaggccccccaggtgccccgcatccccccacctgtgcacaagaccaaggtgcccctggccatggccagcagcctcttccgggtgcctgagccccccagcagccacagccagggcagcggccccagcagcggcagccctgagagaggaggagatggcctgaccttcccccggcagctgatggaggtgtcccagctgctgcggctgtaccaggcccggggctggggcgccctgcctgctgaggacctgctgctgtacctgaagaggctggagcacagcggcacagatggccgcggggacaacgtgcccaggaggaacacagacagccggctgggggagatccccaggaaggagatccccagccaggccgtgccccggcggctggccacagcccccaagacagagaagcccccagccaggaagaagagcggccacccagcccccagctccatgaggagcagaggaggagtgtggaggtag

SEQ ID NO: 22705 - DNA, 138 bp, synthetic construct
  source 1..138: mol_type = other DNA; note = Synthetic coding sequence
atgcccctgctggtggagggccggcgggtgcggctgccccagagcgctggggacctggtgcgggcccacccccccctggaggcccccagccccttctgggtgctgatgatgcccctgctggtgaccctgtggagctag

SEQ ID NO: 22706 - DNA, 1083 bp, synthetic construct; identical to SEQ ID NO: 18837
  source 1..1083: mol_type = other DNA; note = Synthetic coding sequence

SEQ ID NO: 22707 - DNA, 1353 bp, synthetic construct; identical to SEQ ID NO: 18425
  source 1..1353: mol_type = other DNA; note = Synthetic coding sequence

SEQ ID NO: 22708 - DNA, 1113 bp, synthetic construct; identical to SEQ ID NO: 20376
  source 1..1113: mol_type = other DNA; note = Synthetic coding sequence

SEQ ID NO: 22709 - DNA, 738 bp, synthetic construct
  source 1..738: mol_type = other DNA; note = Synthetic coding sequence
atgggcggcggctatgacctgaacctgtttgccagccccccagacagcaactttgtgtgcagcgtgtgccacggcgtgctgaagaggcctgcccggctgccctgcagccacatcttctgcaagaagtgcatcctgcgctggctggcccggcagaagacctgcccctgctgcaggaaggaggtgaagaggaagaaggtggtgcacatgaacaagctgaggaagaccatcggccgcctggaggtgaagtgcaagaatgctgatgctggctgcatcgtgacctgccccctggcccacaggaagggccaccaggacagctgcccctttgagctgacagcctgccccaatgaaggctgcaccagccaggtgccccggggcaccctggccgagcaccggcagcactgccagcagggcagccagcagcgctgccccctgggctgtggggccaccctggaccctgctgagcgggcccggcacaactgctaccgggagctgcacaatgcctggagcgtgcggcaggagaggagaagacccctgctgctgagcctgctgcggcgggtgcgctggctggaccaggccacctctgtggtgagaagagagctggccgagctgagcaacttcctggaggaggacacagccctgctggagggcgccccccaggaggaggccgaggccgcccctgagggcaatgtgggcgctgaggtggtgggggagccccgggccaacatcccctgcaagtag

SEQ ID NO: 22710 - DNA, 309 bp, synthetic construct; identical to SEQ ID NO: 19549
  source 1..309: mol_type = other DNA; note = Synthetic coding sequence

SEQ ID NO: 22711 - DNA, 1473 bp, synthetic construct; identical to SEQ ID NO: 20500
  source 1..1473: mol_type = other DNA; note = Synthetic coding sequence

SEQ ID NO: 22712 - DNA, 1809 bp, synthetic construct; identical to SEQ ID NO: 19244
  source 1..1809: mol_type = other DNA; note = Synthetic coding sequence

SEQ ID NO: 22713 - DNA, 618 bp, synthetic construct; identical to SEQ ID NO: 20195
  source 1..618: mol_type = other DNA; note = Synthetic coding sequence

SEQ ID NO: 22714 - DNA, 360 bp, synthetic construct; identical to SEQ ID NO: 19407
  source 1..360: mol_type = other DNA; note = Synthetic coding sequence

SEQ ID NO: 22715 - DNA, 1473 bp, synthetic construct
  source 1..1473: mol_type = other DNA; note = Synthetic coding sequence
atgcccatgcccacagagggcaccccaccacccctgagcggcacccccatccctgtgcctgcctacttcagacatgctgagcccggcttcagcctgaagaggccccggggcctgagccgcagcctgcccccacctcctccagccaagggcagcatccccatcagccgcctcttcccccccaggaccccaggctggcaccagctgcagcccaggagagtgtccttccggggggaggccagcgagaccctgcagagccctggctatgaccccagcaggcctgagagcttcttccagcagagcttccagaggctgagccggctgggccacggcagctatggagaggtgttcaaggtgcgcagcaaggaggatggccgcctgtatgctgtgaagaggtccatgagccccttccggggccccaaggaccgggccaggaagctggccgaggtgggcagccatgagaaggtgggccagcacccctgctgcgtgcggctggagcaggcctgggaggagggcggcatcctgtacctgcagacagagctgtgtggccccagcctgcagcagcactgtgaggcctggggcgccagcctgcctgaggcccaggtgtggggctacctgcgggacaccctgctggccctggcccacctgcacagccagggcctggtgcacctggatgtgaagccagccaacatcttcctgggcccccggggccgctgcaagctgggggactttggcctgctggtggagctgggcacagctggggccggggaggtgcaggagggggacccccgctacatggcccctgagctgctgcagggcagctatggaacagctgctgatgtgttcagcctgggcctgaccatcctggaggtggcctgcaacatggagctgccccacggcggggagggctggcagcagctgcggcagggctacctgcccccagagttcaccgctggcctgagcagcgagctgcggtctgtgctggtgatgatgctggagccagaccccaagctgcgggccacagctgaggccctgctggccctgcctgtgctgcggcagccccgggcctggggcgtgctgtggtgcatggctgctgaggccctgagccggggctgggccctgtggcaggccctgctggccctgctgtgctggctgtggcacggcctggcccacccagcctcctggctgcagcccctgggccccccagccaccccacctggcagccccccctgcagcctgctgctggacagcagcctgagcagcaactgggatgatgacagcctgggccccagcctgagccctgaggccgtgctggccaggacagtgggcagcaccagcacccccaggagccgctgcaccccaagagatgccctggacctgagtgacatcaacagcgagcccccccggggcagcttccccagctttgagcccaggaacctgctgagcctgtttgaggacaccctggaccccacctag

SEQ ID NO: 22716 - DNA, 1293 bp, synthetic construct
  source 1..1293: mol_type = other DNA; note = Synthetic coding sequence
atgctggagcgctggcaccagctgcagcccaggagagtgtccttccggggggaggccagcgagaccctgcagagccctggctatgaccccagcaggcctgagagcttcttccagcagagcttccagaggctgagccggctgggccacggcagctatggagaggtgttcaaggtgcgcagcaaggaggatggccgcctgtatgctgtgaagaggtccatgagccccttccggggccccaaggaccgggccaggaagctggccgaggtgggcagccatgagaaggtgggccagcacccctgctgcgtgcggctggagcaggcctgggaggagggcggcatcctgtacctgcagacagagctgtgtggccccagcctgcagcagcactgtgaggcctggggcgccagcctgcctgaggcccaggtgtggggctacctgcgggacaccctgctggccctggcccacctgcacagccagggcctggtgcacctggatgtgaagccagccaacatcttcctgggcccccggggccgctgcaagctgggggactttggcctgctggtggagctgggcacagctggggccggggaggtgcaggagggggacccccgctacatggcccctgagctgctgcagggcagctatggaacagctgctgatgtgttcagcctgggcctgaccatcctggaggtggcctgcaacatggagctgccccacggcggggagggctggcagcagctgcggcagggctacctgcccccagagttcaccgctggcctgagcagcgagctgcggtctgtgctggtgatgatgctggagccagaccccaagctgcgggccacagctgaggccctgctggccctgcctgtgctgcggcagccccgggcctggggcgtgctgtggtgcatggctgctgaggccctgagccggggctgggccctgtggcaggccctgctggccctgctgtgctggctgtggcacggcctggcccacccagcctcctggctgcagcccctgggccccccagccaccccacctggcagccccccctgcagcctgctgctggacagcagcctgagcagcaactgggatgatgacagcctgggccccagcctgagccctgaggccgtgctggccaggacagtgggcagcaccagcacccccaggagccgctgcaccccaagagatgccctggacctgagtgacatcaacagcgagcccccccggggcagcttccccagctttgagcccaggaacctgctgagcctgtttgaggacaccctggaccccacctag

SEQ ID NO: 22717 - DNA, 666 bp, synthetic construct; identical to SEQ ID NO: 19418
  source 1..666: mol_type = other DNA; note = Synthetic coding sequence

SEQ ID NO: 22718 - DNA, 2232 bp, synthetic construct; identical to SEQ ID NO: 22521
  source 1..2232: mol_type = other DNA; note = Synthetic coding sequence

SEQ ID NO: 22719 - DNA, 579 bp, synthetic construct
  source 1..579: mol_type = other DNA; note = Synthetic coding sequence
atgagcacagctgctgtgcctgagctgaagcagatcagccgggtggaggccatgaggctgggccctggctggagccacagctgccacgccatgctgtatgctgccaaccctggccagctgtttggccgcatccccatgaggttctctgtgctgatgcagatgagatttgatggcctgctgggcttccctgggggctttgtggaccggcgcttctggagcctggaggatggcctgaacagagtgctgggcctgggcctgggctgcctgcggctgacagaggccgactacctgagcagccacctgacagagggcccccaccgggtggtggcccacctgtatgcccggcagctgaccctggagcagctgcatgctgtggagatctctgctgtgcacagccgggaccacggcctggaggtgggccccccacctggcccccggcccccaccccggggcctggccctggccccctggaaggcccccatgggcgccggccccagggctggccctgctgtgcaccctgagggccccagccggcggctgccccagctgcctgagcagaggctgcgggagcacggctag

SEQ ID NO: 22720 - DNA, 2553 bp, synthetic construct
  source 1..2553: mol_type = other DNA; note = Synthetic coding sequence
atgctggagcggcgggccctgctgtggcagcgggaggccggccctggctggggagaccgggcccgggccggcactggaggagctgggggcggctgcggcggggccatggccgagcggggccctgccttctgtggcctgtatgacaccagcagcctgctgcgctactgcaatgatgacaacctgagcggcaccagcggcatggaggtggatgacagagtgtctgccctggagcagaggctgcagctgcaggaggatgagctggccgtgctgaaggccgccctggctgatgccctgcggcggctgcgggcctgtgaggagcagggcgccgccctgcgggcccggggcacccccaagggccgggccccaccccggctgggcaccacagcctctgtgtgccagctgctgaagggcctgcccaccaggacccccctgaatggaagtggccccccaagaagagtgggcggctacgccaccagccccagcagccccaagaaggaggccaccagcggccgcagctctgtgcggcgctacctgagccctgagcggctggcctctgtgagaagagaggaccccaggagcaggaccaccagcagcagcagcaactgcagcgccaagaaggagggcaagaccaaggaggtgatcttctctgtggaggatggctctgtgaagatgttcctgcggggccggcctgtgcccatgatgatcccagatgagctggcccccacctacagcctggacaccaggtctgagctgcccagctgccgcctgaagctggagtgggtgtatggctaccggggccgggactgccgggccaacctgtacctgctgcccaccggggagatcgtgtactttgtggcctctgtggccgtgctgtacagcgtggaggagcagaggcagaggcactacctgggccacaatgatgacatcaagtgcctggccatccacccagacatggtgaccatcgccaccggccaggtggccggcaccaccaaggagggcaagcccctgccccctcatgtgcgcatctgggacagcgtgtccctgagcaccctgcacgtgctgggcctgggcgtgtttgacagagctgtgtgctgcgtgggcttcagcaagagcaatggaggcaacctgctgtgtgctgtggatgagagcaatgaccacatgctgtctgtgtgggactgggccaaggagaccaaggtggtggatgtgaagtgcagcaatgaggccgtgctggtggccaccttccaccccacagaccccaccgtgctgatcacctgtgggaagagccacatctacttctggaccctggagggcggcagcctgagcaagaggcagggcctgtttgagaagcatgagaagcccaagtatgtgctgtgtgtgaccttcctggagggcggagatgtggtgactggagacagcggcggcaacctgtatgtgtggggcaaaggaggcaaccgcatcacccaggccgtgctgggcgcccatgatggaggagtgtttggcctgtgtgccctgagagatggcaccctggtgtctgggggcggccgggacagaagagtggtgctgtggggcagtgactacagcaagctgcaggaggtggaggtgcctgaggactttggacctgtgaggacagtggccgagggccacggggacaccctgtatgtgggcaccaccaggaacagcatcctgcagggctctgtgcacacaggcttcagcctgctggtgcagggccacgtggaggagctgtggggcctggccacccaccccagccgggcccagtttgtgacctgtggccaggacaagctggtgcacctgtggagcagtgacagccaccagcccctgtggagccgcatcattgaagatcctgcccggtctgctggcttccaccccagcggctctgtgctggccgtgggcaccgtgacaggccgctggctgctgctggacacagagacccatgacctggtggccatccacacagatggaaatgagcagatctctgtggtgtccttctccccagatggagcctacctggccgtgggcagccatgacaacctggtgtatgtgtacacagtggaccagggcggcaggaaggtgtcccggctgggcaagtgcagcggccacagcagcttcatcacccacctggactgggcccaggacagcagctgctttgtgaccaacagcggggactatgagatcctgtactgggaccctgccacctgcaagcagatcaccagcgcagatgctgtgaggaacatggagtgggccacagccacctgtgtgctgggcttcggcgtgtttggcatctggagcgagggcgcagatggaacagacatcaatgctgtggcccggagccatgatggcaagctgctggccagcgcagatgactttgggaaggtgcacctgttctcctacccctgctgccagccccgggccctgagccacaagtatggaggccacagcagccacgtgaccaacgtggccttcctgtgggatgacagcatggccctgaccactggaggcaaggacacctctgtgctgcagtggagggtggtgtag

SEQ ID NO: 22721 - DNA, 2502 bp, synthetic construct; identical to SEQ ID NO: 21332
  source 1..2502: mol_type = other DNA; note = Synthetic coding sequence

SEQ ID NO: 22722 - DNA, 3351 bp, synthetic construct; identical to SEQ ID NO: 19573
  source 1..3351: mol_type = other DNA; note = Synthetic coding sequence

SEQ ID NO: 22723 - DNA, 2055 bp, synthetic construct; identical to SEQ ID NO: 19471
  source 1..2055: mol_type = other DNA; note = Synthetic coding sequence

SEQ ID NO: 22724 - DNA, 378 bp, synthetic construct
  source 1..378: mol_type = other DNA; note = Synthetic coding sequence
atggctgatgaggagctggaggccctgcggcggcagaggctggccgagctgcaggccaagcatggagaccctggagatgctgcccagcaggaggccaagcaccgggaggccgagatgaggaacagcatcctggcccaggtgctggaccagagcgcccgggcccggctgagcaacctggccctggtgaagccagagaagaccaaggctgtggagaactacctgatccagatggcccgctatggccagctgtctgagaaggtgtctgagcagggcctgattgagatcctgaagaaggtgtcccagcagacagagaagaccaccaccgtgaagttcaacagaaggaaggtgatggacagtgatgaagatgatgactactag

SEQ ID NO: 22725 - DNA, 3327 bp, synthetic construct; identical to SEQ ID NO: 19236
  source 1..3327: mol_type = other DNA; note = Synthetic coding sequence

SEQ ID NO: 22726 - DNA, 594 bp, synthetic construct; identical to SEQ ID NO: 21015
  source 1..594: mol_type = other DNA; note = Synthetic coding sequence

SEQ ID NO: 22727 - DNA, 906 bp, synthetic construct; identical to SEQ ID NO: 19231
  source 1..906: mol_type = other DNA; note = Synthetic coding sequence

SEQ ID NO: 22728 - DNA, 990 bp, synthetic construct; identical to SEQ ID NO: 19529
  source 1..990: mol_type = other DNA; note = Synthetic coding sequence

SEQ ID NO: 22729 - DNA, 1263 bp, synthetic construct
  source 1..1263: mol_type = other DNA; note = Synthetic coding sequence
atgctgagcagcttccctgtggtgctgctggagaccatgagccactacacagatgagccccgcttcaccatcgagcagattgacctgctgcagaggctgcggaggacaggcatgaccaagcatgagatcctgcacgccctggagaccctggaccggctggaccaggagcacagcgacaagtttggaagaagaagcagctatggaggcagcagctatggcaacagcaccaacaacgtgcctgccagcagcagcacagccacagccagcacccagacccagcacagcggcatgagccccagccccagcaacagctatgacaccagcccccagccctgcaccaccaaccagaatggccgggagaacaatgaaaggctgagcaccagcaatggcaagatgagccccacccgctaccacgccaacagcatgggccagaggagctacagctttgaggccagcgaggaggacctggatgtggatgacaaggtggaggagctgatgagaagagacagcagcgtcatcaaggaggagatcaaggccttcctggccaacagacgcatcagccaggccgtggtggcccaggtgacaggcatcagccagagccgcatcagccactggctgctgcagcagggcagtgacctgtctgagcagaagaagagggccttctaccgctggtaccagctggagaagaccaaccctggggccaccctgtccatgaggcctgcccccatccccatcgaggaccctgagtggaggcagaccccacctcctgtgtctgccaccagcggcaccttccggctgcggcggggcagccgcttcacctggaggaaagaatgtctggccgtgatggagagctacttcaatgaaaaccagtacccagatgaggccaagcgggaggagatcgccaatgcctgcaatgctgtgatccagaagccaggcaagaagctgagtgacctggagcgggtgaccagcctgaaggtgtacaactggtttgccaacagaaggaaggagatcaagagaagagccaacattgaagctgccatcctggagagccatggaattgatgtgcagagccctgggggccacagcaacagtgatgatgtggatggaaatgactacagcgagcaggatgacagcaccagccacagcgaccaccaggaccccatcagcctggccgtggagatggctgctgtgaaccacaccatcctggccctggcccggcagggcgccaatgagatcaagacagaggccctggatgatgactag

SEQ ID NO: 22730 - DNA, 1263 bp, synthetic construct; identical to SEQ ID NO: 22729
  source 1..1263: mol_type = other DNA; note = Synthetic coding sequence

SEQ ID NO: 22731 - DNA, 915 bp, synthetic construct
  source 1..915: mol_type = other DNA; note = Synthetic coding sequence
atgctgagcagcttccctgtggtgctgctggagaccatgagccactacacagatgagccccgcttcaccatcgagcagattgacctgctgcagaggctgcggaggacaggcatgaccaagcatgagatcctgcacgccctggagaccctggaccggctggaccaggagcacagcgacaagtttggaagaagaagcagctatggaggcagcagctatggcaacagcaccaacaacgtgcctgccagcagcagcacagccacagccagcacccagacccagcacagcggcatgagccccagccccagcaacagctatgacaccagcccccagccctgcaccaccaaccagaatggccgggagaacaatgaaaggctgagcaccagcaatggcaagatgagccccacccgctaccacgccaacagcatgggccagaggagctacagctttgaggccagcgaggaggacctggatgtggatgacaaggtggaggagctgatgagaagagacagcagcgtcatcaaggaggagatcaaggccttcctggccaacagacgcatcagccaggccgtggtggcccaggtgacaggcatcagccagagccgcatcagccactggctgctgcagcagggcagtgacctgtctgagcagaagaagagggccttctaccgctggtaccagctggagaagaccaaccctggggccaccctgtccatgaggcctgcccccatccccatcgaggaccctgagtggaggcagaccccacctcctgtgtctgccaccagcggcaccttccggctgcggcggggcagccgcttcacctggaggaaagaatgtctggccgtgatggagaggaacacctggagccctgagaggaggatggaggagaacaagtggaagctgctgtctgctggatag

SEQ ID NO: 22732 - DNA, 1332 bp, synthetic construct
  source 1..1332: mol_type = other DNA; note = Synthetic coding sequence
atgctgagcagcttccctgtggtgctgctggagaccatgagccactacacagatgagccccgcttcaccatcgagcagattgacctgctgcagaggctgcggaggacaggcatgaccaagcatgagatcctgcacgccctggagaccctggaccggctggaccaggagcacagcgacaagtttggaagaagaagcagctatggaggcagcagctatggcaacagcaccaacaacgtgcctgccagcagcagcacagccacagccagcacccagacccagcacagcggcatgagccccagccccagcaacagctatgacaccagcccccagccctgcaccaccaaccagaatggccgggagaacaatgaaaggctgagcaccagcaatggcaagatgagccccacccgctaccacgccaacagcatgggccagaggagctacagctttgaggccagcgaggaggacctggatgtggatgacaaggtggaggagctgatgagaagagacagcagcgtcatcaaggaggagatcaaggccttcctggccaacagacgcatcagccaggccgtggtggcccaggtgacaggcatcagccagagccgcatcagccactggctgctgcagcagggcagtgacctgtctgagcagaagaagagggccttctaccgctggtaccagctggagaagaccaaccctggggccaccctgtccatgaggcctgcccccatccccatcgaggaccctgagtggaggcagaccccacctcctgtgtctgccaccagcggcaccttccggctgcggcggggcagccgcttcacctggaggaaagaatgtctggccgtgatggagagctacttcaatgaaaaccagtacccagatgaggccaagcgggaggagatcgccaatgcctgcaatgctgtgatccagaagccaggcaagaagctgagtgacctggagcgggtgaccagcctgaaggtgtacaactggtttgccaacagaaggaaggagatcaagagaagagccaacattgctgccatcctggagagccacggcattgatgtgcagagccctgggggccacagcaacagtgatgatgtggatggaaatgactacagcgagcaggacacctggcaggtgagaaatggagaggaggaggagggccgcagcagcgagggcggccgggaggccgagaaggatgacagcaccagccacagcgaccaccaggaccccatcagcctggccgtggagatggctgctgtgaaccacaccatcctggccctggcccggcagggcgccaatgagatcaagacagaggccctggatgatgactag

SEQ ID NO: 22733 - DNA, 357 bp, synthetic construct
  source 1..357: mol_type = other DNA; note = Synthetic coding sequence
atgctgagcagcttccctgtggtgctgctggagaccatgagccactacacagatgagccccgcttcaccatcgagcagattgacctgctgcagaggctgcggaggacaggcatgaccaagcatgagatcctgcacgccctggagaccctggaccggctggaccaggagcacagcgacaagtttggaagaagaagcagctatggaggcagcagctatggcaacagcaccaacaacgtgcctgccagcagcagcacagccacagccagcacccagacccagcacagcggcatgagccccagccccagcaacagctatgacaccagcccccagccctgcaccaccaaccagaatggatag

SEQ ID NO: 22734 - DNA, 1332 bp, synthetic construct; identical to SEQ ID NO: 22732
  source 1..1332: mol_type = other DNA; note = Synthetic coding sequence

SEQ ID NO: 22735 - DNA, 1218 bp, synthetic construct
  source 1..1218: mol_type = other DNA; note = Synthetic coding sequence
atgctgagcagcttccctgtggtgctgctggagaccatgagccactacacagatgagccccgcttcaccatcgagcagattgacctgctgcagaggctgcggaggacaggcatgaccaagcatgagatcctgcacgccctggagaccctggaccggctggaccaggagcacagcgacaagtttggaagaagaagcagctatggaggcagcagctatggcaacagcaccaacaacgtgcctgccagcagcagcacagccacagccagcacccagacccagcacagcggcatgagccccagccccagcaacagctatgacaccagcccccagccctgcaccaccaaccagaatggccgggagaacaatgaaaggctgagcaccagcaatggcaagatgagccccacccgctaccacgccaacagcatgggccagaggagctacagctttgaggccagcgaggaggacctggatgtggatgacaaggtggaggagctgatgagaagagacagcagcgtcatcaaggaggagatcaaggccttcctggccaacagacgcatcagccaggccgtggtggcccaggtgacaggcatcagccagagccgcatcagccactggctgctgcagcagggcagtgacctgtctgagcagaagaagagggccttctaccgctggtaccagctggagaagaccaaccctggggccaccctgtccatgaggcctgcccccatccccatcgaggaccctgagtggaggcagaccccacctcctgtgtctgccaccagcggcaccttccggctgcggcggggcagccgcttcacctggaggaaagaatgtctggccgtgatggagagctacttcaatgaaaaccagtacccagatgaggccaagcgggaggagatcgccaatgcctgcaatgctgtgatccagaagccaggcaagaagctgagtgacctggagcgggtgaccagcctgaaggtgtacaactggtttgccaacagaaggaaggagatcaagagaagagccaacattgctgccatcctggagagccacggcattgatgtgcagagccctgggggccacagcaacagtgatgatgtggatggaaatgactacagcgagcaggacacctggcaggtgagaaatggagaggaggaggagggccgcagcagcgagggcggccgggaggccgagaaggtggaggaggagcggcgcatctag

SEQ ID NO: 22736 - DNA, 1380 bp, synthetic construct
  source 1..1380: mol_type = other DNA; note = Synthetic coding sequence
atgaccgccgaggagatgaaggccaccgagagcggcgcccagagcgctccccttcctatggaaggcgtggatatctccccgaagcaggacgaaggggtgctcaaggtgattaagagggaaggcactggcaccgaaatgccaatgattggcgatcgtgtgtttgttcactataccggctggttgttggacggaaccaagtttgactcctccctggatagaaaggataaattttccttcgacctggggaagggtgaagtgataaaggcttgggacatcgcaatcgctacgatgaaagtcggagaggtctgccatatcacctgtaaaccagagtatgcctatgggagtgcagggtctccccctaagattccgcccaacgcgacgctggtcttcgaagtagaattgttcgagttcaaaggcgaggacctgaccgaagaggaagatggcggaattatccgccggatccagacccgaggagaaggctatgcaaagcctaatgagggcgccatcgtagaggttgctctcgagggctactataaggacaagctgtttgaccagcgggagctgcggttcgaaattggtgagggagagaatctggacctgccatatggcctcgagcgggctatccaacggatggaaaagggcgagcatagtatcgtgtacctgaagccatcctatgccttcggttctgtcgggaaggagaaatttcaaataccacctaacgcagaactcaagtacgagctgcacctgaaatctttcgagaaggctaaagagtcgtgggagatgaactctgaagagaagctcgaacagagtaccatcgtaaaagagaggggcaccgtgtatttcaaagagggtaagtacaagcaggccctgctgcagtacaagaaaatcgtgtcctggctggagtacgaatcctcattttcgaacgaagaggcacagaaagcacaagcgctgcgattggcgtcccacttgaaccttgccatgtgccacctgaagttgcaggcctttagtgctgccatagagtcttgcaataaggccctggaactggactctaacaatgaaaaaggactcttccgaagaggagaggcgcaccttgcggtgaacgattttgagctggccagggctgacttccagaaagtgctgcagctgtaccccaataacaaggctgctaagacacagttagccgtttgccagcagcgtatccggagacagctcgcaagagagaaaaagctgtatgccaatatgttcgaacgtctggcggaggaagaaaataaagccaaggctgaagctagctcaggagaccaccccactgacactgaaatgaaagaagaacagaaatcaaataccgctgggtctcagtcccaagtggaaacagaagcttag

SEQ ID NO: 22737 - DNA, 477 bp, synthetic construct
  source 1..477: mol_type = other DNA; note = Synthetic coding sequence
atggagccccccgagggcgccggcaccggcgagatcgtgaaggaggcagaggtgccgcaagcagccctaggcgtccccgcccagggaacaggcgataatggccatactcccgtcgaggaggaggtgggtggcattcccgttcctgccccagggttactccaggtgacggagcgccgccagccactgtcaagcgtgagtagcttggaggttcactttgatcttcttgacctcacagagctcactgacatgagcgaccaggagctggcagaggtgtttgcagatagtgacgatgaaaacctaaataccgaatcccctgctggactgcatcctctcccccgagccggctacctcagatccccgtcctggaccaggacccgcgccgagcagagccacgaaaagcagcctctcggagaccccgaaagacaagctactgttcttgacacctttctcacagtagagcgcccacaggaggattag

SEQ ID NO: 22738 - DNA, 954 bp, synthetic construct
  source 1..954: mol_type = other DNA; note = Synthetic coding sequence
atggccagcgtgatccccgccagcaaccggagcatgcggagcgacagaaacacgtacgtgggcaagagattcgtgcatgtgaagaacccttatctcgatctaatggatgaagatatactctaccacctggatctgggcactaagacgcacaatctgccagcaatgtttggagacgtgaagttcgtgtgtgtaggggggtctcccaaccgcatgaaagcgtttgccttattcatgcataaggaactcggtttcgaagaagccgaggaggacattaaagatatttgcgctggtaccgatcgttactgcatgtacaagacaggccccgtcctggccatctcccatggtatgggcatcccttctatctcgatcatgctgcatgagctgattaagctgctccaccatgcccgctgttgcgatgttacaatcatcaggattggaacctccggcggaatcggtatcgctcccgggacagtcgtgatcacagacattgctgtagattccttttttaaacctcgatttgagcaggtgatattagataatattgtgacgaggagcacagaactcgacaaagaactcagtgaggaactttttaattgcagtaaggagattccaaactttcctaccctggtaggccacacaatgtgtacatatgacttctatgagggacagggaaggctggatggagccctgtgctccttttcccgcgaaaagaaattggattatttaaagagggctttcaaggcgggcgtgagaaatattgagatggagtccaccgtgtttgccgccatgtgtggcctgtgcggacttaaggctgctgttgtgtgtgtgaccctgttggaccgtctagattgcgatcaaatcaacctgccgcatgatgtgttggtggagtaccaacagagaccccaactgctgatatccaattttattcgccgacggttaggtctgtgtgattag

SEQ ID NO: 22739 - DNA, 1095 bp, synthetic construct
  source 1..1095: mol_type = other DNA; note = Synthetic coding sequence
atgagcgaggtggaggccgccgccggcgccaccgccgtgcccgccgctactgtcccagcaactgctgctggggtcgtggccgttgtggtccctgtgcccgccggggagccccagaagggaggcggcgccggggggggcggaggcgccgcctctggccctgctgcaggaaccccaagtgcccccggctccaggactcccgggaatcctgcgaccgctgtgagcgggacacctgcaccaccggcgcgctctcaggcggataaaccagtcctggctatccaggtgctcgggactgtcaagtggtttaacgtgagaaatggctacggcttcattaatagaaatgacaccaaggaggacgtcttcgtgcaccagaccgccattaagcgtaacaacccgagaaagtttttacggtcagttggagatggcgagacagtggagttcgatgttgtggaaggagagaaaggcgccgaggccaccaacgtaaccgggcctgggggcgtgcctgtcaaagggtctcgttatgcaccaaaccgcaggaaaagccggcggtttatcccacggcccccatccgtggccccacctccaatggttgctgaaatcccctctgccggcacagggccagggtcaaaaggcgaacgggctgaggactcagggcagcgccctcgtcgatggtgcccccctccgttcttttaccgccgtagattcgtcagggggccgcgcccgccaaatcagcagcagcctatcgaggggacagatcgggtggaacctaaggaaaccgcacctctggaggggcaccagcagcaaggcgacgaacgggtgccccctccaagattcagaccaagataccggcgaccttttcgcccaagaccacgtcagcagcctacgacagagggaggggatggcgagaccaaacccagtcagggcccagcggacggcagcaggcctgaaccacagcgccctcgcaataggccatactttcagcgcaggcgacaacaggctcccggcccacagcaagctccaggcccacgacaacccgccgcgcccgagaccagcgcccctgtcaactctggggaccctacgacaactattcttgagtag

SEQ ID NO: 22740 - DNA, 5706 bp, synthetic construct
  source 1..5706: mol_type = other DNA; note = Synthetic coding sequence
atggccaccttccggaacaaccacatgaagaccaaggccagcgtgcggaaatcattttccgaagacgtgttccagtcggtgaaatccctgttgcagagccagaaagagttgtgctcggtgacagcagaagattgcctgcagcaagacgaacatgcaaatctgaccgaagtcaccttcctgggctttaacgaagaaaccgatgcagcccatatccaagacctggccgccgtttctttggagctacccgatattctgaactccctgcacttctgcagtctgaacgagaatgaaatcatctgcatgaagaatatcaacaaacccctggacatcagcagtgatcccctgaaccagtcccacccctccgggatgctttgcgtcatgcgcgtcagcccaacatcaccacgactgcggattgactttatttttagtctgttgagcaagtatgctaccgggatacggtataccctcgacacctttctgcatcagaagcatcagctggaaaccacagacgaggatgatgatgacaccaatcagtccgtttcatcaattgaggatgacttcgtaaccgcgttcgagcatctggaagaggaggaaaccagcaaaccatataacgacggcatgaacataaccgtgctgcgctcccagtgtgacgctgcctcccagaccgtgactggacaccacctcgagacacacgacctcaaaattctcattagcagcggccagcagaaaagtttagcaaagccttcaacatcttccgtgaatgtacttggtcataaagagttgccctctgtgaagacaagcgtaacaacatcaatcagtgagccctggactcagagatcattctatagatcaagcaatgcatctgacaaagactctgaccttcagaaaaccttctttagctctagcccagcttacagttcagaaagcgagtgttcttcaccttctcctgtcatattcttagatgaagaaggctaccagaagagtctgaaagccaagctcgagctcccaaagattcctgtcatgaaggacgatatcgaagatagtgattctgaggttagtgagtttttcgactcttttgaccagttcgatgaacttgagcaaacgctggaaacatgcctgtttaataaagatccagtaattgggaaaagtagccagcgaaaaggacacaagcacggaaagagttgtatgaacccacagaagttcaagttcgacagaccagccctgcccgccaacgttcggaaaccgacaccaaggaaacccgagagcccttacgggaacctttgcgacgcgcctgatagcccccggcctgttaaagcctctagggaggacagtgggctatttagcccaatccgctcatctgccttttcccctctgggtggctgcactcctgccgaatgtttttgtcaaaccgacatcggaggcgaccgaattcacgaaaatcacgactccgtctactacacatatgaggactacgctaaatccatctcctgtgaggtgctcggctccgtgctgcgcacccaccatactaataccctgtccaacataaactccatcaaacacggagagaacaagacagttacttttaaacatggaaatctagaccagaaaaacaagtcaaaaaacaagagccttatgatcaaggattccattcagaagttcgcggccgacctggtggaaaaaagcttcgggtcagccttcaaggatctgcaaaaaggagtgtcaagctgcacaaatgcgctctaccacctggccatcaagctgacgagttcagtcctccaaatggcctttgacgaactgcggagacagagggctttcagtctgaaagagagggcaatctctgggttggccaattttctggtgtcagaagctctgtcaaatgccctgaaggacttgcaatatgtcaagaagcaaattttcacaaataccgtggcacgcttcgcagctgatctcgcagaggaacttgtgttcgaaggtatcatggaggtttgccagtttagttacccacagacgcccgcgtccccacagtgtggatcctttgattttgaggataaagtcgttaagttgtatgcgaaggacctcagtgaatcggtaatacaagaagccttcattgaactgagtcaggtcgacgtgacgtttacaaccaaggccgccgtttccgtgtcaactgacaacataaaatatgtgtcagctgagtcagtggtgcccagcacgcaggctgtcacattttcgccttccttccataatcaggcgatcatggtgactaagccagtccaggagtacaaaaaggaatacacagtccagcaagccctgttctgcacctctggcattgtgacttccatccctgtcccactggcggggtccgccttacttccataccatatatcctccactgcttgccaggcgaaggctcatctttccagcgacgatagcaactcaaacggtgattctgctcaggttcatatcgctacgaagaaccgagaggagaaggccgcgtgtctcagaaacatatgcctaccctcggaacataacccagggaatcagaatgattttaagcccaccaacgacgacattgagatgcagtcgagttctaaactgcccaacgatcccgcaatcatctcaaactttagcgcagcagtggtccacactatcgttaacgagacactggagtctatgacgtctcttgaggtaaccaagatggtcgatgagcggactgactatctcacaaagtctctcaaggagaagactcctccatttagtcactgcgaccaggccgtgctgcagtgcagcgaagcctcatcaaacaaagacatgtttgctgaccggctaagcaaaagtattatcaagcacagcattgacaagtctaagtctgtgattccaaacatcgacaaaaacgccgtttataaagagagcctgcccgtctctggtgaggaaagccagcttactcctgagaagtcgcccaaatttcccgacagccagaaccagctgactcactgctccctctctgccgctaaggactgtgttcccgaatgcaaggtcagcatggtgcatggatctagcttggagactctgccatcttgccctgctgttactggacaaaagagcgatctcaaagaatcagccaaggaccaaccactgaagaagcataatctgaatagcacaagtctggaggccctgtcgtttggacaggagaatccctttcctcacagccatacattctcatccaccgccctcacctgtgtggacggtttacacgtggaggataaacagaaggtccgcgatcgtaacgttattcctgataccccccctagtacaccactggtaccgtctcgggctagcagcgagtgggacatcaagaaactgaccaagaagctcaagggtgagttggctaaggaattcgcccccgccaccccccccagcacacctcataattccagcgtcgggtccctgtccgagaacgagcagaacacaattgagaaggaggagtttatgctgaagcttatgaggtcactctccgaggaggtggaaagtagtgaatctggcgaattacccgaagtggacgttaagtcagagcatagcgggaaaaaggtgcagtttgcagaagccctggccacccacatactgagtttggccacagagatggccgcgtcacatctggacaacaagatcattcaagagcctaaagtcaagaatccctgcttaaacgtccaatctcagaggtcagtgtctcccacatttctgaatccttcagacgagaacctgaaaacgttgtgtaactttgcgggagatcttgcggccgaggtgatcaccgaggcggagaagatcgccaaagtgagaaattgtatgctttttaagcagaaaaagaacagctgctacgccgacggtgacgaggactacaaggtagaggaaaagctggacatcgaagccgtcgttcatcccagagaagtggatccgtttatcctgtcactgccacctagcagctgtatgtcagggctgatgtacaagtaccccagttgtgaatctgtgacggacgaatacgctggacatctgatccagatccttaaacaagagggaggcaactctgaactgattatggaccaatatgctaatagactggcctacagaagcgtcaaaagcggacttcaggaggcggccaagaccaccaaggttcagtgcaatagcagaatgtttccggtcccatcttcacaagttaagaccaataaagaactactaatgttctccaataaagagcaccaccaggaagctgacaagaagcgtcagtctaaacggaatgagggctatttttgcaagaatcagacctgtgaacgaaccctggatccatacaggaacgaagtctctcagctgtatagcttctcaacatctctcgtacactccattacaaaggacgccaaggaagagttgaccgcaagtctggtcggcctgcctaaatcactgactgactcctgcctgttcgagaaatccggatatgaggaggacaacgagtgtcacgttaccccagagctcccaaagtccctgcagccgtcgtcacagaaccacagattttatcacagcactgggtctttgaatggctacggctgtggcgacaatgtcgtgcaggccgtagagcagtatgccaaaaaagtcgtagacgacactctggaattgactctcggctctacggttttcagggtgagcgagaccaccaaatccgcagaccgggtcacatatgccgagaagctgtcccctctgaccggccaggcatgtagatactgcgatctgaaagaactgcacaattgtacagggaattcttcccagcacttctttcgccagggttctctcgcttcatccaagccggcgtcaaatcccaaattctccagcaggtaccagaaatctagaatatttcacctctcagtgcctcagatccacgttaacctggacaaaaaggcggtgttagcagaaaaaattgtagccgaggccatcgagaaggccgagagagagctgtcttctacctctttggctgcagatagcgggatcggtcaggaaggcgcgagcttcgctgaatcacttgccactgaaaccatgacagccgccgtcacgaatgtgggtcatgcagtgtctagctcgaaagagatagaagatttccagtccaccgaatccgtgagtagtcagcaaatgaacctgtcaattggagacgattccaccgggtcctggagcaatctgtcgttcgaggacgagcatcaggacgagtcatcatcgttccaccacctttccgaaagtaacggcaactctagctcttggtcatctctgggcctggaaggtgatctttacgaggataatctcagcttccctactagtgactctgatggcccagacgacaaagatgaggaacacgaggacgaggtggaggggttggggcaagatggcaagactctgctgatcacaaatattgacatggagccttgcaccgtggatcctcagcttagaattatcttgcaatggttaattgccagcgaggccgaggtggctgagctgtacttccacgactctgcaaataaggaatttatgctcttatccaagcaactgcaagaaaaagggtggaaggtgggcgacctcctgcaggcagttctgcagtattacgaggtcatggagaaagcaagcagcgaggagcgttgcaagtcactctttgattggctgctcgagaacgcttag

SEQ ID NO: 22741 - DNA, 417 bp, synthetic construct
  source 1..417: mol_type = other DNA; note = Synthetic coding sequence
atggccgagctgcagcagctgcgggtgcaggaggccgtggagagcatggtgaagtctctggaacgcgaaaatatcaggaaaatgcagggcctcatgtttcgttgttcggcctcatgctgcgaagatagccaggcatctatgaagcaggtccaccaatgcatcgaaaggtgccacgttccccttgcacaggctcaggccctggtgacatctgaactggaaaagtttcaggatcgccttgctcgctgtacaatgcattgtaatgataaagctaaggattccatcgacgcggggagtaaagagctgcaggtgaaacagcaattggactcatgtgtcactaagtgcgtcgacgaccacatgcatttaatcccaaccatgacgaagaagatgaaggaggcccttctgtctatcggaaagtag

SEQ ID NO: 22742 - DNA, 1110 bp, synthetic construct
  source 1..1110: mol_type = other DNA; note = Synthetic coding sequence
atgaccctggaggccatccggtacagccggggcagcctgcagatcttggatcagcttctgctaccgaaacaatctcggtacgaggctgtggggtctgtgcaccaggcatgggaggcaattcgcgcgatgaaagtgcggggggcccccgccattgcactggtgggatgtctgtcactcgccgttgagctccaggccggagctggcggccccggcctggctgccctggtggctttcgttcgcgataaactgagcttcttggtgacagctagacccacagcagtcaacatggcccgagcagccagagacctggctgatgtggccgctcgtgaagcggagcgcgagggcgcaactgaggaagccgtgcgcgagagggtgatttgctgcacagaagacatgttggagaaagaccttcgggacaaccgatctatcggtgatctgggcgcgagacacctccttgaacgggtggcccccagcggggggaaggtgactgtgcttacgcactgcaataccggggctcttgctacggccgggtatgggaccgctctgggggttattaggtcgctccattctctcgggagattggaacacgccttctgtactgagacccgcccctataatcagggggccagactgactgcctttgagttggtttacgaacaaataccagcaacgctgatcaccgacagtatggttgccgccgccatggcccataggggagtgagtgcggtagttgtaggcgccgatagagtggtcgccaacggcgacaccgcaaataaagtaggaacgtatcaactcgccattgtggccaagcatcacgggatcccattctacgtggccgctccctctagcagctgtgatctacggttagaaacaggaaaggagatcattatagaggagcgccccggccaggaactgactgatgtaaacggggtgaggatcgccgcaccagggatcggcgtttggaaccccgcgtttgatgtgacgccccacgacctgataacaggcggaatcattacggagttaggggtgttcgctccagaagagctgcgaaccgcactgacaactactatcagttcccgagatggcaccctggacggtccccagatgtag

SEQ ID NO: 22743 - DNA, 3660 bp, synthetic construct
  source 1..3660: mol_type = other DNA; note = Synthetic coding sequence
atgatgagcctgagcgtgcggccccagcggcggctgctgagcgcccgcgtgaaccggagccagtctttcgccggagtgttaggaagtcacgagcgaggccctcgttcctttccagttttctcaccgcccgggcccccccggaagcctccagcgctgagccgcgttagcagaatgttctctgtagcccacccagcagcgaaagtgccacagcccgaacgactggaccttgtctacaccgcccttaaacggggtctgactgcttacttggaggtccaccagcaggagcaggagaaattacagggccagatcagggaatcaaagcggaattctcgacttggtttcctgtatgatctggacaaacaggtgaagtcaatcgagcgttttctgaggagattagaattccatgcaagtaagattgacgaattgtatgaggcttattgcgtgcagaggaggctgcgagatggggcttataatatggtacgagcatatacgacgggctctcccggtagccgcgaagcacgagattccttggctgaggccactcggggtcatcgggagtacactgagagtatgtgcctcctggagtccgagttagaggctcagttaggtgagttccacctcaggatgaagggtctggccggcttcgctcggctgtgtgtgggtgaccagtacgaaatctgtatgaagtatgggcgtcagcgctggaaactgaggggaagaattgaggggtcaggtaagcaggtgtgggatagcgaagagacaatcttcctgcccttgctcactgagttcctgagcataaaggtgacagagctgaagggcttggcaaatcatgtggtggtagggagcgtgagttgtgagaccaaggatttgttcgccgcccttccacaggtggtggctgtggatataaacgacctgggaactattaagctgagtttagaggtgacctggagcccattcgacaaggatgatcagccttcagcagcttccagtgtgaataaagcctcaacagtaacaaaaaggttctcgacctactcccagagccccccagacacaccttccttacgggagcaggcattttataacatgttaagacgccaagaagaactggagaatggcactgcctggagtctgtcatccgagagctctgacgactcttcgagtccccagctcagtggaaccgctcgccactcaccggcccctcggccattggtccagcaaccagagcctcttcccatccaggtcgcttttaggaggcccgagacaccttctagcggcccactggatgaggaaggagccgtggcccctgtgcttgccaatgggcacgccccatattccagaactctgtctcatatttccgaagcgagtgtcgacgcagcgctggctgaagccagtgtagaggccgtggggccagagtcactcgcttggggcccaagtccaccaacacatcctgcacctacccacggcgaacatccatcccccgtgcctcccgcgcttgaccccgggcactccgctacttctagtacccttgggaccacaggaagcgtgccgacctcaacggacccagcgccatctgcacatctggacagcgtccacaagagcaccgatagcggcccatcagaactgccaggccccacacatactaccacgggaagcacctattctgctatcactacgacacatagcgcgccatcgcctctcacccacaccacaacagggagtacccacaagcccattatatccaccctgacaacgaccgggccgacactgaatatcatcgggccagtccagactacgacatcccctacacatacaatgccgtccccgacccataccaccgcatcccccactcacacctctacaagcccgacccatacacctacttccccaactcataaaacatcaatgagtccccctaccactaccagccccacaccctccgggatggggcttgtacaaaccgccaccagtcccactcatccaaccacatctcccacccatccgaccacatcaccaatccttatcaatgtttccccttctaccagtctggagttggcaaccttgtcttccccctccaaacactcagatcctaccctccctgggactgattccttgccgtgttcccctccagtttccaactcgtacactcaggcggatccaatggccccaaggaccccgcacccctcacccgcccactccagccggaagccgctgacatctcccgcccccgacccatcagaaagcacagttcagtcgctctctcccaccccgtcccctccaacacccgccccacagcacagtgatctgtgtctggcaatggctgtccagacacctgttcctacagcagccggaggcagcggggataggtccttggaggaggctcttggggctttaatggccgccctggatgattatcggggccagttcccggaactacagggcctagagcaggaggttacacgcctcgaaagtctgctgatgcagagacagggtctcaccaggtccagagcttccagcctgagcataaccgttgagcacgctctggagtcgttctcattcctgaatgaagacgaggatgaggacaatgatgtgcccggtgatagacctccaagttcacccgaagcaggcgccgaggacagtatcgatagcccttcagctagacccctgtcgacagggtgtccagccttagatgcggccctcgtccgccatctgtatcattgttctagactgttgctgaaacttggaacatttgggccactccgatgtcaggaggcatgggctctggaacgcctattgagagaggctcgagtactggaggccgtatgcgagttttcaagacggtgggaaatacctgcctcaagcgctcaggaagtagtgcaattcagcgcctctaggccaggattcttgaccttctgggatcagtgtacagagcgtctctcatgttttctgtgtcctgtggaaagggttcttctgacattttgcaaccagtacggtgctaggctgtcactcagacagccaggtttagctgaagcggtatgtgtgaagtttctagaagatgcgctgggacaaaagcttcccaggagaccgcaaccgggccctggcgagcagttaacagtctttcagttttggtcatttgttgaaacgttagattcccctacaatggaggcttacgttactgaaaccgcagaagaggtccttcttgtacgaaatctcaattccgatgaccaggccgtggtgctcaaggccctgcgtctggccccagaaggccggctgcgcagagacggactgagagctctgtcaagccttctggttcacggcaacaataaggttatggccgctgtatcaacccagctgaggtctcttagcttgggcccgacttttcgggaacgtgccttgctttgtttcttggatcagctggaggatgaggatgtgcagacgagagtggctggctgcctggcgttggggtgcatcaaagcccctgaagggatagagcccctggtgtacctatgccagacagacactgaggccgttcgggaagccgctagacagtctcttcagcaatgtggggaagaaggtcagtctgcgcaccgcaggctggaagaaagtttggatgccctgccccgcatattcggaccagggtctatggcgtctaccgcattctag

SEQ ID NO: 22744 - DNA, 1326 bp, synthetic construct
  source 1..1326: mol_type = other DNA; note = Synthetic coding sequence
atggccagcgtggccgccgcccgggccgtgcccgtgggcagcggcttgcgcggtctgcagaggacactgccccttgttgtgatcctgggagccacgggtactggcaaaagcacgctggcattgcagctcggacagcgcctaggaggagagatcgttagcgctgatagtatgcaggtgtatgaaggtctggacatcataacgaacaaggtcagcgcccaagagcagagaatctgtcgacatcatatgatctctttcgtagaccccctggttactaattacactgtggttgattttagaaatcgagccaccgctctgatagaggacatctttgctcgagacaagatccccatcgtggtgggcgggactaattactatatcgagtctttgctgtggaaagtgcttgtcaataccaagccgcaggagatggggacagagaaggtcatcgatcgcaaagtggaacttgagaaagaggacggactcgtactgcacaaaaggctgtcccaggtagacccagagatggcagcgaaactccacccacacgacaaaaggaaagtggcacggtctctacaagtttttgaagaaactggaattagccactctgagtttctgcatcgccagcacaccgaggaaggcgggggtcccctgggtggacccttgaagttctccaatccttgcattttatggctccatgcggaccaggccgtgcttgatgaacggctcgataagagagtcgatgacatgctggctgctggattgttagaagaactgcgggacttccacaggcggtataatcagaagaacgtgtccgagaactcccaggattaccagcatggaatctttcagtctatcggtttcaaagagtttcacgagtatctgattacagagggaaagtgtacccttgagacctcgaaccagctcttaaaaaagggccccggtccaatagttccacccgtgtacgggctggaggtgtctgacgtgtcaaagtgggaggaatccgttctggaacccgcgttggagatcgtccagagctttatccagggacataagccaactgccacccccatcaagatgccctacaacgaggccgagaataaacggtcctaccacctgtgcgatctctgcgaccgcatcatcataggtgaccgcgaatgggccgctcatataaaaagtaagagccacttgaatcagctcaaaaaacgtagacggttagattctgacgcggtgaacaccattgaatcccagagcgttagccccgatcataacaaggaaccaaaggagaaaggtagtcctgggcaaaatgaccaggaattgaagtgctccgtgtag

SEQ ID NO: 22745 - DNA, 618 bp, synthetic construct
  source 1..618: mol_type = other DNA; note = Synthetic coding sequence
atggccgagcccctgcagcccgaccccggcgccgccgaggacgccgccgcccaggcagtggagacccccggctggaaagcaccagaggatgccgggcctcaacctggctcctacgaaatccgtcactatggcccggccaaatgggtgagcacatctgttgagagcatggactgggactctgccattcaaactgggtttacgaagctgaactcatatatccagggtaagaacgagaaggagatgaaaatcaaaatgacagcgcccgtgacaagttacgtggaacctgggtccgggccgtttagcgaaagcactattacgatttctctttacatcccctccgaacagcagtttgatccccctaggccccttgaatcagacgtgtttattgaagaccgtgctgaaatgacagtatttgtgagatctttcgatggattctcctccgcccaaaagaatcaggaacaattattaactctggcaagtatcctcagggaggacggcaaagtgttcgatgagaaggtgtactacactgctggctataactcccccgtaaaactgttgaataggaataatgaagtgtggttgatacaaaaaaacgagccaaccaaggaaaacgaatag

SEQ ID NO: 22746 - DNA, 624 bp, synthetic construct
  source 1..624: mol_type = other DNA; note = Synthetic coding sequence
atgagctgcaccatcgagaagatcctgaccgacgccaagaccctgctcgagcgactccgagagcacgatgctgcagctgaatctttggtcgatcagagcgccgcgttacataggcgcgtggcggcaatgcgggaagcaggtaccgcgcttcccgaccagtaccaggaggacgcttcagatatgaaagacatgagcaaatacaaaccccacatcctgctaagccaagagaacacgcaaatcagagacctccaacaggagaatagggagctgtggatcagcctcgaagagcaccaagacgctctagagcttatcatgagcaagtaccggaaacagatgctgcagctgatggttgccaagaaagccgtggacgcagagcccgttctcaaagcacaccagtcccattcagccgagatagaatcacagatcgatcggatttgcgaaatgggtgaggtgatgcgcaaagccgtacaagttgacgatgatcagttctgcaaaatccaggaaaaactggcacaactggagctcgaaaacaaagagctccgtgaattactgtccataagtagtgaatctctgcaggcccggaaggagaatagtatggacaccgccagccaagccatcaagtag

SEQ ID NO: 22747 - DNA, 1032 bp, synthetic construct
  source 1..1032: mol_type = other DNA; note = Synthetic coding sequence
atgaacatccaccggagcacccccatcaccatcgcccggtacggcagatctcgtaataagacccaggacttcgaggaactctcctccatccgcagcgctgagcctagccagtcattctcccccaacctgggaagcccttctccccccgagacacctaacctatcccattgcgtatcctgcatcggcaaataccttcttctggaacctctggagggcgaccacgttttcagggcagtccacctccatagcggcgaggaactagtctgcaaagtctttgacattagttgttaccaggagtccctggccccttgtttctgcctatcggcgcacagcaacattaaccagattactgagattatcctgggagagacgaaagcatatgtatttttcgagagaagttatggtgatatgcattctttcgtgcggacttgcaaaaagcttcgtgaggaagaggcagccagactgttctaccagattgcatcagccgttgctcattgtcacgacggaggcctggtgctgagagatttgaaactgaggaagttcatcttcaaagacgaggaacgtactcgagtcaaactggaaagcctggaagatgcttacattctccgaggagacgacgactccttgagcgataagcacggttgccctgcttacgtctcccccgagatcttaaacaccagtggttcttacagtgggaaagctgccgatgtctggtctctcggtgtcatgttgtacacaatgttagttggaaggtacccgtttcatgatatagagcccagttccctcttctccaagatccgacggggccaattcaacattcctgagacgctgtcaccgaaagccaaatgtctgatacgcagcatcttgcggagggaacccagtgaaagattgaccagccaagagattctcgatcatccatggtttagcaccgacttctccgttagcaacagcgcatacggtgctaaggaggtgtctgatcagcttgtgcccgatgtgaatatggaagaaaacctcgacccgttcttcaattag

SEQ ID NO: 22748 - DNA, 3048 bp, synthetic construct
  source 1..3048: mol_type = other DNA; note = Synthetic coding sequence
atgcggcggttcctgcggcccggccacgaccccgtgcgggagcggcttaagagagacctgttccaatttaacaagacagttgagcacggctttcctcaccaaccatctgccctgggatactcaccatctctgagaatcctcgcaattggtacccgtagcggagccataaaactatacggagcgccgggggtcgagtttatggggttgcaccaggaaaacaatgcagtgacccagatccacctcctgccaggtcagtgccagcttgtgactctgctggatgataacagcctgcatctgtggagtctgaaggtgaaagggggagccagcgaactccaagaggacgagtccttcacactgcggggcccacccggtgctgcaccctccgccacccagatcacagtcgtcctgccccactccagctgcgagctgctttatctcgggacggaaagtgggaacgtgttcgttgtgcagctgcctgcgtttcgcgccctggaagatagaaccattagcagtgatgcagtgctccagaggctgcccgaagaagcccggcatcgcagagttttcgagatggttgaagccctgcaggagcaccctagagaccccaatcagatcctcatcgggtattcacgcggcctcgttgtcatctgggacctgcaggggagcagggttctctaccattttttgagcagccagcagttggagaacatttggtggcaacgcgacggcagactgcttgttagttgccactccgacgggagctactgccagtggcccgtatccagtgaggcacaacagcccgaacctttgcgaagcctggtcccatatggtccgtttccatgcaaggcaatcaccaggattctctggttaactacccgtcaggggcttcccttcaccatctttcagggagggatgccccgggccagttacggagatcgccactgcatcagcgttatacatgatgggcaacagaccgctttcgatttcaccagtagggtcattggatttactgtgctcaccgaggcggatccggctgcaaccttcgacgatccttatgccctggtcgtgttggctgaagaggagctcgttgtaatcgacctccagaccgccgggtggccccccgtgcaacttccatatctggccagcctgcactgctccgctataacttgctctcaccacgtgtctaacattccacttaaattgtgggaacgtataatagctgctggtagcagacagaatgctcacttttctactatggagtggcctatcgacggcgggactagtctgaccccagcccccccccagcgggacctgttattaaccgggcatgaggacggtactgtgcggttctgggatgcctccggagtctgtctaaggctcctctacaaactttcaaccgttagagtgttcctgaccgacaccgatccaaatgagaacttttcggcacagggtgaagacgagtggccgcccttgagaaaggtgggtagctttgacccatacagcgacgatcccagattgggcatccagaaaatattcctatgtaagtattccggatacctggcagtcgctggaacagccggccaggtcctcgttctggagcttaatgatgaggctgccgaacaggctgtcgagcaggtagaggccgatttgctccaggatcaggagggttacagatggaaagggcatgagcgcctggccgcgagaagcggacctgtgagatttgaaccagggttccaaccattcgtgctggtgcagtgccagcccccagcagtcgtcaccagtctggccctccacagtgaatggcgcttggttgcctttggcacatcccacggctttggactgttcgaccaccagcaaagaaggcaggtcttcgtcaagtgcacgctgcacccctcagaccaattagcccttgaaggccccctgagtagggtaaaaagccttaagaagtcgttgagacagtcctttagacggatgcgacgtagccgggtgtcgagtaggaagcggcatcccgcggggccgccgggggaagcccaggagggctccgctaaagccgagaggccaggtctgcaaaatatggagcttgctccggtccagcggaagattgaagctcgaagcgcggaggattccttcaccggatttgtaagaaccctgtactttgccgacacatacctaaaagatagtagccgccattgtcctagcctatgggccggaactaatgggggcacaatatatgcattttctctgcgtgtcccaccagccgaacgacggatggatgagcccgtgagagccgagcaggctaaggagatccaactgatgcacagggcaccagttgttggtatactggtccttgatggccatagcgtccccttacctgagcccctggaggtggcccacgacttatctaagtcccccgacatgcagggatcccaccaactgctggttgtcagcgaagagcagttcaaggtcttcactctgcctaaagtttccgccaagcttaagcttaaactcaccgcattggaaggctcccgagtccgccgggtttctgtggcccatttcggaagcaggcgtgctgaggattacggtgaacatcatcttgcggtgttgactaacctgggggacatccaagtggtctcactaccactcctaaagccccaggttcgctatagctgtattcgaagggaggatgtcagcggcatcgcgtcgtgtgtattcacaaaatatggtcaggggttctacctgatcagtcccagcgagtttgagcgattttcacttagcactaaatggctggttgaacctcgatgtctggtcgattcggctgagacaaagaatcacaggccaggtaacggagccggaccgaagaaagcgcccagcagggctagaaattccgggacacaaagcgacggcgaagagaagcagcccggcctggtaatggagcgcgccttactgagcgatgagagagcagctaccggcgttcacatcgagccaccttggggggccgcttcagctatggccgaacagtccgaatggctgagcgtccaggccgctcggtag

SEQ ID NO: 22749 - DNA, 897 bp, synthetic construct
  source 1..897: mol_type = other DNA; note = Synthetic coding sequence
atggccgccgccgagcccgccgtgctggccctgcccaacagcggcgcagggggggcaggagcacctagcggaacggttcctgtgctgttttgcttctctgtctttgctcgccctagctccgtaccccatggggctggttacgagctacttatccagaaattcctctctctatacggcgaccagatagatatgcatagaaagtttgtcgtgcaactcttcgccgaagagtggggccaatatgtggatttgccaaaaggcttcgccgtgagcgagcggtgcaaggttagactggtgcctctccaaattcagttgactactctcggcaatcttaccccatcctccacagtcttcttttgctgtgatatgcaagagcgatttcggcctgccattaagtactttggcgatatcatctctgttggacagaggctcctgcagggcgccagaatactgggcatacctgttattgtaacagagcagtaccccaagggtctcggttctacagtccaggaaattgatctaactggcgtgaagctagttttgccgaaaacaaagttcagcatggtgctgccagaggtggaggcggccctggccgagatcccaggagtgagaagcgtagtgctcttcggggtggagacacatgtctgtatacagcagacagctctggagcttgtgggaagaggcgtcgaggttcatatcgtagcggacgcaacatctagtcgcagcatgatggaccggatgttcgccctagagagattagcgcgcacaggaataatcgtgaccacgtctgaagcagtattactgcagctcgttgccgacaaagaccaccctaagttcaaggaaattcaaaatctaatcaaagctagtgctcccgagtccggccttctgtctaaagtgtag

SEQ ID NO: 22750 - DNA, 2439 bp, synthetic construct
  source 1..2439: mol_type = other DNA; note = Synthetic coding sequence
atgagcgagcagggcgacctgaaccaggccatcgccgaggagggcggtaccgaacaggagactgcgacgcctgaaaatggaatcgtcaagagcgagtctctcgatgaggaagagaagttagaactacagaggcgcttggaggctcaaaatcaggaaagaaggaagagcaagagcggggcggggaaggggaagttgacccggagtctggcggtatgtgaagagtcaagtgcgcggccaggaggcgagtcgctccaggaccaagaatcaattcacttacagttgtcctccttctcgagcctccaggaggaagataaatcaaggaaagacgactcagaacgcgaaaaggaaaaggacaagaataaagacaagacctcagaaaagcccaaaatacgaatgctgtctaaggactgcagccaagaatacaccgactccacgggtatcgatctgcacgagtttctcatcaacacgctgaaaaataacagccgcgataggatgatattactgaagatggagcaggaaattatagatttcatcgctgataacaataatcattacaaaaaatttccacagatgagttcatatcagcggatgttagtgcatcgggttgcggcgtactttggcctagaccacaatgttgatcaaacggggaagtctgtcatcataaataaaacaagctccacgagaatcccggagcaacggttttgcgagcatcttaaagatgagaaaggcgaagaatctcagaagagatttattcttaaacgtgacaattcatcaatcgataaggaggacaatcagcagaatcggatgcacccgtttcgcgatgatagaaggtccaagagtattgaagagagagaggaggagtatcaacgcgttcgggagagaatcttcgctcatgattccgtgtgctcacaggagtcgctgttcgtagagaactcgcggttgttggaggactctaacatctgtaacgaaacatataaaaagcgacagctgtttcgcggcaatcgggatggcagcggacgtacaagtggctcccgccagagttcgtctgagaatgagctgaaatggagtgatcatcagcgggcttggtcaagcactgattctgattctagcaatcgcaacttgaaacccgctatgacaaagacagcctctttcggcgggataaccgtcctgacccgcggcgactctacttcctccacccgctcaacaggaaaactgagcaaggccgggtctgaaagttccagctcagcgggatcaagcggctccctgtctaggacacatccacccttgcaatctacacctttggtatctggggttgcagcggggtcccctggatgcgtgccttatcccgaaaatggaatcgggggccaggttgcaccttcctcaacaagctatatcctgctgccactcgaagcagcaaccggcatacctccaggctcaattctgttgaacccccacaccgggcaaccgtttgtgaaccctgatggtactcctgctatctacaatccccctacatctcaacagcctctccgttcagccatggtggggcagagccagcaacagccaccccagcagcaaccaagcccacagccacagcagcaggtccagccacctcagccacagatggccggaccactcgtgactcagcgcgacgatgtggccactcagttcggtcagatgaccctaagtcggcagtcatccggggaaaccccggagccgccttccgggcctgtatacccatcatctctcatgccgcaaccagcccagcagccttcttatgtgatcgcctctacaggccagcaactgcccaccgggggattcagtggctcggggcctcctatttcccagcaggtgctgcagcccccgccctcaccccaggggtttgtgcaacagccgcctccagcgcagatgcccgtgtactactatccctcaggccagtatcccacgtccaccactcagcagtatcggcccatggcccccgtgcagtacaacgcccaaagatcacagcaaatgccacaggctgctcaacaggcaggctaccagccagtactttccggccagcaggggttccaaggcctgattggggtccagcagccccctcagtctcagaacgtgataaacaaccagcagggcacccccgtgcagagcgttatggttagttatccgaccatgtcctcctaccaggtacctatgacgcaggggagtcagggtcttcctcagcagtcctaccagcaacccattatgttacctaaccaagctggtcagggctccttgcctgccacaggaatgcccgtgtactgcaacgtgacacctccaaccccccagaataatctgcggctaataggcccacattgtcccagcagcacagtgcccgtgatgtccgcgtcatgccgcaccaactgtgcgagcatgtccaatgcaggttggcaagtaaagttttag

SEQ ID NO: 22751 - DNA, 1191 bp, synthetic construct
  source 1..1191: mol_type = other DNA; note = Synthetic coding sequence
atgaccaccctggtgctggacaacggcgcctacaacgccaagatcggctacagccacgagaatgtgagcgtgattcctaactgccagttccgatctaagacagctcgcctgaaaacgtttacggccaatcagattgacgaaattaaggacccctcgggtctattttatattctgccatttcaaaaagggtacctcgtaaattgggatgtccagcgtcaggtttgggattatctcttcgggaaggaaatgtatcaggttgactttctggacacaaacataatcatcaccgagccgtactttaactttacatctattcaggaatcaatgaatgaaatcttgttcgaggagtaccaattccaggctgtcctgcgggtgaacgccggtgccttgtccgctcaccgctattttagagacaacccctcagagctctgttgtataatcgtggacagcggttacagctttacacatatcgttccatattgtaggtctaagaagaagaaggaggccatcattcggatcaatgtgggtggaaaactcctaaccaaccacttgaaagagatcatatcctataggcaattgcacgtcatggatgagacccatgtaatcaaccaggtgaaggaggatgtctgttatgtcagccaggatttttacagagatatggacattgccaaactgaagggcgaagagaacaccgttatgattgactacgtgctgcccgatttttctacaattaagaaaggattttgcaagcctagggaagagatggtgctgagtggcaagtataaatccggagaacaaatcctgcggctggcgaatgagagattcgctgtcccagaaatcctgttcaaccccagtgatataggaatccaggagatggggattccagaagcgattgtgtattccattcagaatctgccagaagagatgcagccacactttttcaagaatattgttctaacagggggaaactcgttgtttccaggattccgagatcgcgtctacagcgaagtgagatgccttacccctactgactacgacgtgagcgtggtgctccctgagaaccccataacgtatgcctgggaggggggcaagttaattagcgagaacgacgatttcgaggatatggttgtaacccgagaggattacgaagaaaatggacattcagtatgcgaggagaagttcgacatatag

SEQ ID NO: 22752 - DNA, 1005 bp, synthetic construct
  source 1..1005: mol_type = other DNA; note = Synthetic coding sequence
atggagcccggccccaccgccgcccagcggcggtgcagcctgcccccatggctgcctttggggcttctgctttggtcggggttggcccttggagcgttgcccttcggttcctcaccccatagggttttccatgatttgctctctgagcaacagttgctggaagtggaggatctaagcctcagcctcctccaggggggaggcctgggtccactaagtttgccacctgatctgccagacctggaccccgaatgtcgcgagttgctactggactttgcgaactcatctgcggagcttacaggctgtcttgttcggtccgcaaggccagtacgtctgtgtcagacttgctatcccttatttcagcaagtcgtcagtaaaatggacaatatctctcgggctgctgggaatacatccgagagccagtcctgtgcccggtcactgttgatggccgatcgtatgcaaattgttgtgattttgtccgagttttttaacactacgtggcaggaggcaaattgcgctaactgtctgactaacaatagtgaagagctctctaacagtaccgtatattttttgaatttgtttaatcatacattgacgtgtttcgagcacaaccttcagggaaatgctcatagcctgctgcagacaaaaaattatagcgaggtgtgcaaaaactgtcgggaagcttacaagaccctgagcagcttatactctgagatgcagaaaatgaacgaactggagaacaaagcagagccaggcacacacctttgcatagacgtggaagacgcaatgaacatcactcgcaaactctggtcacgtacctttaactgttccgtgccgtgctctgacacggtgcccgttatagccgtctccgtgttcatcctcttcctgcccgtagtgttctatctcagttcattcctgcactcagaacagaagaagcgcaaactcattctgcctaaacgtctgaaaagtagtacttcatttgctaacatacaagagaacagtaactag

SEQ ID NO: 22753 - DNA, 2172 bp, synthetic construct
  source 1..2172: mol_type = other DNA; note = Synthetic coding sequence
atgagcaccgccaccggccccgaggccgcccccaagcccagcgccaagagcatttacgagcagcgcaagaggtattcaaccgtggttatggccgacgtcagccagtaccctgtaaatcaccttgtgacattctgcctgggggaagacgacggcgtccacactgttgaggatgcctcccgaaagctggcagtgatggatagccaaggaagagtgtgggcccaggaaatgctgctgcgggtgtcccctgaccacgtgaccctgttggatccagcctccaaggaagaactggaatcgtacccactaggtgctattgtcagatgcgacgctgtcatgccacctggtagatctagatccctgctcctgctggtgtgtcaggagccagaacgggctcaaccagatgtgcatttcttccagggacttaggttaggagctgagctgattcgggaggacattcagggcgcactccacaactaccggtctggacgcggagaacgtagggcagccgctctgcgagccactcaagaggagctccaaagggaccggtcaccagccgccgagacacccccattacaaaggcgcccctctgtccgggcggtgatttccaccgtagaacggggcgcaggccgcggccgccctcaggcaaagccaattcctgaggccgaagaggcccagcggccagagccggtcgggacatcttcgaacgctgactccgcttcaccagatctgggccctagaggacctgacctggccgtactgcaagcggaacgagaagtagacattctgaaccacgtcttcgatgacgttgagtcattcgtctctagactacagaagtcagctgaagcagctcgggtgctcgaacaccgggaacggggccggcgttccaggaggcgcgccgccggtgaaggattgctgacactgcgagcaaaacccccctctgaggcagaatatacagatgtcctgcagaagattaaatatgcattttctcttcttgctcgcctgcgaggaaacattgctgaccctagtagccctgagctccttcatttcttgtttgggcccctgcaaatgatagtcaacacctcaggcggtcccgagttcgccagcagtgtccgccgaccccacctcacatccgacgccgtggctctgctgagagacaacgttaccccccgcgaaaatgaactttggacaagcctaggggattcctggacgaggccaggattagaactttcaccggaagaaggccccccctatagacccgagtttttctcgggctgggagcctccagtcacagaccctcaatctcgcgcatgggaggacccagtagagaaacaattgcagcacgagcgcaggaggcggcagcagagcgcccctcaggtcgctgtgaatggtcatcgtgacttggagcccgagtctgagccccagttggagtcagaaactgctggaaaatgggtgctgtgtaattatgattttcaagcacgcaatagcagcgagctgtcggtcaaacagcgggatgtattggaagtgttggatgactcaaggaagtggtggaaggttcgggatccagccggtcaagagggctacgtcccttacaacatcctgacaccatatccaggcccccggctgcatcactctcaaagccctgcccgttcattgaactctaccccaccgccaccccctgcccctgctccagctccaccccctgctctcgcacggccccgatgggaccggcctcggtgggacagttgtgacagcttaaatggactggatccctccgaaaaagagaagtttagccaaatgctaattgttaatgaggagctccaggctagactcgcccaagggaggtctgggccatcaagagccgtgcctggcccccgcgcccccgagccccaactttcacctggcagcgacgcctcggaagtccgcgcatggcttcaggccaagggtttctcatccggcactgttgacgccctcggagttctgacaggtgcccagttattctctctgcagaaagaggagttgcgcgctgtttcccccgaagagggcgcccgcgtgtactcccaggtcactgtgcagcggtctttgctggaagacaaggagaaggtttctgagttggaagctgtgatggagaaacaaaagaagaaggtggaaggcgaagtggaaatggaggtgatttag

SEQ ID NO: 22754 - DNA, 5622 bp, synthetic construct
  source 1..5622: mol_type = other DNA; note = Synthetic coding sequence
atgttcagccggcggagccacggcgacgtgaagaagagcacccagaaagtcctcgaccccaagaaggacgttctgacccgcctaaagcacctgcgagctctcctggacaacgtggatgccaatgaccttaaacagttctttgagaccaattatagccagatatactttatattctacgagaatttcattgcactggagaattctctcaagctaaaaggcaacaacaaatcacagcgtgaagagctggattcaattctgtttttgtttgagaagatcttacagttcctaccagaaaggatctttttcagatggcactatcagagtattgggtcaacattaaaaaagttgcttcatactgggaactctattaaaatccgctgcgagggcatcagacttttcttgctctggctgcaggctctgcagacaaattgtgcagaggagcaggtcctcatcttcgcatgtctcgtgccggggtttccagctgtaatgtcatcacggggaccatgcacactcgaaactcttattaacccaagcccgtcagtcgccgacgtgaagatatatcctgaagaaattacccccctgctacctgccatctctggcgaaaaaattgctgaggatcagacgtgtttcttccttcagatcctgctaaagtacatggtaatacaggctgcgagcttggagtggaagaataaagaaaaccaggacaccggcttcaagtttctatttaccttgtttcgaaagtattacttgccccacctgtttccatcttttacaaagcttaccaatatatataagccagtgctggacataccacatctcagacccaaacccgtttacataaccacaaccagggacaacgagaacatctactccaccaagattccctatatggccgcgcgggtagtgttcattaaatggattgtgactttcttcctggaaaagaagtacctaactgcaactcaaaataccaaaaacggcgtagacgtccttcctaaaatcattcagaccgtcggcggcggcgccgttcaggagagggcaccagagttggatgggggaggccctaccgaacaagacaagagccatagcaatagctcaaccctgagtgatagaaggctttctaactcctccctgtgcagtatcgaggaagagcatcggatggtttacgaaatggtgcagcgtatccttctgagcaccaggggatacgtgaattttgtgaatgaggtttttcatcaggcttttctgttgccctcctgcgagattgccgtcaccaggaaggtggtacaggtttatcgcaaatggatcctccaggacaaaccagtgttcatggaggagccagaccgtaaggacgtggcacaggaagacgccgagaagctagggttctcagagaccgatagtaaagaggcgtcctccgagagctccggtcacaagagatcatcttcatgggggcgcacatactcattcacgtcagccatgtctcgaggctgcgtaactgaggaggagaacaccaatgtcaaggccggggtacaggcacttctccaggtttttctgaccaattccgcaaacattttcctgctggaaccttgtgcagaggtacccgtgttgctgaaggaacaagtcgacgcatgcaaggcagtcttaataattttcagacggatgattatggaactcactatgaacaagaaaacctgggaacaaatgctccagattttactgagaatcaccgaggcagtcatgcagaagccgaaagacaagcagatcaaggatctgtttgcgcagtctcttgccgggctactgtttagaacgttgatggtggcctggattcgcgcgaacttgtgtgtctatatttcacgcgaactgtgggacgattttcttggtgttctgtcctccctgaccgagtgggaggaactcattaacgagtgggcaaatattatggattctctgaccgccgtccttgcgagaaccgtttatggggtagaaatgactaacctgccgctggacaaactctccgagcagaaggaaaagaagcagcgcggaaaaggatgtgtgctggatccacagaagggaacgactgtgggtaggagctttagcttgagctggcgttctcatcccgacgtcactgagccgatgcggtttcgttcggcaacaacttcaggagctcccggagtagaaaaagcaagaaatatagtaaggcagaaggctactgaggtagaagagtgtcagcagtcagagaacgctccggccgctggctccggacacctcaccgttggtcagcaacaacaggtcctgcggtcttccagcacgtccgacatacctgagccattatgctctgattcttcacaaggccagaaggcagaaaacacacagaattcaagcagctccgaaccgcagccaatacaggaaaataagggtcatgtgaaaagggagcacgaaggaatcaccatcctggtcaggcggagctcctcacccgccgaattggatctgaaggatgatcttcagcaaacacagggaaagtgtagagaaaggcagaaatcagaatctactaatagcgataccaccttaggatgtactaatgaggcggagctgagcatgggcccttggcaaacatgcgaggaggacccagagctcaacacgccaacagacgtcgtagcagacgcggatgcaaggcattggctccagcttagcccaactgatgcatccaatctcacggatagctccgagtgtcttacagatgattgtagcattatcgcaggcgggtcgctgaccgggtggcatccagactctgcggccgtcctatggcgccgggtgcttggaattttgggtgacgtaaataacatccagtctcctaagatacatgcccgtgtcttctgctatttgtatgagctgtggtacaagttagccaaaatccgagataatctggccattagcctggacaatcaatcttcgccaagcccccccgtgcttatcccccctctacgcatgttcgcctcttggctgttcaaagccgcaaccctccccaacgaatataaagagggtaagttacaagcctataggctgatctgtgcgatgatgacccgcaggcaggatgtactccccaactcagatttcctcgtccacttttaccttgtcatgcatctggggctaacgagtgaggatcaggacatcttgaacactataatcagacactgtcccccccgcttcttcagtctgggattccccggttttagtatgctggtaggcgatttcattaccgctgccgccagagtgctgtcaacagatatactgaccgccccacgaagcgaggccgtgactgtgcttggctcactggtgtgcttccctaacacttatcaggagatacccctgctgcagtccgttcctgaagtgaacgaggctattactggaaccgaagacgtaaaacactacctaatcaatattctgctgaagaacgctaccgaagaacccaacgaatatgcccgctgtatagcggtgtgctccctaggcgtgtggatctgcgaggaactggctcagtgcacttcgcaccctcaagtgaaggaggcaatcaatgtgatcggcgttactctgaaattcccaaataaaattgtagcccaggtagcatgcgatgttttacagctgttggtgtcctactgggaaaagctccagatgttcgagacaagcctccccaggaaaatggccgagattctggtcgctaccgtggccttcctcttgccaagcgcagagtattcctcggtggaaacagacaagaagttcattgtcagcctcctgctgtgtctccttgactggtgtatggcattgcccgtatctgtgctgctccacccagtgtcaaccgccgtgctcgaggaacagcactccgctcgggctcccctactcgactatatctatcgtgtccttcattgctgtgtctgcggtagttccacatatacacagcagtcccactatattctgactttggccgacctgagcagcaccgattacgacccgtttctcccattggccaacgtgaaatcgtcagaacctgtccagtatcactcctctgcggaactcggtaacctgttgactgtggaggaggagaaaaagcgtaggtccctagagttgattccactcactgctcgtatggtgatggctcacctggtaaaccatctgggacactatccactttccggaggtcctgctatcttgcactcccttgtgtctgagaatcatgacaatgcccatgtggaggggagtgagttgtccttcgaagtgttccgcagcccgaatttacagctgttcgtatttaacgactcgactctaatcagctacctgcagacccctaccgagggtcccgtgggcggaagcccagtgggttctttaagcgacgtacgggtcatagtgagggatatatctggtaagtactcttgggatggcaaggttctttacggccctctggaaggctgccttgccccaaatggacgaaaccccagtttcctgataagttcatggcatcgggacacattcggcccccagaaagattcatcccaagtagaggagggtgacgacgtcctcgacaagctattggaaaatattggccacactagtcctgagtgtctactgccttcccaactcaatctgaacgagccaagtcttactccatgtgggatgaattacgaccaagaaaaggagatcattgaggtgattttgcggcaaaacgcccaggaggacgaatacatccaatcccacaatttcgattccgccatgaaggttaccagccagggacagcctagccctgttgaacccaggggccctttctacttttgccgcctccttctggatgatcttggaatgaatagttgggaccgccgcaagaactttcatctgttaaagaaaaacagtaaattactgcgggagctgaaaaatttggactcacgccagtgccgggagactcataagattgccgtgttctatatcgccgaaggccaggaagataaatgttcgattttgtctaatgaacggggcagtcaagcctacgaggattttgtggccgggctgggctgggaggtggacctgtctacccactgtggatttatgggtggcctgcagcgcaatggtagcaccgggcagaccgctccttactacgccacctccacagttgaggtgatctttcatgtgagcacacggatgccctcagactccgatgattccctgaccaagaaactacgccacttaggtaacgacgaggtgcacatagtttggtccgaacacagccgcgactatcggaggggcataattccaaccgccttcggcgacgtgtctatcattatctatccgatgaagaatcatatgtttttcatcgccataacaaaaaagccagaggtaccatttttcggccctctatttgatggagcaatagtctcaggtaagctgttaccctctctagtctgcgctacctgcatcaatgcaagcagggcagtgaaatgtctgatcccactgtatcagtcattttacgaagagcgcgcattgtacctggaggccattatccagaatcatcgggaggtgatgacctttgaggacttcgcagctcaggtgttttcgccatcaccttcatacagtctgagcggcacagactag

SEQ ID NO: 22755 - DNA, 1041 bp, synthetic construct
  source 1..1041: mol_type = other DNA; note = Synthetic coding sequence
atggcccggcccggccagcggtggctgggcaagtggctggtggccatggttgtttgggcactatgccgtctcgctacgccactggcgaaaaatttggagccagtgtcatggtcctcattgaacccaaagtttctgagcggaaaggggctcgtgatctatccaaaaattggcgataagctagacattatatgcccacgggccgaagccggccgtccgtacgagtactataagctttacttggtgagacccgagcaagccgcagcatgttctaccgtgctcgatcccaacgtgctcgtgacatgcaataggcctgaacaggagattcgttttacaattaaattccaggaattcagtccaaactatatgggtttagagttcaaaaagcaccatgattactatatcacctctacctccaacggaagcctggaggggctagagaaccgagagggtggagtgtgccgcactcgtacaatgaaaataattatgaaggtgggccaggatccaaacgcagtcacccctgagcagcttacgacatcccgccccagcaaggaggcagataataccgtcaaaatggctactcaggcaccaggttcaagaggtagtttgggagactccgatggcaaacatgagaccgtcaaccaggaggagaaatctggtcccggagcatccggcgggagctccggagatcctgatggcttttttaactcaaaggtagccctctttgcggccgtcggagcggggtgtgtcattttcctcctaatcataatatttctgaccgtgctgttattgaaactgcggaagaggcaccgtaagcatacccagcagagagctgctgcattgagtttgagcacgttggcatcacctaagggcggcagcgggaccgccgggaccgagccttccgatattataatccctttgagaaccaccgaaaacaattactgcccccattacgagaaagtgagcggcgactatggacaccccgtgtatattgtccaggaaatgcccccacagagccctgccaacatctattacaaggtttag

SEQ ID NO: 22756 - DNA, 1617 bp, synthetic construct
  source 1..1617: mol_type = other DNA; note = Synthetic coding sequence
atggccagcgaccccatcttcaccctggccccccccctgcactgccactatggagcattcccaccaaacgcgtccggttgggaacagccaccaaatgcatccggggtttctgtcgcaagcgccgccctggccgcaagtgcagcatccagagtcgccactagtaccgatcccagctgctctggctttgcccctccagatttcaatcactgtctaaaggattgggactataacggcttgccagttctgactaccaatgctattggtcagtgggacctggtttgcgacttggggtggcaggtcattctggagcagattctgttcattctggggttcgcaagcggctacctttttctcggatatccagcagatcgctttggcagaagggggatcgtgctcttaacactgggcttggtggggccctgtggggtcggcggggcagctgccggctcttctaccggtgtaatggctcttcgcttcttgcttggctttcttctcgctggcgtcgatctgggggtttatctcatgagactggaactgtgtgaccccacccaacgcctgcgggttgccctggccggagaactggttggcgtcggagggcacttcctattcctcggactggcattagttagtaaggactggcgattcctacaaagaatgattacagcaccttgtatcctgtttcttttctatgggtggccgggattgtttctggagtccgcccgatggctcattgtgaaacgtcagattgaggaagcacaaagtgtgctgcgaatcctggcagagcgaaaccgcccgcatgggcagatgctcggagaagaggcgcaggaggcactgcaggatctggagaacacttgtcctttacctgcaaccagctcgttttccttcgcatccttgctgaactaccggaatatatggaagaacctcctcatattggggtttacaaattttattgcccacgcaattaggcattgctatcagcccgtgggcggcggcggatctcctagcgatttttatctctgtagcctgctcgccagcggcactgctgctctggcatgtgtgttcctgggagtgacagtggatcggtttggccgtcgaggaatcctcctcctaagcatgaccctgacaggtattgcctcactggtgctgttaggcctgtgggactgcgagcaccccatattcccgactgtgtgggcccagcagggcaatcctaaccgcgacttaaacgaagccgctattacgacgttctctgtgcttggattgttttctagccaagcagctgcaatcctcagcaccttgctcgccgcggaagtgatcccgaccactgttagaggaagaggcctgggcctgattatggccttaggagcccttgggggtctttcgggtcccgcccagcgtttgcatatgggacatggagcatttctgcagcacgtggttctggcagcatgcgctctcctgtgtatactttccattatgctgctgccagagaccaagaggaagctcttacccgaggttttgcgcgacggagagctttgcaggagaccttcactcctgaggcagccaccaccgacccggtgcgaccacgtcccgctgttggccacgcctaatccagccctgtag

SEQ ID NO: 22757 - DNA, 1128 bp, synthetic construct
  source 1..1128: mol_type = other DNA; note = Synthetic coding sequence
atgagcaccgccggcaaggtgatcaagtgcaaggccgccgtgctgtgggaactcaaaaagcctttcagcatcgaggaagtcgaagtcgcgcctcccaaggctcatgaagtacgcataaagatggtagccgtgggaatctgtgggacagatgatcatgtagtgtcaggcacaatggttaccccactccccgtgatcctcggacatgaagccgccgggattgttgaatctgtcggtgagggagtgaccaccgtcaagccaggcgataaagtcatccctctggccattcctcaatgtggaaagtgtcggatatgcaagaatccagaaagcaactattgcttgaagaatgatgtgagcaacccgcagggcaccctgcaggacgggacctccaggtttacgtgtcgccgcaaacccattcaccacttccttgggatttccacgttttcccagtacacagtcgtggacgaaaatgctgttgccaagattgacgctgcctctccgcttgagaaagtttgcctgatcgggtgcggattctctacaggctatggtagcgccgttaacgttgcaaaggtgacccctggtagcacttgtgcggtgtttggactggggggggtcggattgtcagcaattatggggtgtaaagcagctggagcagcaaggataatcgctgtggatataaataaagacaaattcgccaaggctaaggaactcggagccactgaatgtatcaatccacaggattacaagaaaccaatccaggaagtactgaaagaaatgacagatgggggagtggattttagcttcgaggttattgggcgcctggatactatgatggcatcactcctgtgctgccatgaggcatgcggaacttcggtaatcgtaggtgttccccccgactcacaaaacctcagtatgaacccgatgctactgctcaccggacgcacttggaagggcgccattctaggcggtttcaaaagcaaggagtgtgttcccaagcttgttgccgattttatggctaaaaaattctctttggacgcgctgatcactcatgtgctgccttttgagaagattaatgaaggatttgacctgcttcattctggaaaatcgatacggaccatcttaatgttctag

SEQ ID NO: 22758 - DNA, 1641 bp, synthetic construct
  source 1..1641: mol_type = other DNA; note = Synthetic coding sequence
atgtgcagcctgggcctgttcccccccccccccccccggggccaggtcacactgtacgaacataacaatgaactggtgacgggaagctcctacgaatcaccgccccccgatttccgtgggcagtggataaatttgccggtgctacagctgactaaagacccactcaagacaccgggtcggctggatcacgggacacgcaccgcattcattcatcaccgtgaacaggtgtggaaacggtgtattaatatatggagggatgtcggtctattcggcgttctcaatgaaattgccaattcggaggaagaagtttttgaatgggtcaagaccgcctctgggtgggctctggccctctgcagatgggcgagctcgctacacggctccctgtttccacatttatctctcagatccgaagatctgatcgcagagtttgcccaagtgaccaactggtcatcgtgctgcctacgggttttcgcctggcatccacataccaataagttcgctgttgcactgctggatgacagcgtgagggtctataatgctagttcaactatcgtgccgtccctcaagcacaggctgcagcggaacgtggcctcgctggcctggaagcccttgtctgcctccgtgttggctgtggcctgccagtcatgcattctgatctggaccctagaccccacatccctgagtaccagacctagctctgggtgcgcgcaggtcctctctcatcctgggcatactccggtcacatcactggcctgggcccccagtgggggcagactcctgtcggcaagcccagtggatgcagccatccgcgtgtgggacgtttctaccgagacttgtgtcccactgccctggttccggggaggaggcgtgactaacttactgtggtctcccgacgggagtaagatccttgcaactaccccttctgctgtgttccgcgtgtgggaggctcagatgtggacttgcgagagatggccaacattaagcggccggtgtcagacagggtgttggagtccagacggatcacgtcttttattcacagtgctgggcgagcccctgatatactcactgtctttccccgaaaggtgcggtgaggggaagggctgtgtgggcggtgcgaagtcggccaccatcgtcgccgacttgtcagagaccactattcagaccccggacggagaggaaaggttagggggggaggcccactcgatggtttgggatccatccggggagagactggccgtactaatgaaaggaaaacctcgggtgcaagacggcaagccagtgatactgctgttcaggacaagaaactctcccgtcttcgagctccttccctgcggcatcatccagggtgaacctggcgctcagcctcagctgattacatttcatcctagctttaataagggtgctctgctgagtgtcggatggagcacaggacgaattgcccatatccctctgtactttgtcaatgcccagtttccccggttctcccccgtgttaggacgtgcccaggaaccccctgccggcgggggcgggtccatccacgatctgccgcttttcacagagactagtcccacttccgccccttgggatcctcttccagggcctcccccagtcctgccacattctcctcactcgcacctttag

SEQ ID NO: 22759 - DNA, 576 bp, synthetic construct
  source 1..576: mol_type = other DNA; note = Synthetic coding sequence
atgggcaagaagaccaagcggaccgccgacagcagcagcagcgaggatgaagaggaatacgtcgttgaaaaagtgttggatcgtagggttgtaaaaggccaggtggaatacctgctgaagtggaaaggcttctccgaagaacacaacacttgggagcctgagaagaatttagattgtccagagctgataagcgaatttatgaagaaatacaagaagatgaaagagggcgagaacaataagccccgtgaaaaaagtgaatctaacaagaggaagtctaactttagcaactctgccgatgatatcaagtctaagaaaaaaagagagcagagcaacgacatcgctaggggcttcgaaagagggctggaacccgagaaaattatcggcgccaccgacagctgcggcgacctgatgtttttgatgaagtggaaagataccgacgaggctgatctggtgcttgctaaagaagctaacgttaagtgcccacagattgtcatagccttctatgaggaaagactgacctggcacgcttatcccgaggatgccgagaacaaagaaaaggagacagctaagtcatag

SEQ ID NO: 22760 - DNA, 1554 bp, synthetic construct
  source 1..1554: mol_type = other DNA; note = Synthetic coding sequence
atgggccggaagagcaagaagtggggcaagaaggtgagccggtacgagggcaaggtccgccttaagaaggttcccgccaaaaagttggtgcccgcctggaaagagaaagtactctgggcattactggcagtcttgctggccagctggaggttatgggccatcaaagacttccaagagtgcacttggcaggtggtgctaaatgagtttaaacgggtgggcgaaagcggggtgagcgactcgttttttgaacaggaacctgtggacactgtgagttccttgttccatatgctcgtggactcgccgatcgatccttccgagaagtacctcggattcccatattacctgaagatcaattatagttgcgaggagaagccctctgaagatctcgtgaggatggggcatctcaccgggctcaagccgcttgtgctggttacattccagagccctgtgaacttctaccgctggaaaatcgaacagcttcagatccagatggaagcagcgccattccggtccaagggagggcctgggggcggcgggcgtgaccggaacctcgcagggatgaatatcaatggattcttgaaacgagaccgcgataacaatatccagtttacagttggcgaggagctgtttaacctgatgcctcagtactttgtgggagtctcaagccgacctttatggcatactgtggaccagtctccagtgctgatcctgggcggaatccctaatgagaaatatgtactgatgacggacaccagctttaaagacttcagcttggtggaggtgaacggggtaggacaaatgcttagtattgacagttgctgggtgggcagcttttactgcccgcattcagggtttacagcaaccatctacgacacgatcgccactgaaagcaccctcttcattcggcagaatcagctggtgtactatttcaccgggacctataccactctgtatgaaaggaaccgtgggagtggagagtgtgccgtggcaggtccgaccccgggtgagggtaccctggtaaatccaagtacggaaggatcttggatccgagtgctggcatccgaatgtatcaaaaagctctgtcccgtttactttcatagcaacggctcagagtacataatggctcttacaactggcaagcatgaggggtacgtacatttcggcaccattcgggtgactacttgctctatcatctggagtgagtacatcgctggagagtacacattacttcttcttgtggagagcggctacggcaacgcctccaagcgcttccaggtcgtttcgtataacactgcttctgatgacttagagctgctttatcacatccccgagttcattccagaggccagaggcctggagtttcttatgatcctcggaaccgagagctatactagtaccgctatggcgcctaaaggcatattttgtaatccctacaataacctgatcttcatttggggcaatttcctgctacagcgcagcggaacaagctggcgcgccgcgacaggctccaccagttgttcacttcctcgggctggcagatgcaccagtgcttag

SEQ ID NO: 22761 - DNA, 1203 bp, synthetic construct
  source 1..1203: mol_type = other DNA; note = Synthetic coding sequence
atgagcggccgggtgggcgacctgagccccaagcaggccgagaccctggcaaaatttagagaaaacgtccaagatgtcctgccagcgctgcctaaccctgatgactactttctgctacgatggctccgtgcccgaaattttgatttgcagaagtctgaggctctgttgaggaagtatatggaattccgaaaaacaatggacattgaccacattttagactggcagccccctgaggtgatccagaagtacatgccggggggtctctgcggatacgatcgggacggctgtcccgtatggtatgatattatcggaccactcgaccctaagggactgcttttttctgttactaaacaggaccttctcaagaccaaaatgcgcgactgtgagagaatcctgcacgaatgtgacctgcagacagaacgtctgggaaaaaagatcgagaccattgtgatgatctttgactgtgagggactagggctgaagcatttttggaaacccctggtggaggtctaccaagagttctttggactgcttgaggagaattaccctgaaactttaaaattcatgttaatagtgaaggcaacgaaactttttcccgtgggatacaacctgatgaagccgtttctttcagaggacacaaggcggaagatcatcgttctcgggaataattggaaggaggggcttttgaagcttatttccccagaggaactgccagcccaattcggcggcaccctaaccgatccagatggcaatcccaagtgtctgacgaagatcaactacggtggagagatccctaagtctatgtacgttcgggaccaagtcaaaacccaatacgaacactctgtccagatcaacagaggctcaagtcaccaggtggaatatgagattctgttcccaggatgcgttttgaggtggcagtttagtagtgacggtgccgacattggatttggtgtttttctaaaaactaagatgggggagaggcagagagccggcgaaatgaccgacgttcttccttcgcagagatacaacgctcacatggtccctgaagatggcaacttgacatgctcagaggcaggagtatacgtgttaaggtttgataacacgtactcctttgtacacgctaagaaggtgtcttttaccgtggaggtgctgcttccagatgagggaatgcagaaatacgacaaagaactaacacccgtatag

SEQ ID NO: 22762 - DNA, 636 bp, synthetic construct
  source 1..636: mol_type = other DNA; note = Synthetic coding sequence
atggccgagcagcacggcgcccccgagcaggccgccgccggcaagtctcacggagatttgggaggctcgtacaaagtgattctctacgagctggagaatttccaggggaagaggtgtgagctgtccgctgaatgcccaagcttgacggactccctcctggaaaaggttggcagtatccaggtggaatctggtccctggttagctttcgaatccagagcattcagaggggaacagtttgttctcgaaaagggtgattaccccagatgggatgcatggagtaattctcgggattcagacagtctcctttcacttagacctttaaatatcgatagccctcatcacaagctccatctgttcgagaatcctgctttcagtggcaggaagatggaaatcgttgatgacgacgtcccatccctctgggcacacggttttcaggatcgggtggcctcggttagggcaatcaatggaacatgggtggggtacgaattccctggatatcgcgggaggcaatacgtgttcgaaagaggcgaatatcgccactggaatgagtgggacgcctcccaaccacagttgcagagtgttcggcgaattcgtgaccaaaaatggcacaaaaggggacgctttccgtcatcttag

SEQ ID NO: 22763 - DNA, 387 bp, synthetic construct
  source 1..387: mol_type = other DNA; note = Synthetic coding sequence
atgaccgaggccgacgtgaaccccaaggcctaccccctggccgacgcacacctgaccaaaaaactgcttgacctcgtgcagcaatcgtgtaattataagcagctgcgaaagggcgcaaatgaggccactaaaactctgaatagaggcattagcgagttcattgttatggccgccgatgcagagcctttggaaattattctgcacctgccgctcctgtgtgaggacaagaatgtcccctacgttttcgtgagatctaagcaagccctaggaagggcctgcggtgtgtcaagaccagttattgcctgttctgtgaccatcaaagaaggaagccaactgaagcagcagattcagtccatccaacagtcaatcgaacgccttttagtgtag

SEQ ID NO: 22764 - DNA, 2592 bp, synthetic construct
  source 1..2592: mol_type = other DNA; note = Synthetic coding sequence
atggccggcccccggggcgccctgctggcctggtgccggcggcagtgcgaaggctaccggggagtagagatccgcgacctttcgagtagctttcgggatggtctggctttctgtgctatcttgcaccgccatagacccgacctgctggacttcgatagcctgtctaaggacaatgtgttcgaaaacaaccgtctggctttcgaggtggcagaaaaggaattgggcatcccggcgcttctggatcctaacgatatggtgtcaatgtccgtgccagactgtctcagcatcatgacttatgtcagtcaatattataaccacttttgttccccaggacaagccggcgtaagccccccacggaaagggcttgccccatgtagccccccaagcgtggcccccacgcccgtggagcccgaggacgttgcacagggcgaggaactgagtagtggctctctgtccgaacaaggtaccggacagacgcccagctccacatgtgccgcctgccaacagcatgtacacctagtgcagcgctaccttgcagacggtcgcctataccaccggcattgcttccgatgccgtcggtgctcctccacactgctccctggcgcttacgagaacggtccagaggaggggacgtttgtctgcgctgaacactgtgccaggctggggcccggcaccaggagcggaacacgccccggaccattcagccagcccaagcagcaacatcaacagcagctggccgaagacgccaaagatgtgccagggggtgggccatcatcaagcgcacctgctggcgctgaggcagatggacccaaagcctccccggaggcccgcccccagatcccaactaagcctagagtgcctggcaagcttcaggagttggcaagtccacctgccggccggcctactccggcaccaaggaaggcttccgaatccaccaccccagcccccccgactcccagacccagatccagcctacagcaagagaatcttgtggagcaagctggcagtagctccctcgtgaacgggcggttgcatgagcttccagtgccaaaaccacgcgggacccctaagccttccgagggcacgccggccccgcgcaaggatccaccatggattacgctggtgcaggccgaacctaagaagaaacccgcacccctgcccccctcgagttcccccggcccgccctctcaagatagcaggcaggtggagaacggtggcaccgaggaggttgcgcagccctcgcccacagcaagcctcgagagcaagccctataacccattcgaagaagaggaggaagacaaggaggaagaggcaccagccgccccctccctggccaccagtcctgcattgggccatcctgagagcacccctaagtctctccacccctggtacggaatcacccccacatcatctcctaagaccaaaaagcgacctgcccccagagcaccaagcgcaagtccactcgccctgcacgcgtctcggctctcacactcagagcctcctagcgctactcctagtccagcgctgtccgtggagtcactgtcttcagagtcagcatcgcaaacggcgggcgctgaactgttagagcctccggcagtacctaagtcttcctctgagcccgccgtccacgcaccagggactcccggcaaccccgtcagtctttccacaaattcctccctggcttcgtccggcgaactcgttgagccccgcgttgaacagatgcctcaagcttcccccgggctcgcccccaggactagggggtccagcggtccacaacccgccaagccatgctccggagcaacacccacaccgcttcttctcgtcggagataggtctcctgtcccctcccctggttctagctccccccagctccaggttaagagctcatgcaaagagaatccattcaacagaaagccatctcccgctgcttctccagccaccaaaaaggccaccaagggatctaaacccgtgcggccccccgccccagggcatgggtttcctttaattaaacgaaaggtgcaggcagaccaatatattcccgaggaggacattcatggagaaatggacaccatcgaacggcgcttggacgccctagagcaccgtggggtgttactggaagaaaaactccgaggtgggttaaatgaggggcgggaagacgacatgctggtggactggtttaaactcatccacgagaaacacctactggtccggcgagagagtgagctgatatatgtgtttaagcaacaaaatcttgagcagaggcaggccgatgttgagtatgagttgcggtgcctgcttaataagcctgagaaggattggactgaggaggatagggctcgtgagaaggtgctcatgcaagagcttgtcaccctcatcgagcagcgcaatgcgatcattaactgcctggacgaagatcggcaacgagaagaggaagaggacaagatgcttgaggccatgatcaagaagaaagagttccagcgcgaggctgagccagaaggcaagaaaaaaggcaagttcaagaccatgaagatgctgaaattgctgggaaataagagggacgctaagagtaaatctcccagggataaatcgtag

SEQ ID NO: 22765 - DNA, 708 bp, synthetic construct
  source 1..708: mol_type = other DNA; note = Synthetic coding sequence
atgtggcggggccgggccggcgccctgctgcgggtgtggggcttctggcctacaggagtacctcgccggagaccactgagttgtgacgcggcctcccaggctggcagcaattatccgcgttgttggaactgtgggggcccttggggtcctgggcgggaggataggttcttttgtccacaatgtagagccctccaagcccccgaccccacccgcgattacttcagtctgatggactgcaatcggagtttcagggtagacacggctaagcttcaacaccgataccagcagcttcaaaggttggtccatccagactttttcagtcagcgatcacagactgagaaggactttagtgagaaacatagcacactggtcaacgacgcctacaagacattgctggcgccactatctaggggattatatctactgaaactacacggcatagagatcccagaacggaccgactatgaaatggatcgtcagttcctaatcgagattatggaaattaacgagaagctagctgaggcagaatctgaggccgcgatgaaagagatcgagtcaatcgtcaaagccaagcaaaaagaatttacagacaatgtctcttcggccttcgagcaggatgacttcgaagaggcgaaggaaatccttaccaaaatgcgatacttcagcaacattgaagaaaagatcaagctcaaaaaaattcccctctag

SEQ ID NO: 22766 - DNA, 2010 bp, synthetic construct
  source 1..2010: mol_type = other DNA; note = Synthetic coding sequence
atggccaccgagcggagccggagcgccatggacagccccgtgcccgctagcatgtttgcacccgagccatcatcacccggcgccgccagggccgcggcggcagctgccagactgcatggcggctttgacagcgattgctcagaagatggcgaagccctaaatggcgaacccgaactcgatctcacgtcaaagttggtgctggtttctccaacttccgagcagtacgactcacttcttcgacagatgtgggaacggatggatgaaggatgtggcgaaacaatatatgtaattggacaggggtcagacgggactgaatatggcctctcagaggcagacatggaggcctcgtacgcaactgtgaagtcaatggccgagcagatcgaggcagacgttatcttactgagagaacgtcaggaagctggtgggagagtgcgagattatttggtgaggaagagggtgggggacaacgacttcttggaggtcagagtcgccgtcgtgggcaacgttgacgcaggtaaatcaactttgctaggggtcctcacccacggcgagctggataacggccggggcttcgcaaggcaaaagctgtttagacataaacatgagatcgaaagcggccggacttcatccgtcggcaacgacattcttggttttgactcagagggtaatgtggttaataagcctgactctcacggaggatcacttgaatggacaaaaatatgtgagaagtcaaccaaagtcatcaccttcatcgatctcgcaggccatgagaaatacctaaaaactaccgtatttgggatgaccgggcatcttcctgatttttgcatgctcatggtgggctctaacgctggaatcgttggtatgacaaaggagcacttgggtttggcactggcattgaatgtgcctgtgttcgttgtggtgactaagatagacatgtgcccagccaacatccttcaggaaactcttaaactcctgcagcgattacttaagtcgcccgggtgccgcaagataccggtacttgtgcagtccaaggacgatgttatcgttacagcgtccaacttcagcagtgagaggatgtgtcccatcttccagataagcaatgtgacgggcgaaaatctggatctgcttaaaatgtttttgaaccttttgagccctaggactagttacagggaagaagaaccggctgaatttcaaattgatgatacctacagtgtaccgggcgtggggaccgtggtgagtggtaccacattacgggggcttataaagctgaacgacaccctgctactggggccggaccctttagggaacttcttgtcaattgcagtcaaatcaattcatcggaaaagaatgcccgttaaggaagtacgcgggggacagactgcgagctttgctttaaagaaaataaaacgcagctctatcagaaagggaatggtaatggtcagtccaagactgaatcctcaggcatcatgggagtttgaagccgagatcctcgttttacaccatccgactaccatctccccccggtatcaggcaatggtgcactgcggctctatacgtcagacagctacgattctgtctatggataaggactgccttcggaccggggataaggctaccgtgcacttcagattcattaagacaccggagtatctccacattgatcagaggctggtcttcagggagggtcgtacgaaagccgtaggaaccattacgaaacttctccagactaccaacaattctcctatgaacagtaagcctcagcagattaagatgcagagtaccaagaagggcccactgacaaaacgagacgagggcggcccttcaggaggacctgctgtcggcgctccacctccaggggatgaagcctctagtgtcggtgctggtcaaccagccgcgagcagtaatcttcagccccagcctaaaccatcaagcggggggcgaaggagaggagggcaaagacacaaggtcaagtcccagggcgcctgtgtgacaccagcatcagggtgctag

SEQ ID NO: 22767 - DNA, 1656 bp, synthetic construct
  source 1..1656: mol_type = other DNA; note = Synthetic coding sequence
atggccgcccccgccctgagctggcggctgcccctgctgatcctgctgctgcctttggcaacctcatgggctagcgccgccgtcaacggtacctcccaattcacttgtttttataactctcgtgcaaatattagctgtgtttggtcccaagatggtgctttacaggatactagctgtcaggtccatgcctggccagaccgccgccggtggaaccagacatgtgaacttctacctgtgagccaggccagttgggcatgtaatcttattttgggggccccagactctcaaaagctgaccactgtggatatcgtgactctgcgggtactatgtcgtgagggtgtgcgctggcgtgtgatggccatacaggattttaagccctttgaaaatctacgactcatggctccaatcagtcttcaggtggtgcacgtcgagacccacaggtgcaatatctcctgggagatctcccaagcatcgcactacttcgagaggcacctggagtttgaagccagaaccctgagtccaggacacacatgggaagaagcaccactcctcaccctcaaacagaaacaggagtggatttgcttggagacacttacccccgacacccagtacgaattccaggtccgggtcaagcccctgcagggtgagttcaccacctggtctccctggtcccagcccctggccttcaggacaaaacctgctgcccttggtaaggacaccatcccctggctcggccacctgctggttggactctcaggcgcatttggttttataatcctggtatacctgctcatcaattgccgcaatactggcccgtggctgaagaaagtcctgaaatgcaacactccggatccgagcaagtttttctcccagctttcctccgaacacggaggcgacgtgcagaagtggctcagtagtcctttcccttcttccagcttctcccccggagggctcgcccccgagatcagccccttggaggtcctggaacgagacaaggtcacacagctgctgctgcagcaggataaggttcccgagccagcttcactgtcttctaaccacagcctcacttcatgtttcacaaaccagggctattttttctttcacctgcccgacgccctggagatcgaggcatgccaagtctacttcacttacgacccctacagcgaagaagaccctgatgagggcgtggctggtgctccaaccggcagctccccacagcccctgcagccgctgtcaggcgaagatgatgcctattgcaccttcccaagcagggacgacctcttgctattttctccatcgctgctcggcgggccatcaccgccctctaccgctccagggggctccggagcaggggaagagcggatgccaccgagcctgcaggaaagagtgccccgcgactgggatccacagcctttggggccccccaccccaggggtgcctgatctggtggatttccaaccaccacctgaactagtgctgagggaggctggtgaagaggtgccagatgccgggccccgggaaggagtcagtttcccttggagcagaccacccgggcagggcgagttcagagcccttaacgctagactgccccttaataccgacgcatatctgtctctgcaggagctgcagggccaggatcctacacaccttgtctag

SEQ ID NO: 22768 - DNA, 3516 bp, synthetic construct
  source 1..3516: mol_type = other DNA; note = Synthetic coding sequence
atggagaacaacctgaagacctgccccaaggaggacggcgacttcgtgagtgacaaaatcaagtttaagatcgaagaggaagacgatgacgggatcccacctgattctctcgaaaggatggatttcaagagcgaacaagaagacatgaaacagacagatagtggaggcgagcgagctgggttagggggtacaggttgctcatgtaagcctcctggaaaatatctttcggccgagtccgaggacgactacggtgctctcttctcgcagtacagctcaaccctgtatgacgtggcgatggaagccgtgacacagagcctcttgtcgtccagaaacatgagcagtcgcaaaaaatccccagcctggaagcacttcttcattagcccccgggattccacgaaagctatttgcatgtactgtgtgaaagaatttagccgcggaaaaaatgaaaaggatctttccactagctgcttgatgcgtcacgttagacgggcacatcctaccgtgcttatccaagagaatggatccgtaagtgccgtcagcagctttcctagcccttctctgctcttaccgccgcagcccgcagacgcaggtgatctaagtacaatcttgagtcccatcaaattagtgcagaaggtagcatcgaagattcctagccccgataggatcacagaggaaagcgtgtccgttgtaagttcagaggagatcagctccgatatgtccgtgtcagagaaatgtggcagagaagaggcactggtcggatcgtcaccacacctccccgcgctgcattatgacgaacccgcggagaacctggccgaaaaatctcttcccctgcccaagtccacatccggctcacgcagaagaagcgccgtctggaagcacttctatctttcacccctggataattccaaagcagtttgcatccattgtatgaatgagttttcccggggaaagaacggcaaagacctgggcacgtcttgcttgatccggcatatgtggcgagcacatcgcgccattgtcctgcaagagaatggcggcacgggcattccccccctctactctacaccgccaacactgctcccgtccttgcttccaccagaaggggagctgtcctctgtttcctcatcccctgttaagccagttcgtgaaagccctagcgccagttcttcacctgatcggctgaccgaggacctgcaaagccacttaaatcctggggatggtctcatggaggatgtcgccgccttcagtagcagcgatgacatcggagaagcctccgccagttccccggagaaacagcaggccgatggactatctccccgcctgtttgagagcggtgctatattccagcagaataagaaagtgatgaagcggcttaagtcagaggtctggcaccacttctcgttggcgcccatggactcactcaaggcggagtgtcggtactgcggatgtgcgattagtcgcggtaaaaagggcgacgtgggtacgtcttgcctcatgaggcacctttataggagacatccagaggtggttggctcacaaaaagggtttctgggggcctcgctggctaacagcccctacgccacccttgcttctgccgaaagttcttcatctaaattgaccgatctcccaactgtggttaccaagaataaccaagtgatgttccctgtgaatagtaaaaagacgagcaagctgtggaaccattttagtatatgtagtgccgacagcaccaaggttgtctgcctgcattgtgggaggacaatctcacggggaaaaaaacctacgaacttaggaacaagctgtttgctgcggcatctgcaaaggttccactctaacgttctcaaaactgaggtgtccgaaacagctcggcctagctcacccgatactcgtgtgccaagagggactgaactctctggcgctagcagctttgacgacacaaatgaaaaattttacgactcacacccagtcgcaaaaaaaattacttctctgatcgcagaaatgattgcgttagacctccagccatacagctttgtggataatgtaggattcaatcgcttgctggaatatctgaaaccacagtacagcctcccggccccttcttacttttcaaggacggcgatacccggcatgtacgataatgtaaagcagatcattatgtctcacctgaaggaggcggaatcaggcgtaattcacttcaccagcggaatttggatgtccaaccagaccagggagtatcttaccctgaccgctcattgggtctcattcgagtcacctgcccgacccagatgtgacgaccaccactgcagcgccctgttagacgtatcacaggttgactgtgattactctgggaactctattcagaaacagctggaatgttggtgggaagcctgggtcacttccactggcctccaagtggggataaccgtgactgataatgcttctatcggcaagactctgaacgagggggaacacagctccgtgcagtgttttagccacacagtgaacctgatcgtgtcagaggctattaagagccaaaggatggttcaaaatctgctatcattggcgcgaaaaatatgtgaacgggtgcatcgctctccaaaggctaaggagaaattagcagagctacaacgagaatatgctcttccccagcatcatctaatacaggatgtgccatccaagtggtccactagcttccacatgctcgagcgactaattgagcagaaacgcgctattaatgaaatgagcgtagagtgtaactttcgcgagctgatatcttgtgaccagtgggaggtgatgcaaagcgtctgtagagctctgaaaccatttgaagccgcaagtagagagatgagcacgcagatgtccacactgtcacaagtcatcccaatggtccacattttgaaccgcaaggttgagatgctcttcgaggagacaatgggaattgacacaatgcttcgtagcctgaaagaggctatggtgagtcgcttgtccgccacccttcatgatcctcgttacgtcttcgctacactccttgacccgcggtataaagcctctctattcacagaagaagaagcagagcagtataagcaggacctcattcgcgagctggaacttatgaattctacgtcagaagacgtggctgcaagccatcggtgcgacgcaggatccccgagcaaagattctgccgctgaggagaacctgtggtctctggtagctaaagtcaagaagaaggacccaagggagaagttgcccgaagcgatggttctcgcatacctggaggaagaagtcctggaacacagttgtgatcctctgacctactggaacctgaaaaaagcttcttggccggggttgtcagcacttgccgtacgctttctggggtgcccgccaagcatagtcccttccgagaaactttttaacacacctaccgaaaatgggagtctgggccagtcacgacttatgatggaacactttgaaaagctcatttttctcaaggtaaatctgccgctgatctactttcaatactag

SEQ ID NO: 22769 - DNA, 744 bp, synthetic construct
  source 1..744: mol_type = other DNA; note = Synthetic coding sequence
atgcagcccatcctgctgctgctggccttcctgctgctgccccgggctgacgcaggtgagattatcggagggcacgaggcgaaaccgcattcccgaccatacatggcttatctcatgatctgggatcaaaaaagcctcaagaggtgcggaggatttcttatccgagacgatttcgtgctcaccgcagcccattgctgggggtcctcaataaatgtgacgcttggagcacataatatcaaagaacaggaacctacccagcagttcattccagtaaagagacccatacctcatcctgcatacaaccccaaaaatttctccaacgacattatgctgctccagctcgagcgaaaggccaagagaacccgcgcggtacagcctttgcgactgcccagtaacaaagctcaggttaaaccaggacagacttgctctgttgcaggatggggccagacggcccccctgggcaagcacagccacacactccaggaggtgaagatgacggtgcaagaagatagaaagtgtgaaagtgatctaagacattattacgacagtacgatcgagctttgtgtaggcgaccccgaaattaagaagacatcttttaagggtgattctgggggcccactcgtttgcaataaggtggctcagggcattgtctcctatggtcggaataacggcatgcctcccagagcgtgtacgaaagtctccagtttcgtgcattggattaaaaagacaatgaaaagatactag

SEQ ID NO: 22770 - DNA, 1062 bp, synthetic construct
  source 1..1062: mol_type = other DNA; note = Synthetic coding sequence
atggaggacggcgtgctgaaggagggcttcctggtgaagcggggccacatcgtgcataattggaaggctcggtggtttatcctgagacagaataccctggtgtattacaagctcgaaggtgggagacgcgtaacccctcctaaagggaggatcttgctggatggatgcaccatcacatgcccatgcctagagtatgagaacaggccactgcttatcaaactcaagactcagacctccactgaatattttttggaagcttgcagccgcgaggagagggacgcatgggcgttcgagatcaccggggccatccatgcagggcagcccggaaaagtgcagcaactgcactctctcaggaattcatttaagctgcccccacacatcagtctccacaggattgtagacaaaatgcatgacagcaacaccgggattcgcagttctccgaacatggaacagggctccacttacaaaaaaacctttcttgggagttctctggtagattggttgatcagcaactctttcacagccagccggctcgaggccgtgacgctagcctccatgttgatggaggagaactttctgagacctgtcggggtgcggtcaatgggggctatcaggtcaggtgacttggctgagcagttcttggacgactctaccgcattatatacttttgccgaatcttataaaaagaagatcagcccaaaagaggaaatttctctttcaacagtcgaactgagtggtaccgtcgtcaagcagggatacttagctaagcaggggcataagcggaaaaattggaaagtgagaagattcgtcctgagaaaagatcctgcttttctccactactatgacccttcaaaggaggagaaccgccccgtaggaggattctctcttcggggctctctggtgtctgccctcgaggataatggcgtgcccactggcgtaaaagggaacgttcagggaaacctgttcaaagtaatcaccaaagacgatacacactactacatccaagcttccagtaaggctgaacgggccgaatggatcgaagctattaaaaagttaacctag

SEQ ID NO: 22771 - DNA, 2025 bp, synthetic construct
  source 1..2025: mol_type = other DNA; note = Synthetic coding sequence
atggccgaggtgcccgaggactacgacagcggccccgacgaggacggcgagcttgagccggaacgcccagaactgcccggattgcacaagctgtatgaaaatgcggagcccgataccatggccaaggctgacagcaaactcccggccgagatctatcaggagccgcagccagagaccgaggaagaggactttaaggagggcgagcctgattctgctaagaacgtgcagcttaagcctgggggtacctcgcaggaaggcatcgcaaaagagagtaagcgcgatgtgccatcagaaacggaaccagggatccaccaagaagtgaagtccgagaccagtcgagagatgggcgaatttttcaaagacctggaagcccccatggatgaaacccataaggaaagcgacctggagccgcctgaggaagcaaagccaaacgtaacagaggacgtttttttggagagcgccatggagactgatcccgaccctgtccctccaaccgagacaatgtcagaagtgagcggcgctacggtccgtgaacgcaacttggaactgcttgaggaggagactgagcccggcgttcccgaggagagcctgagggtgcagcacgaagagactggcctcgaaccccctgaacaaaccaaacaggatttccccagcgagaaactgggcgaatcactggaagagactgatctccaacctcccaaaatgactaagcctgaaacacctgaggagactcagcgggagtctacagaaaaaaagagaactgaaccacctgaacaggcccgactcgaatttttagagaaggagcccagaaagtcgagtgaagaagcgggcctggagcctcccgaggagacccagcccgaggttccagaagagatgcagagaaaagccacggaggaaaaaggaacggaactaccagaacgcacgaagccagatttccctgaccataagccgcggaaatccacagacgaaaatgttcccgagccgctagaagagattaaattagagttccctgaggaggaatctcggaaaactaatgaggagacaatccttgagcagagtgagatgatgaagcctgaaagccctgaagaaatcagaaaatccaacgagaaaaagaatcctcagcctccggaggaaaccggtcctgtcctgcctcaagagattaaccctcaagttgaggaaaagacccagaccaaacccaccgagaagattctggagcttcccgacgagacgaaaccgcgggagactcatgtggagtttagcaaagaggacagacctgaaccaattaagtcaaagtacagcgtgggaaatgacgagctggaacacagggagccaaagcgcggaaaactttcgctgtcagataagttccgcaaggagtactacgccctggggtccttgagggagtctgaggaatctatagggacacattacgagtttctccaacccctgcaaaaattactcaacgtctccgaagaatgttcatacagtgatccctctgagtcacagactgaactgtcagagttcgtccatgaaaaggaggtggttgatctctcccaggagcttaaagagagagtgagtgaggatgatgagacccagccagaaaaaggaaccgaattgcagtttgaacacctgaactgggaccccgaagaggtggcggaatggatcagccaactgggcttcccccagtacaaggaatgctttattaccaatttcataagcggcaggaagctcatccatgtgaactgctcaaatctcccacagatgggaatcacaaatttcgaagacatgaaggccatttccagacatacacaagaactactggagatcgaggagcccctctttaaacggtccatcagtctgccttatcgggatataatcggactctacctagaacaaaaggggcatactggcatcaaaagtgactccctgaccctgagcgagtttgttaaagcggccggcttacaggactatgccccagaaataaccgctcccgaggagaacgaggaactcccatgcaccgaaccatag

SEQ ID NO: 22772 - DNA, 1689 bp, synthetic construct
  source 1..1689: mol_type = other DNA; note = Synthetic coding sequence
atgcggcccgagcccggcggctgctgctgccggcggaccgtgcgggcaaatggatgtgtcgcgaacggggaagtgaggaatggttacgttcgttcctccgccgccgccgcagctgccgccgctgcagggcagattcatcacgttacacaaaacggagggttatacaagcggcccttcaacgaagcctttgaagagacgccaatgttggttgctgtactgacatacgtaggatacggggttcttaccctgtttggatacttacgtgacttcctaaggtattggcgcattgaaaaatgccaccatgccactgagcgtgaggagcaaaaagatttcgtctcgctctaccaggactttgaaaatttctatacacgtaatctctacatgaggatccgcgataattggaacaggccaatttgcagtgtgccaggtgctagggtggatatcatggagaggcagagtcacgactataattggtcatttaaatataccggaaacattattaaaggtgtgataaatatgggctcttataattacttaggcttcgcacggaataccggctcttgtcaggaagctgccgcaaaggtactggaggagtacggtgccggcgtatgctccaccagacaggagatcgggaatttagacaagcacgaagagctcgaggagcttgtggccagattccttggggtggaagccgctatggcctacggtatgggcttcgcaaccaattcaatgaacattccggccttggtgggaaaaggatgtctcattctgagcgatgaactgaaccacgcctcattggttctcggcgctcgcctgagcggggcaaccatacggatctttaagcacaacaacatgcaaagcctagaaaagctgctgaaagatgctattgtgtacggccagcccagaacacggagaccatggaagaaaatcctgatattagtagaggggatctacagcatggaaggatccattgtgcgacttcccgaggtgatagctctcaagaagaaatacaaagcctatctatacctggacgaagcccatagcatcggtgccttaggtccaacaggtaggggggtggtagagtactttggattagaccccgaggacgtagatgtgatgatggggacattcacaaaaagttttggagcatccggaggatacattggaggtaagaaggaacttatagactatctgaggacccattcccatagtgcagtgtacgcaacatctttgagtccccctgtggtggaacaaattatcacttctatgaagtgcatcatgggccaggacgggacttctctcgggaaagagtgtgtgcagcagttggcagagaacacaagatactttagacggagactcaaagagatgggcttcattatctacgggaatgaggactcacctgtcgttcccctgatgctgtacatgcccgcaaagataggggccttcggacgggaaatgctgaagcgaaacattggggtggtcgtggttgggttcccagcgacacctattattgagtccagagcccgcttctgtctgagcgcagcccacactaaagaaattctggacactgcactcaaggaaattgatgaggtaggtgacctcctgcagctcaaatacagtaggcacaggctggttccgctcctcgaccggccttttgatgaaacaacttacgaagagaccgaggactag

SEQ ID NO: 22773 - DNA, 2346 bp, synthetic construct
  source 1..2346: mol_type = other DNA; note = Synthetic coding sequence
atgagcagcagcagccccaccggccagatcgccagcgccgccgacatcaaacaggagaacgggatggaatctgctagcgagggacaggaagcccacagagaagtcgcagggggagcggccgtggggctatctcctccagcccccgctccgttcccccttgagccaggcgacgccgctactgcggcggccagagtgagcggagaagagggcgccgtggctgccgccgccgccggggccgcagcagaccaggtgcagctacattctgaactcctgggccgtcaccatcatgccgctgcagctgctgctcagacacccctggccttctcacctgatcacgtggcttgcgtgtgcgaagcactacagcaaggaggtaatctagaccgtcttgcaagatttctgtggtctcttccacagagtgacttactacgcggaaatgagtctcttttgaaggccagagctctggtggcgttccaccaaggtatatacccagagctgtattcaatccttgagtcgcattcttttgaatcagccaatcaccctttgctccaacaactgtggtataaagcacggtacactgaggccgaaagagcacgcgggaggcccctgggagctgtggataaatacaggctgcggaggaaatttccccttcctaggacaatttgggacggggaggaaactgtgtattgtttcaaggagaagtctcgaaatgccctaaaagaattgtataagcaaaaccgatacccaagtcctgctgagaagaggcacctggccaaaatcaccggcctgtcacttactcaggtgtcaaactggttcaagaatcgaaggcagagagacagaaacccatccgaaactcaatccaagtctgaatctgatggcaatccttctacggaggatgaaagtagtaagggccacgaggatctgtccccacatcccctgtccagtagcagcgacggcattaccaatttaagcctgagctctcacatggaacctgtctacatgcagcagatagggaatgccaagatcagcctgtcctctagcggtgtgctccttaacggaagtctagtcccagcctccacctcaccagtttttctgaatggtaatagtttcatccagggcccctcgggcgtgattctgaatggcctcaacgttggcaacacccaagcggtcgccctgaatcccccgaaaatgagtagcaacatcgtgagcaatggtatttctatgacagacattctcggctcgacatctcaggatgtgaaggaattcaaggtgttgcagagcagcgccaacagcgcaacaactacttcatactctccatctgttcccgtgagcttcccagggctaattccaagcactgaagtgaaacgggaaggaattcagaccgtcgcgagccaggacggcggcagtgtggtaacatttacaacccctgtccagatcaatcagtatgggatcgtacagattcccaacagcggcgccaactctcagttcctgaacggatccatcgggtttagtcccctgcaactgccgcctgttagtgtggctgcgagccaggggaatattagcgtgagctcttccacctccgatggctctactttcacatccgaatcgactaccgtgcagcagggtaaggtgtttctctcttctctcgccccgtctgccgtagtttacaccgttcccaacaccggccagacgattggctccgttaaacaggagggtctggagagatctttagtattctcccaactcatgcccgttaaccagaacgctcaggtgaacgctaatctgtccagcgagaacattagtgggtcaggactgcatcccctagcctcctctctggttaacgtgtctcctacacacaacttcagtctgtctccttcaacactgttaaatccaaccgaactgaaccgcgacattgctgattcccagccaatgtccgcacccgttgcctccaaatccacagtcacatcggtttcgaacaccaattatgccacccttcagaattgcagcttaattactgggcaagacctcctcagtgtgcctatgacccaggctgcccttggcgagatcgtcccaactgccgaggatcaagtgggacatccatctccagccgtccaccaggattttgtgcaagaacaccgtctggtcctccagagtgtagccaacatgaaagagaatttccttagtaactctgagagcaaggcaacaagcagcctcatgatgctggatagcaagtccaaatacgtgctagatggcatggtagataccgtgtgtgaggatctagaaaccgataagaaggaattagcgaagctgcaaaccgtacagcttgacgaggacatgcaggacctgtag

SEQ ID NO: 22774 - DNA, 1392 bp, synthetic construct
  source 1..1392: mol_type = other DNA; note = Synthetic coding sequence
atgggcaaggagaagacccacatcaacatcgtggtgatcggccacgttgacagtggtaagtccaccacaacgggccatcttatatataagtgcggaggcatagacaaacgtacaattgaaaagttcgaaaaggaggctgctgaaatgggaaagggaagcttcaaatatgcatgggtacttgataaattgaaggccgaacgggaacgcggcattacaatcgacattagcctttggaagtttgagacaacaaagtactatatcactattattgatgcccctggccatcgagatttcatcaagaacatgatcactgggacttctcaggctgactgtgctgtcctcatagtagcggctggcgtgggggaatttgaggcgggaatctcaaagaacggtcagaccagagagcatgctctgttggcttacaccctcggcgttaagcagctgattgtcggtgtcaataagatggattctacggagcctgcctattcagaaaagcggtacgatgagatagtcaaagaggtgtccgcatacattaagaagatcggatataacccagccactgtgcccttcgtgccgataagcggctggcacggtgacaatatgctcgaaccctccccaaacatgccttggttcaaaggttggaaagtggaaaggaaggaaggcaatgcctcaggcgtctccctgttagaggctcttgataccatcctccctcccacccgccccactgacaaacccctgcgactgcccctgcaggacgtttataagattggcgggatcgggacagtgcccgtcggtagagttgaaacaggcatcctccgacctggtatggtggttacttttgcccctgtaaatatcacaacagaggtgaaatccgtggaaatgcaccatgaagcattatcagaagcattgccaggagacaatgtcggatttaacgtgaagaacgtgtccgtcaaggatatacggcgtggcaatgtgtgcggagatagcaagtcagatccaccgcaggaagctgcccagttcactagccaggtgatcatcctaaatcatcccgggcagataagtgcagggtacagccccgtcattgactgccatacggctcacatcgcgtgcaagttcgctgagctgaaggaaaaaatcgaccggagaagcggcaagaaactggaagacaatcccaaatccttaaagagcggtgacgctgccatcgtggaaatggttcctgggaaaccaatgtgtgtcgaatcattctcccaatatcctccgctgggcagattcgcagttcgggatatgaggcagaccgtggccgtgggagtgataaagaacgtggaaaagaaatcagggggcgctgggaaagtcaccaagagtgcccaaaaggctcagaaagctggtaaatag

SEQ ID NO: 22775 - DNA, 600 bp, synthetic construct
  source 1..600: mol_type = other DNA; note = Synthetic coding sequence
atggccgccgccaacaagggcaagtgcctgcccggcgtggtgggccttgcccaagctttgcccgtggggcctggcaggcgtgccatcgctgccggtaacaaaccacgagtccggagcatacgctttgctgcaggacacgatgcggaaggaagccactctcacgtgcactttgatgaaaaactgcacgactcggtggtgatggtgacacaggaatctgactcgagcttcttagtgaaagtgggtttcctgaaaatcctgcataggtacgagatcacctttaccctgccccccgtgcacaggttgagtaaagacgtgcgtgaggcccccgtcccgagtttacatctcaagctgttgtctgtggtgcctgtgccagagggttacagcgtcaaatgcgagtattccgcccacaaggaaggtgtgttgaaagaagaaattcttctggcatgcgagggtgggactgggacctgcgtgcgcgtgaccgtgcaggctagagtgatggaccgacatcatgggacacctatgctgctggacggggttaagtgtgttggtgcagaactcgagtacgattccgagcactctgattggcatggctttgactag

SEQ ID NO: 22776 - DNA, 270 bp, synthetic construct
  source 1..270: mol_type = other DNA; note = Synthetic coding sequence
atgcagctgcaggccagcctgagcttcctgctgatcctgaccctgtgtctggagctgcggagtgaactggcacgagacaccatcaaagatcttctgccaaatgtgtgcgcattccccatggagaaggggccatgccagacctatatgactagatggttcttcaatttcgaaacaggagagtgcgagctgtttgcttacggtggatgtggcggaaactcaaacaattttcttcgcaaggaaaaatgcgaaaaattctgcaagttcacgtag

SEQ ID NO: 22777 - DNA, 1251 bp, synthetic construct
  source 1..1251: mol_type = other DNA; note = Synthetic coding sequence
atgagcgaggccgacggcctgcggcagcggcggcccctgcggccccaagttgtgacagacgatgacgggcaggctcccgaggcaaaggacgggagcagcttcagcgggagagtttttagggtcaccttccttatgctggctgtgagtctgaccgtgcctctacttggggccatgatgctactggaatcgcctatcgatccccagccactgagttttaaggagccccccttgctcctgggggtgctgcatccaaacacgaaactgcgccaggcggagcggctctttgaaaatcagttagtggggcctgaaagcatcgctcacattggcgatgtcatgttcacagggaccgccgatggcagggtggtgaaactggaaaacggcgaaattgaaacgatcgctcgctttggcagcggcccatgcaagacccgagacgatgagcctgtatgcggccgcccactcggcatcagggccggacctaacgggaccttgttcgtggctgacgcttacaagggcctcttcgaggtgaacccttggaagagggaggtgaaactgctcctgtcctctgagaccccgatcgagggaaagaatatgtcgttcgttaatgatctgaccgtaacccaggacgggaggaagatttactttaccgatagcagttcaaagtggcaacgccgcgactacctgctccttgtgatggagggcacagatgacgggcgattactggaatacgataccgtcaccagggaggtcaaggtcctgctggaccaattgaggttccccaacggggttcagctttcccctgcagaggacttcgtgctggtggccgaaacaaccatggcgagaatccgccgcgtgtacgttagcggcctcatgaagggcggggcagacctgtttgtagagaacatgcccggattccctgataacatccggccatcgtctagcggcggttattgggtgggaatgtccacgatcaggcccaaccctggctttagcatgctcgacttcttatccgagcgcccctggataaagcgaatgattttcaagctgttctctcaggagacagtgatgaaattcgtcccacgttattcgctcgtgctcgagttaagcgattccggggcctttcgtcgctcactgcacgatcccgacggcctggtggcgacctacatttcagaagtgcacgagcatgacggccacctctatctcggatcattcagatccccatttctgtgccgcctgtctctacaagctgtctag

SEQ ID NO: 22778 - DNA, 870 bp, synthetic construct
  source 1..870: mol_type = other DNA; note = Synthetic coding sequence
atggtgggcgtgaagcccgtgggcagcgaccccgacttccagcccgaactgtcaggagccgggtcgcggctcgcagttgtgaagtttacaatgagaggatgcgggccttgcttgaggatcgctcctgcgtttagcagtatgtcaaacaaatatccacaggctgtgtttctggaagtggatgtgcatcagtgtcagggtacagcagccactaacaatatcagcgcgacacctaccttcctcttcttccgaaacaaagtgcgcatcgaccagtaccagggcgcagatgccgtcggcctggaagaaaagattaagcaacatttggagaacgacccagggtccaacgaggataccgacattcccaaggggtacatggatttgatgccattcattaacaaggccggttgcgaatgcctaaacgagtctgacgaacatgggttcgataattgtttacggaaagacacgacattccttgagtcagattgtgacgagcaactgctgatcacagtggcttttaatcagcccgtcaaactttacagcatgaagttccaggggcctgacaacggtcagggtcccaaatacgtgaagattttcattaacctcccacgttccatggactttgaagaggcagagaggtcagagcctacccaggctctagaattaaccgaggacgacataaaggaggacgggatcgtcccgctcagatatgtgaagttccagaacgtgaatagtgttactatttttgttcaatccaatcaaggggaagaagagactacacgcatctcttattttactttcattggtacccccgtccaggcaaccaatatgaatgatttcaagagagttgtggggaagaagggcgagtcacactag

SEQ ID NO: 22779 - DNA, 1164 bp, synthetic construct
  source 1..1164: mol_type = other DNA; note = Synthetic coding sequence
atggtgttcgccttctggaaggtgttcctgatcctgagctgcctggccggccaggtctccgttgttcaggtcactattcctgacgggtttgtcaatgtgaccgtcgggtcaaacgtgactctgatttgtatctacactaccaccgtggcaagcagagagcagctctctatccaatggtcttttttccacaagaaagagatggagcctatcagcatatacttttcacaaggaggccaggctgttgccataggacaattcaaggaccgtatcacaggttcgaatgatcctgggaacgcctctataacgataagccacatgcaaccagctgactcgggaatttatatctgcgacgtgaacaaccctcctgacttcctgggccagaaccaagggattctcaatgtgtcagtcttagtcaaaccatcaaagcctctgtgcagcgtgcaagggcggcctgaaaccggccataccattagtctgagctgtctctccgccctaggcactcccagcccagtctactactggcataaactggaggggagagacattgtgcctgtgaaggaaaactttaatcctactaccggtatcttggtcatcggcaacctgacaaatttcgagcagggctattaccagtgtacagctattaatagattgggaaactccagttgtgaaatagatcttacgtcgagtcaccctgaggtgggaatcatagtcggcgccctcatcgggagtctcgtgggggccgccatcatcatttcagtcgtgtgcttcgcacgaaacaaggccaaggctaaagccaaggaaagaaactcgaaaactatcgcagagctggaacccatgactaagatcaaccccagaggagaatcagaggctatgcccagggaagacgcaacccagctggaagtcacactaccttcatctattcacgaaacaggacccgacaccattcaggagcccgactacgagcccaagccaactcaggaaccagcacccgagcctgccccagggagtgagcctatggccgtgcctgatttagatattgagctggagttggaacccgagacacagtccgagctggaaccagagccagaacctgagcccgagtccgagcccggcgtggtcgtggagcccctgagcgaagatgaaaaaggtgtagtcaaagcctag

SEQ ID NO: 22780 - DNA, 1821 bp, synthetic construct
  source 1..1821: mol_type = other DNA; note = Synthetic coding sequence
atgagcgacaccagcgagagcggcgccggcctgacccggttccaggccgaggcctcagaaaaagactctagctctatgatgcagaccctgctgacagttactcagaatgtggaggtacccgaaactccaaaggccagtaaggcactggaagtctcggaggacgtgaaggtttctaaggcatccggggtgtccaaggcaacagaagtgagcaagactcctgaagccagagaggcccctgcaacacaggccagctctacaacccagttgacggatactcaggttctggccgcagaaaacaaaagccttgcagccgacactaagaaacagaacgccgacccgcaggcagtgaccatgcctgcgaccgagacaaagaaggtaagccatgttgccgatacgaaggtgaacacaaaagcacaggaaactgaggccgcgccaagccaggcaccagccgatgagcctgaaccagagagcgccgcagcccagagtcaggaaaaccaagacacgagaccaaaggttaaagccaaaaaagctcgaaaggtcaagcacctggatggtgaggaggatgggtctagcgaccaaagccaggcgtctggcacaactgggggaaggagggtgtcgaaagcgctgatggctagtatggcccgtcgggcatccagaggcccaatcgccttctgggccagacgcgccagcaggacaaggctggcagcctgggcacggagagccttgctgagcctgagaagccctaaggcccggcgcggcaaagctcggcgacgagcagcaaagctacagtcgagtcaggagcccgaggcaccaccacctagggacgtggccctcctgcagggccgtgctaacgacctggtcaagtatttactggccaaggaccaaaccaaaattccaataaaaaggagtgacatgctcaaggatattatcaaggaatacactgacgtctatcccgaaatcatagagcgggccgggtactctttggaaaaggtttttggcatccaattgaaagagatcgacaagaacgatcatctctatattctgcttagtacactggagcctacagacgcaggaattttgggtacgactaaggatagtcccaaactggggctgctgatggtgctgctgtccattatctttatgaatggcaatcggtcatctgaggctgtgatttgggaggttctgcgcaagctcgggctcagaccagggatccaccatagcctttttggcgacgtgaaaaaactaattacagatgagtttgtcaagcaaaagtatcttgactacgcccgtgttccaaattccaatcctcctgagtacgagttcttctggggcttgcggtcatattacgagacttctaaaatgaaagttctgaagtttgcatgcaaagtgcagaagaaggatcccaaggagtgggccgcacagtatagagaggcaatggaagccgatctgaaagccgcagccgaggcagcagcagaagctaaagcccgggcagaaattcgggccagaatgggcattggtttgggatccgagaacgccgctggtccctgcaattgggacgaggccgacatcggaccatgggccaaagcgcgcatacaggccggagccgaagcaaaagccaaagcccaggaaagtggaagcgcatctactggggcttccacaagtacaaacaacagcgcctcagcatcagcctcaacctccggtggcttctccgcaggagcgagcctcacagctacgctgacttttgggttgttcgcaggccttgggggggcaggggccagtaccagcggaagtagtggcgcatgcggcttctcctacaaatag

SEQ ID NO: 22781 - DNA, 369 bp, synthetic construct
  source 1..369: mol_type = other DNA; note = Synthetic coding sequence
atgaccaccgccacccggcaggaggtgctgggcctgtaccggagcattttcagactagctcgaaagtggcaggctacaagcggccagatggaggacaccatcaaggagaagcaatatatcctgaatgaggccaggaccctgttccgcaagaataagaaccttactgatacggatctgattaagcagtgcatcgacgagtgtactgcgaggatcgaaattggcttgcactacaagataccttatcccaggcctatacacctgcctccgatgggtctcacgcccttgagaggcaggggactcaggtcacaggaaaagttgagaaagctgagcaagcccgtatacctaagatcacatgatgaggtgagctag

SEQ ID NO: 22782 - DNA, 582 bp, synthetic construct
  source 1..582: mol_type = other DNA; note = Synthetic coding sequence
atgctgggcgtgctggagctgctgctgctgggcgccgcctggctggcaggccctgcccgaggtcagaacgagactgagcccatcgtgctcgaaggtaagtgcctggtggtgtgtgattctaatcccacctccgatcccaccggaacagcgttgggcatctcagtgcgatctgggagcgccaaagtcgcctttagcgcaattaggagtacaaaccacgaacccagcgaaatgtctaatcgcaccatgatcatctacttcgaccaagtgctggtgaatatcgggaataactttgattcagaacgcagcaccttcattgcaccccggaaagggatctatagcttcaatttccacgtggtgaaagtgtacaataggcaaactatacaggtatccctgatgctgaacggatggcctgtaatttccgcattcgccggagatcaggacgtcacacgcgaggctgctagcaatggtgtgctgatacagatggaaaagggcgaccgggcttatttgaaactggaacgggggaaccttatgggaggctggaagtattcgacctttagtgggtttctcgttttcccattgtag

SEQ ID NO: 22783 - DNA, 1578 bp, synthetic construct
  source 1..1578: mol_type = other DNA; note = Synthetic coding sequence
atgagccggcagctgctgcccgtgctgctgctgctgctgctgcgggccagttgtccctggggacaggagcagggcgcccgctctcccagtgaggaaccacctgaggaggaaattccaaaagaagatggcatcttagttctgtcaaggcatactctcggattggccctaagggagcaccctgccctgctcgtggagttttacgctccctggtgcggtcattgccaggccctcgcacccgagtactccaaagccgccgcagtgctggccgcagaatccatggtcgtgaccctggccaaagtggacggccctgctcagcgggaactcgccgaggaattcggggtcacagagtatcccactctgaaatttttccgcaatggtaatcgcacccaccccgaggagtacacaggcccacgcgatgctgaaggaatcgccgaatggcttcgtcggagagtcgggccatccgctatgagacttgaagatgaggcagccgcgcaggcactcatcggcggcagggacctcgtggtgattggtttctttcaggatttgcaggatgaagacgtggctacatttttggccctcgcacaggatgctctggacatgacattcggcctcaccgacagaccacgtctgtttcagcaattcggactcacaaaagacaccgtggtgttatttaagaaattcgatgaaggtcgcgcggattttcctgtggatgaggagcttggcctggaccttggcgatctcagtcgcttcctcgtgacgcatagtatgcggctggtgactgagtttaacagtcagacctccgcaaaaatatttgcggctaggattctgaaccatctgctcctgtttgtcaaccagactctggctgcacaccgagagctcttagcaggcttcggagaggccgcccctcgttttcgcggacaggttctgtttgtggtcgtcgatgtggccgctgacaatgagcatgtgctccagtactttggcctaaaagcagaggcggcccccacccttcggctggtgaacctggagacaacaaagaagtacgcgcctgtggatggcggtccggtgacggccgcgtcaattacagcattttgccatgccgtactgaatggtcaagtcaaaccttatttgctttcccaggaaatacctcctgactgggaccagcgtccagtgaagaccctcgtggggaagaatttcgagcaagttgctttcgacgagacaaagaatgtattcgtgaagttctacgctccatggtgcactcactgcaaggaaatggcaccagcttgggaggcactggccgagaagtaccaagatcacgaggacattattattgccgagctcgatgccaccgcaaacgagctagatgcatttgctgtgcatgggtttcccacactgaaatactttcccgcgggcccaggcagaaaggtgattgagtataagtctactagagaccttgagacattttcaaagttcctggacaatggtggagtactgcctactgaagaaccccctgaggagcctgcggcgccattccccgagcctcctgcaaacagcacgatgggatccaaggaggaactgtag

SEQ ID NO: 22784 - DNA, 2262 bp, synthetic construct
  source 1..2262: mol_type = other DNA; note = Synthetic coding sequence
atggccgacaagcggaagctgcagggcgagatcgaccggtgcctgaagaaggtctccgaaggggtggagcagtttgaggatatttggcaaaagctccacaatgcagccaacgccaaccaaaaggaaaaatacgaggctgatctgaagaaggagataaagaaactgcagcggctgcgggatcaaatcaagacctgggttgcctcaaacgagataaaagacaaacgacaattgattgataatagaaaactgatagaaacacagatggaacgcttcaaggtggtggaacgggagacaaagacaaaggcttattctaaggagggactcggacttgcgcagaaggtcgaccccgcacagaaggagaaagaggaagtaggtcagtggctcaccaatactattgataccctaaacatgcaggtagatcaattcgaatctgaagtcgagagtctcagcgtgcagacccggaaaaaaaagggcgacaaagacaaacaggatcgtatcgagggccttaagcgacacatcgagaagcaccggtaccacgtcaggatgctggagactattctccgtatgcttgacaatgacagcatcctggtagatgcaatccggaagatcaaagatgatgtcgagtattacgtagattcatcccaagaccccgacttcgaggagaatgagttcctctatgacgatcttgatcttgaagacatcccacaggccctggtggcaacctcgccaccaagccattctcatatggaggatgagatcttcaaccaaagttcaagcactccaacttctactacctcttcatctccaatccctcccagtccagctaactgcacaactgagaacagcgaggatgacaagaagcgagggcggtcaaccgacagcgaagttagccagtctcccgccaagaatggatcaaaacccgtccatagcaaccagcatccacaatcccctgccgtcccaccaacctaccctagcgggcctccaccggccgcttcagcgctgtccactacgcctggcaataacggagtacccgctccggctgctccccctagtgccctgggacctaaagcttctcccgcccccagtcacaactctggaactcctgcgccttatgctcaggcggttgctccgcctgctcccagcggccccagcactacacaaccaagacccccgtccgtacagccatccggtggcgggggcggaggaagcggcgggggtggctcttctagtagctccaacagtagtgccgggggaggtgctggaaaacagaacggcgccacttcttatagctcagtggttgctgactcgcctgccgaagtcgctctctctagtagcggcggaaacaacgcatcatcccaggcacttggtcccccatccggtccccataacccaccaccctccacaagtaaggaacccagtgccgccgcgcctacgggtgccggaggtgttgctccaggctcaggcaacaatagcggtggcccgagtttactggttccgctgccagtgaatccaccttcctccccgactccttcttttagtgatgccaaggccgcgggcgcactcctcaatggacctccacagttttctactgccccggagatcaaggccccggaaccactgtccagcttaaagtccatggctgaacgggccgccataagttcaggaatcgaagatcctgtaccgaccctgcacctgacagagcgggatatcatactatcctcaacatcagccccacctgcctccgcccagcccccccttcagctgagtgaagtgaacataccattatcgctgggcgtctgcccactgggacccgtcccactgactaaggaacaactgtatcagcaggccatggaagaagccgcctggcatcatatgcctcaccctagcgacagcgaacgcatccggcagtatctccctagaaatccatgtcccacccctccgtaccaccatcagatgccacctccacattctgacaccgtggaattttatcagagattgtccacagagaccttgttctttattttctattatttagaagggacaaaagctcaatatctagcggccaaggcgttgaagaagcagtcctggaggttccataccaaatacatgatgtggttccaaagacacgaagaacctaagaccattaccgacgaatttgagcaggggacttacatttacttcgactacgagaagtggggccagcgcaagaaggagggctttaccttcgagtatcgctacttggaggatcgggacctgcagtag

SEQ ID NO: 22785 - DNA, 1146 bp, synthetic construct
  source 1..1146: mol_type = other DNA; note = Synthetic coding sequence
atgcccttcggcaacacccacaacaagttcaagctgaactacaagccagaagaggaatatcccgatctctctaagcataacaaccacatggccaaggttcttactctggagttgtacaagaagctgcgagataaagagacaccttctgggttcacggtggacgacgtcattcaaactggtgtggataatccgggtcatccgttcataatgacagtcggatgcgtggctggggacgaagagagttatgaggtctttaaagagctatttgatcctatcatctccgatcgccatgggggttacaaacctactgataaacacaagaccgatttgaatcacgaaaacttaaagggtggcgacgacctggacccgaactatgtcttatcctccagagtgcggacaggaaggagtatcaaaggatatacgttgccaccccattgtagccggggcgagcgcagggccgttgaaaaactatcagttgaggcgctgaattctttgacaggagagtttaaaggtaagtattacccccttaaatctatgactgaaaaagagcagcagcagttaatcgacgaccatttcctctttgataagccggtgagccctctcctcctggcttcaggcatggccagggactggccagacgctcgaggaatctggcataacgataacaagagcttcctggtttgggtgaacgaagaagaccatcttcgggtgatcagcatggagaaaggcgggaacatgaaagaagtgtttaggcggttctgcgtcggcctccagaagatcgaggagatttttaagaaggccggtcacccttttatgtggaaccagcacttaggttatgtcctcacctgcccctccaacctgggaacaggcctgcgggggggtgtgcacgtgaagttggcccatctcagtaagcatccgaaattcgaagagatactgaccaggctgcggctgcaaaagcgaggcacgggtggtgtggacacagcagccgtgggctcagtcttcgatgtgtcaaacgctgacagattaggctcctcagaagtggaacaagtccagctggtggtcgacggtgtaaagttgatggtggagatggagaaaaaactcgaaaaaggtcagagtattgacgatatgatccctgctcagaagtag

SEQ ID NO: 22786 - DNA, 300 bp, synthetic construct
  source 1..300: mol_type = other DNA; note = Synthetic coding sequence
atggcccagggccagcggaagttccaggcccacaagcccgccaagagtaagacggccgccgctgccagcgagaagaaccgaggaccacggaaggggggccgtgtcatcgcaccaaagaaagcccgtgtcgtccagcagcaaaagctgaagaagaacctggaggttggtattcgtaaaaaaatcgaacacgacgttgtgatgaaagcctcatcttctctacccaaaaagttggcgctcctcaaggcaccagcgaagaagaaaggagcagctgccgccacctctagtaagaccccatcttag

SEQ ID NO: 22787 - DNA, 1491 bp, synthetic construct
  source 1..1491: mol_type = other DNA; note = Synthetic coding sequence
atggacgacgtgcccgcccccacccccgcccccgccccccccgccgccgcagccccacgggtcccatttcactgttccgaatgcggaaagagctttcggtacaggtccgacctgcgccgccactttgctagacataccgcactgaaaccccacgcttgtccccggtgcggtaaaggattcaaacacagtttcaatctggctaaccatctgcgatcacacactggggaaagaccgtaccggtgctccgcctgtccgaagggattcagggactctactggccttctacaccaccaagtggtgcatacaggggagaaaccctattgttgcctagtctgcgagctccgtttttcatcaagatcctccctgggaagacatctgaagagacagcaccggggtgtgctccccagtccattgcagccaggaccaggtctgcccgctctctccgcgccttgctccgtctgctgtaatgtcggcccatgctcagtttgtggtggcagcggggctggggggggggaagggcccgagggggccggcgccgggctgggtagctggggtttggctgaagccgcagccgctgcagcagctagtctcccaccatttgcttgtggcgcctgcgctagacgcttcgaccatggtcgcgagctggcagcgcattgggccgcccacacagatgttaagccatttaagtgccctcggtgtgagcgcgattttaatgcaccagcgttattagagcgccacaagttgacacacgacctccaaggtccaggcgcgccacccgctcaggcctgggccgccggaccaggggcagggccagagacagctggagagggtaccgcagctgaggcaggtgacgcacccctcgcctccgatcggcgcctacttctgggccctgccggcggaggcgttcctaaactggggggcctgctcccggaaggagggggcgaggccccagccccagccgccgctgccgagccaagcgaggacactctgtatcaatgtgactgtggcaccttctttgcttccgcagctgcactggctagccacctcgaagcacactcaggccctgcaacctatggatgcggccattgtggcgctttgtacgctgcactggctgccttagaagagcaccgaagagtgtcccacggggagggcggcggggaagaagcagctacagctgcccgcgagagagaaccagcgtccggtgaacctccctcaggcagtggccgaggaaagaaaatttttggctgttcagagtgcgagaagctgtttaggagcccccgggaccttgagagacacgtgttagtgcacactggggagaagccttttccttgtcttgagtgcggcaagttttttagacacgaatgttacctcaaacgacaccgcctcctgcacgggaccgagcgaccatttccatgtcacatctgcgggaaggggtttattacactttctaatctgtcacggcatctgaaattacataggggcatggattag

SEQ ID NO: 22788 - DNA, 663 bp, synthetic construct
  source 1..663: mol_type = other DNA; note = Synthetic coding sequence
atgaagagcgtgatctaccacgccctgagccagaaggaggccaacgactctgatgtacaaccaagtggagcgcagagagcagaggcttttgtgcgagcattcttgaaacgctccacgccccggatgtccccccaagcccgtgaggaccagctgcagcgcaaagctgtggtgctggaatattttactcggcataaacgaaaagaaaaaaagaagaaagcaaagggtctgagtgcccgccagcggagggagctacggttgttcgacatcaaaccagagcagcagaggtactcgctttttctgcctctccatgagctgtggaagcagtatatccgcgatctttgttccggcctgaaacccgatactcaacctcagatgatccaggccaagttgctcaaggctgacctgcatggcgccattatttccgttacaaagtcaaagtgcccctcttatgtcgggatcacaggcatcctgctgcaggagaccaaacacatctttaagattattacaaaagaggaccgtctgaaagttattccaaaactcaattgtgtgtttaccgtggagactgatggatttatttcctatatctatgggagcaaattccagctgcggagtagtgaacgcagcgctaagaaattcaaagccaagggcaccatcgacctctag

SEQ ID NO: 22789 - DNA, 768 bp, synthetic construct
  source 1..768: mol_type = other DNA; note = Synthetic coding sequence
atggcccgggccaaggccctgctgggcggccccggcgaggagctggaggctgatactgaatacctggaccccttcgacgcacagccccacccagccccccctgatgatgggtacatggagccatatgatgctcaatgggtgatgagcgagttacccggaagaggcgttcaactttatgacacaccctatgaggaacaggaccccgagaccgctgacggccctccctccggccaaaaaccccggcaatctcggatgccacaggaggatgagcgtcccgctgatgagtatgaccagccttgggaatggaaaaaagatcacatctcccgagcctttgcagtgcagttcgacagtcctgagtgggagcgtacccctggaagcgcgaaggaacttcgtaggccgcctccccggagcccacaaccagcagaacgcgtcgacccggccctgccactggagaagcaaccatggttccacggccccctgaaccgggctgatgcggagtcgttgctgagcctgtgcaaagaggggtcctacctggtgcggttaagtgagacgaacccccaggattgctctctgtctctccgatccagccaaggctttctacacctcaaatttgctcgtactcgggagaaccaggtggtactgggccagcattcaggacccttcccatctgtgcccgagctcgtgctgcactactcttcccgtcccctccctgtgcagggcgccgaacatcttgcacttctgtacccagtggtgactcagaccccatag

SEQ ID NO: 22790 - DNA, 858 bp, synthetic construct
  source 1..858: mol_type = other DNA; note = Synthetic coding sequence
atgagcgacgacttcctgtggttcgagggcatcgccttccccaccatgggattccgctcggagaccctgaggaaggtgagagatgagttcgtaattagggacgaggacgtcataatcctgacttaccccaagtctggtactaattggctggctgaaatcctttgcctgatgcatagcaagggtgatgcaaagtggatccagtctgtgcctatttgggagagatctccgtgggtggagagcgagatcggatatacggcgctgtccgaaacagagagtcctaggctgttctcgagccatttgcctatacagctgtttcctaagtcttttttcagctcaaaagccaaggtgatttatctgatgcggaatcccagggatgtgctcgtgtctgggtatttcttctggaaaaacatgaaattcattaaaaaacccaagagctgggaggagtatttcgagtggttctgccagggcacagtcctctatgggagctggttcgaccatatacatggctggatgccgatgagagaagaaaagaattttctcctactgtcttatgaagaacttaaacaggacacaggtcgcacaatagagaaaatctgtcagttcttgggcaagactctagagcctgaggaactcaatcttattctgaaaaactcttcattccagtcaatgaaagagaataagatgtcaaattatagtctgttaagtgtggactatgtggtggataaagcacagttgctgaggaaaggggtgagtggtgactggaagaaccattttactgtggcccaggcggaggactttgacaaactgttccaggagaagatggctgatcttccccgggagctatttccctgggagtag

SEQ ID NO: 22791 - DNA, 1647 bp, synthetic construct
  source 1..1647: mol_type = other DNA; note = Synthetic coding sequence
atgaagacccccgccgacaccggcttcgccttccccgactgggcctacaagccagagagctcgcccggttcaaggcaaatccagctttggcactttatattggagcttttacgaaaggaagagtaccagggagttatcgcgtggcagggcgactacggcgagtttgtaatcaaggaccctgacgaggtggccaggctctggggggtacgtaagtgtaagcctcaaatgaattacgacaagctctctagagccctccggtattattacaacaagcggattctacataaaacaaaaggtaagcggttcacttataaatttaattttaacaagctggtgctggttaactacccttttattgacgttggcctcgctggaggagctgtgccgcagagcgcaccccccgtgccctctggcgggtctcattttagatttcccccttctaccccctccgaggtactgtccccgacagaagacccgcggtcccctccagcttgtagcagcagttccagcagcctgttttcggccgttgtagccaggcgactgggaagaggctcagtgagtgactgttcggacggtacgagcgaactggaggagccgcttggtgaagacccaagagcccgtccgcccgggccacctgatctcggcgcctttcgcggcccccctctcgcacggttaccccacgaccccggcgtattcagagtttacccacgcccacgaggcggtcccgaacccttgtcgccgttccctgtgtccccgctagctggacctgggagcctgctgccaccacagctctctccagccttacctatgactcccacccacctggcctataccccttctcctacactgtcacccatgtatccttctggggggggtgggccgtcaggctctggcggcgggtctcacttcagctttagccccgaagacatgaaacgatatctacaggcacacacccagtctgtgtataactatcacctttccccccgggcttttcttcactacccaggactggttgtgccacagccccaacgcccagacaaatgtccactccctccaatggctcccgagacacctcccgtgcctagctcagcatcaagcagttcttcaagttccagtagccccttcaaatttaaattgcagcccccaccactaggacgcagacagagagcagctggggaaaaggccgtggcaggagccgacaaatcaggaggcagtgccggtgggctcgcagaaggggcaggcgcactcgccccccccccaccccctcctcagatcaaagtggagccgatcagcgaaggcgaaagcgaagaggttgaagttacagacatctccgatgaggatgaagaggacggagaagtattcaaaacccccagggccccccctgccccaccaaaacctgagcccggcgaagctcccggagctagccagtgcatgccactcaagctgagattcaaaagacggtggtccgaagattgcaggctggaggggggtgggggccccgcaggagggttcgaagatgaaggagaggataaaaaggtgcggggcgagggaccaggggaagcaggcgggcctctgactcctagacgtgtttcttccgacctgcagcatgccacagcccaattgtcccttgaacaccgcgattcctag

SEQ ID NO: 22792 - DNA, 1530 bp, synthetic construct
  source 1..1530: mol_type = other DNA; note = Synthetic coding sequence
atgggcgtgctgaagttcaagcacatcttcttccggagcttcgtgaagagctccggggtttcacagattgttttcacattcctgcttattccatgctgtttgactctcaattttagggcacccccggtcattcccaacgtgcctttcctgtgggcctggaacgcaccaagcgaattctgtctcggtaagttcgatgaacctctggatatgtccctgtttagctttatagggtcgccacggattaatgctaccggccagggtgtcactatcttctacgttgaccgattgggatattatccctatattgactcaatcaccggggtcaccgttaatggagggatcccacagaagatatccctgcaggatcacctcgacaaagctaaaaaggacatcaccttttatatgccagtggacaatttaggaatggcagtgattgactgggaagagtggcgcccaacctgggcccgtaactggaagcccaaagacgtatacaagaacaggagcattgagctggtgcaacaacagaacgtccagcttagccttactgaagcaaccgagaaggcaaaacaggaattcgaaaaggccggaaaagatttcctcgtggaaactatcaagcttggcaaacttttacggcccaaccatctttggggttactatctcttcccggactgttataatcatcactacaaaaagcccggctacaacggaagctgctttaatgtggagattaagaggaatgatgatctgtcatggctgtggaatgagtcaacggccctgtacccctctatctacctcaatacccagcagtctcctgtcgccgccaccctgtacgttcgcaatcgggtacgggaagctatcagggtgtcaaagatacccgatgcgaaatctccactgcccgtctttgcctacacaagaatagttttcacagatcaggtgctgaagttcctgtcccaggacgagctcgtttatactttcggcgaaaccgtagctttgggcgcgagcggcattgtgatttggggtactctgtccatcatgcgttcaatgaagtcttgccttctcctcgataattacatggagactatattaaatccgtacatcatcaatgtcacactggcagctaagatgtgtagccaggttctgtgtcaggaacagggggtttgtatacgcaagaactggaactcttccgattacctccatctgaatccagataattttgccattcagttggaaaaaggtggcaagttcacagtgcgggggaaacccaccctggaagaccttgagcaattctccgagaaattttactgttcttgctattctacgctaagctgcaaagaaaaggcagatgtgaaggatacagatgctgtcgatgtgtgcattgctgacggcgtgtgtatagacgccttcctgaagccccccatggaaacagaagagcctcagatcttctacaacgcgagccctagcacactgtctgcgacaatgtttatcgtatccatcttatttttgataatcagttccgttgcaagcctctag

SEQ ID NO: 22793 - DNA, 1041 bp, synthetic construct
  source 1..1041: mol_type = other DNA; note = Synthetic coding sequence
atggagacccagctgagcaacggccccacctgcaacaacaccgccaatgggcccacgaccattaataataattgttcctccccggttgactcaggtaacaccgaggacagtaagactaacctgatcgtgaactacctaccacagaatatgacgcaggaagaactgaagagccttttcgggagcataggcgagatcgaaagctgcaagctggtcagggacaagattacaggacagtctctgggatacggctttgtgaactatatcgatcccaaagacgcagagaaggcaatcaatacacttaacgggctgaggctgcagacaaaaaccatcaaggtttcatacgctagaccttcaagcgctagcataagggatgccaatctctacgtcagtgggctgcccaaaacaatgactcagaaggaactggagcagctgtttagccagtacgggcgtattataacatcaaggattctggtcgaccaagtcactggcattagccgcggggtgggctttatcaggttcgataaaaggattgaagcagaggaagccatcaagggactgaacggccaaaagcccccgggcgctaccgagccaatcaccgtcaaatttgccaataaccctagccagaaaacaaatcaggccattctctcgcagctgtatcagagccctaatcggcgctatccaggaccgctcgcccagcaggctcagagattcaggttttcgcccatgaccatcgatggaatgacttctctcgccggaatcaacatccccggccacccgggtaccggctggtgtatctttgtgtataacttagccccggatgccgatgaaagtatattgtggcagatgttcggaccatttggtgctgtcacaaacgtgaaagtgattagagacttcaacacaaacaaatgtaaagggttcgggtttgtgacaatgacaaattacgatgaagcagctatggcaattgcgtcgctaaacggatatcgcttgggggatcgagttctacaggtttcattcaagactaataaaacacacaaggcgtag

SEQ ID NO: 22794 - DNA, 1437 bp, synthetic construct
  source 1..1437: mol_type = other DNA; note = Synthetic coding sequence
atggcccacgtgcccgcccggaccagccccggccccggcccccagctgctgctgcttcttcttccactcttcttgctgctgctaagggacgtggccgggagccacagagctcctgcatggagcgccctccccgccgccgcggacggactgcagggggatcgagaccttcagaggcacccgggggatgcagcggctacactgggcccgtcagcacaggatatggttgccgtccacatgcatcgattatacgaaaagtactctcgccagggggctaggcctggaggtgggaatacggtcagatccttcagggctcggctcgaggtggttgaccagaaggctgtgtacttcttcaatcttacatccatgcaggatagcgaaatgatcctgaccgcaacattccatttctacagtgagccgcctaggtggcctcgggcactggaggtgctatgtaagccccgggccaagaatgcaagtggtaggcctctgccactgggtccacccacgagacagcacctgctgtttcggtctctgtctcagaacactgcaacgcaaggactgctgagaggggcaatggcgctagcacctcctccgaggggactctggcaggcgaaggatatcagtcctatcgtcaaggctgcccggcgggatggggaacttctgctgagcgcccagctcgattctgaagagagggacccgggcgtaccgaggccaagcccctacgctccatatatattggtatacgctaatgacctcgccatcagtgagcctaacagcgttgctgtcacgctgcagcggtacgatcctttccctgcaggcgacccagaacccagggcagcccctaataactctgccgacccaagagtccgtcgagccgctcaagccactggaccactgcaggacaacgagttgcctggtctagatgaaaggcctcctagagcgcatgctcaacacttccacaaacaccagctctggccctcacccttcagagcactcaagccaagacccggtagaaaagacagaaggaaaaagggccaggaggtgtttatggccgcctctcaggtcctagattttgatgagaaaaccatgcagaaagcacgcagaaagcagtgggatgagccgcgcgtctgcagccgaagatatctgaaagtggacttcgccgacatcggttggaatgagtggatcattagtcccaagtcctttgatgcctattactgtgccggcgcttgcgagttcccaatgcccaagatagtccggccctccaatcacgcaaccattcagagcatcgtccgcgccgtggggatcatcccaggaatacctgagccgtgctgtgtgcccgataagatgaattctttgggtgtgcttttcctggacgaaaaccgaaatgtagtgctgaaggtgtatcccaacatgagcgtggacacctgcgcatgtcggtag

SEQ ID NO: 22795 - DNA, 978 bp, synthetic construct
  source 1..978: mol_type = other DNA; note = Synthetic coding sequence
atggagagcaagatgggcgagctgcccctggacatcaacatccaggagccaaggtgggatcagagtacctttctaggccgggccaggcacttcttcacagttaccgatccacgcaacctcctcctcagtggagcccagttagaagcctctcgcaatatcgtgcaaaactatcgcgcaggagtcgtcactcctgggataactgaagatcaactctggagggctaagtacgtgtatgactcggcctttcatccagataccggggaaaaggtagtgctgataggccgcatgagcgcccaggtgccaatgaatatgactataacaggttgcatgctcaccttttacaggaagactcctacagtggtcttttggcagtgggtgaaccagtcttttaatgccatcgtgaactattcgaacagatccggagacaccccaatcaccgttcgccaattgggcactgcttacgtgagcgctaccacaggcgctgtcgcaacagctctgggattaaaaagcctgacaaagcatctgccacccttagtgggacggttcgtaccgttcgcagccgtcgctgctgctaactgcattaatataccactgatgagacagcgtgagctgcaggtgggtatccctgtagccgacgaagccggacagcggctgggatatagtgtgaccgctgccaaacaagggatttttcaagtggtcatctcgcgtatatgtatggctattcccgccatggcgatcccaccacttatcatggatactctggagaagaaggatttcctaaaacgcagaccctggctgggggcccctctccaagtgggactcgtgggtttttgcctcgtgtttgccactccactgtgctgcgcgctgtttccgcagaagtctagtatccatatctctaaccttgaaccggagctccgggctcagatccacgaacagaatccctccgtggaggttgtgtactacaataaaggactgtag

SEQ ID NO: 22796 - DNA, 1068 bp, synthetic construct
  source 1..1068: mol_type = other DNA; note = Synthetic coding sequence
atggagccccacctgctgggcctgctgctgggcctgctgctgggcggaacccgtgtgctcgctggttatccaatttggtggagcctggcgctgggtcagcagtacacctccctgggcagccaacctttgttatgcggtagcatcccgggcctcgtaccaaagcagctacgcttttgcagaaactatattgagataatgccttctgtagccgagggcgtgaagttaggcattcaggagtgtcagcaccagtttcgtggccggagatggaactgtactacgattgatgattctctggctatcttcggtcctgttctggataaagccacacgcgagagcgccttcgttcacgccatcgcatcagctggcgttgccttcgcagtgacaaggtcctgcgcagagggaaccagtacaatttgcggatgtgattctcatcacaagggtccccccggggaggggtggaaatggggaggatgtagcgaggacgcagatttcggagtactggtcagccgcgagtttgctgatgccagagagaaccgcccagatgcccgctcagctatgaacaaacacaacaatgaagctggccgaacaactattctggaccacatgcatttaaaatgcaagtgccatggattaagcggtagctgtgaagtgaaaacttgctggtgggcacaacccgatttcagggcaatcggggatttcctgaaagataaatacgattcggcgtctgagatggtggtcgagaaacatcgcgagagcaggggctgggtggagaccttgcgcgccaagtattcacttttcaagcccccaacagaacgcgacctggtgtattacgaaaattccccaaacttttgtgagcctaaccctgagacaggcagcttcggtaccagggatcgaacgtgtaacgtgacctctcacgggatcgatggctgcgacctgctttgctgtgggcggggacacaacactaggacagaaaagcggaaggagaagtgtcattgtatcttccactggtgctgttacgtctcctgccaggagtgtatacgcatttacgacgtacacacttgcaagtag

SEQ ID NO: 22797 - DNA, 1437 bp, synthetic construct
  source 1..1437: mol_type = other DNA; note = Synthetic coding sequence
atggccgcccggcccatcaccctgggcatcgacctgggcaccaccagcgtgaaagcggcgctgctgagagcggcccccgatgacccaagtggctttgccgtgttggcctcttgcgcccgagctgcccgtgctgaagccgccgtggagagtgcggtggcgggaccacagggtcgggagcaggatgtctcccgaatcctgcaggctctgcatgagtgtttggcagccctgcctaggccacagctgcggagtgtggttgggataggtgtgtcaggtcagatgcatggggtcgtattctggaagacgggccagggctgcgaatggacagaaggaggcattacccccgtgttcgagcctcgcgccgtgtctcacttggttacttggcaggacggacgatgttcctccgaatttctagctagtctgccacagccaaagagtcatttgtccgtcgcaacaggattcggctgcgcaaccatcttctggctgcttaagtatcggccagaattcttaaagagctatgacgccgccggcaccatccatgactacgtcgtggccatgctgtgcggcctaccccgtcctctgatgagtgatcaaaatgctgcctcctggggatacttcaatacccaatctcaatcatggaatgtggagactctacgtagttctggtttccctgtgcacctgttgcctgacatcgctgagcccggatcagtggccggccgcacttcccacatgtggtttgagataccgaaaggcacacaggttggtgtggccctgggcgacctgcaggcttcagtctactcatgcatggctcagcgaacagacgccgtgctgaatattagtacttccgtacaactggccgcgtctatgccctcgggcttccagcctgcccagacccctgatccgacagcccccgtggcatattttccttacttcaacagaacgtacctgggggtggccgccagcctcaacggcggaaacgttcttgccacttttgttcacatgctggttcaatggatggctgatctcgggctcgaagtggaagaaagtaccgtatatagccggatgattcaggcggcagtgcagcagagggatacacatttgacaatcacccccacagtgctgggtgagagacatttgcccgaccaactcgccagcgttactcgaatatccagctctgatctgagtctggggcacgtgacccgggccctctgcagagggatcgtgcaaaacttgcactctatgctgccaatccagcagttgcaggattggggcgtggagcgcgtaatgggttccgggagtgctctcagccgtaacgacgttttgaagcaagaggttcagcgtgctttccccctgccgatgtcttttgggcaggacgtggatgcggctgtgggcgccgctttagtcatgctgagacggcaccttaaccagaaggagtcgtag

SEQ ID NO: 22798 - DNA, 1578 bp, synthetic construct
  source 1..1578: mol_type = other DNA; note = Synthetic coding sequence
atgcggcggcggcggcggcgggacggcttctaccccgcccccgacttcagggatcgcgaagccgaggacatggcaggggtcttcgacattgatctagatcaacccgaggatgcaggaagcgaggatgagctggaggagggcggtcagcttaacgaatcaatggaccatggtggggtgggcccctatgaacttgggatggaacattgtgagaagtttgaaatttcagaaacgtctgtcaatcgagggcctgagaaaataaggcctgagtgttttgagcttctgcgcgtgctggggaaaggcggttatgggaaagtgttccaggtgcgaaaagtcaccggtgctaacactggaaagattttcgctatgaaggttttaaaaaaggccatgattgttagaaatgccaaggacactgctcatacaaaagctgaacggaatatactggaagaagtgaaacatccttttattgtagacctgatctacgcatttcagactgggggcaaactatacctcattttggaatacctgtctggcggggagctgttcatgcagttagaacgagaaggaatttttatggaggatacggcctgcttctatctggcagagatttccatggccctgggccatctccatcagaaaggcatcatctaccgggatctcaaacccgaaaatatcatgctgaaccatcaggggcacgtcaagctgaccgacttcggcttgtgcaaggagagcatacatgacggtactgtgacacataccttttgcggaacaatcgagtacatggctccagaaatactgatgcggagcggccacaatcgggcagtcgactggtggtccttgggtgcactcatgtatgatatgctgacaggtgcaccacccttcacgggtgaaaatcggaaaaagacaatagacaaaattcttaagtgcaagttaaatctgccgccttacctaacacaggaagcccgagacctcctgaagaaactcctcaaacggaacgccgcttccaggttgggtgctggtcctggagatgctggagaagttcaagcacacccattcttcagacacattaactgggaggagctgctagctagaaaagtcgagccaccctttaaaccactgctccagtctgaagaggacgtctctcagtttgacagcaaattcactagacagacaccggttgatagccctgacgatagcaccctgagtgaatccgcgaaccaggtcttcctgggcttcacttacgtcgcaccctctgtcttggagtcagttaaagagaaattttcttttgaaccgaagatccggagtccccggaggttcatcggatcccctcgcacgcccgtgtcgccggtgaaattttcccccggggatttttggggtcgtggggcatccgcctccactgccaatccacagacaccagtggagtacccaatggaaacttcaggtatcgaacagatggatgtgacaatgtctggagaggcatccgctccactacctatccgccagcctaattcaggtccttacaagaaacaggcctttccaatgatcagcaagcgacctgagcacctccggatgaatctgtag

SEQ ID NO: 22799 - DNA, 987 bp, synthetic construct
  source 1..987: mol_type = other DNA; note = Synthetic coding sequence
atggcccggaccgtggtgctgatcaccggctgcagcagcggcatcggcttacacttagccgtgcgtctcgcaagtgatccttcgcagtccttcaaagtgtatgctactctgagagatctcaagacacaaggacggctctgggaagccgccagagctctagcctgcccccccggtagtctggagacacttcaactggatgtccgtgattccaagtctgtcgcggccgccagggaaagagtgacagaaggaagggtagacgtgctggtttgcaacgccggactcggactgttgggccctctggaggcattgggagaggatgccgtcgcttctgtcctcgatgtgaatgtggtgggcacagtgaggatgttgcaggccttcctgccagacatgaagcgcagaggttctggacgagtccttgtaacaggatcagttggaggcctcatgggactcccatttaacgatgtgtactgcgcctccaagtttgccttggaaggactttgcgaaagtcttgctgtcttgctgctgcctttcggcgtgcacctcagcttgatagagtgcggccctgtacatacggcatttatggagaaagtactggggagccctgaagaagtgcttgaccgcactgatatacatacctttcacagattctaccagtacctggcgcacagtaaacaggtgttcagagaagccgcccagaatccagaggaggtggcggaggtgtttctcactgctttaagagctcccaagccaaccctccgctactttacaaccgagaggttcctgccactgcttcgaatgaggctcgatgatcctagcggctccaattatgtgaccgcgatgcaccgagaggtgtttggagatgtgccggcgaaggcagaagctggcgccgaagcaggtggaggcgccggacctggggcagaggatgaggcaggcaggggcgcagtgggagatccagagttgggcgatccacccgctgccccacaatag

SEQ ID NO: 22800 - DNA, 1626 bp, synthetic construct
  source 1..1626: mol_type = other DNA; note = Synthetic coding sequence
atgcccggcctgcggcgggaccggctgctgaccctgctgctgctgggtgctcttctcagcgccgacctgtattttcacctgtggccccaagtacaaaggcagcttcgccccagggaaagaccacggggctgtccatgcaccgggcgcgcctcttctctggctagagactctgccgcagccgccagcgatccaggcacaatcgttcataacttcagcaggaccgagcccaggacggaacccgccggcggcagtcattctggctcatcgtcaaaactccaggcactcttcgcacacccactttacaacgttccagaggagccccctctcctcggcgctgaagattcactcctggcttcacaagaagctctccgctactataggcgcaaggtagcccgatggaaccggagacacaaaatgtacagggaacagatgaacctgacgtcattggatccccctttgcagctccggttagaggcatcatgggtgcagttccatttgggcatcaaccgccatggcttatatagtaggtcatccccagtcgtatctaaacttttacaggacatgaggcacttccctaccataagtgctgattacagccaagatgagaaggccctgctaggcgcttgcgattgcacccagattgtcaagcctagtggcgtccacttgaaacttgtgctgaggttctcagactttggcaaagcaatgtttaaacccatgcggcagcagcgggacgaggaaacccccgtagatttcttctacttcatcgatttccagcgtcacaatgccgaaattgctgctttccatttagacagaatccttgatttccgcagggttccaccaacagtgggtcgcatagttaatgtcaccaaggaaatcctggaggttaccaagaacgaaatcctccagtcagtttttttcgtgagtccagcatcgaacgtgtgtttttttgcaaagtgtccatacatgtgcaagaccgagtatgccgtatgtggtaaccctcacctgctggagggctctctcagcgctttcctgccgtcattgaacctggcgccccggctcagtgttcctaatccctggataagaagctacacactggccggtaaggaagagtgggaggtcaaccccttatattgtgacacggtgaaacaaatttacccttacaacaacagtcagaggctcttgaacgtcatcgacatggccatctttgattttttaattgggaatatggatagacaccactatgaaatgttcacaaagttcggcgacgacgggtttctgatccatctcgacaatgctcgcgggtttggacgacacagtcatgacgagatatcaatcctatcccctcttagccagtgttgtatgattaagaaaaagacccttctccatctgcagttgctggcgcaagccgactatagactctcagacgtcatgagagaaagcctactcgaggatcagctttctccggtcctcaccgagccccacctactcgcactggacaggaggttacagacaatcctgaggacagtcgaggggtgtatcgtggcccacggccagcagagcgtcattgtggatggaccagtcgaacagctggccccagactcagggcaggcaaacttgacatcctag

SEQ ID NO: 22801 - DNA, 954 bp, synthetic construct
  source 1..954: mol_type = other DNA; note = Synthetic coding sequence
atgaagaccgccctgatcctgctgagcatcctgggcatggcctgcgctttttcaatgaaaaacctccataggagggtgaaaatcgaggactccgaagaaaacggcgtcttcaaatacagaccacggtactacctgtataagcacgcatatttttaccctcacctgaagcggtttccagttcagggttccagtgactctagtgaggagaacggcgacgattccagcgaagaagaggaagaggaggaggagaccagcaatgaaggggagaacaatgaagagagtaatgaggatgaagatagcgaggctgagaataccacactgtctgccactaccctggggtacggtgaagacgcgacaccagggaccggatatactggattagcggctatccagctgcctaagaaggccggagatatcactaataaagcaacaaaggagaaagaaagcgacgaagaggaggaggaagaagaggaggggaacgaaaacgaggagagcgaagctgaagtggatgagaatgagcagggcatcaatggcacctcaaccaactcaacggaggcggagaacggcaatgggagcagcgggggagacaacggggaggaaggggaagaagagtcagtgacaggtgccaacgctgaagatactacagagaccggcaggcagggcaagggaacctcaaaaacaacaacctccccaaacggcggatttgaacccactactccaccccaggtttatcgaactacatcaccaccattcggcaagaccactaccgtggagtatgagggtgagtacgagtataccggagctaatgaatacgacaatgggtatgagatatacgaatcagagaatggcgaaccgcgcggcgataactatcgcgcgtacgaggatgagtatagctattttaagggacaaggctatgacggctatgatggccaaaactactatcaccaccagtag

SEQ ID NO: 22802 - DNA, 345 bp, synthetic construct
  source 1..345: mol_type = other DNA; note = Synthetic coding sequence
atgagcctgcccagcagccgggccgcccgggtgcccggccccagcggaagcctctgtgccctcctcgcccttttgctactgctaactcctccaggcccccttgcttccgctggcccagtgtctgccgtgctaacagaattgcgatgtacctgtcttcgtgtgacactgagggtgaaccctaagacaatcggaaaattacaagtgtttcccgctggcccccagtgttccaaagtcgaggtcgttgctagtctcaaaaatggtaagcaggtgtgcctcgaccctgaagctccgttcttgaaaaaggtcattcagaaaattctggactcgggcaacaaaaaaaattag

SEQ ID NO: 22803 - DNA, 2100 bp, synthetic construct
  source 1..2100: mol_type = other DNA; note = Synthetic coding sequence
atgcccagcctgtggcgggagatcctgctggagagcctgctgggctgtgtgtcgtggagcctgtatcacgacctgggccccatgatttactacttcccactgcaaactcttgaactcacaggtcttgagggtttttcgattgcctttctgagtccaatattcctcacaattacacctttctggaagctcgtaaataagaagtggatgttgacactgctcagaattatcactataggcagcatcgcatcctttcaagctcccaatgccaaactgcgtctgatggttctcgccttaggagtgtcaagctccctcattgtgcaggcggtgacatggtggtctggatctcacctacagcgctacttacggatctggggcttcatactcggccagattgtgctggttgtcctgaggatatggtatacctccttgaatcctatttggtcataccagatgagcaataaagtgattttgaccctcagtgcgatcgcgactctggaccggatcggcacggatggggattgttccaagccggaagaaaagaaaaccggagaggtagcaaccgggatggcctctcgacccaactggcttctcgctggggccgccttcgggagccttgtgttcctgacacattgggtgttcggcgaggttagcctggtcagccgttgggctgtcagcggacaccctcaccccggtccggatccaaatccatttggcggcgcagtactcttgtgtctcgcgtcagggttgatgctgccatcctgcctttggttcaggggaacaggactgatctggtgggtgaccggtaccgccagtgcagcaggcctgctgtacctgcacacatgggctgcagccgtaagtgggtgtgtgtttgcaatctttaccgcatccatgtggccccaaactcttggacacttaatcaacagcggaactaaccccgggaaaaccatgacaatcgccatgattttctaccttctcgaaatcttcttttgcgcctggtgcacagcttttaaatttgtgcccgggggcgtgtacgcccgagagaggtcggatgtgctgcttgggacaatgatgctcatcatcggtctgaacatgctcttcggtccgaagaagaacctggatctgttgttgcagaccaaaaactcatctaaggtgctgttcagaaagtcggagaagtatatgaagcttttcctctggcttcttgtgggtgtaggactgctgggcctggggctgcggcacaaggcgtacgagaggaaacttggtaaggtagcacccactaaagaggtgagtgccgccatttggcctttccggttcggttacgacaatgaggggtggagtagcctcgagcggtcagctcaccttctcaatgaaacaggcgccgactttatcacaatactcgagtcagatgcgagcaagccttacatggggaacaatgacctgacaatgtggttgggcgagaagctagggttctacactgactttggaccaagcactagatatcacacctggggcataatggctctatcacgctacccaattgttaaaagcgagcaccaccttttgccttcaccagagggcgagattgctccagccataacactgaccgtcaatatatctgggaagctggttgacttcgttgttacacactttgggaatcatgaagatgacctggacaggaaactgcaggctatcgctgtgagcaaactgctgaaatcctcttccaaccaggtcattttcctgggatatatcacgagcgctcctgggtctcgcgattacctgcagctcacagagcacgggaacgtgaaagacatcgattccactgaccatgatcgatggtgcgagtacatcatgtacagaggcctgatcaggctaggatatgcgcgcatcagccacgctgagcttagcgactctgaaatacagatggcaaagttccggatacccgacgacccaactaattacagggacaatcaaaaggtggtgattgatcatcgggaagtatcagagaagattcacttcaaccccaggtttggcagttacaaggaggggcataattacgagaacaatcatcacttccacatgaatacgcccaaatacttcctgtag

SEQ ID NO: 22804 - DNA, 1449 bp, synthetic construct
  source 1..1449: mol_type = other DNA; note = Synthetic coding sequence
atgctgttcgagggcaaggtgaacccccagacccagagcctgctggcagaatgtggcgagtggacccggcgaagcctacacctgcgggtgctcggtcgccagttaatacttccaacagataaaggcgtccagcacttccaaggtagtacaccagctagtgctgtgcacaggcctccgttaagtgcctgtggacacagcagtaacatccgagagttgtgcatttcagggagccagattgtgcctgccgcactgtcggcctccgccttacccggtccagatgacactggtgtagccgaccttactgcccgcagcagtttggaggaggaagtataccatgtagacggcaagatcgaggagtatttcgcatttgacaggaaagaagatgatgacgagtgcttggagcagaaacctgctcagcccggcaggaaatggaggaagctgggcctgccaccagtatccccgagagactgtgtcaaggacgccgtcgccgccgaggtgtttgatcacgtatggaccaacatggtagaattactggaagagttgatcaggaaacactgggaaaccaccctcacggaaggaaaaaaacagcgcgagactttgaaggtggccggcaacagatttcctcacgtgcttgtgccgcacgcccatgctgatggggcaagcggaccacccagcggccatgctgaagcccacggcatttctttggcctcccgcctcaaccctccacaaattcatcacttctcaagcagtttctatagtgacatgaacggcgtcatgaccattcaagcaaagcctctacagagaagacctgcatattttgctgaccgaacccagaacgaaaaagaggacaaggccagcggtggaggtgccggtgctctgtccagcgccccccaccgcctgggcagagctagtgacactcacgggctgtccccctccgccaaaaagacgcccgtgccgtggcgactgccaagtctggccagcgactctcagcgccttaagacccctaacatttatagtgacgaggtgctaaggggcacaaaacttcccaccggcgttgatcatatggccagcccacttgtgcaaacctctagatctcgatttcctccacttgttaccgagacaagaggtcagaataccgctgttccaggatgtcggctcgtgtcatacagagggagacacttacagaatcgcgttttgagtgccatgccagacggtacagagcgttccagacttagagaacgcactgcaaccctggagagactgtctagaccctccacgactcacacatttaggcaatcagacacaccccgtaagagctccctaactcaaatggaatttgctgcccacacgtggacaggccagagtattctcaccggctcccagtatgtacctaagagttttcagcgtacaactttgacattcaaacgacgattccaggtcacctcctag

SEQ ID NO: 22805 - DNA, 1392 bp, synthetic construct
  source 1..1392: mol_type = other DNA; note = Synthetic coding sequence
atgggcgccggccccagcctgctgctggccgccctgctgctgctgctgtcaggggacggagcggttagatgtgatacgcctgctaactgtacgtatctggatctgctgggcacatgggtgtttcaggtaggatcttcagggagccagcgtgacgtaaattgtagtgtgatggggcctcaagagaagaaggtggttgtttatcttcaaaaactcgataccgcatacgacgacctgggtaactctggtcacttcacaatcatctataatcagggattcgagatcgtattgaatgactacaagtggtttgccttctttaaatataaagaggaagggtctaaggtcacaacttactgtaatgaaacaatgacaggctgggtgcacgacgtgttagggcgtaattgggcctgctttactgggaagaaagtaggaaccgcctccgagaacgtgtatgtgaatattgcccacttaaagaactctcaggaaaagtatagtaataggctgtataagtacgaccataacttcgtgaaggccataaatgccatccaaaaaagttggaccgccaccacatacatggaatacgagaccctgactctgggagacatgatccggcggtccggcggacattcccgcaagatccccaggcccaaaccagccccactgacggcagagatccaacagaagattcttcatctgcctacctcatgggactggaggaacgttcatggtattaactttgtgagcccagtgcgcaatcaggcctcttgcggctcctgctacagttttgcttcgatgggcatgctggaggcccggatcaggattctgactaacaattctcagacacccattctgtcacctcaagaggttgtgagttgcagtcaatacgcgcagggatgcgaagggggctttccatacctcatagcagggaagtatgcccaggacttcggacttgtcgaagaggcatgcttcccctacaccggcaccgattcaccttgcaagatgaaggaggattgcttccggtattactcctcagagtatcactatgtggggggcttctacgggggatgcaatgaagcactcatgaaattggaactggtgcatcatggaccgatggcggtcgcctttgaagtgtacgatgattttctgcactacaaaaagggtatttaccaccataccgggctgcgagaccctttcaacccattcgaactgacaaaccacgctgtgttactcgtgggttacggaacggattccgctagcgggatggattattggatagttaaaaattcctggggaacgggctggggcgaaaatggctatttcagaatcaggagaggaaccgatgagtgcgcgattgagtcaatcgcagtcgctgccaccccgatcccaaagctttag

SEQ ID NO: 22806 - DNA, 1941 bp, synthetic construct
  source 1..1941: mol_type = other DNA; note = Synthetic coding sequence
atgagcaagggccccgccgtgggcatcgacctgggcaccacctactcctgtgtgggtgtcttccagcacggaaaagtcgagattatcgccaacgaccagggtaaccgcaccactccatcttacgtggcttttacggacactgaaagacttatcggagatgcggcgaagaatcaagtggccatgaacccaacaaacactgtattcgacgccaaaaggctgattgggcggcgctttgacgacgcagttgtccaaagcgacatgaaacattggccatttatggttgtgaacgacgcaggaaggccaaaggtgcaggtagagtataaaggggagactaagagtttttatcccgaagaggtgtcttcaatggtgctcactaaaatgaaggagatcgccgaagcatacctgggcaagaccgttacaaacgccgtcgtgaccgttcccgcctatttcaacgattcccaacgccaggcgacaaaggatgcaggtactatcgcagggctcaatgtgctgagaataataaatgaaccaacagcggccgcgatcgcatatggtctggacaagaaagtcggcgccgagagaaatgtgctgattttcgacctcggcggcggtactttcgacgtgagtattctgacgatagaggacggaatattcgaagtaaaaagcacggctggtgatacacacctgggcggtgaagatttcgacaacagaatggttaaccattttattgccgaattcaagaggaagcataagaaggacatctctgaaaataaacgggccgtccgacgcctccgcaccgcctgcgaacgcgctaaacgaaccctgtcatcttccacgcaggcttccatcgaaatcgacagtctctatgagggcatcgatttttacacttcgataactagggctcgatttgaggagcttaacgcagacctgtttcgcggcactctggatcctgtcgaaaaagcacttagagacgccaagttagacaagtcccagatccatgacatcgtgctagtcggcggctccaccaggatccctaagattcagaagctgctgcaagactttttcaacgggaaagagttgaacaagagcatcaatcctgatgaagcggtcgcatatggcgccgctgtccaagccgccatcctgagcggagacaaatctgagaacgtgcaagaccttttactactcgatgtaactccgctgagcctagggatcgaaacagctggaggtgtgatgaccgttttaatcaaacgtaataccaccatccctactaaacagacccagacctttaccacctacagcgataaccagccaggcgttcttatacaagtgtacgagggcgagcgtgctatgactaaagacaacaacttattggggaagtttgagctcacgggcataccaccggctccccgaggcgtgcctcaaattgaggtgacattcgacatcgacgctaacggcatcttgaatgtgtcagctgtcgataagtcaactggcaaagaaaacaaaattaccatcacaaatgacaaggggcggctgtccaaggaggacattgaaaggatggtccaagaagcagaaaagtataaagcagaggacgagaagcagcgtgacaaagtgagttcgaagaatagcctggagtcttacgcatttaacatgaaagctacagttgaggacgagaaacttcaggggaaaattaacgatgaagacaagcagaagatcctagataaatgtaatgagatcatcaattggttggacaagaaccagaccgcagagaaagaggagtttgagcatcaacagaaggaactcgagaaggtctgtaatcccattatcaccaagctctatcagagcgcaggtgggatgccaggcggtatgcccggtggtttccctggcggcggcgccccaccctccggcggcgcatcttccggccccaccattgaagaggtcgactag

SEQ ID NO: 22807 - DNA, 1017 bp, synthetic construct
  source 1..1017: mol_type = other DNA; note = Synthetic coding sequence
atgtgggaggccaaccccgagatgttccacaaggccgaggagctgttctcaaagaccactaataatgaagtcgacgacatggatacgtcagacacgcagtggggttggttctatctcgccgagtgtggaaaatggcacatgttccaacccgataccaattctcagtgttccgtatcttcggaggacattgagaaatccttcaagacaaacccatgtggatccatctccttcaccacaagtaagttttcttataagattgacttcgccgaaatgaaacagatgaacctcaccacagggaagcagaggctcattaagcgggcacccttctcaatctcagcgttcagttatatctgcgaaaacgaggctataccgatgccaccccattgggagaatgtcaacactcaggtgccataccagcttatccctttacacaatcagacacacgaatacaacgaagtggcaaacctgtttggcaaaacaatggaccggaatagaatcaaacgcatccagcgaatccagaacctggatctgtgggaattcttttgtcgtaagaaagcacagctgaagaaaaaaagaggcgtgccccagattaacgagcagatgctgttccacggaactagtagcgaattcgtggaggcaatctgtattcataatttcgactggaggatcaatggtatacacggggctgtgtttgggaagggcacttacttcgcacgagacgctgcttattcatcccggttttgcaaagatgacataaaacatgggaatacattccagatccacggcgtgagtctgcagcagcgtcacttgttccggacatataagtccatgttcttggctcgcgtcctaataggtgattacattaacggggatagcaaatacatgcggcctccatcaaaggatggctcttatgtgaacttatacgactcttgtgttgatgatacctggaaccccaagatattcgtggtgttcgacgcaaaccagatctatccagaatatctcatcgactttcactag

SEQ ID NO: 22808 - DNA, 1059 bp, synthetic construct
  source 1..1059: mol_type = other DNA; note = Synthetic coding sequence
atggtgcggcccgtgcggcacaagaagcccgtgaactacagccagtttgatcattctgactccgatgatgattttgtgtcggcgactgtacccctgaacaaaaaatctcggactgcccccaaagaactgaagcaggacaagccaaaacccaatttgaacaatctaagaaaggaggagatccccgtgcaggagaagactcctaagaaacgtctgccagagggaaccttttcaatcccggccagtgcagtgccatgcactaaaatggcattggacgataaactgtaccagagggatctcgaagtggccctcgccctgagcgtgaaagaacttcccacagtcaccaccaatgtgcagaatagtcaggacaaatctattgaaaaacatggttcatccaaaatcgaaactatgaacaagtctccgcacatttccaattgttccgtggcctctgattatctggaccttgacaagattactgtggaagatgatgtggggggcgtgcaggggaagagaaaagccgcgagcaaagccgcggctcaacaacgcaaaatcctacttgaaggcagtgatggtgatagtgcaaacgacacagagccagactttgcacctggagaagatagtgaggatgattccgatttctgcgaatcggaggataacgacgaggatttctcaatgcggaagtctaaggtgaaggagatcaaaaagaaagaggtgaaggtcaaaagtcccgttgaaaaaaaggagaagaaaagcaaaagcaaatgtaacgcactcgtaactagcgtagactcggcacctgccgcggtgaaaagcgaaagtcagtccctcccgaagaaggtgtccctttcttccgacacgaccagaaagcccctcgagattaggtccccttcggcagagtcgaaaaagccaaagtgggtccccccagctgcctcaggcgggagccgatcttcatcatctcccctcgtggtcgtgagcgttaaatcgccaaatcagtcacttagattgggcctcagcaggctggcccgcgttaagcccttacatccgaacgctacctccacatag

SEQ ID NO: 22809 - DNA, 1488 bp, synthetic construct
  source 1..1488: mol_type = other DNA; note = Synthetic coding sequence
atgaccgtgatgagcggcgagaacgtggacgaggccagcgccgccccagggcacccgcaggacggatcatatcctaggcaggccgatcatgatgaccacgagtgctgcgagcgggtcgtcattaacatctcagggctaagatttgaaacacagctaaagactctcgcccagtttcctaacactcttttaggaaacccaaagaagagaatgaggtattttgatcctttacggaacgaatactttttcgacagaaaccgcccaagcttcgacgccatactatactactaccaatctggcggccgcctcaggcggcccgtcaacgtcccactggacatgttctcagaagaaatcaagttttatgagctgggggaggaggctatggagaagttccgagaggatgaaggcttcatcaaagaagaggaaagacccctgcccgagaaggaataccagcgccaagtgtggctgctgtttgagtatccggaatcaagtggacctgcccgtgtgattgccatcgttagtgtgatggtgattctaataagcatcgttattttctgtctagaaaccctgccagaactgaaggacgataaggactttacagggaccgtacaccgaattgataacacaaccgtcatctataattctaatatctttactgacccattctttattgttgagacactgtgtattatctggttctccttcgagcttgtggttcggtttttcgcgtgcccatcgaaaacagatttcttcaagaacataatgaactttattgatattgtcgccatcatcccttattttattaccctcggtactgaaattgctgaacaggagggcaaccagaaaggagagcaggctacgagtctcgcgatactccgggtaatcaggttggtgagagtattccgaatattcaagctttcaagacactcaaaagggctccagattctgggacagacactgaaagcgagtatgagggaactgggactcctgatcttttttctctttatcggggtcatcctctttagcagcgccgtttatttcgccgaagccgaggaagccgaatcgcacttcagtagcatccccgacgccttctggtgggctgtcgtgtctatgacgaccgtgggatacggcgacatgtaccccgtgactatcgggggaaagatagtcggctccctgtgcgcaatcgccggcgtgcttacaatcgctctgccagtcccagttattgtctctaattttaattacttttaccatcgggagaccgaaggagaagagcaagcccagctgctgcacgtgtcttcaccaaatctggcatccgactcagatttgagtaggcggtccagtagcaccatgtccaaaagcgagtacatggaaattgaggaggatatgaacaattccatcgcacactatagacaggtgaatatccgcacagccaactgtacgactgcaaaccagaactgtgttaacaagtccaagcttctgactgacgtctag

SEQ ID NO: 22810 - DNA, 1632 bp, synthetic construct
  source 1..1632: mol_type = other DNA; note = Synthetic coding sequence
atgcggaagcccgccgccggcttcctgcccagcctgctgaaggtgctgctgctgccccttgctccagccgccgcccaggacagcacccaggccagcactcctggctccccactcagcccaaccgagtatgagagattctttgcactgcttacgcctacttggaaagcggaaacaacttgtagactgagggctactcacggctgtcggaatcccaccttggtccaactagatcaatacgaaaaccacggcctcgttcccgacggcgcagtgtgtagcaacctgccctatgcctcttggttcgaatccttctgccagttcactcactatcgctgttcaaatcacgtttactatgccaaacgagtgttgtgttcccagcccgtaagtatcctgtcacctaacaccctaaaggagatcgaggcctctgccgaagtgtcaccaacaaccatgaccagcccgatctcgccacacttcactgttacggagaggcagacatttcagccctggccagagcgactgtctaataacgttgaagagctgctgcagagcagcctctccctcggcggccaggagcaggcgcccgaacacaagcaggaacaaggcgttgaacatagacaagagcccactcaggagcacaaacaagaagagggccagaagcaagaggagcaggaggaggagcaagaagaggaagggaagcaggaggaaggtcaggggacgaaagaggggagggaagctgtcagccagttacaaaccgactccgagccaaagttccacagcgaatcccttagttctaaccccagctccttcgccccccgtgtgagagaagtggaatcgacacccatgatcatggaaaatatccaggagctaatccggagcgcgcaagaaatcgacgaaatgaacgagatttacgacgagaactcttattggcgcaatcagaaccctggctccctcctccagctgccacacacagaggccctgctggtgctttgttactccatcgtcgagaacacatgtatcatcaccccgactgctaaggcctggaaatatatggaagaagaaatcctgggatttggaaagtcggtctgcgactccttaggtagaaggcacatgagtacttgtgccctgtgcgatttttgtagcctgaaattggaacagtgccacagcgaagcatcccttcagcgacagcagtgtgatacttcccataaaacacccttcgtgtctcccctgctggcatctcaatcactctccatcggaaatcaggtcggctccccagaaagcgggcgcttttacggcctggacctgtacggtggactccacatggacttttggtgtgcacgactcgctaccaaaggatgcgaggatgtaagagtgagcggctggctgcagaccgaatttttatctttccaggatggagatttccccacaaaaatctgcgacactgactatatccagtacccaaactattgttcctttaaaagtcagcagtgtctcatgcgtaaccggaacagaaaagtcagccggatgcggtgccttcagaacgaaacctactcggcactatctcctggcaagagcgaggatgtggtgttaagatggtctcaggaatttagcactcttaccctgggccagtttggttag

SEQ ID NO: 22811 - DNA, 666 bp, synthetic construct
  source 1..666: mol_type = other DNA; note = Synthetic coding sequence
atgagcggctgggccgacgagcggggcggcgagggcgacggccggatctacgtcggaaatctgccaactgatgttagagaaaaagaccttgaggacctgttttacaaatatggacgcattcgtgaaattgaactgaaaaaccggcatggcctggtgccgtttgcttttgttcgcttcgaggaccctagagacgccgaggatgcgatctatggtcgaaatggctacgattatggccaatgccgtcttagggtcgagttcccacggacttatggcggaagaggtggctggccacgtggcggacggaacgggcctcccacccggagaagcgactttcgcgttctggtatctggtttacctccatcgggcagctggcaggacctgaaggaccatatgagagaggcaggggacgtctgctacgcggacgtgcagaaggacggtgtcgggatggtcgaatacttgagaaaggaggatatggagtatgctctgagaaaacttgatgacacgaaattcaggagccacgaaggagagaccagttacataagagtgtaccctgagcggtccaccagctacggatattctaggagcaggtctggctcacggggcagggattcaccttatcagagtcggggttctccacactatttttcacctttccggccatactag

SEQ ID NO: 22812 - DNA, 2523 bp, synthetic construct
  source 1..2523: mol_type = other DNA; note = Synthetic coding sequence
atgagcgccttccggctgtggcccggcctgctgatcatgctgggcagcctttgccacagaggctcaccatgcggtctgtctacgcatgtggaaattggtcatcgggcactggagtttctccaattacacaacggtcgggtgaattatagagaactccttcttgagcaccaggatgcttatcaggccgggatcgtttttccagactgtttttaccctagtatttgcaagggggggaaattccacgacgtgtccgaatccacccactggacccctttcctaaatgcaagcgtgcattatatcagggaaaactaccccctgccctgggagaaagacactgagaagctggttgctttcctctttggcataacaagccatatggctgccgatgtaagttggcattccctcggcctagagcagggcttcttaaggaccatgggagcaatcgatttccacggttcctacagcgaggctcactccgcaggggacttcggaggggatgtgctgagccaatttgaatttaacttcaattatctcgcgcgacgttggtacgtgcccgtaaaagacctgctgggcatctacgaaaagctgtacggtaggaaagtaatcacagagaacgtgattgttgactgctcacacattcaatttcttgagatgtacggagagatgctggccgtgagcaaactgtaccccacctactccaccaagtccccctttttggtcgagcagtttcaggaatactttctggggggactagacgacatggctttctggtccaccaacatttaccacctgacaagcttcatgcttgagaatgggacgtctgattgcaatctgccagaaaacccgctctttatcgcctgtggcggccagcagaatcatacgcagggttctaagatgcaaaaaaatgactttcaccgaaacctgactacctccctaactgaaagtgtagacaggaacattaattatactgaacgcggtgtgtttttttctgttaattcttggacgcctgatagcatgagcttcatctacaaggctctggaaaggaacatcagaacaatgttcatcggggggagtcaactcagccaaaagcacgtctccagcccactcgccagctacttcttgtcattcccgtacgcgcgcctgggatgggccatgacgtccgcagacctcaatcaggacggccatggagatctggtggtaggcgctccagggtacagcagaccaggccatatccacattggacgagtctacctgatctatggtaacgatctcggcctgcctcccgttgacttggacctggacaaagaagcccatagaatcctggaagggttccagccatctgggcgcttcgggtcggccctggccgtattggacttcaacgttgatggcgtaccggacctagcagttggtgccccgtctgtaggttcagagcagcttacctacaagggagcggtgtacgtatacttcggaagtaaacagggcgggatgagtagtagccctaacatcaccatcagctgtcaggatatctattgtaacctaggctggaccctgctggcggctgacgtgaacggcgattccgagcccgatttggtgatcggaagtcctttcgcacctgggggaggaaagcagaaaggcattgttgcggctttctactccggcccgagtctgagcgataaggagaagctgaacgtggaagctgccaactggaccgtgcggggggaagaggatttttcgtggttcggttatagcctacacggggtgactgtggacaacaggacactactgctggtggggtctccaacctggaagaacgccagtcgcctcggacaccttctccacatccgcgacgaaaagaagtccctgggccgggtgtacggatattttccacctaatggacagagttggtttaccatctctggagataaagcgatgggaaagctcggaacatccctgagttcaggtcacgtgttgatgaacggcacgctaaaacaggtgctgttggttggagcacctacttatgacgatgtttcaaaggtggcctttctgacagttacgctccaccagggaggcgcaacaagaatgtacgccctaacctcggatgctcagccactgctcttatctactttttctggggatcgccgattttccagattcgggggtgtgctgcacttgtcagatctggacgatgacggccttgatgagattatcatggctgcaccccttcgtatcgcagacgtgaccagcggcttgatcgggggcgaagatggccgcgtatatgtgtacaacggtaaggagacaactctgggtgacatgactggaaaatgcaaaagttggatcacgccgtgccccgaggaaaaggctcagtatgtcctgatctcgccagaggctagttcgagattcggatcttctctgattaccgtgcggtccaaagctaaaaaccaggttgtcatagctgccgggcgatcctcactgggagcacggctgtccggcgccctccacgtgtatagcttaggatccgattag

SEQ ID NO: 22813 - DNA, 972 bp, synthetic construct
  source 1..972: mol_type = other DNA; note = Synthetic coding sequence
atgaagagcgccctgttcacccggttcttcatcctgctgccctggatcctgatcgtcattattatgcttgatgttgacacccgtaggccagttcctccactgaccccccggccttacttttcaccatacgccgtcggccgcggaggagcaagattgcctttaaggcggggaggccctgcccatgggacccagaaaaggaatcagtcaaggccccagccgcagccagagcctcagctgccaacaatctatgcaattacccctacctactcacggccagtgcagaaagctgagctgacccgccttgccaacacatttaggcaagtcgctcagctccactggatcctggtcgaggatgccgccgcccgttcagagcttgtgtcacgcttccttgctagggcagggctgccttcaactcatctacatgtgcccacgccacggcgctataagcgtccaggactaccaagagctactgagcaacggaatgctggacttgcatggcttcggcaaaggcaccagcatcaacgggctcagcctggcgtactgttctttgctgatgacgacaatacctattcgctcgaactgttccaggaaatgcggactacccgtaaagtgagtgtatggccggtgggcctggtgggaggaaggagatacgaacggccactggtcgagaacggcaaggtcgtggggtggtatactgggtggcgtgccgataggcccttcgccatagatatggctggattcgccgtgtctctgcaggtgatcctgtctaaccccaaggcagttttcaaaagaagggggagtcagcccggcatgcaggagtcagactttcttaagcagatcactactgttgaagagctcgaaccaaaagctaataattgcaccaaagtcctggtctggcatacccggaccgagaaagtcaacctggctaatgaaccaaaataccatctcgacaccgtcaaaattgaggtgtag

SEQ ID NO: 22814 - DNA, 3213 bp, synthetic construct
  source 1..3213: mol_type = other DNA; note = Synthetic coding sequence
atgggcgccgcccggggcagccccgcccggccccggcggctgcccctcttgagcgtccttcttctgcctctgttagggggaacccagaccgcaattgtgttcataaaacagcctagtagccaggatgctttacaggggcgtcgcgccttactccgatgcgaagtggaagcccccggacccgtgcacgtgtattggctcctggatggtgcccccgtgcaagatactgagcgcaggttcgctcaaggctcgtcactgtccttcgctgccgtggatcgactacaagattccggcaccttccaatgtgttgctcgcgacgacgtaactggagaggaggcccgctcagccaatgcttctttcaacattaagtggattgaagcaggccccgtagtacttaagcatccagcatcggaggctgagatccagccacagacccaagtgacccttaggtgtcacattgatggccacccccgtcccacctaccagtggtttagagacggaacccccctgtcagacggccagtccaaccacactgtgagttcgaaagagcgcaatctgactctgaggccagccggcccagagcattcaggtttatactcctgctgcgcacatagcgcgttcggccaggcatgcagctcgcagaactttaccttaagcattgctgacgaaagtttcgctagggtcgtgttagctccccaggacgtggtcgtggctaggtacgaggaagctatgtttcactgtcagttcagcgctcaaccccccccctctctccagtggctgtttgaggatgaaacaccaatcacaaataggagccgtcccccacacctgagacgggctacggtttttgccaatggctccttactgctgacacaggttcgcccccggaacgccggaatctatcgatgcataggtcaggggcagaggggccccccaatcattttagaagcaacactgcacctggctgaaatcgaagatatgcccctcttcgagccccgtgtctttacagctggcagcgaggagcgcgtgacctgccttcctccaaaaggtttaccagagcctagtgtgtggtgggagcacgccggcgtgaggctgcccacccacggacgggtgtaccagaagggtcacgaactcgtcctcgcaaacatcgcagagtccgacgctggagtgtatacatgtcacgctgccaacctcgctggacagcggagacaggatgtaaacatcacagtggctactgtgccctcatggctcaaaaagccccaggacagccagctggaggaaggcaaacctggatatctggactgcctgactcaggccacacccaaacccacagtggtgtggtacagaaatcagatgctcatctctgaagactcccggttcgaggtcttcaaaaatgggacgctgaggattaacagcgttgaggtgtacgacggcacatggtaccggtgcatgtccagcaccccagcagggagtatcgaagcccaggcccgcgtgcaagtgctggagaagctgaagtttaccccacctcctcaaccgcagcaatgtatggagttcgacaaagaagctactgttccctgctctgccacaggcagagaaaagccaacaattaagtgggagcgtgctgatggtagttcactgcctgagtgggtgactgacaacgcgggtactctgcacttcgcgagggttactcgggacgacgctggcaattacacctgcatagcctcgaatggaccgcagggacagatccgtgcccacgtgcagctgacagttgctgtattcatcacttttaaagtagaacccgaacgcaccacggtataccagggtcacactgctctcctccagtgtgaggcccagggagatcccaaaccgttaattcagtggaagggcaaagacaggatcttggatccaacaaaactggggcctaggatgcacatcttccagaatggttccctggttatccacgacgtggctccagaagacagtgggagatatacctgcattgcgggtaattcgtgcaatattaagcatacggaggcccccctctacgtagtcgacaaaccagtgcctgaggagagtgagggccctggttctccccctccctataagatgatacaaactatagggctgtctgttggagcagcagttgcctacatcatcgccgttctgggcctgatgttctattgtaagaagagatgtaaggccaagagacttcagaaacagcccgagggagaggagcctgaaatggaatgtctgaacgggggaccactgcaaaacggccagccatcagccgaaattcaagaagaggtggctctaacatcacttggctcaggacccgctgcgacaaacaagcggcacagtaccagtgacaagatgcactttccacgatcctctctgcagcctatcaccacgctcggcaaaagcgagttcggggaggtgttcctggccaaagcgcagggactagaggaaggcgtggctgagactcttgtgcttgtgaaatccctgcagtcgaaggatgagcagcaacagctggactttcggagagaactggaaatgttcggcaaattgaaccacgccaatgtcgttagattgcttggactatgcagagaggcggagccacactacatggtcctcgaatacgtcgacctgggcgatttgaagcagtttctgcgtattagtaagtctaaagatgagaagctcaagtctcaacctctgtcaacgaagcagaaggttgccctgtgcacccaggtggctctgggaatggagcacctctctaacaatcgatttgtgcacaaagatctggccgcccggaactgtcttgtctccgcacaacgccaggtcaaggttagtgcgcttggcctgtctaaagacgtgtacaattctgaatactatcatttcaggcaggcatgggttccactgaggtggatgtcacctgaagccatcttggagggagattttagcacaaaatccgatgtgtgggccttcggcgtgctgatgtgggaggtatttacccacggtgagatgccccacggtgggcaagctgacgatgaggtcttagcagacctgcaggccggtaaagcacggctgccacagcctgaaggatgtccttctaaactgtaccgtctgatgcaaagatgctgggcgctgtctccaaaggatcgtcccagtttcagtgagattgcatcagcactgggcgattctaccgtggattctaaaccctag

SEQ ID NO: 22815 - DNA, 1521 bp, synthetic construct
  source 1..1521: mol_type = other DNA; note = Synthetic coding sequence
atgcccctgctgggcctgctgccccggcgggcctgggccagcctgctctcccagctgctgcggcccccttgcgcctcctgcacgggcgcagtgcgatgtcagtcgcaggttgccgaagcagttctgacctcccaattaaaagcgcatcaggagaagcccaactttattataaaaacccctaagggaacccgagacctcagccctcagcacatggttgtcagggagaagattctggacttggtgatctcctgctttaagaggcacggtgcgaaaggcatggatacacctgcatttgagctcaaagagactcttacggaaaagtacggagaagactccggactcatgtatgaccttaaagatcagggtggcgagttgctatccttacgatatgaccttactgttccatttgccagatacctcgctatgaataaggtgaaaaaaatgaaaaggtatcacgtgggcaaggtgtggagacgtgagtcccccacaatagtacaaggtcggtaccgtgaattctgtcaatgcgatttcgacatcgccggtcagttcgaccctatgatacccgatgccgaatgcctgaaaattatgtgtgaaatcctgtccggcctccagctgggagattttttaattaaggtgaacgataggagaattgttgatggcatgttcgcggtttgtggcgtgcctgagtcaaagtttcgcgctatttgcagctccatcgacaagctagacaaaatggcgtggaaagatgtccgccatgagatggtcgtgaaaaaggggttggctcccgaagtggcggaccgcattggcgattacgttcagtgccatggcggggtgagtctggttgaacagatgttccaagatccccggctttcacagaacaagcaggccctggagggtctgggtgacttaaagctactgtttgaatacctcaccctcttcgggatagccgataagatttcattcgacctcagcctggccaggggcttggactactacaccggcgtgatttatgaggctgtcctgctccaaacacctacacaagctggggaagaaccactgaatgtgggcagcgtggcagctggcggaagatatgacggcttggtggggatgtttgaccccaaggggcataaagtaccctgcgttggcctgtcaataggagtggaacggattttttacatcgtggagcagagaatgaagactaaaggggaaaaagtccgcacaacagaaactcaggtcttcgtcgctactcctcagaagaatttcctgcaggagaggctcaagcttatcgccgagctctgggactccgggattaaggctgaaatgctgtacaaaaataatcccaagctactaactcaactgcattattgtgaatcaacagggattccactggtagtgattatcggcgaacaggagttgaaagaaggggttattaaaatacggagcgtggctagtagagaggaagtggcaatcaaacgggaaaactttgtggctgagattcagaagaggctaagcgagtcatag

SEQ ID NO: 22816 - DNA, 912 bp, synthetic construct
  source 1..912: mol_type = other DNA; note = Synthetic coding sequence
atgcgggcctggatcttcttcctgctgtgcctggccggccgggccctggcagcaccacagcaggaagctctccctgacgagactgaagtcgtcgaagaaaccgtggcagaggtgacagaggtgtccgtcggagcgaatcctgtgcaggtggaagtcggagaatttgacgatggtgccgaagagactgaagaggaggtggtagctgagaatccttgccaaaaccatcactgcaagcacggaaaggtgtgcgaattggacgaaaacaatacacctatgtgcgtgtgccaggacccgaccagctgcccagctcctattggcgaatttgagaaggtctgctcgaatgacaataaaacgttcgacagttcttgccacttttttgctactaagtgcaccctcgagggcaccaagaagggacataaattacaccttgactatatcgggccatgtaagtatattcctccctgcctcgattccgagttgaccgagtttcctctgcgcatgcgagactggctgaagaatgtactcgtcacgctctacgaaagggatgaagacaacaacctcctcactgaaaagcagaaacttcgggtgaaaaagatccacgaaaatgaaaaaaggcttgaagccggagaccacccggtggagctgcttgcacgggattttgagaagaactacaatatgtacatcttccccgtgcactggcaatttgggcaactcgatcagcaccccatcgatggctacttgagccacacagaattggctccattgcgagccccactcattcctatggagcactgcactactcgcttcttcgaaacttgcgaccttgacaatgacaaatacatcgcgctcgacgagtgggccggttgttttggcataaagcaaaaggatatagataaggacctcgtgatctag

SEQ ID NO: 22817 - DNA, 2634 bp, synthetic construct
  source 1..2634: mol_type = other DNA; note = Synthetic coding sequence
atggcccggccccggcgggcccgggagcccctgctggtggccctgttgccactcgcgtggttggcacaggcagggttggcccgcgctgccgggtctgtcagactagcaggaggcctgaccctgggcggactgttccccgttcacgcccgcggggcagccgggcgtgcctgtggacagctaaagaaggaacaaggcgtccatcgcttagaggccatgctttacgctcttgaccgcgtgaatgccgaccccgagctcttgcccggtgtgcggctgggagcaaggctgctcgacacatgctcacgcgatacctacgctcttgagcaggccctttccttcgtgcaggcccttattagaggaagaggcgatggtgatgaggtgggcgtgagatgtcctggaggcgtccctcctttaagacccgctcctcccgaacgcgtcgtcgcggtagtgggcgcttctgcgtccagcgtctctataatggtcgcaaacgtgctgagactttttgctatccctcagatctcatatgcgtctactgcccctgagctgagcgacagcacaagatatgactttttcagtagagttgtgccacccgattcttaccaggcccaagctatggttgacatcgttagagcactggggtggaattatgtcagtacattggcaagcgaggggaattacggagagtccggcgtggaggcattcgtgcagataagcagggaggctggcggcgtgtgcattgcccagtcaattaaaatccccagggagccaaaacctggagaattctccaaggtgattcggcgactcatggagacacccaatgcgcgtggaattattattttcgccaatgaagacgatataaggcgagtgctggaagccgcccggcaggctaacctgacaggacatttcctctgggtgggaagcgatagctggggtgcgaaaacttcacctattctgtctctggaggacgttgctgtgggcgcaatcacgatactgccaaagcgcgcttcaatagatggttttgaccagtactttatgaccaggtcattggaaaacaataggcgcaatatttggttcgctgaattttgggaggagaactttaactgcaagctgacctcttcggggactcagtctgacgactccacccgtaagtgcaccggggaagaaagaataggccgcgatagcacttacgagcaggaggggaaggtgcagtttgttattgacgcagtctacgccatcgcccacgcccttcatagcatgcaccaagctctctgcccaggtcacacaggattatgtcctgcaatggagccaaccgacggacggatgttgctgcagtacatccgtgccgttcgctttaatggctccgctggtaccccagtcatgttcaatgaaaatggagacgcccctggtagatacgatatcttccagtatcaagctacaaatgggtctgcaagcagcgggggttatcaggccgtagggcagtgggctgagaccctaagactagacgtggaagctctgcagtggtcaggcgacccacacgaagtcccatccagcctgtgttcattgccctgcggacctggggagcgaaaaaaaatggtgaaaggcgtgccatgctgttggcactgcgaggcctgcgacggataccgcttccaggttgacgagtttacctgcgaggcctgtcccggtgacatgcgccccacacctaatcacaccgggtgcaggccaactcccgtcgttagattatcatggtcctcaccttgggccgcgcctcccttgctgttagcggtcctgggcatagtcgcgacaacaaccgtggtggcaacctttgttaggtataataatactcctatcgtcagagctagtgggagagaactttcatacgtgctgctaacaggcatcttcttgatttacgccatcacatttctcatggtggcagagccgggagctgccgtgtgcgctgctagacgtctgttcctaggactcggcacaactctgtcctactctgcccttctgactaagacaaaccggatttacaggatctttgaacagggtaagagatctgtgaccccaccccccttcatttcacctaccagccagctcgtgattactttttcgcttacctctctgcaggtggtgggtatgatcgcatggctcggtgcacgaccaccacattctgtgattgactatgaagaacaaaggactgtggaccctgagcaggcccgtggggtgctaaagtgtgacatgtccgatctgtccctcattggctgtctgggctactcccttttgctcatggtgacgtgcaccgtgtacgccatcaaggcccggggagttcccgagacattcaatgaggcgaagccgataggctttaccatgtacacaacatgcatcatctggctggcgtttgtaccaatcttcttcggaacagctcagtccgccgagaagatctacatacagaccactacattgacagtaagcctctcactgagtgcatcggtctccctcggcatgttatacgtgcctaagacatacgtcatactattccaccctgaacagaacgtccagaaaagaaagcgatcattgaaggccacatctactgtcgccgcacctccaaagggtgaggatgctgaggcccataaatag

SEQ ID NO: 22818 - DNA, 798 bp, synthetic construct
  source 1..798: mol_type = other DNA; note = Synthetic coding sequence
atggccgccgccgtgcccaagcggatgcggggccccgcccaggccaagctcctgcctggttctgccatacaagccctcgtgggcctagctaggcctctggttctggcactactgctggtgtctgcggccctcagcagtgtcgtgtctcggaccgatagcccttctcctaccgtgttgaattcccatatctctacacccaatgtgaacgccctgacacatgagaatcagaccaaaccctccatcagccagatcagcaccacactgcctcctaccaccagcactaagaagagcgggggtgcctccgtggtgccccacccttcgcccacacctctgtcacaggaggaggctgataacaacgaagatccaagcatcgaagaggaagatctgctgatgctcaacagctctccttcaactgccaaagatactttggacaatggcgattatggcgagccagattacgattggacgaccggcccaagggatgacgacgagagcgacgatacgctcgaagaaaaccggggatatatggaaattgaacaaagcgtcaagtcgttcaaaatgccgtcatccaatattgaagaggaagactctcatttctttttccacttaatcattttcgctttctgtatcgcagtagtgtatataacttaccacaataagagaaaaatcttccttctcgtacagtctaggaagtggcgggatggcttatgtagtaagactgttgagtaccaccgactcgaccaaaatgttaacgaggccatgccttcactgaagattacaaatgactatatcttctag

SEQ ID NO: 22819 - DNA, 2349 bp, synthetic construct
  source 1..2349: mol_type = other DNA; note = Synthetic coding sequence
atggcccccagcgcctgggccatctgctggctgctgggcggcctgctcctgcatgggggaagctccggccccagtcctgggccatcagtgccccgcctgcggctgtcgtatcgggacctcctatctgccaacagatccgcaatctttctcggccctcagggcagcctcaatctgcaggctatgtacttagatgaatatcgggacaggctgtttttgggcgggctggatgcattgtatagcctgagattggatcaagcttggcctgaccccagggaggtcttgtggcccccccagcccgggcagcgggaggagtgcgtgcgcaaaggccgggacccactgacagagtgcgccaactttgtgagagtgctgcaacctcataatcgcacgcatctcttagcctgcggcacaggtgcctttcagccaacctgcgcgctcatcacagtgggacacaggggggagcacgtgctgcatcttgagccaggatccgtcgagagcggcagagggcggtgcccacatgagccaagtagaccattcgccagtacttttatcgatggagagttatatacaggtctgactgctgactttcttggaagagaggccatgatatttcgctcaggcgggccccgccccgccctgcgctcggactctgaccagtctctcctgcatgaccctcggttcgtgatggcagcaagaatacccgagaacagcgatcaagacaacgacaaagtttacttctttttctccgagaccgtcccttcgcctgacgggggatccaatcatgtgacggtcagcagggttggacgagtctgtgtgaacgacgccggtggtcagcgggtgttagtcaataagtggtccactttcctgaaggctcgcctggtctgttcagtgccagggcctggcggcgccgagacccacttcgaccagctggaggacgtgtttctgctctggcccaaagccggaaaatcacttgaggtgtacgctctcttctccaccgtgtcagcagttttccaggggtttgcggtctgcgtgtatcacatggccgatatctgggaagtgttcaacggtcctttcgctcaccgggacgggccccaacatcagtggggaccctacggaggcaaggtgccattccctaggcccggagtatgtccgtcaaaaatgacagcccaacccggcaggccatttggatcaactaaagattatcctgatgaggtgcttcaattcgctagagcacaccctctaatgttctggcctgtgagaccaaggcacggacgacccgtgctagtcaaaactcacctggcccagcagctccatcagatcgtggtagacagggtcgaggcagaggacggcacctacgacgtcatctttctgggtaccgacagcgggtcagtgcttaaggtgatcgcactgcaggccggaggatccgccgagcccgaagaagtggttctggaggaactgcaggttttcaaggtgccgacgcccatcaccgaaatggagatctccgtgaagcgacagatgttgtacgtggggtccaggcttggggtggcccagctgcggctgcatcagtgtgagacatatgggacagcctgtgctgagtgttgcctggcccgggacccgtactgcgcgtgggatggcgctagctgtacacactatcgaccatcccttggtaagaggcgattcagaaggcaagacatccggcacggaaacccagcactccagtgcctgggacagagccaggaagaggaagctgtgggccttgtagccgctacaatggtctatggaactgagcacaattcaacctttttggaatgtttgccgaaatctccccaagcagctgtgcgctggttgttacagcgtcccggcgatgaggggccagaccaggtgaagacagacgagcgcgtcctgcacacagagcgggggctgctgttccggcgcctttccaggttcgatgctggtacctatacatgtacaaccttagagcatggattttctcagactgttgttaggcttgcactggtggtgattgttgcttcacagctggataatttgttcccccctgagcctaaacctgaggagccaccagctaggggcggcctggccagcacgcccccaaaggcctggtacaaagacatactgcagctcattgggttcgccaacctacctcgggtggacgaatactgtgagcgcgtatggtgcaggggaaccactgaatgctctggttgttttcggtctcgatcaagagggaaacaggcccgcggcaaatcatgggctgggctagagcttggcaaaaaaatgaagagccgggttcacgccgaacacaaccgcacaccgagggaagtcgaggccacatag

SEQ ID NO: 22820 - DNA, 1725 bp, synthetic construct
  source 1..1725: mol_type = other DNA; note = Synthetic coding sequence
atggtggaggacggcgccgaggagctggaggacctggtgcacttcagcgtcagtgaactgccttccagagggtacggggttatggaagaaattcgaagacagggcaaactctgtgacgttacattaaagatcggtgaccataagttcagcgcccatagaattgtcctggcagcctcaattccatactttcatgctatgtttactaatgacatgatggagtgtaagcaggatgaaatagtgatgcaaggcatggaccctagcgccctggaggcgctgattaattttgcttacaatggaaatctcgccatagaccagcagaatgtccagagcctattgatgggagcctcctttctgcagctgcagtcaatcaaggatgcctgttgtacatttctgagagaacgcctacatcctaagaactgccttggcgttcgtcaattcgcagagactatgatgtgcgccgtgttgtatgatgccgcaaattcctttatccaccagcactttgtcgaggtttccatgagcgaggaatttttagcactgccattggaggacgtgttagagcttgtcagccgagatgagctgaacgtcaagtctgaagagcaagtttttgaagccgccctggcctgggtacgctatgatcgtgaacagcggggtccctacctacctgagttgctgtcaaacattcgcctgcccctgtgccgcccacagttcctaagtgaccgcgtgcagcaggacgacctggtgcgctgctgccataaatgccgcgatttagtggacgaggccaaagactaccatctgatgccagagcggcgaccgcacctgccggcctttcgcactaggccaaggtgctgtaccagcatcgctgggctaatctacgctgtgggtggactgaacagtgccggagactcacttaacgtggtggaggtctttgatcccatcgcaaactgttgggaacgttgtagaccaatgaccaccgctcggtctagagttggggtggctgtggtgaatgggctgctgtacgccattggagggtacgatggacagctgcggctgtccaccgtcgaggcgtataatcctgagactgacacctggaccagagtgggctccatgaactcaaagaggagcgctatggggaccgttgtgctcgatgggcagatttacgtgtgcgggggatacgacggcaactcatcactgtcaagtgtcgaaacatacagtcccgagacagacaaatggacggtggtcactagcatgtcttctaaccgcagcgcagctggggtgaccgtcttcgaaggcagaatctatgtttctggtggacacgacgggttacagatcttttctagcgtggaacattataaccatcatacagccacctggcaccctgccgccggtatgctgaacaaacgctgccgacacggcgctgcctccctggggtctaaaatgtttgtgtgtggagggtacgatggctctggcttcctatcaatcgcagaaatgtactcgagcgttgccgaccagtggtgcctgatagtacctatgcacaccagacggagtcgggtcagccttgtggcttcttgcggccggctgtacgcggtggggggatatgatgggcagtccaacttatcgtccgtcgaaatgtacgatccagagaccgactgttggacctttatggctccgatggcgtgtcatgaaggaggcgtcggtgtgggatgtatacctttgctaacaatatag

SEQ ID NO: 22821 - DNA, 486 bp, synthetic construct
  source 1..486: mol_type = other DNA; note = Synthetic coding sequence
atggccaaggaggagccccagagcatcagccgggacctgcaggagctgcagaagaaactctcactgttgatcgattcttttcagaataactcaaaagttgtcgccttcatgaaatcacccgtagggcagtacctcgattctcatccctttttggcattcactcttctggtgtttattgtgatgagcgccgtgccagttggcttcttccttctcatagtggtgttaaccaccctagccgctctgctgggcgtcataattctggaaggactggtgatctcagtggggggtttctcactcctctgcattctctgtggacttggctttgtatcccttgctatgagtggaatgatgattgcatcatatgtcgtcgttagctcactgatcagctgctggttcagcccacgcccactcactcagcaaaatacatcttgtgactttttgcccgcaatgaaaagcgctgaattcgagggactttatcaagagtag

SEQ ID NO: 22822 - DNA, 4503 bp, synthetic construct
  source 1..4503: mol_type = other DNA; note = Synthetic coding sequence
atgacccggatcctgaccgccttcaaggtggtgcggaccctgaagactgggtttggatttacaaacgttactgcacatcagaagtggaagttttcccggccaggtatccgcctgctctcagttaaggcacaaaccgcacatattgtgttggaggatggcaccaaaatgaaagggtattcttttggtcacccaagctccgtcgctggggaagtggtcttcaataccggacttgggggataccctgaggcaatcactgaccctgcctataaaggacagatcttaaccatggccaatccaattataggtaatggcggggccccagatactactgcgctggacgaactgggcctgtcaaaatatctggaatcgaatggtatcaaggtgtctgggctgctggtacttgactatagtaaagattataatcactggttagccaccaaaagcctggggcagtggcttcaggaggagaaggttccggcgatttatggcgtggacacacggatgttaactaagatcattcgagacaagggcacaatgctaggaaaaatagagtttgagggccaaccagtggatttcgtggaccccaataagcaaaatctgatcgctgaagtgtcaaccaaggacgtcaaagtatacgggaaagggaacccgacgaaagttgtcgctgtggactgtgggatcaaaaacaatgtgatccgtctacttgtaaagcggggtgcagaggtgcatctggtgccttggaaccacgatttcaccaagatggagtatgatggaatcctgattgccgggggacctggaaacccagcactcgctgaaccgcttatccagaacgttagaaaaatactcgaaagcgacaggaaggagcctctcttcggaatcagcaccggcaacttaatcacaggcctggccgccggtgcgaaaacatataaaatgtccatggctaatcgaggccaaaatcaacctgtcttgaatattactaataaacaagccttcatcacggcacagaatcatggctacgctcttgacaataccctgcccgcgggatggaaaccactgtttgtcaatgtaaatgaccagaccaacgaaggaatcatgcatgagtccaagcccttcttcgccgtgcagttccatcctgaggtcactcccgggccaattgataccgagtatctttttgacagctttttcagccttatcaagaaggggaaagctactacaatcaccagcgtgttacccaagcccgccctggtggcaagcagggtggaggtatctaaagtgctgatcctcgggtctgggggcctctctatcggccaggcaggtgagtttgactactcagggtcccaggccgtgaaagccatgaaggaggaaaatgtcaaaacggtgctgatgaaccctaacatcgcctcagtacagacaaatgaggtcgggctaaaacaagctgataccgtgtacttcctgccaatcactccccagtttgtcacagaagtgataaaagccgaacaacccgatggtctcatcctgggaatgggcggacagactgcacttaattgcggtgtagaactattcaagcgaggggtgctcaaggagtatggggttaaggtgctgggtacgagtgtggagtcgattatggctacagaagacagacagctgtttagtgataaactaaacgaaatcaacgagaagatcgctccttcgttcgcagttgaaagcatagaggacgcgcttaaagcagcggatacaattgggtacccagtgatgattaggagtgcttatgctctcggtgggctgggaagcgggatctgtcccaatcgggaaaccctcatggacctgagcacaaaggcattcgccatgactaaccaaatcttggtggaaaagtccgtcaccggctggaaagagatcgaatacgaagtcgtccgcgacgccgatgacaactgtgtgaccgtgtgtaatatggagaacgtggatgctatgggggtgcatacaggagatagcgttgtggtcgcacccgcacaaacactttcgaatgccgaatttcagatgctgagacgcacctcaatcaacgtcgtcaggcacctgggcatcgtgggggagtgcaatatccagtttgctttgcacccaacaagcatggagtactgtataatcgaggtcaatgcccgcctttccagatctagtgcgttagctagcaaggccaccgggtaccctttggcctttatagctgctaaaattgcactgggtattccactgccggagataaagaacgtcgtcagcggaaagacatcggcctgtttcgagccgtccctggactatatggtgactaagataccaagatgggacctggacaggttccacggaacttctagccgtattgggtcatctatgaaatcagtgggcgaggtgatggccattggtaggacattcgaggagagcttccagaaggctctgcgcatgtgccatccaagcattgaagggtttacaccccggctgccaatgaacaaggagtggccatctaatttagatctgagaaaggaactgtcggagccgagcagcacaagaatttacgccatcgctaaggctattgacgacaacatgtcccttgatgagattgaaaaactgacatacatcgacaagtggtttctatataaaatgcgggacatccttaatatggagaagacccttaagggcctcaattcggagtcgatgaccgaagagaccttgaagcgggcgaaagagattggctttagtgataagcagatttcaaaatgccttggactgaccgaggcgcagactcgcgaactgcgactgaaaaagaacatccacccctgggtgaaacagatcgataccctggcagcagagtatccttccgtcaccaactatctgtacgtgacttataacggtcaggagcacgacgtcaacttcgacgaccacggcatgatggtccttgggtgcgggccctaccacattggatccagtgtcgagtttgattggtgtgcagtcagctctatcaggacgttacggcagctgggcaaaaaaacagtggttgtcaattgtaaccccgaaactgtctctaccgacttcgatgaatgtgataaactgtacttcgaggaattgtcccttgagcgcattcttgatatttaccaccaagaggcctgcggcggctgcataatctcagttggcggacagattccaaataacctggcggtcccgctttacaagaatggtgtgaagattatgggcacgagccctttgcagatcgacagagcagaagataggagcatctttagtgccgttttggatgagttgaaagtagctcaagcaccttggaaagctgtaaataccctgaatgaggcgttggaatttgcaaagtccgtggactacccatgtttgctgcgcccatcgtacgtactgagtggctcagctatgaacgtcgtcttttctgaagatgagatgaagaagtttctggaagaagcaaccagggtgagccaggagcatccagtggtccttacaaaatttgtggaaggcgctagagaggttgagatggacgcagtaggtaaggacggtcgggttatcagccacgctatcagcgaacatgtagaagatgccggtgtgcacagcggagatgccacactgatgttaccgacccagactatctctcagggtgctattgaaaaggtgaaagatgcaacgcgaaagatcgcaaaagcattcgccataagtggcccattcaacgtacaatttttagtgaagggcaatgacgtgttagtaattgagtgcaacctgcgagcttctagatcttttccttttgtcagcaagacccttggcgttgatttcatagatgttgctaccaaggtgatgatcggcgaaaatgtcgacgagaaacacttaccaacgctggatcacccaatcatacctgcagattacgtggcgattaaggctcccatgttttcatggccccgactgagagacgcagaccccatcctgagatgcgagatggcgagcaccggtgaagtagcctgttttggcgaagggattcacacagcctttctgaaagccatgctttctacaggatttaaaattcctcagaagggtatcttaatcggcattcaacagagttttagacctcgtttccttggtgttgcggaacagctccacaatgagggcttcaaactcttcgctacagaggccacttcagactggctgaatgccaacaacgttcctgcaacaccagtggcgtggcctagccaagagggacaaaacccatccctcagctctatacggaaattgattcgcgacgggtcaattgacctggtcattaacctgccaaataacaacaccaaattcgtccacgataattacgtcatcaggcgcactgccgtggattccggcatcccgctgctcaccaattttcaggtcactaagctgtttgctgaggccgtccaaaagagccgcaaggtcgattctaaatccctgtttcattacagacaatattctgctggtaaagctgcctag

SEQ ID NO: 22823 - DNA, 846 bp, synthetic construct
  source 1..846: mol_type = other DNA; note = Synthetic coding sequence
atggccgtgaacgtgtacagcaccagcgtgaccagcgagaacctgtcgcgccatgacatgctggcatgggtgaatgactcactacacctgaactatactaagatcgaacaactgtgttcaggggccgcatactgccagttcatggatatgctgtttcccggttgtgtccatctcaggaaagttaaatttcaggccaaactggagcacgagtacatccataatttcaaagtcctccaagctgcttttaaaaaaatgggtgtggataagatcattcccgtggagaagcttgtgaaaggaaagttccaggataatttcgagtttatccagtggttcaagaagttttttgatgccaactacgacggcaaagattacaacccactcttagctcgccaggggcaggatgtcgctccccctccaaacccaggcgatcagattttcaacaaatcaaagaaattgatcggcaccgccgtgccccagaggacgagtcctactggtcccaagaatatgcagacttctgggcgcctcagcaacgtggccccaccatgcatcttgaggaaaaaccctccttcggctcgcaacgggggacacgaaacagacgctcaaatcttagaattgaaccaacagctagtggatcttaaactcactgtcgacggtcttgagaaggaacgcgacttttacttttccaaacttcgggatatcgaattgatttgccaggagcatgaaagcgagaatagtcccgtcatctcaggtatcattgggatcctttacgcaaccgaggaaggcttcgccccccccgaggatgacgagattgaggagcatcaacaggaggaccaggatgagtactag

SEQ ID NO: 22824 - DNA, 531 bp, synthetic construct
  source 1..531: mol_type = other DNA; note = Synthetic coding sequence
atggccctgtggcgggcctaccagcgggccctggccgcccacccctggaaggtgcaggtcttgactgctggatctttgatgggactgggagacatcatctcccagcagctagtagagagacgtggactccaggagcatcagagagggcgtacccttaccatggtctccctgggatgcggattcgttggtcctgtagtaggtgggtggtataaggttctagaccggtttatccccgggacaacaaaggttgacgctctgaaaaagatgctgttggaccaaggggggtttgcaccttgtttcctcggatgctttctgcctctggtgggggcactcaacggacttagcgctcaggacaactgggccaaacttcagagagattatcctgacgccctcattactaattattatctatggccggcagtgcaactcgccaatttttatcttgtcccactccattataggctggctgtggtgcaatgtgtcgccgtcatctggaatagctatctaagttggaaggcccatcggctctag

SEQ ID NO: 22825 - DNA, 1143 bp, synthetic construct
  source 1..1143: mol_type = other DNA; note = Synthetic coding sequence
atggccagcctgcccgtgctgcagaaggagagcgtgttccagagcggggcccatgcctacaggatcccagccctgctgtaccttccaggtcagcaatctctgctggcttttgcggaacagcgggcatccaaaaaggacgaacatgccgagttaattgtactgcgtaggggcgattatgatgcaccaacacaccaggtgcagtggcaggctcaggaagtggtggctcaggccagattggatgggcaccgctccatgaacccctgccctctgtacgacgcccagaccggtaccctgttcctctttttcattgcaattccagggcaggtgaccgaacagcagcagttgcagaccagggcaaatgttactcgattgtgccaggtcacaagtaccgatcacggtaggacctggtcatcgccgagagacctaacagatgccgccatcggacccgcctatagagaatggtccacctttgccgtgggcccaggacattgtctgcagctgcatgatcgagcaaggtcactcgtggtccccgcatatgcataccgcaagctccatcccatccagcggcctattccctctgctttctgttttctctcacacgatcatgggcgcacatgggcaagaggccacttcgtagctcaggatactctggagtgtcaagttgcggaagtcgagaccggcgagcagcgagttgtcactcttaatgccaggagtcatcttcgcgcccgagtacaggctcagtccaccaacgacggcctggattttcaggaatctcagctcgtcaaaaagctagtggagccgcctccacaaggatgtcaaggctcagtgatcagtttcccatcacctaggtcaggtcctggctctccggcacaatggctgctctacacacacccaacacattcatggcagcgggcagacctgggcgcttatctcaacccccgccctcctgcgccagaagcctggagtgaacctgtgctactggctaaaggatcatgtgcctattcagacctgcagagcatggggactggtcccgatggctcgccattatttggctgtttgtatgaagcaaatgattacgaggagattgtgttccttatgtttactttgaaacaagcttttccagccgaatatctcccacagtag

SEQ ID NO: 22826 - DNA, 3165 bp, synthetic construct
  source 1..3165: mol_type = other DNA; note = Synthetic coding sequence
atggccgccgtgaaggagcccctggagttccacgccaagcggccctggagacctgaggaggctgtagaagatcccgatgaggaggacgaggataacaccagtgaggcagagaatgggttctcactggaagaggtcctgaggctcggcggcaccaagcaggactacctgatgctcgccactttggacgagaacgaggaagtaatcgacggaggcaagaaaggcgccattgatgatttgcaacagggcgaactggaggcctttatacagaacttaaaccttgcaaaatacacaaaagcgagccttgttgaagaggacgagccagctgagaaagagaactcttcaaaaaaggaagtcaagatacccaagatcaacaacaagaatacagcagagagccagaggactagcgtcaacaaggtgaagaataagaatcgtcccgaaccgcattcggacgaaaacggcagtaccacgccgaaggtgaagaaggacaagcagaacattttcgaatttttcgagagacaaacgctcttattgagacctggaggaaagtggtatgatttagagtactcaaacgagtatagtcttaagccgcaaccacaagacgtggtaagcaagtacaaaactctggctcagaagctttaccagcatgagatcaacttattcaagtccaagacaaattcacagaagggtgcttcttccacttggatgaaggccattgtctcatcaggcaccttaggtgatcggatggccgcaatgatccttctgatccaggacgacgcagtgcataccttgcagttcgttgaaaccctggtcaatcttgtcaagaagaaaggctctaaacagcagtgccttatggccctcgacactttcaaggaattgctgatcaccgacctcctgcccgacaatcgcaaactgcgaatattctcacagagaccatttgataagctggagcagcttagttccggtaacaaggatagcagggatcgccgcctaatcttgtggtattttgagcatcaacttaaacacctcgtggccgagtttgtacaagttctcgaaactctttcgcacgacaccctggtgaccacgaagacacgtgcattaactgtcgcccatgagttactgtgcaacaagccagaggaagagaaggctctgcttgttcaggtcgtgaataagttaggagaccctcagaaccggatagctactaaagcatcgcatctgcttgaaacgctcctttgcaaacacccaaatatgaaaggcgttgtgtctggcgaggtggagcggctcttatttcgttcaaacatcagttccaaggcccagtattatgctatttgcttcctgaaccagatggccctcagccacgaagaatctgagctggccaataaactcatcacagtctacttctgttttttccgcacctgtgttaagaagaaggacgtggagtcgaaaatgttaagcgcacttctcacaggagtgaatcgcgcatacccatattcccaaactggagacgataaagtgcgcgagcagattgacacactgttcaaagtgcttcacatcgtgaatttcaatacaagtgtgcaggcactaatgctgctgttccaggtcatgaacagccaacaaactatttccgataggtactacacagccttgtaccgcaaaatgctcgacccaggactcatgacttgtagcaagcaggcaatgtttctgaaccttgtgtataagtcgctcaaagccgacatcgtgctaagaagagtgaaagccttcgtgaaacggcttctgcaggttacttgtcagcagatgccgccatttatctgcggtgctctgtacctggttagcgagattctgaaagcaaagcccgggctgcgctcccagctggacgatcacccagaatctgacgatgaagaaaattttatcgatgccaatgacgatgaagacatggagaaattcactgatgccgacaaagaaaccgaaattgttaagaagcttgagacagaagagacagtccccgaaaccgacgtcgaaaccaagaaacctgaggtagcctcctgggtgcacttcgataatctgaagggaggtaaacagttgaataaatacgatccattcagtcgaaatccattgttctgcggagctgagaatacgagtctttgggagctaaagaaactgagtgtccacttccatccctctgtcgctttgttcgcaaaaacaattcttcaggggaactacatccaatactctggagaccccctccaggacttcacattgatgcgatttcttgaccgcttcgtttataggaatccaaagcctcataagggcaaagagaacacagactccgtggtgatgcagcctaagcgaaagcacttcatcaaagacatcaggcatcttcctgttaactcgaaggaatttcttgcaaaggaggaatcacagatccccgttgatgaagttttttttcataggtactacaagaaggttgctgtgaaagagaaacagaaacgagatgctgacgaagagtcaattgaggacgtggacgatgaagaattcgaggagctaatagatacgttcgaggacgacaactgcttctcctccgggaaagatgacatggatttcgccggcaatgtaaaaaagcgcactaagggagccaaggataacactctggacgaagatagtgagggctccgacgacgagctgggcaacctagatgatgacgaggtcagcttgggatcgatggacgatgaggaatttgctgaggttgatgaggacgggggcactttcatggacgtcctggacgatgaatccgaaagcgtgcccgagctagaagtgcactcaaaagtttcgacaaagaaatcaaagcgaaaaggcaccgatgatttcgactttgccggctcatttcaggggccacgcaaaaagaaacgtaatttgaatgacagctccttgttcgttagtgctgaggaattcgggcacctgctagacgagaacatggggagcaagtttgacaatattgggatgaatgccatggccaacaaggataatgcctctctcaaacagctacgctgggaggcagagcgggatgattggctgcataatcgggacgctaagagtattatcaaaaaaaagaaacacttcaaaaagaagagaatcaagacaacacaaaagacaaagaaacagcgcaaatag

SEQ ID NO: 22827 - DNA, 1107 bp, synthetic construct
  source 1..1107: mol_type = other DNA; note = Synthetic coding sequence
atggagcccggccagccccgggagccccaggagccccgggagcccggcccgggagccgagacagcagccgcccccgtatgggaggaggccaaaattttttacgacaatctggctccaaaaaagaaacctaaaagccccaaaccccagaacgcagttacaatcgcggtgtcatctcgcgcgctgttccgaatggatgaggagcagcaaatctacacagaacaaggggtcgaagagtacgttaggtatcaactggagcacgagaacgagccctttagtcctggccctgccttcccttttgtgaaggctttagaggcggtgaaccgccggcttcgggagttgtatccagactccgaggatgttttcgacatcgttctcatgactaataatcacgcccaggtgggggtgaggttgataaattccattaatcactacgatttattcatcgagcgattttgcatgaccggcgggaacagtcctatatgttatctgaaagcctaccatacgaacttgtaccttagcgccgatgctgagaaagtgagagaggccattgacgaggggatagcagccgcaactatcttttctcccagcagggacgtcgtggtttctcagtctcagctgcgtgttgccttcgatggcgacgcagtgctgttttccgatgaaagtgaacgtattgttaaggcccacggcttagatcgcttctttgaacacgaaaaggcgcacgaaaataaacctcttgcacaggggccactaaaggggtttcttgaggccctgggccggctgcagaagaaattttactccaaggggttgagattggagtgtccgataagaacgtacctggttacagctagaagcgcagcctcttcaggcgcccgtgctctaaagaccttgagatcatggggcctggagaccgacgaggcactttttctggccggcgcccctaagggaccactactcgagaagattaggccccatattttctttgacgaccaaatgtttcatgttgctggggcccaggagatgggtactgtggcagctcatgtcccatatggagtcgctcagacacctcgccgcaccgcacctgccaagcaggcaccaagcgctcagtag

SEQ ID NO: 22828 - DNA, 1080 bp, synthetic construct
  source 1..1080: mol_type = other DNA; note = Synthetic coding sequence
atgctgagcgccgccagccgggtggtgagccgggccgccgtgcactgtgcgttgagatctccaccacctgaggcccgggccctggcaatgagtcgacctccacctccccgcgtcgcatctgtacttggaactatggaaatggggcgtagaatggacgcccctgcgtcagctgcggctgttcgggcgttcctggaacgcggacacaccgagctggataccgcctttatgtactcagatgggcagtcagaaaccattttggggggcctggggctcggactgggtgggggggattgtcgagtgaaaattgctacaaaagccaacccatgggatgggaaatcccttaaacctgattctgtgcgctcccaactagagacatccctcaaacggctacagtgccctcaggtcgaccttttctatctgcatgctcctgaccacggaactcctgtcgaggagaccctacatgcctgtcagcgcctgcaccaagagggaaagttcgtcgagctaggtctgtccaactatgcctcttgggaggtggcagagatctgcacattgtgtaagtccaacggctggattttacccactgtttaccaagggatgtacaacgccactacacggcaagtggaaaccgaactgttcccgtgtctgaggcactttggcctgaggttctacgcttataatccgctcgctgggggactcctcactggaaagtataagtatgaagataaggatggtaagcagcccgtcggccgattcttcggaaactcatgggccgagacatatcgcaataggttctggaaagagcaccatttcgaggcaatcgccctggttgagaaggcccttcaagccgcttacggagcttccgcaccaagtgttacttccgcggctctccggtggatgtatcaccacagccagctacaaggggcacacggggacgccgtgattctgggtatgagtagcctggagcaactagaacagaatctggctgcgacggaggaggggcccctcgaacccgcggttgtggatgccttcaaccaggcttggcatcttgttgcacacgagtgcccaaattactttcgttag

SEQ ID NO: 22829 - DNA, 561 bp, synthetic construct
  source 1..561: mol_type = other DNA; note = Synthetic coding sequence
atggacgccgacagcgacgtggccctggacatcctgatcaccaacgtcgtctgcgtgtttcgcactcggtgccacctgaacctgcgcaaaatcgcacttgagggagccaatgtgatctacaaacgggacgtcggtaaagtcctgatgaagcttagaaagcccaggatcaccgcaaccatctggtcctcaggcaaaattatttgtacaggagctacttcagaggaggaggccaaatttggggctagacgcctcgcgcggtcactgcaaaagctgggctttcaggttattttcaccgacttcaaagtcgtgaacgtgttagccgtttgtaacatgccttttgaaatacgtctcccagagttcactaagaacaatcgcccccacgcctcttatgagcctgagctccatccggcggtgtgttatcggatcaagtccctccgcgcgacactgcagatcttttccacaggttccatcactgttacaggacctaatgtgaaggccgtggctaccgctgtagaacaaatttacccctttgtgttcgaatcaagaaaagagatcctttag

SEQ ID NO: 22830 - DNA, 537 bp, synthetic construct
  source 1..537: mol_type = other DNA; note = Synthetic coding sequence
atggccgcccccctgggcggcatgttcagcggccagccccccggccctcctcaggcaccacctgggctccccggacaggccagcctcctgcaggcggcacccggcgcccctcggcccagcagcagtactcttgtagacgagttggagagctcatttgaagcatgtttcgcttcgctcgtgtcacaggactacgtgaacggtacagaccaggaggagatcaggaccggcgtggatcagtgcatccagaagtttctggatatcgccaggcaaacagagtgtttcttcctgcagaagaggctccagttaagtgtgcagaagccagaacaggtcattaaggaggatgtgagtgaattacgtaatgagttacagagaaaagacgctttggtgcagaagcatctgactaaactgcgacattggcagcaggtgttggaggacatcaatgttcagcacaaaaaaccggccgacatcccccagggtagtctcgcctatctcgagcaagccagcgccaatattcctgccccactcaaacccacatag

SEQ ID NO: 22831 - DNA, 738 bp, synthetic construct
  source 1..738: mol_type = other DNA; note = Synthetic coding sequence
atggagaagaccgagctgatccagaaggccaagctggccgagcaggccgagagatacgatgatatggccacctgtatgaaggccgtgactgagcagggagcagaactaagcaacgaagagaggaatctcctgagcgtcgcctacaagaatgtggtggggggccgccgatcagcttggcgggtgatttcttcgattgaacaaaagaccgacactagcgacaagaaactccagctgattaaggactaccgcgagaaagtggagagcgaacttcgtagtatctgcacgacggtgctggagctcctggacaagtacttgattgctaacgctaccaacccagagtccaaagtgttctatctaaagatgaaaggagactactttaggtacctcgctgaggttgcatgcggggatgatcggaaacagactattgacaactctcagggggcgtatcaggaagcgttcgatatcagcaaaaaagaaatgcagcccacccatcctattcgcctgggtctcgctctcaatttttccgtgttttactacgagatcttgaacaatcccgaattggcctgcacactggctaagaccgccttcgatgaagcgatcgcagagctggataccctcaacgaagattcctataaagactcaactctgattatgcagctgctgagggataaccttacattgtggacctcagacagcgctggggaggaatgcgatgctgctgagggtgctgagaattag

SEQ ID NO: 22832 - DNA, 534 bp, synthetic construct
  source 1..534: mol_type = other DNA; note = Synthetic coding sequence
atgcccggcctgaccgcctacttcggcctgctggagatctgcggcgtaaaggggggcgagaccgtcatggtgaacgccgcagcaggggcggtcggctcagtcgtcgggcagatcgccaagctgaaagggtgtaaggttgtcggcgctgtcggtagcgacgagaaggtagcttatttgcagaagctcgggttcgatgtggtctttaactacaagaccgtggaaagcctcgaggagactctgaagaaggcctcccccgacgggtacgattgttacttcgacaacgtcggcggagaatttagcaatacggttattggacagatgaagaagtttggaagaattgcaatttgcggtgcaatctcgacatacaacaggactggaccgctacccccagggcctccacccgagattgtcatatatcaggagttgagaatggaggcatttgtggtgtaccggtggcagggagatgcacggcagaaagcactgaaggatctgctcaagtgggtcctcgagcttccgtacttcgtgatcgactag

SEQ ID NO: 22833 - DNA, 3660 bp, synthetic construct
  source 1..3660: mol_type = other DNA; note = Synthetic coding sequence
atgttcggcgccggcgacgaggacgacaccgacttcctgagcccctccggaggcgcacgcttagcctccctgttcggcctagaccaggctgccgctggtcacgggaacgagttcttccagtatacagcgcctaagcagcccaagaagggtcaagggacagccgctaccgggaaccaagccacacccaaaaccgctcctgctactatgagtactccaaccattttggttgctacggctgtgcatgcctataggtatacaaacgggcagtatgtgaagcaggggaaatttggtgcagccgtcctaggtaaccacacagccagagagtataggatcctcttatatattagtcagcagcagccggtgacagtggcaagaattcacgttaattttgaactcatggttcgccctaataattatagcaccttctatgacgatcagcgacagaactggtctatcatgttcgagagcgaaaaggctgcagtggagtttaacaaacaggtgtgtatcgccaaatgcaattcaaccagttccctcgacgctgttcttagccaagatctgatcgtggcagacggccccgcagtggaggtgggcgacagcctggaagtggcctatactggctggctcttccagaatcatgtgcttggccaagtgttcgacagtaccgctaacaaggacaagctgctgagacttaaactgggcagcggcaaagtaatcaagggttgggaggacggtatgcttggcatgaagaaagggggcaagcgactgctaatcgttccccctgcctgtgccgttggcagtgaaggagtgataggttggacccaggcaaccgactccatcctggtcttcgaagtagaagtaagacgtgtcaagttcgctcgcgattccggcagtgacggccacagcgtgagttctcgagactctgccgccccttcacccattcctggggcagacaacctgtccgccgaccccgtggttagtcctccaaccagtataccattcaagtcaggagaaccagccctgcggaccaaaagtaatagcctgtcagagcagctggccatcaacacctcccccgacgctgttaaagcgaagctgattagcagaatggcaaagatgggccagcccatgcttccgatccttccaccccaattggatagcaacgatagcgagatcgaggatgtcaatacgctccaaggcggtggccaacccgtcgtgaccccatctgtccagcccagcttgcatcccgcgcatcccgcgctcccccagatgaccagtcaagctccccaaccctcagtgactgggctgcaggcaccctcagcggctctcatgcaggtttccagcctcgattcgcattctgctgtttccggtaacgcccagtcatttcagccatacgctggcatgcaagcttacgcctacccgcaggcctctgcagtgaccagtcagttgcaacctgtcagacccctgtacccggcccccctctcacagcccccgcatttccagggctcgggggatatggcttcatttctgatgaccgaggcccggcaacacaacacagaaatccgtatggcagtgtccaaggtggcggataaaatggaccacctaatgaccaaggtggaagagctgcagaaacactccgccgggaatagtatgttgatccccagcatgtccgttaccatggagacttccatgataatgagcaacattcagcgcatcattcaagagaacgaaaggctcaaacaggaaatactggagaagagtaatagaatcgaggagcaaaacgataagatctcagagctgattgaaaggaaccagcgatatgtggaacagtctaacttaatgatggagaaacggaataatagcctccagacagccaccgaaaacacacaagcccgcgtgctccatgcagagcaagaaaaggccaaggtgacggaggaactcgcggccgccaccgctcaggtgtcccacctccagctgaagatgaccgcccaccagaagaaagaaactgaactgcagatgcagctgaccgagagtctgaaggaaactgatttgctgaggggacagctcaccaaggttcaggctaagttatccgaactgcaggagactagcgagcaagcacagtccaaattcaagagtgaaaagcagaacaggaagcaacttgagcttaaagtgacgtctttggaggaagaactaactgatcttcgtgtggaaaaagaatccctggaaaagaatctgagtgagaggaagaaaaagagcgcacaggaaagaagccaagctgaagaggagatcgatgagatccgtaaaagttaccaggaagagttggataaactgaggcagctcctgaaaaagacaagagtttccaccgatcaggccgccgcggaacagctgagtctggtgcaggctgagctgcagacacagtgggaggcaaagtgcgaacaccttttagcttctgcaaaggatgagcacttacagcagtaccaagaggtctgcgcacagagggacgcctatcagcagaagctggtacagctacaggagaaatgccttgcactccaggctcaaattaccgcccttacaaaacagaatgaacaacacatcaaagagctggaaaagaataagagccagatgtctggcgtggaggctgctgcttctgatccatctgagaaagttaagaaaataatgaaccaggtgttccagtccttgcggcgggagttcgagctcgaggaatcctataatggacgaacgattttgggtaccattatgaacaccataaagatggtgacattacagttgctgaaccagcaggaacaagagaaggaggaaagttccagcgaagaggaagaagagaaagccgaggagcgcccccggagaccatcccaggagcagagcgcttccgctagctctggacagcctcaggctccactgaacagggagcgacctgaatcccccatggtgccctccgaacaggttgtggaggaggctgtgccacttccccctcaggcgctaaccacgtctcaggacggccaccgcagaaagggcgactcggaggctgaagcactatctgagattaaggatggcagtctgccgccagaactctcctgcattccatcccacagagttttggggccaccaacgagcatacctccggagcctctgggccccgtttccatggactccgaatgcgaagagtctcttgccgcttctcccatggccgccaagccggataaccctagcgggaaagtttgtgttagggaggtggcgcccgacgggcccctccaggaatccagcacacgcctgtccctgaccagtgaccccgaggagggcgatcctctggctttggggcctgagtcccctggggagccacaacctccccagctgaagaaggacgacgtcacaagcagtacaggaccacacaaagagctctcatctaccgaagccggtagcacagtagcaggtgctgccctgcgcccctcgcaccacagtcaacggtcctctctgtctggggacgaggaggatgagctgtttaaaggagccaccctcaaggccctgaggcctaaggcacaacccgaggaggaagacgaggacgaggtgtcgatgaaagggagaccaccccccacccctttatttggcgatgacgatgatgatgatgatatcgactggcttgggtag

SEQ ID NO: 22834 - DNA, 6978 bp, synthetic construct
  source 1..6978: mol_type = other DNA; note = Synthetic coding sequence
atgaagaagggcagccagcagaagatcttcagcaaggccaagatcccctccagtagtcattcccccattcctagttccatgtcaaacatgcggtcacgttctctttcacctttgataggaagtgagactttgcctttccattccggcgggcagtggtgtgaacaggtggaaatcgctgacgaaaataatatgttattggattatcaggatcataagggcgctgatagtcatgcgggggttaggtacattacagaggctctcataaagaaattgacgaaacaggacaacctggccctgattaaatcacttaacttgtcgcttagcaaagatgggggtaaaaagtttaaatatatcgagaatcttgaaaaatgtgttaagctggaggtgttgaatcttagttacaacctgattggtaagatcgaaaaattggataaacttctgaaactacgagagcttaacctttcatataacaaaatctcaaagatagagggaattgagaatatgtgcaaccttcagaaacttaacctcgccggaaacgagattgaacatataccggtgtggctggggaagaagctcaagtcactcagagtccttaatttaaagggcaataaaatttcaagcctgcaagatatcagcaagctgaaacccctgcaggatctcattagcctgatcttggtagaaaatcctgtggttaccctgccacattacctgcagttcaccatctttcacttaaggtcgttggagtctctcgagggacagcccgtgacgacccaggatcgacaggaggccttcgagaggttttctcttgaggaagtggagaggttagagcgagatttggagaagaaaatgatcgaaactgaggaattgaagtctaagcagacaagattcctcgaggaaataaaaaatcaagataaactgaataaaagcctgaaagaagaggccatgctccagaaacagtcctgtgaggaactcaagagcgacctgaacacaaagaacgagttgttgaaacaaaagactatagaacttactagagcttgtcagaaacagtacgagctagaacaagaactggccttctacaagattgacgccaagttcgagccacttaattattatcccagtgagtacgctgagatcgacaaagctcctgacgagagcccgtatataggcaaaagtaggtacaagcggaacatgttcgccactgaatcgtacattattgactcagctcaggcagttcagattaagaagatggagccggatgaacagcttcgaaatgatcacatgaatctgaggggccatacccccctggacacacagttggaggataaggagaagaagatctccgctgcacagaccaggctgagtgagttgcacgacgagattgaaaaggcagaacagcaaattcttcgcgccactgaggaattcaagcagcttgaagaggctatccagcttaaaaaaatttccgaagccggaaaggatctcctttataaacagctgagtgggaggctgcagcttgtcaacaagctcagacaggaggctctagatctggagcttcagatggagaaacagaaacaggaaatcgccggcaaacaaaaagagattaaggacctgcaaatcgccatagactccctcgattccaaagatccgaagcactcacacatgaaggcacagaagagcggtaaagaacagcaattggatattatgaataagcagtaccagcagttggaatctcgccttgatgaaatcctgagtaggattgccaaggaaactgaggaaattaaagacttagaggaacagctgactgaggggcaaattgcagccaacgaggcactgaagaaagatctcgaaggggtgatctccggactgcaggagtacctgggcacgataaagggacaggcaacacaggctcagaacgaatgtagaaagcttcgggacgaaaaagaaacactgctccagagactgactgaagtagaacaagaacgggaccagctggagattgtggcgatggatgcagagaatatgcgcaaggagctggccgaacttgagtctgccctgcaggagcagcacgaagtcaatgccagcctgcagcagactcagggggacctgtcagcttatgaggccgagctggaggcccgccttaatctgagggatgctgaagcgaatcagctgaaggaagaactcgaaaaggtgaccaggcttacgcaactggaacagagcgccctgcaggcagagctcgaaaaggagagacaggccctaaagaatgcgctcggaaaggcccagttcagcgaagaaaaagaacaggaaaacagtgagttgcacgccaagttgaagcaccttcaggatgataacaacctccttaagcagcaactcaaggactttcaaaaccatctgaaccatgttgtggacggcctggtacgacctgaagaggtggctgcccgcgtggacgaactgcgcagaaagctgaaattgggaacgggggaaatgaatattcactcacccagtgacgtcctcggcaaatcgctggctgatctacagaaacagttctcagaaatccttgctagaagtaagtgggagcgagacgaagcacaggttcgagaacgcaagctccaggaagaaatggctctccagcaggagaaactcgccaccgggcaggaagagttccgacaggcatgcgagcgcgccctagaggcgcgcatgaacttcgataaacgccaacatgaggcacgcattcagcaaatggagaatgagatacattatttgcaggagaacctcaagagcatggaggagatccagggattgacagatcttcagctgcaggaggctgatgaggaaaaggaaaggatcctggcccagctgcgggagctagaaaaaaagaagaaactggaagacgcaaaaagccaggagcaagtctttggtctggataaagagctgaaaaagctgaaaaaggcagtggccacctccgacaaattggcaactgctgagctaacgattgccaaagatcagctcaaatccctccatggcactgttatgaaaatcaaccaagagagggccgaggagttgcaggaggcagagcgcttctctagaaaagcagctcaggccgccagagatctaacgagggccgaggcggaaattgagctgctgcagaatcttctgcgccagaagggtgagcagttccgtcttgagatggagaaaactggcgtgggaactggagcgaattcccaggtgcttgagatcgagaaactgaatgaaactatggaacgccaacgaaccgaaattgcccggttacaaaacgtgctggacttgacaggcagtgataacaagggtggatttgaaaacgtgttggaggaaatagccgagctgaggcgcgaagtttcttaccagaatgattatatttcatctatggctgatccattcaagaggaggggttattggtacttcatgcctccccctcccagttccaaagtctctagccacagttcccaggccacgaaagactccggggtaggcctcaaatatagtgctagcacccccgtccggaaaccacgtcctggccaacaggatggcaaggaagggagtcagccaccgcccgcttcgggatactgggtctacagcccaattaggtcaggcttgcataagctcttcccttctagggatgcggactccggtggcgatagccaggaagaatctgaactggacgatcaggaagagccgccatttgtgcctcccccggggtacatgatgtataccgtcctacctgacggttcacccgttccacaaggtatggcactgtatgccccacctccaccactgcccaacaattcccggcctctgactccagggacagtcgtgtatgggccaccccccgccggcgcgccaatggtgtatggacctcccccccctaatttcagtatcccatttatccccatgggggtgcttcactgcaatgtgcccgagcaccataacctggaaaatgaggtgtcccggctggaagacatcatgcaacatctgaagtcaaagaaaagggaggagcggtggatgagagcctcaaaaaggcagtcagaaaaggaaatggaggagctacatcacaatatcgacgatcttctacaggagaagaaatccctggagtgtgaggtagaggagctgcaccggaccgtgcagaagcggcagcagcagaaggattttattgacggaaacgtggagtccttaatgacagaactggaaattgaaaagtcactgaagcaccatgaggatatcgtggatgagattgaatgtatcgagaaaaccctgttgaaaaggcgctcagagctcagagaggcggatcgcttgttggccgaagcagagagtgagctctcatgcacaaaggaaaagaccaaaaatgcagtcgaaaagtttactgacgccaaacggtccctgctgcagacggagtccgacgcagaggaattggaacggcgggctcaagagactgcagtgaacctggtgaaagcggatcagcagctaaggagcctacaggctgacgcgaaagatctagaacaacataaaattaagcaggaggagattcttaaggaaattaataaaattgttgccgctaaggattcagactttcagtgtctatcgaagaagaaagaaaagcttacagaggaactgcagaagcttcagaaggatattgaaatggccgaaagaaacgaggaccaccacttgcaggtgctgaaggagagcgaagtgttacttcaggcgaaacgggccgagttggagaaactgaagtcccaggtgacatcccagcagcaggagatggctgtcctggatagacagctggggcacaaaaaagaggagcttcacctgttgcaaggaagtatggtgcaggctaaggctgatttgcaggaggcactgcgcctgggggagaccgaagtgaccgagaaatgcaatcacataagggaggtaaagagcctgctagaagagctctcctttcagaaaggcgagctgaatgtccagatcagcgaaagaaagactcaactcacccttatcaaacaagaaatcgaaaaagaggaggagaaccttcaggtagtcctgcgtcagatgagtaaacataagactgaattaaagaacattttggacatgctgcagctggaaaaccacgaactgcagggcctgaaattgcagcacgaccaacgtgttagtgaactggagaagacccaggtagctgtgctggaagaaaagctggagctggagaatctgcaacaaatcagccagcaacagaagggcgagattgaatggcagaaacaactactggagcgcgataaacgcgaaatcgagcggatgaccgcagaaagcagagcactgcaatcctgcgttgagtgcttgagcaaagaaaaggaggatcttcaggagaagtgcgatatctgggaaaaaaaactggcgcagacaaagagggtgctggccgccgccgaggagaactctaaaatggagcagagcaatctcgaaaagctggaactaaacgtaagaaagcttcaacaggaactggatcagctgaatcgggataaactgtctctccataacgatatctccgccatgcagcagcaactacaggagaaacgggaagcagtaaacagcttgcaggaggagctggcgaacgtgcaggaccacctgaacttggccaaacaggacctgcttcacactactaagcatcaagatgtcttgttgtcggagcagacacgactccagaaggacatcagtgaatgggcgaaccggttcgaggactgtcaaaaggaagaggagaccaagcaacaacagctccaggtcctgcaaaatgagatcgaggaaaacaagcttaaactggtgcaacaggaaatgatgtttcagagactgcaaaaagaacgtgagtccgaagagtccaagctcgaaaccagcaaggttaccttgaaggagcagcagcaccagttggagaaggagcttacagaccagaagagtaagctcgatcaagtattgagcaaggtactggctgcggaggagcgggtgcgtacactccaggaagaggagcggtggtgcgagtcattggaaaaaactttatcccagactaagagacagctgtctgagagagagcaacagctcgtggagaagtcaggcgagcttctggcacttcagaaagaggcagactctatgagagccgacttctccctgctcagaaaccaatttcttacagagcgcaagaaggctgagaagcaggtggcgagcttgaaagaagcactcaaaatccaacgctctcagcttgaaaaaaacctgttggagcaaaagcaggaaaattcctgcattcaaaaagaaatggccacaattgaactcgtggcccaagacaatcacgagcgggcccgccgcctgatgaaggagcttaatcagatgcaatatgagtacactgagctgaagaagcagatggcgaatcagaaagacttggaaagaagacagatggagatttctgacgccatgagaaccctgaaaagtgaggttaaggatgaaatcaggacatccctcaaaaaccttaaccagttcctgcccgagctgcctgccgatctcgaggcaatcttggaacgaaacgaaaacctggagggagaactggaatctctgaaggagaacttaccattcacgatgaatgaaggacctttcgaagagaagttgaatttcagtcaggtgcatattatggatgaacactggcgtggagaagccctgagggagaagttaagacacagagaagatcgcctgaaagcccagcttaggcactgtatgtccaaacaagccgaggtcctgatcaaaggcaagcggcagacagaaggtaccttacacagcctgagaaggcaagtggacgctttaggagagctagttacctccacaagcgcggacagcgccagttcgccgagtttgagtcagttagaaagctcattgacagaagactcacaactcggacagaaccaggagaagaacgcatcagctcggtag

SEQ ID NO: 22835 - DNA, 2811 bp, synthetic construct
  source 1..2811: mol_type = other DNA; note = Synthetic coding sequence
atggagcccgacatcatccggatgtacagcagcagccccccccccctcgataacggagccgaagatgacgatgatgatgaattcggcgagtttggtgggttctccgaggtcagcccttcgggtgtgggctttgtagacttcgacaccccagattatactagacctaaggaagaattcgtacctagcaatcatttcatgcctatccacgaattctcagagaatgttgactccctgacctcatttaaatccatcaagaatggcaatgacaaggatattacagcagagctgagcgcccccgtgaaggggcagtctgatgtgctactcagtacaacctcaaaagaaattatttcatctgagatgctagcaacttctattgacgggatggagaggccaggcaacttgaataaggtggtagaacagcgccagaatgtgggaacgctggagagcttcagccctggcgacttccgcaccaatatgaatgtggtccaccagaacaagcagcttgagagctgtaatggcgaaaagcccccttgcctggagatcctcaccaacggtttcgctgtcctagagacggtaaatcctcagggcacagacgacttagacaatgtcgctgacagcaaaggcagaaaaccactgtcaacccacagcaccgagtacaacttggattccgtaccaagccccgctgaggagttcgccgatttcgctacatttagtaaaaaggagcgcattcaactggaagaaattgagtgtgctgtgctcaacgatcgagaggctttgaccattcgggaaaacaacaaaatcaaccgggttaatgagcttaatagtgtgaaagaggtggcactggggaggagcctcgacaataaaggggatactgatggtgaggaccaggtctgcgtttcagaaatttccattgtaacgaatcgcggcttttccgtggaaaaacagggactgcctacccttcagcaggacgagttcctgcagtccggggtccagtccaaagcttggagccttgttgattccgctgataacagtgaggcgattcggcgtgaacaatgcaaaaccgaggagaaactagaccttctaacttccaagtgcgctcatctgtgtatggacagtgtgaaaacctctgacgacgaggtaggtagtcccaaggaagagtctcgcaaattcacaaactttcaaagtccaaacatagacccgacggaggagaatgacctggatgacagtctcagtgtgaagaacggggattcttcaaacgacttcgtgacatgcaatgacataaacgaagacgatttcggagactttggggactttggatctgcctccggctccactccccccttcgtgaccgggacacaagattctatgtccgatgccacctttgaggagtcaagcgaacacttcccgcactttagcgaacccggcgacgactttggcgagttcggcgacatcaacgccgtttcctgccaggaggaaacgattctgaccaagtcagatttgaagcagacctcagataatctcagtgaggaatgtcagcttgcccgaaaaagctccggaacgggcacggagccagtcgctaagctcaaaaacggacaggaaggggagatcgggcactttgactcagtcccgaacatccaggacgactgtaatgggttccaggattcagacgactttgctgatttcagctctgccggtccgagccaggtggtagactggaacgcttttgaggatgagcagaaggattcttgttcttgggccgccttcggagatcaacaggcaacggaaagccatcaccggaaagaggcatggcaaagccacaggacagatgagaacattgacaccccaggtacacctaagacgcattctgtgccatctgcaactagcaaaggtgccgtggcatcaggccatctccaggaaagcgccacctctgttcaaaccgctctgttgaacaggctggaacggattttcgaagcatgcttcccttcaatccttgtgcccgatgccgaggaggaggtcacctcactgaagcacctacttgaaacctctacccttcctatcaagacgagagaggcgctgcctgagagcggcgaacttttagacgtgtggaccgaactgcaagatatccacgacgcccatggactacgttatcagtggggcggctcccattctaataaaaagctcttgtcaagcctgggcatagatacccggaatatcctgttcaccggtaataaaaaacaacccgtgatcgtgcctatgtatgcagcaggtttagggatgttggagcctactaaggaaccgctgaaaccactctccgccgctgagaagatcgcctcaataggtcaaacggctacaatgtctcccgacatgaatacctgtactagcgaccagtttcaagagtccttgcccccagttcaattcgactggtcttctagcggcctgaccaatccactagacgcctccggtgggagtacactcctgaacctggatttcttcggaccagtggacgattcatcatcaagctcttccactacgatcccaggcgtggaccccgagctgtatgagctgaccacaagtaaattggagattagtacgagctcactcaaagtaaccgatgctttcgccagactgatgagtaccgtcgaaaaaacgtcgacctccaccaggaagcccaagagagaggaacatctgtctgaagaggcaatcaaagtgattgctggcctgccagatctgacatttatgcacgcaaaggttctaatgtttccagctactttgaccccttccacgtcctcacaggaaaaagctgacggatag

SEQ ID NO: 22836 - DNA, 2730 bp, synthetic construct
  source 1..2730: mol_type = other DNA; note = Synthetic coding sequence
atggagcccgacatcatccggatgtacagcagcagcccccccccccttgacaatggagccgaggatgatgacgacgacgagtttggtgagtttggaggtttttccgaggtatctcctagtggcgttggcttcgttgacttcgatacacctgattataccagacctaaagaggaattcgtgccctccaaccattttatgccaatccatgagtttagtgagaatgtggattctctgacgtcctttaagtccattaagaacgggaatgataaggacattacagccgagttgtcagcaccagtcaagggacagagcgatgttctcctgagcactaccagcaaggagattatcagtagtgagatgttggccaccagcatcgacggaatggagcgacctggaaatctgaataaggtagtggaacaaagacagaacgtcggcacgcttgagtccttcagcccaggcgattttcgtactaatatgaatgttgttcaccagaataagcaacttgagtcatgcaatggggagaagcccccatgcctagagatccttactaacggctttgccgtcctggagaccgtgaacccacaggggactgatgatctggataacgtggctgactccaaaggacgcaaaccactctcaacgcatagtaccgaatacaacctggacagtgtccctagccctgccgaagaattcgctgattttgcaactttttccaaaaaagagagaatacagctcgaggagatagagtgcgccgtcctgaatgaccgggaagcgttaaccatcagagaaaacaataaaatcaatagagtgaacgaacttaactctgtcaaggaggtcgccttaggacgcagccttgacaataagggggataccgacggagaagaccaggtctgtgttagtgagattagtatcgtgactaaccggggcttcagcgttgagaagcaggggctgcctaccctgcagcaggatgaatttttgcagtcaggcgtgcaatccaaggcatggagcctggtggattccgcggacaactctgaagccattcggagagagcagtgtaaaaccgaggagaaacttgaccttcttacaagcaaatgcgcacatctttgcatggacagtgtgaaaacgagtgatgatgaggtgggatccccaaaagaggagtctcgtaagtttactaatttccaaagtcctaacattgacccaaccgaggagaacgacctggatgactccctgtccgtcaagaatggagacagctcaaatgactttgtgacttgcaacgacatcaacgaggatgattttggcgacttcggggatttcggctctgctagtggctcaactccacctttcgtcacgggaacacaggactcaatgtccgacgctacctttgaggagtcaagcgagcattttccccatttttcagagccaggggacgatttcggtgaatttggagacattaacgcagtgagctgccaggaggaaactatcctcacaaaatctgatttgaaacagacctctgataacctctcagaggaatgccagctcgcccgtaagtcatctggaactggcactgagcctgttgcgaaactgaagaatggtcaggagggcgaaatcggccattttgactcggtacctaatatccaagacgattgcaacggcttccaggactctgatgattttgccgatttcagttctgcaggtcccagccaagtcgttgattggaacgcttttgaggacgagcaaaaagatagctgttcctgggccgcttttggcgatcagcaggctaccgaatctcaccacaggaaagaggcctggcaatctcatagaactgacgagaatatagatacaccagggactccaaaaacacactcggtgccctccgccacctcaaaaggggctgtggcatctggccatctccaagaatcagccacaagcgtacaaaccgccctactcaacaggctggagcggatttttgaggcttgttttccctcaatactggtgccagacgctgaggaggaggtcacatctctcaagcaccttttagagacaagcacactgcctatcaaaacaagagaagcccttcccgagagcggcgaactgctggacgtgtggacagaattacaggacatacacgatgcgcacggcctaagataccaatggggagggtcacactccaataaaaagctgctgtcatccctggggattgacacgcgaaacatactgtttactggaaataagaaacaacccgtcatcgtcccaatgtatgctgcgggcctgggaatgctggagccaaccaaagagcctctgaaacccctgagcgctgctgagaagatcgcttcaatcggacagactgcaactatgagtccggacatgaatacttgtacctcagaccagtttcaggagagcctgcctcccgttcaatttgactggagcagcagcgggctcacaaatccgttggacggtgtcgatcccgaactatatgagcttacaacctctaagctcgagatctctacctccagtctgaaagtgactgatgcattcgccagactcatgtcaacagtggagaaaacctcgaccagcactagtcgcaaacctaaacgtgaagagcatttgtcggaggaagccataaaagtgattgcagggttgccagacttgactttcatgcacgccaaggtgttaatgtttcccgctacactcacgccaagcacatcttcccaagagaaagccgacggatag

SEQ ID NO: 22837 - DNA, 306 bp, synthetic construct
  source 1..306: mol_type = other DNA; note = Synthetic coding sequence
atggtgtgcgagaagtgcgagaagaagctgggcaccgtgatcaccccagacacgtggaaagacggggcccgcaacacaacagagagtggaggaagaaagctgaacgagaacaaggcactcacttctaagaaagccaggttcgacccctacggaaaaaacaagttctccacatgtcgcatctgcaaatcctcagtccaccagcctggctctcactattgtcagggatgtgcttacaaaaagggtatatgcgctatgtgtgggaaaaaggttcttgatacaaaaaactacaaacaaacctccgtgtag

SEQ ID NO: 22838 - DNA, 1467 bp, synthetic construct
  source 1..1467: mol_type = other DNA; note = Synthetic coding sequence
atgaacttcacccccacccacacccccgtgtgccggaagcggaccgtcgtatccaaaagaggggtggctgtgtccggcccaaccaagaggcgggggatggcagactcgctcgagtccacccccttgccatcccccgaggaccggctggcaaaactgcacccatccaaggagctgctcgagtattaccagaagaagatggcagagtgtgaagccgagaatgaagacctactgaagaagctggagctttacaaggaagcttgcgaaggccagcacaaactcgagtgcgacctccagcagcgcgaggaagagatcgccgaactgcagaaagcactgagcgacatgcaagtctgtctttttcaagagagagagcacgttctgagactttactctgagaatgataggctgagaataagggaattagaggataagaagaaaattcagaaccttcttgccctggtcgggactgacgcgggggaagttacttacttctgcaaagagccgccccacaaggttacaatcttacagaagacgatccaggcagtaggcgagtgtgagcaaagcgaaagttctgcttttaaggctgaccccaagatctctaaacggagaccaagccgggagagaaaggagagttccgaacactaccagagagacattcagaccctcatactccaggtggaagctctgcaagctcagctcggagaacagaccaagctcagtagggagcagatagagggtttgatcgaggatcgacggattcacctggaagaaatccaggtacagcaccaaagaaatcagaacaagatcaaagagttgacaaaaaatctgcatcatacacaggagctgctgtatgagtctactaaagattttctccagttgcgatccgaaaaccagaataaggagaagtcgtggatgctagagaaagacaacctcatgagtaagatcaagcagtatcgggttcagtgcaaaaaaaaagaagacaaaattggaaaggtgctccctgtgatgcacgaatcacaccatgcccaaagcgagtacattaaatctctgaaagataagctcgtacaagagaaaaagctgagcaacatgtatcaggagcagtgcatatccctggaggaggagctcgcccgcattcgggaggaagagggaatgcgcagagagattttcaaagacagaacgaacaagatgggcaagcgcctccagataatgacgaagcgttacgaggccctggagcgaaggcgcatcctggaagttgaaggttttaaaactgacattaaagtgctccggcagaagcttaaggacctggagcagatgttgtataaagccaccgtgaatgcaagagctaaccaggatctcgcactcctctgcgaggtccgggactccaatcgcagagctcacaagattcagggggaactcaagaatctgaagagtaaggtgtttggcctcgaaaatgagttgcgcctgtgttag

SEQ ID NO: 22839 - DNA, 258 bp, synthetic construct
  source 1..258: mol_type = other DNA; note = Synthetic coding sequence
atgagcaaggtgagcttcaagatcaccctgaccagcgacccccggctcccatataaagttctgagtgtgccagagtctaccccctttactgctgtgcttaaatttgccgccgaggagtttaaagtgcccgcagccacaagtgccattatcaccaatgacggtattggaatcaaccccgctcagactgccggcaatgtttttcttaagcatgggtctgaactccggatcattccgagagaccgtgtggggtcttgctag

SEQ ID NO: 22840 - DNA, 585 bp, synthetic construct
  source 1..585: mol_type = other DNA; note = Synthetic coding sequence
atggacgaggacggcctgcccctgatgggcagcggcatcgacctgactaaggtccctgcaatccagcagaagaggactgttgcattcctgaaccagttcgttgttcacaccgttcagttcctcaatcgatttagtacagtctgtgaggagaaactggcagatctgtcactgcgcatccagcaaatcgagacaaccttgaacattcttgatgcgaagctcagctccattcccggactggatgatgtgactgtggaagtttctccactcaacgttacatccgtgaccaacggcgcccaccccgaagcaacttccgaacaaccccagcaaaatagcacccaggactctggcctccaggagagcgaggtgagcgcagagaatatacttaccgtggcgaaggatccccgatacgcgaggtacttgaaaatggtgcaggtgggcgtacccgtaatggccatacgcaataagatgattagtgagggactggatcccgacctcctcgagaggcctgacgcacctgtacctgacggtgagagcgaaaagacagtcgaagagtcatctgacagcgagagcagcttcagcgactag

SEQ ID NO: 22841 - DNA, 2226 bp, synthetic construct
  source 1..2226: mol_type = other DNA; note = Synthetic coding sequence
atgggcccccccggccccgccctgcccgccaccatgaacaacagcagcagtgaaacgcgcggccacccacacagcgcctcctctcctagcgagcgagtgttccctatgcctttgccccggaaggcccctctcaacatccccggaacacccgtcctggaagatttccctcagaatgatgatgaaaaggaaagactgcagcgccgtcgtagccgggtattcgatttgcaattctccactgactccccacgcctgctggcctcgccttcttctcgctctattgatataagcgctactatacccaaattcaccaatacccagatcaccgaacattactctacttgcatcaagctgagcaccgaaaataagattacaacaaagaacgcattcggactgcatctcattgatttcatgagtgagattttgaagcaaaaggacactgagcccactaactttaaagttgccgccggcaccctggacgcctcgaccaaaatttatgctgtgcgcgtcgacgcagtgcacgcagatgtgtatcgtgtcctcggaggcctgggcaaagatgccccatcactcgaggaggtcgagggccatgtcgcagacggctcagctacggaaatgggaaccaccaaaaaggccgttaagccaaagaagaagcatctgcatagaacaattgagcaaaatatcaataacctgaacgtgtcagaggctgacaggaaatgtgagatcgatcccatgtttcagaaaacagctgctagctttgatgaatgttcaacagctggtgtatttctgagcaccctccactgtcaagattatcggtctgaactgctgtttccttcggacgttcagacgctctccacaggcgaaccacttgaactgccagagctgggctgtgtcgaaatgactgacttgaaagctccactccagcagtgcgcggaggatcggcagatatgccctagtctcgcgggtttccagttcacccagtgggattccgagacacataacgagtcggtcagcgcccttgtcgacaaatttaaaaagaatgatcaggtcttcgatattaacgccgaagtcgacgaaagcgattgcggggactttcccgacgggagcctgggcgatgacttcgatgctaatgatgagcctgatcatacagccgtgggcgaccacgaagagtttcggagttggaaggaaccctgtcaggtgcagtcatgccaggaagagatgatatctctgggagatggtgatatcagaaccatgtgcccactgctgtctatgaagcccggagaatatagctacttcagcccccgcaccatgagtatgtgggcagggcctgaccattggcggtttcgacctcgacggaagcaggatgcaccctcccagtctgaaaataagaagaagtctaccaagaaagactttgaaatcgacttcgaggacgatatcgatttcgatgtgtacttccggaagaccaaagctgccaccattctgacaaagtcaactctcgaaaatcagaactggcgagcaacgaccttaccaaccgatttcaattacaacgttgatacactcgtccagctgcacctgaagcctgggacacggctattgaagatggctcagggccatagggtcgagactgaacattatgaagagatcgaagattatgattataacaatcccaacgacaccagtaatttttgcccaggcttgcaggccgctgatagtgacgatgaggacttagatgatctgttcgtcggtccggtgggcaattcagacctgtccccatatccatgtcatccacctaagacagcccaacagaacggcgatactccggaggcacaggggctggacataacaacatatggtgagtctaatttggtggcagagccacagaaggtaaacaaaatcgagatccactatgctaagaccgccaaaaagatggacatgaagaagctcaagcagagcatgtggtctcttctgactgccttgtccgggaaggaggcagatgcagaggcaaaccaccgagaggccggcaaggaagccgctctggctgaagtggcagatgagaaaatgctgagcggactgaccaaggacttacagagaagccttccacccgtcatggcacagaacctgagcatcccgttagcctttgcatgcctgctccacctggccaacgaaaagaatctgaaattagagggcactgaggacctgtcggatgtcctggtccgtcagggggactag

SEQ ID NO: 22842 - DNA, 510 bp, synthetic construct
  source 1..510: mol_type = other DNA; note = Synthetic coding sequence
atgaagggcagccggatcgagctgggcgacgtgaccccccacaacataaaacagttaaaacggctcaaccaggtgatttttccagtgtcatacaacgacaaattctataaagatgtgcttgaggtcggcgagttggctaagttagcttacttcaatgacatcgcagtgggtgccgtttgctgcagggttgatcatagccagaaccagaaacgactgtacatcatgacactaggttgcctcgctccctacagacggcttggaatcgggaccaagatgcttaaccatgtgttaaacatctgtgagaaagacggcacgtttgacaatatttacctccatgtgcagattagcaacgagtccgcaattgacttttaccggaaatttgggttcgaaattattgaaactaaaaagaactactataagcggatagagcccgccgatgctcatgtcctgcagaaaaatttgaaggtcccctctgggcaaaacgccgatgtgcagaaaaccgacaactag

SEQ ID NO: 22843 - DNA, 1245 bp, synthetic construct
  source 1..1245: mol_type = other DNA; note = Synthetic coding sequence
atggccgccgccccccccagctactgcttcgtggccttccccccccgggctaaggatgggctggtcgtgtttggaaaaaacagtgcacgcccccgcgatgaggtgcaggaggtggtctacttcagcgccgccgaccacgagccagaaagcaaggtagagtgcacctatatttcgatagatcaggtgcccaggacttatgccattatgatttctaggcccgcctggctatggggagcggaaatgggcgcaaatgaacacggtgtgtgcatcgcaaatgaggctattaatacccgcgagcctgccgccgagattgaagcactcctgggaatggacttagtcagattaggtctcgaacgcggagaaactgctaaggaggcactagacgtgatcgtgagcctgctagaggagcatggacagggaggcaactattttgaggatgccaactcctgccatagcttccaatctgcctatctcatcgtggaccgcgacgaggcttgggtactcgagactataggcaaatactgggctgcagaaaaagtgaccgaaggtgtacgatgtatttgtagtcagttgagtctcactaccaagatggatgcagaacatccagaactccggtcctacgcacagtctcagggatggtggacaggagagggcgagtttaacttctcagaggtgttttcccccgtggaagaccatctggattgtggcgcaggcaaggatagcctcgagaagcaggaagagagcatcacagtccagaccatgatgaatacattgcgggataaagctagcggcgtgtgcattgatagcgagttctttctcaccactgcttccggggttagtgtgctgccgcagaataggtcatctccctgtatacactactttaccggaacgcccgacccatcccgctctattttcaaacctttcatttttgttgatgacgtgaagctggtgccaaaaacccagtcgccttgctttggggacgacgatcccgccaaaaaagagcctcgcttccaagagaagcccgatagaagacacgaactgtacaaagctcatgagtgggctagagccatcattgaatctgatcaggagcagggcaggaagttgaggtccaccatgttggaactagagaagcaaggacttgaggcaatggaagagatattgactagtagtgaaccgctggaccccgccgaagtgggagaccttttttacgattgtgtcgacactgagatcaagttcttcaagtag

SEQ ID NO: 22844 - DNA, 2031 bp, synthetic construct
  source 1..2031: mol_type = other DNA; note = Synthetic coding sequence
atgagcgaccagatcaagttcatcatggacagcctgaacaaggagccgttccggaagaactataatctgattacatttgacagcttggagccaatgcagcttctgcaggtgctctccgacgtccttgccgaaatagacccaaagcagctggtggatatcagggaggagatgcccgaacaaactgccaaaaggatgctgtcactgctcgggattctaaagtataaaccttccggtaacgccacagatatgtccacttttcggcagggcctcgtaatcggtagtaaaccagttatatacccagtcctccattggttgcttcagcgcacaaacgagctaaagaagcgcgcatacctggcccggtttctcatcaaactggaagtgccctctgagttcttgcaggatgagacagtcgccgacaccaacaagcagtacgaggagctgatggaggcattcaaaacgctccataaggaatatgaacagctcaaaataagtggcttttccaccgctgagatccgcaaagacatctccgctatggaagaagagaaagatcaactaattaagcgtgtggagcatctgaaaaaacgggtggagacagcccagaaccatcagtggatgctgaagatagctcggcaactgcgagtggaaaaagagagggaagagtacctcgcacaacaaaagcaggagcagaagaaccaactcttccacgcagttcagcgcctgcagagggtacaaaaccaactcaagtctatgagacaagccgctgcagatgcgaagccggagagccttatgaagagattggaggaggaaattaagttcaatctgtacatggtgactgagaagttccctaaagagctggagaataagaaaaaggaattgcacttcctacagaaggtggttagcgagccagccatgggacacagcgatcttctggaactggagtcaaagataaatgaaattaacacagagattaatcagctcatcgagaagaaaatgatgagaaacgaacccatagaaggtaaactgtccctgtaccgtcaacaggcttcaataatctcgcgcaaaaaagaagctaaggccgaggagctgcaggaagcaaaggagaagctggcatctcttgagcgggaagcctccgtgaagcgcaaccagacacgcgaatttgacgggaccgaggtgctgaaaggagacgagttcaaaagatacgtgaataaattgcgttccaagtccacagtattcaaaaagaagcaccagataatcgccgagttgaaggcagagtttggacttctgcagcggacggaggaactgctgaaacaacgccatgaaaatatccagcagcagctgcaaactatggaagaaaagaaagggatttcagggtacagttacacacaagaggagctagaaagagtaagtgccttaaagtcagaagtggacgagatgaaaggcagaacccttgacgacatgtctgaaatggtcaaaaagctgtacagcttggtgagcgaaaagaagtccgcactagcatctgtgataaaagagctcagacagctcagacaaaagtatcaggaacttacccaagagtgcgatgagaaaaaatcgcagtacgacagttgcgcggcagggcttgaaagcaacaggtctaagctggagcaggaggttagacgcttacgcgaggagtgcctacaagaagaatcccgctatcattacaccaactgcatgattaaaaacctcgaggtccagctgaggcgcgcaaccgatgagatgaaagcgtatatcagttctgatcagcaagaaaagcggaaggccatccgagagcagtacacgaagaacaccgctgagcaagagaatctgggcaagaagctcagagaaaaacagaaagtcatccgtgaatcacatggacctaatatgaagcaggccaagatgtggcgtgacctcgaacaacttatggaatgtaagaaacagtgcttcttgaagcagcagagccagacctcgattggacaggtcattcaggaggggggggaagatcgcttgattctgtag

SEQ ID NO: 22845 - DNA, 948 bp, synthetic construct
  source 1..948: mol_type = other DNA; note = Synthetic coding sequence
atggccttccccgagcccaagccccggccccccgagctgccccagaagagacttaagaccctggattgcggccagggcgccgttagagcagtacgcttcaacgtggacgggaattattgcctcacatgcggaagcgacaaaacactgaagttgtggaaccccctccgaggaaccttgctgcggacctatagcgggcatggttacgaagtactcgacgccgccggaagcttcgacaacagctccctgtgttcagggggaggcgacaaggccgtggtgttgtgggacgttgctagcgggcaggtagtccgaaaattcaggggtcacgcgggtaaggttaatacagttcagttcaacgaagaggctaccgtcatcctcagtgggtcgatcgactcttctatcagatgctgggactgcaggagtcggagacccgagcctgtacaaactctggacgaggcccgagatggtgtatcgtccgtgaaagttagtgatcacgagatccttgcaggtagcgttgatggccgtgtccggaggtacgatctgcgaatgggacagctcttttcggactacgtggggtctcccatcacctgcacatgtttttcgcgcgatggacagtgtacccttgtgagcagcttggactctaccctccggttgctggataaggatacgggagagttgctgggggaatacaagggccacaagaaccaggagtacaagctggactgctgtctttctgagagagatacccacgtcgtctcttgttccgaggacgggaaagtgtttttctgggatctcgttgaaggggcactggcactcgctctcccagtaggctccggtgtcgtacagagcctggcatatcatcccaccgagccttgtttgctgaccgctatgggcggctccgttcagtgttggagagaggaggcatacgaggcagaagatggcgccgggtag

SEQ ID NO: 22846 - DNA, 1803 bp, synthetic construct
  source 1..1803: mol_type = other DNA; note = Synthetic coding sequence
atggtgctgatcctgggccggcggctgaaccgggaggacctgggcgtaagagactctccagcgaccaagcggaaagtctttgaaatggacccaaagagcctcacagggcatgaatttttcgacttctcatccgggtcttctcacgctgagaatatactccagatcttcaacgagttccgggattccagattattcacagacgtgattatctgcgttgagggcaaggaattcccctgccacagggctgtcctgtccgcatgcagctcctattttcgagccatgttttgtaacgaccatagggagtccagagaaatgttagtggaaattaacggcatcctggccgaggcgatggagtgctttctccagtacgtttatacgggtaaggtcaaaatcacaacagagaacgtgcagtatttgtttgagacatcttccctgttccagataagcgtgctgagagacgcttgcgccaaatttttggaggagcagcttgacccttgtaactgtttaggaattcagaggttcgccgatacgcatagcttgaagacactgttcacaaagtgtaagaattttgctctgcagacctttgaagatgtttcgcaacatgaggagttcttagagttggacaaagacgaattaattgactacatctgcagtgacgagcttgtgatcggaaaggaggagatggtattcgaagccgtgatgcgctgggtgtatagagcagtggacctgcggagaccactcctccatgaactcctgactcatgtaaggcttccactgcttcatccaaattacttcgtccagactgtcgaagtcgatcaattaattcagaattcaccagaatgctaccagctcctccacgaggcccgccgctaccatatccttggaaacgaaatgatgtcaccaaggaccagacccagaaggtccaccggatactcggaggttattgtcgtcgtgggcggatgcgagagagttggtgggttcaacctgccgtacacagaatgctacgaccccgtcactggcgagtggaaaagcctcgctaagctgccggaattcaccaagagcgaatatgctgtctgtgctctgcggaatgacatcttggtaagtgggggtaggatcaacagtagagacgtttggatctacaacagccagctgaatatctggatccgtgttgccagcttgaacaaggggcggtggagacacaaaatggcggtgctgctcggcaaggtctatgtcgtgggaggttacgatggacagaaccggttaagctccgttgaatgctacgactctttttcaaaccgctggactgaagtcgccccattaaaggaagcagtgtcttcacctgccgtgacatcctgtgtaggtaagttgttcgtgattggaggcgggcctgatgacaatacatgttccgacaaggtccagtcatacgatcccgaaactaactcctggttgctgagggcagccatcccaatagccaaaagatgcattacagcagtctctttaaacaatctgatctacgtagccggcgggctgaccaaggcaatctactgttatgatccagtggaagattactggatgcacgtgcagaacaccttctctagacaagagaactgtgggatgagcgtctgtaacggtaaaatttacatactgggaggtagaagagaaaacggcgaggctacagatacaatcctctgctatgatccagccacaagtatcatcactggcgtggcagctatgccaaggcctgtgtcatatcacggctgcgtcacgatccaccgctacaatgagaagtgttttaagctgtag

SEQ ID NO: 22847 - DNA, 810 bp, synthetic construct
  source 1..810: mol_type = other DNA; note = Synthetic coding sequence
atgaaccaggaggacctggaccccgacagcaccaccgacgtgggcgacgttaccaacaccgaggaggaattgatccgagaatgtgaagagatgtggaaggacatggaggagtgtcaaaacaagctatcactaattggtaccgagacgctaaccgactctaacgcccagctgagcttactgatcatgcaggtcaagtgcctgacagcggaactttcccagtggcagaaaaaaacacccgagactatcccgttgaccgaggacgtcctcattacattaggaaaagaggaattccagaaattacgtcaggaccttgagatggtccttagcactaaggaaagcaaaaatgaaaaactgaaggaagacctagagcgagagcaacggtggttggatgagcaacaacagatcatggaatctctcaacgtgctgcacagcgagttgaaaaacaaggtagaaacgttctccgaatctcggatcttcaacgaactaaagacaaaaatgttgaatatcaaagaatacaaggaaaagctgctgtcaaccctgggcgagtttctcgaagatcatttccccttgccagacaggagtgtgaagaagaagaagaaaaatatccaggaatcctccgttaacctcatcaccctgcacgagatgctggagatactgattaatcgtttgttcgatgtgccccatgatccgtacgtgaaaatatccgactccttctggcctccttatgtcgaacttctgttgaggaatggcatcgccctaagacacccagaggatcccacacggatacggctggaagcctttcatcagtag

SEQ ID NO: 22848 - DNA, 1041 bp, synthetic construct
  source 1..1041: mol_type = other DNA; note = Synthetic coding sequence
atgtgcgagggccccagccggatcagcggccccatcccccccgaccccaccctgtgccctgataattatcgacgccccacaagtgcacaggggaggcttgaggggaatgcgctgaagctggatctccttaccagtgaccgggctcttgatacgacagcccccaggggaccatgtataggacctggtgccggcgagatcctagagagaggacagcggggcgttggggatgtgctcctccagctcgaaggcatatctctgggtcccggagcctccctgaaaaggaaagatcctaaggaccacgaaaaagaaaatctcagacgcattagagagattcagaaaaggttccgtgaacaagagcgttctagagagcaaggacagccacgaccactcaaagcactttggagatcaccaaagtacgacaaggtggagtcaagggttaaggcacaactgcaagaacctggcccagccagcggtactgagtcagcacattttctgcgtgcccactcaaggtgcggcccaggacttcccccaccccacgtcagcagtcctcagcccacccccccgggcccagaggcgaaagaaccagggttgggtgttgattttataagacacaacgcaagggccgctaagcgcgctcctagacgccacagttgttctttgcaggttctagcacaagtcttggagcagcagaggcaggcccaggagcactacaatgctacccagaaagggcacgtaccgcattacctgctggagcggcgggacctttggaggagggaggctgaggcgcgtaaacagtctcaaccggaccccgctatgcccccaggtcatacacgaatgccagagaaccagagattggaaaccctgaccaaattgttgcagtcccagagccagttattgcgggaattggttctgctcccagcgggagcagattccttgcgcgcccaatctcaccgagccgaactggataggaaattagtgcaggtggaagaagcaattaagatattttctagacctaaagtctttgttaaaatggatgactag

SEQ ID NO: 22849 - DNA, 1824 bp, synthetic construct
  source 1..1824: mol_type = other DNA; note = Synthetic coding sequence
atggccgccaacgtgttccccttccgggacgcccgggccgcccccgacccagtactggaagccggacccgtggcgcacggcccgctgcccgtgcccctcgttttagacaacggaagctttcaagtccgggctggatgggcttgccccggtcaggatcccggacccgagccaagactgcagtttcgcgccgtatgtgctcgcggccgaggtggcgcgcgcggcgccagcgggccccaggtggggaatgccctggggtcactggagcccctgcgctggatgttgcgctcgccattcgataggaatgttccagtaaaccttgagcttcaggaactgctcctcgattactccttccagcatcttggggtgtcttcccaaggttgcgtggatcaccctattgttctgacggaagctgtctgcaatcctctatacagtcgacagatgatgagtgagttgctgttcgagtgttacggaatcccaaaagtggcctatggcattgactccctatttagcttctaccataataagccaaagaactccatgtgtagcggcctcatcattagctcgggctaccagtgcactcatgtcctccccatcctggaaggacggctggatgccaagaactgcaaacggattaatttgggcgggtcccaggcagcaggatatctgcaaagactgttacagctgaaataccccggccacctggccgccattacgctgagcagaatggaagaaattcttcacgaacacagctatattgccgaagactatgtggaagaacttcacaagtggagatgtcccgattactacgagaataatgtgcacaaaatgcagttaccattctctagcaaactgctgggtagcacgctgacttccgaggaaaagcaggagcggcggcaacagcaactgagacgtctccaggagctcaatgcaaggcgccgtgaagagaaacttcagttggaccaagagcgcctcgatagattgctctatgttcaggaacttctggaggacggtcaaatggaccagtttcacaaagctcttatcgaactgaacatggatagccccgaagaacttcagtcatatatccagaagctctccatcgctgttgagcaggccaaacaaaaaatattgcaggccgaggtgaatttagaggtcgacgttgtggactcaaaacccgagactcctgacctcgaacaactagaacccagtctggaagatgtagaatccatgaacgactttgacccccttttcagcgaagaaacgccgggggtggaaaaaccagtgacaaccgttcaacctgtctttaatctggcggcttaccatcagctgttcgtgggaactgagcggattagagcccccgaaataattttccaacccagcttaatcggggaggagcaagctggcatcgcagaaacactccaatacatactggatcgctacccaaaggacattcaagagatgcttgtgcagaacgtcttcctgacaggcggcaacacgatgtaccccggcatgaaggcgcgtatggagaaggagttgttggaaatgagaccgttcaggagctcctttcaggtccagctggcctccaaccctgttctggatgcttggtacggcgcccgtgactgggcattgaatcacctcgacgacaatgaggtgtggataacaagaaaggagtacgaggaaaagggcggggagtatctaaaggagcactgtgcttcaaatatttacgtaccgatccggttgcccaagcaggcttcccgaagcagcgacgcccaagccagttctaaaggatctgctgctgggggagggggggctggagaacaggcgtag

SEQ ID NO: 22850 - DNA, 1383 bp, synthetic construct
  source 1..1383: mol_type = other DNA; note = Synthetic coding sequence
atggccagccgggaggaggtgctggccctgcaggccgaggtggcccagcgcgaggaagaacttaacagccttaagcagaagctggctagcgcccttctggccgaacaggagccacaacccgagcggcttgtgccagtgtctcctctgccacctaaggctgctctctcccgggacgaaatactgcggtatagtagacagctggtgctgcctgagttgggagttcatggccagctgagattaggcacagcctgcgtgctgattgtggggtgcggagggcttgggtgccccctggcccaatatctcgcggctgccggagttgggcggctgggattggttgactacgacgtggtggagatgagtaaccttgcccggcaagtgctccatggtgaggctcttgctggtcaggctaaggccttcagcgctgcggccagtctgcgccgacttaacagtgcagtggagtgcgtaccatatacacaggcccttacccctgccaccgctctggacttagtcagacgctacgacgtggtggccgactgctccgataacgttcccaccaggtacctcgtcaatgacgcatgcgtgctagccgggagacccctggtgtcagcaagtgcattgcgctttgaaggccagattaccgtgtaccactacgacggcggtccatgctatcgttgcatctttccgcagcctcccccagcggaaactgtaacaaattgtgctgacgggggagtcctcggagttgtgaccggtgtgctgggctgcctgcaagcactggaagtcctgaaaatcgccgcagggctggggccctcctacagcggcagtctgctgctttttgatgctctcagggggcatttccgcagcatacgcctccgcagccgaagactggattgtgccgcttgcggagaacgccccacagtgaccgacctcctcgactacgaagccttttgcggcagctcagctaccgataagtgcaggagcctccagctgctctcaccagaggagcgtgtgtctgtcactgactataaacggttactagacagtggagcttttcaccttctgctggatgtcagacctcaggtcgaggtggatatttgtcgtcttccgcatgctcttcacatcccactgaagcatctcgagcgacgcgatgccgaatccctgaaactgttgaaagaggccatttgggaggagaagcagggtacccaggagggggctgccgtgccaatttatgtaatttgtaaattgggaaatgactcccagaaggccgtgaaaattctgcaatccctgtctgcagcccaggagctggatccgctgacggtgcgcgatgtagtcggcggtctgatggcttgggcagctaagattgacggcacattccctcagtactag

SEQ ID NO: 22851 - DNA, 1041 bp, synthetic construct
  source 1..1041: mol_type = other DNA; note = Synthetic coding sequence
atggagagcgtgagctgcagcgccgccgccgtgcggaccggcgacatggagagccagagagatctgagtctcgtgcctgagcgccttcagaggcgtgagcaagagcggcagctggaggtggagagaaggaaacagaagcggcagaaccaggaagtggaaaaggagaactcacactttttcgttgccactttcgtgagggaaagagccgcggtcgaggagctgctggagcgtgccgaatctgtggagcgcctggaagaagccgctagccggctccaggggcttcagaagttgattaatgactcagtctttttcctggcggcatatgatctccgacagggccaggaagctctggcaaggttacaagcagcccttgcagagcgccgcagggggctgcaacctaagaaaaggtttgcattcaagaccaggggtaaggacgccgccagctcaaccaaggtggatgcagctcctgggattcccccagctgtggagtccatccaggattctccgttgcccaaaaaggcggaaggtgatcttggaccaagctgggtgtgtggtttttccaatctggaatctcaagtcctcgagaagagagcatccgagcttcatcagagagatgtgctgttaactgaactctccaactgtaccgtgcgattgtacgggaatcccaacacattaaggctgacaaaggcgcactcatgcaagcttctctgcggccccgtctccacaagcgtttttttggaggattgtagtgattgtgtactcgccgtggcgtgtcagcaattaagaattcactccaccaaggataccagaatttttctgcaggtgactagtcgtgctatagtcgaggactgcagcggtatccagtttgctccgtatacgtggagctacccggaaatcgacaaagatttcgaaagtagcggccttgatcggtcaaaaaataactggaatgatgttgacgacttcaattggcttgcaagagacatggcgtcgccaaattggtctatcttgcctgaggaggagagaaatattcagtgggactag

SEQ ID NO: 22852 - DNA, 747 bp, synthetic construct
  source 1..747: mol_type = other DNA; note = Synthetic coding sequence
atgacccccaagggccccgccatgtgcagcatgcccctgaccagcgctgactgtttttctaatgatatccacaagctggacactagcactatgacgtggactcttatctgcactaaagggagtccagcacgctggagagatttccacagcgccacaatgctgggatcacacatgtatgtcttcggcggaagggcagatagatttggcccatttcacagcaacaacgaaatctactgtaatagaatccgagtgttcgatacacgcacagaagcatggctggactgtcccccaactccggtgctgccagagggaaggcgatcccacagtgcgttcggctataacggcgaactttacatcttcggaggttataatgctcgtctgaacagacattttcacgatttgtggaagtttaaccccgtttcttttacatggaaaaagatcgagccaaaggggaaagggccctgcccgcggcggcgccagtgttgctgcatcgtaggcgacaaaatcgtgcttttcgggggaacatccccctctccggaggaagggctcggcgacgagttcgatctgatagaccacagcgacttgcacatattagacttttccccttcccttaaaactttgtgtaaattggctgtcatccagtataacctggaccagtcctgtttgccccacgatattaggtgggagctgaatgccatgacaacgaactctaacatctctcggcctatcgtgtcatctcatgggtag

SEQ ID NO: 22853 - DNA, 1401 bp, synthetic construct
  source 1..1401: mol_type = other DNA; note = Synthetic coding sequence
atggagtacgagagctactacttcgtgaagttccagaagtaccccaagattgtaaagaagagctctgacaccgctgaaaataacttgcctcagcggtcacgggggaagacaagacgcatgatgaatgactcttgccaaaacctgcccaaaattaatcagcaaaggccgcgttcgaagactactgccggaaaaacaggcgacaccaaatctttgaacaaagaacaccccaaccaagaagtcgttgacaacaccaggctggaatccgccaatttcgggcttcatatcagccgtattagaaaagacagcggagaggaaaacgctcacccccggaggggtcaaatcatcgatttccagggccttcttacagacgcaattaagggagccaccagcgaactggcgctcaacacatttgaccacaacccagacccatctgaaaggttgttaaagcccctgagcgcctttatcggcatgaactccgaaatgcgtgagctggccgctgttgtctctagagacatctaccttcataatccaaacattaagtggaatgatatcatcgggcttgatgcggccaaacagctggtgaaagaagctgttgtctatcccatacgatacccccagcttttcacgggaattctgtccccctggaaaggcctgttgctgtatggcccaccaggcacggggaagactctgcttgcaaaggctgttgccaccgagtgcaagacaactttcttcaacatctccgcctctacaatagtttcgaagtggcgaggggactcggaaaaactggtccgggtcctgtttgaactggctagatatcatgccccatctacaatatttttggacgagttggaatcagtgatgagtcaacggggcaccgcatccggcggagagcacgaaggaagcctccgtatgaagacagagttgttggtgcagatggatgggctggcccgatctgaggacctggtttttgttttggccgcatccaacctgccatgggagttagactgtgctatgctgcgccgcctggagaagaggattttagttgacctgccgtcacgggaggctcgtcaggctatgatctatcattggttgccgcccgtttctaagagtcgggcgctcgagctacataccgagttggagtactccgtgctcagtcaggagaccgaggggtattctggatcagacatcaaactggtatgccgggaggcagccatgcgcccggttcggaaaatttttgatgcactggaaaatcatcaatctgagagcagcgaccttccacgcatccagctcgatatcgtcactaccgccgacttcctcgatgtgctgactcataccaaaccatccgcaaagaacctcgcccaacgatattccgactggcagcgggagtttgagtctgtttag

SEQ ID NO: 22854 - DNA, 6402 bp, synthetic construct
  source 1..6402: mol_type = other DNA; note = Synthetic coding sequence
atggacgaggtggagcaggaccagcacgaggcccggctgaaggagctcttcgatagtttcgacacaaccggaaccgggtccctcggccaggaagaactcactgacctttgccatatgctgtctttggaggaggtagctccagtcctgcagcagaccttgctgcaggacaatctactaggaagagtacacttcgaccaattcaaagaggcactgatcctgattttgtctcgcacgctgtccaatgaggagcactttcaagagcccgattgtagcctggaagcgcagcccaagtatgtgaggggcggcaaaagatatggaaggcgatcactgcccgagtttcaggagtcagtcgaagaattccctgaggtgaccgtgattgagccactagatgaggaggcgagaccctcccatatcccagctggtgattgctccgaacattggaagacccagcggagcgaggagtacgaagcggagggccaactcagattctggaatcccgacgacttgaatgcttcacagtctgggtccagccctccccaggattggatcgaagagaagctgcaggaagtgtgtgaagatctgggtattacaagagatgggcatcttaaccggaagaagttggttagtatttgtgagcagtacgggctgcagaatgtggacggagagatgctcgaagaggttttccacaacctcgatccagatggcacaatgtcggtggaggactttttttatgggttgttcaaaaacggtaaaagccttacaccctcagccagcactccgtacaggcagttaaaaaggcacctgagcatgcagtcattcgacgaatcaggccgccggacaacaaccagcagcgccatgacctcaaccattggtttccgagtcttctcctgcctcgacgacggaatgggccacgccagcgttgagcgtatactcgatacctggcaggaggagggtatcgagaacagtcaggagattctcaaggctctcgactttagtctcgatgggaatatcaacctcacggaactcactcttgctttggagaacgagctgctcgtgaccaaaaacagtattcatcaggctgctttagcatcctttaaggctgaaatccgacacctgctggaacgtgtggatcaggtcgtcagggagaaagagaagctgcggtctgacctggacaaggccgaaaaactaaaatccttaatggcgtctgaggtggatgaccatcatgccgccatagaacggagaaatgagtacaacctgcgcaagctggacgaggaatacaaggaaaggatcgctgcactgaaaaacgagctcaggaaagaacgggagcagattttgcaacaagcaggcaagcaacggctcgagcttgagcaggagatcgaaaaggctaagactgaggagaattatattcgtgaccgcttggctcttagcttaaaagagaactctcgtttggaaaacgaactgctggagaacgcagaaaaactcgccgagtacgagaacttgactaacaaacttcagcgtaacctcgaaaacgttctggcagaaaaattcggagatctggaccctagctccgctgagttctttctgcaggaggaaaggctgacccagatgcgcaatgagtatgagcgccagtgccgggtactacaggaccaggtggacgaacttcagagtgagctggaagagtaccgcgcccagggtcgagtcttgcgattgccactcaagaattcaccgagcgaggaggtggaagcaaactcaggcgggattgaaccagagcacgggctgggcagcgaggagtgtaaccctctaaacatgtcgattgaagctgagcttgtcatcgaacagatgaaagagcaacatcatcgtgatatatgttgtcttcggttagagcttgaggacaaggtgaggcattacgagaaacaattggacgaaactgtggtatcctgtaaaaaagcccaggagaatatgaaacaacggcatgagaatgagacccacaccctagaaaagcagatcagcgatttgaagaacgagatcgctgagctgcagggccaggccgcagtccttaaagaggcccaccatgaggcaacttgcagacatgaagaagagaaaaagcagctccaggtgaagcttgaagaggaaaaaacacacttacaggagaagcttaggcttcagcacgagatggaacttaaagcccgattaacgcaggcacaggcatccttcgaaagagaacgagagggactccaatcttccgcctggacagaggagaaagtacgcgggctgacccaggaattggagcagttccatcaggagcagctgactagcctcgtcgaaaagcacacgctggagaaggaagagctgcggaaggagctgctggaaaagcatcagcgtgagctgcaggaagggagagagaaaatggagactgaatgtaaccgtcggactagccagattgaagcccaatttcaatccgattgccagaaagttactgagcggtgcgagtcagccctacagtctctagaaggaaggtatcgacaggaactgaaggaccttcaagaacagcaaagggaggaaaaaagccagtgggaatttgagaaggatgagttaactcaggaatgtgctgaagctcaagagcttctcaaagaaaccctgaagcgggaaaagacaacgagcttagtactgactcaggaacgggagatgttagagaaaacctacaaagagcatctgaattccatggttgtggaacgacagcagctgcttcaggatctcgaagatctgcgcaatgttagcgaaacccagcagtctttattgagcgaccagatcctcgaactgaaatcctcacacaagcgcgagttgagagaacgcgaggaagtgttgtgccaggccggggccagcgagcagcttgcctcgcagcggctcgaacgacttgagatggagcatgaccaggagcggcaggagatgatgtcaaagctcttagccatggaaaacatacacaaggccacttgcgagactgctgaccgcgaacgagcagaaatgtctacggaaatatcaaggctccaatctaagattaaggagatgcaacaggctacaagtcccttatcaatgctgcaatctgggtgccaggtcattggcgaggaggaggttgagggggatggggcactcagtctgctgcaacagggggagcagctcctggaagagaacggagatgtgctgctcagtctacagcgagcacacgagcaggctgtgaaagaaaatgttaagatggccactgagatttcacggttgcagcagagattgcagaagcttgagccaggattggtgatgtcctcttgcctcgatgagccagccaccgagtttttcggaaacactgcagagcagactgaacaattcctgcagcagaacaggactaaacaggtggagggggtaacccggcgacacgtgctgtcagacctcgaggacgacgaagtaagggatttgggtagcacaggaaccagctctgtgcagcgccaggaagtaaagattgaggagagcgaggcctcagtggagggtttctccgagctggagaatagtgaagagacaagaacagagagctgggaacttaaaaaccagatctcccagcttcaagagcaacttatgatgctctgcgccgactgtgacagggcctccgagaagaaacaggatttgctgtttgatgtgagcgtattgaaaaaaaagctgaagatgctggagcgtattccagaagcttcccctaaatataagctgctgtacgaggatgtgtctcgcgaaaatgactgccttcaggaggaactgaggatgatggagacacggtacgacgaggcattggagaacaataaagagctgacggccgaagtgtttaggttacaggacgagttgaagaaaatggaggaggtcacagagacattcctgtcgttagaaaaaagttatgacgaggtgaaaatagaaaacgagggtctcaacgtgcttgtgctgcgcctgcaaggcaagatagagaaattgcaagaaagtgtggtgcaacgatgtgactgctgtctctgggaagcctctctggaaaatctggagattgaacccgacggtaacattctgcagctgaaccagactctggaggagtgcgtcccgcgagtgagaagtgtacaccacgtgatcgaggaatgtaagcaagagaatcaatacctggaggggaatacccagctcctggaaaaagtcaaggcgcatgagatcgcctggctgcacggcacaatccagacccatcaggagaggccgagagtgcagaatcaagtgatattggaggagaacactacccttttgggcttccaggacaagcacttccagcaccaggctaccatcgccgaattagaactggaaaagactaaattacaggaactgacacgcaaactgaaggaaagggtgacaatcctggtgaagcagaaagacgtactttctcacggggagaaagaagaagagctgaaagcgatgatgcatgacctgcagataacctgctctgagatgcagcaaaaagttgagctgctcagatatgaaagcgagaaactacagcaggaaaactcaattttgcgcaacgagatcacaactcttaatgaagaggactcaatctccaacctgaagctggggacactgaacgggtctcaggaggaaatgtggcagaagacagaaaccgtgaagcaggagaatgccgccgtgcagaaaatggttgagaacctgaaaaagcagattagtgaactgaagatcaaaaatcagcagctggatctggaaaacactgagctgtctcagaagaactctcagaaccaggagaaactgcaagagttaaaccagagactgactgaaatgttgtgtcaaaaagaaaaggagcctggaaacagcgccctggaagagcgcgagcaggagaaatttaacctgaaagaagagcttgagcgctgtaaggtacaaagttcaacgcttgtgtcctccctggaggccgagctctcagaagtcaagatccagactcatatagtgcagcaagagaatcatctcctgaaggacgagctggagaagatgaagcagctacaccggtgtccggacctgagcgatttccagcagaagatttcctccgtcctgagctacaatgagaaattactcaaagagaaggaggcactgagcgaagagcttaactcgtgcgtggataagttggccaagtccagtctgctggagcatcggattgccactatgaagcaggagcagaagtcttgggagcatcagagcgcttccttaaagagccagctagtggcatcacaggaaaaggtgcagaacctggaggacacagttcagaacgtgaatctgcagatgtctcggatgaagtctgatctcagagttactcagcaggaaaaggaggccctgaagcaggaagtaatgtcccttcacaagcagctccaaaatgcaggaggcaaaagctgggctccggaaatcgccacccatccgtcaggtctacacaaccagcagaaaaggcttagttgggataagttagaccatctgatgaatgaagaacaacagctgttatggcaagaaaatgaacgcctgcaaaccatggttcagaatactaaggccgagcttacacacagccgggaaaaggtccggcagctcgaaagtaacctgttgccaaaacaccagaagcatctaaaccccagtggaaccatgaatcctaccgagcaagagaaactgagcttgaagcgcgagtgtgaccagtttcaaaaagagcaatcccctgcgaaccgaaaagtgagccagatgaatagcctggagcaggaattagagacaatccacttagaaaacgagggactcaaaaaaaagcaagtaaagctggatgaacaactgatggaaatgcaacacttgcgttctactgctactccgagcccttcacctcacgcttgggacctccagctcctgcagcagcaggcatgtcccatggtaccccgtgagcaatttcttcagctgcaacggcaattgttgcaggcagaacgaattaaccagcaccttcaggaagagctggaaaatcgcacaagtgaaacaaatactccacagggcaatcaggaacagcttgtgactgtcatggaagaaagaatgattgaggtggagcagaagttgaaactagttaaacgcctgctccaagagaaggtgaatcagctgaaagagcagctctgtaaaaacacaaaggcagatgctatggtgaaagatttgtacgtagaaaatgcacagctgttaaaggcactcgaggttacagagcagagacagaagacggctgagaagaaaaattacttgcttgaagagaaaatcgcatccttgtctaatatagtccgcaaccttacacccgcaccgctgacttccacgcctccgctgagatcctag

SEQ ID NO: 22855 - DNA, 1713 bp, synthetic construct
  source 1..1713: mol_type = other DNA; note = Synthetic coding sequence
atggccggcggcgcccgggaggtgctgaccctgcagctgggccactttgcgggcttcgttggggcacattggtggaatcagcaggacgcagcattgggacgtgccactgattccaaagaaccgcccggcgaactatgccccgacgtcctttatcggactggccgtacactgcatggccaggaaacctatacacctagattaattctcatggatctcaaaggctccctgtcatctttaaaagaggaaggcgggctataccgagataagcagctagacgcagctattgcttggcaggggaagctcacaacccacaaagaagagttgtaccccaagaacccctatctgcaggatttcctgagcgcggaaggcgttctctcctcagatggggtgtggcgggtgaaatctatccccaacggtaaaggctcaagccccctgcctacagccactaccccgaagccgttaatccctaccgaagcaagtatccgcgtgtggtctgactttctgcgagttcacttgcatcccagaagtatctgtatgatccagaagtacaaccacgacggggaagccgggcggctggaagcattcggccaaggcgagtcagtgttgaaggaaccgaagtaccaggaggaacttgaagacaggctacatttttacgttgaagagtgtgactatctgcaaggatttcagattctgtgtgatctgcacgacggattcagcggggtgggtgcaaaggcggcggagcttcttcaagacgagtactcgggccgcggtatcattacttgggggttgctgccagggccctatcaccgaggcgaagcccaaagaaacatttacagattactcaatacggccttcgggctggtacatctgacggctcatagtagcctggtgtgtcccctgagtcttgggggctctctggggctgagaccagagccaccagtgtcttttccttacttgcattacgacgctactctccctttccattgttcagctattctggcaacagctttggataccgtgacagtgccatataggctgtgctcttcccctgtgagtatggtacacttggccgatatgttatcattttgtgggaagaaggtagttacagcaggcgccatcattccattcccacttgcccccggccagtccttgcccgatagtctcatgcagtttggcggggccacgccttggacacctctgtctgcctgtggcgagccaagtggaacccggtgctttgcccagagcgtggtgttacgtgggatcgaccgggcctgtcatacatcgcagttgactcctggcactcctccaccatccgctctacatgcatgcacaaccggcgaggaaattctggcacagtacttacagcagcagcagcctggggtaatgagctcttcccatttactgcttacaccatgtagggtggctcctccttatccccatctcttcagtagctgtagccccccagggatggtgctagacggatcacccaaaggggccgcagttgagagcatcccggtttttggggcattatgttcctcgagcagcttacatcaaactctcgaggccctggcccgggatctaacgaaactggatctacgacggtgggcctctttcatggatgccggggtggagcatgatgatgtggctgaactgcttcaggagctccagagtctcgcacagtgctatcagggaggcgactccttagtggattag

SEQ ID NO: 22856 - DNA, 1791 bp, synthetic construct
  source 1..1791: mol_type = other DNA; note = Synthetic coding sequence
atgaaccggacctggccccggcggatctggggcagcagccaggacgaagcagaactgattagagaggacatccagggagctctccacaactatcgctctggacgaggggagagacgagcagctgccctcagagccacccaggaagagcttcagagggatcgctcaccagctgccgaaacaccacctctgcaacgacgaccatctgtgcgcgcagtgatctcaaccgttgaacgaggcgccggacgcggtcgaccccaagcgaagcccatccccgaggccgaggaggctcaaagaccagagccggtcggtacctcctcaaacgcagattctgcatccccagacctgggccccagaggccccgacttggcagttctgcaagccgagagagaggtcgacatattgaaccacgtcttcgacgacgtcgagtcttttgtctcccgactccagaaatctgccgaagcagctcgggtcttggaacacagggagcggggacggcggagtagacggcgcgccgccggggaagggttgcttaccctgcgggctaagccgcctagcgaggcggaatataccgacgtcctgcagaaaattaaatacgcgttctcccttctggcgaggcttcgaggaaacattgccgacccatcaagtcccgaactcctccacttcctctttgggccgctccagatgattgtcaatacctctggcggacccgagttcgcatcctcggtccgacgcccccatttgacttccgatgccgttgctctcctcagagataacgtcaccccaagagaaaacgagctctggacatccttgggggattcctggaccaggcccggactagagctctcacctgaggagggacctccctataggcccgagttcttctcgggctgggaacctcctgtgaccgacccacagagcagggcatgggaggaccccgtcgaaaagcaactgcagcacgagcgcaggaggcggcagcagagcgcaccacaagtcgccgttaacgggcatcgggacctggaaccggagagcgagccccagcttgagagcgagacggccggcaagtgggtgctctgcaattatgattttcaggccaggaatagtagtgagctgagcgtgaagcagcgagatgtactcgaggtcctagatgattccagaaagtggtggaaagtcagggaccccgctggacaagagggctacgtaccatacaatattctgacaccatatcctgggccccgcctgcaccacagccagtctcctgccaggtcattgaactcaactccaccccccccacccgctcccgcccctgctcctccacccgctctggccaggccaaggtgggatcggccacggtgggatagctgtgacagtttgaacggcctggacccctctgagaaggaaaaattttcccaaatgctgatcgtaaacgaagaactgcaggcgaggctggcccagggacggagtggtccctcgagggcagtcccagggcccagggccccggagccacagttgtcccctgggtccgatgctagtgaagtaagagcctggctccaagctaaaggcttttcctcaggaaccgtggatgccctaggagtgctcacgggggcccagctgttttctctgcaaaaagaggaactgcgcgcggttagccccgaagaaggcgctcgggtgtattctcaggttaccgtgcagcggtcactcctggaggataaggagaaagtgagtgagctggaggccgtcatggagaaacagaaaaaaaaggttgaaggtgaagtggaaatggaagtcatttag

SEQ ID NO: 22857 - DNA, 1950 bp, synthetic construct
  source 1..1950: mol_type = other DNA; note = Synthetic coding sequence
atgagcagcttcggcgccggcaagaccaaggaggtgatcttcagcgtggaggatggatctgtcaagatgtttcttaggggacgacctgttcctatgatgatccctgacgagctcgcacccacatatagcctcgatactcggtctgaactcccttcctgccgattgaagctagagtgggtttacggctaccgcggtcgcgactgtcgagccaacctctaccttttacccaccggagagatcgtgtactttgttgcctcggtcgccgttttgtatagtgtggaagagcaaaggcagagacactacttaggtcataacgatgacattaaatgtctcgctatccaccctgacatggttaccatcgccaccggccaagtggcagggacaaccaaggagggtaagcccttgcctccacacgtaagaatctgggactcggttagtctctccacactgcatgtgctgggcctcggagtttttgaccgcgcggtgtgttgcgtgggattttcaaagagcaatggcggcaatctcctgtgcgccgtggacgagtctaacgatcacatgctgtcagtatgggactgggccaaagaaacaaaagtggtggatgtgaaatgtagcaatgaggccgttctggttgccactttccacccaactgatcctacagtcctgataacttgtggcaagtcacatatatatttctggacactggagggtggcagcctctccaaaagacagggcctttttgaaaagcatgaaaagcccaagtacgtcctctgcgtgacattccttgagggtggggatgtcgtgactggcgattctggtggcaacctttatgtgtggggtaagggaggaaatcgcatcacacaggccgtgctgggtgcccacgacggaggtgtgttcggcttgtgcgccctgcgggatggaacattggtgagcggaggcgggcgcgatcgtcgtgtggtactttggggttctgactatagtaagttgcaggaggtcgaagtgcccgaggattttggccccgttcggacagtggctgaaggccatggcgacacgctctatgtgggcaccacacgcaactctattctccaggggagtgtacacactgggtttagcctgctggtccaggggcacgtggaggaattgtggggcctggctacccacccatctagagcccagttcgtgacatgcgggcaggacaagctggtgcatctttggagctctgacagtcatcagccactgtggagccggattatcgaggaccccgcaagatccgcaggctttcatcctagcggtagtgtcctggccgtaggcaccgtaacgggtcggtggttgctgctcgacacagagacccatgacctggtcgcaatccacaccgacggaaacgagcagatttccgtagtcagcttctcccctgacggtgcttatttggcggtcggtagtcatgacaatctggtgtacgtctatactgttgatcagggggggcggaaagtctcccgcctcggcaaatgtagtggtcattcttcattcattacacacctagactgggcacaggatagcagctgcttcgttacgaacagtggcgactacgaaatactttattgggatccagccacatgtaagcaaataacatcagcagacgctgttcggaatatggaatgggccacagctacatgtgttctgggttttggcgtgtttggcatatggagtgagggcgccgatggaacagatattaacgccgtggcacgctcgcacgacggtaaattactagcctctgctgacgacttcggtaaagtccatctctttagctacccatgctgccagccacgggcactgtcccataagtatggcggtcattcctcacacgttactaacgttgcttttctatgggacgattccatggcacttacaaccggcggtaaagatacatctgtccttcagtggagagtggtgtag

SEQ ID NO: 22858 - DNA, 792 bp, synthetic construct
  source 1..792: mol_type = other DNA; note = Synthetic coding sequence
atggccggcctggaggtgctgttcgccagcgccgcccccgccatcacctgtagacaagacgccttagtttgctttctccactgggaggtggtaacacacggctacttcgggttaggggtgggtgaccagcccggaccaaatgataagaagagcgagctgctgccagcaggttggaataacaataaggatctgtacgtgctcaggtatgagtacaaggacggcagcagaaaactgctggtgaaggccattactgttgaatcctctatgatccttaatgtgctggaatacggttcacagcaagtcgccgacctgaccttaaacttagacgattatatcgacgctgagcatctaggagattttcacaggacatataaaaattccgaagaactgaggtccagaatcgtgtctggtatcatcacccctatccacgagcagtgggagaaagcaaatgtatcctccccacaccgcgaatttcccccagcaaccgcccgcgaagtggatcctctgcgaattcctccccaccaccctcacaccagccggcagccaccctggtgcgatcccctgggtccattcgtagtcgggggcgaagatctggatccctttggacctcggagagggggaatgatcgtggaccccctgaggagcgggttccccagagcgcttatcgacccttcttcaggactgccaaatcgcctgccccccggtgcagtgccacccggcgcccgattcgatccattcggccctatcgggacttctccacctggaccgagacctgacagaagaggacagtag

SEQ ID NO: 22859 - DNA, 273 bp, synthetic construct
  source 1..273: mol_type = other DNA; note = Synthetic coding sequence
atggacaacatgagcccccggctgcgggccttcctgagcgagcccatcggggagaaagacgtgtgctgggtggatggcataagccacgagctggctatcaacctcgtcaccaaagggatcaacaaggcatacatacttttagggcaattcctccttatgcataaaaatgaggctgagtttcaacgctggttaatctgttgcttcggagcgaccgagtgtgaggcacagcaaacctcgcactgtttaaaagaatggtgcgcatgtttcttatag

SEQ ID NO: 22860 - DNA, 888 bp, synthetic construct
  source 1..888: mol_type = other DNA; note = Synthetic coding sequence
atgcccgtgcacaccctgagccccggcgcccccagcgcccccgcccttccttgccgtctgcgcactcgcgtgccgggctatttactgcgcggtcccgctgatggaggcgctcgaaagccatccgctgtggaacggctggaggcggacaaggccaagtacgtcaagtccctgcatgttgctaacacccgccaggagcccgtgcaacctttgctttctaaacaacctctttttagtcctgagacccgccggaccgtgctgactccgtcacgcagagccttacctgggccatgccgaagaccccagttggaccttgatatcctgagttccctgatagatctttgtgactctcccgtgtctccggcagaagcctctaggacacccggccgggctgaaggggctggacgccctccccccgccacccctccaaggcctcctcctagcactagtgcagtcaggagagtcgacgtccgaccgctgcccgcctccccggcacgtccctgcccatctcccggacccgccgccgcgagttcccccgcccggccccctggtctccagaggtccaaaagtgacctttcggaacgcttttcgcgggctgccgctgatctcgaacggttctttaacttctgtggacttgaccccgaggaggcccggggcctcggcgtcgcgcatctcgctagagcttctagcgatattgtgtcgcttgccggtccatcggcagggcctggcagctcagaaggtggctgcagtagaagaagttctgttacagttgaggaaagagctcgggagagggttccctacggagtatcggtggtagaaaggaatgcccgtgtgatcaagtggctctatgggctgaggcaagctcgagaatcccctgccgccgaggggtag

SEQ ID NO: 22861 - DNA, 582 bp, synthetic construct
  source 1..582: mol_type = other DNA; note = Synthetic coding sequence
atgcccaccaccagccggcccgccctggacgtgaagggcggcacctctcccgcaaaagaagatgccaaccaggagatgtcgtccgtggcatatagtaatctggccgtgaaagacagaaaagccgttgccattcttcactaccccggcgtagccagcaacggcaccaaagcgagcggtgcccctacgagcagctccggcagcccaatcggttcgcctaccaccacgcccccgacaaagcctccaagctttaacctgcacccggcgcctcaccttttggcatctatgcatttgcagaagctgaatagccaatatcaaggaatggcagccgccacccccggccagccaggcgaggctgggcctttacagaattgggacttcggagcacaagcgggcggggccgagtcactgtccccatctgctggtgcacagagtcctgccattattgattccgacccggtggatgaagaggtactgatgagtctggtagtagagctgggccttgatagagcaaatgaactccctgagctttggttgggacaaaatgaattcgacttcacagcggatttcccctcgtcctgctag

SEQ ID NO: 22862 - DNA, 1077 bp, synthetic construct
  source 1..1077: mol_type = other DNA; note = Synthetic coding sequence
atggccgccgtgctgaagcccgtgctgctgggcctgcgggacgcccctgttcatggctcacccactggtcccggcgcctggactgcttctaagctgggagggataccagatgccctgcccacggttgccgcacctcggcctgtctgtcaaaggtgcgggcagcccctggccctggtcgtgcaggtctactgcccactcgagggttctccctttcatcggctcttacacgtgttcgcctgtgcttgtccaggttgcagcacgggaggtgctcgcagttggaaggtcttccgttctcagtgtctgcaagtgcccgagagagaggcccaagatgcccagaagcaaggtaactctcttgccgcagaagactggtgcgagggagctgatgattgggggagcgacactgaagaggggccatccccgcaattcactctggactttggaaacgacgcctctagtgccaaagacgtggactggaccgcccgactgcaggatcttcggttgcaagacgccgttctcggtgctgctcatcccgtgcctcccgggctacctttgttcttaccctattatatctgtgtggccgatgaggacgattaccgcgactttgtcaacctggatcacgctcactccctgttgcgggactaccagcagcgcgagggcatagccatggaccagctgctgtcgcagtcactccctaacgacggcgatgaaaagtatgaaaaaacaatcataaaatcaggcgatcaaaccttctacaagtttatgaaaagaatcgcagcttgccaggaacagatcttgcgatacagctggtctggcgagccccttttcctcacatgtcccacctcagaggtgacggagttaccggcctgttcgcagtgtggcggccagaggattttcgagttccaactcatgcctgccctagtctcaatgttgaagagtgcaaacctggggttgtccgttgagtttggaaccatcttggtttatacatgtgagaaaagttgctggcccccaaaccaccaaacccctatggaggagttttgtatcatccaggaggaccctgacgaactgttatttaaatag

SEQ ID NO: 22863 - DNA, 1779 bp, synthetic construct
  source 1..1779: mol_type = other DNA; note = Synthetic coding sequence
atggccagcgtggtggtgaagaccatctggcagagcaaggagatccacgaagctggagatacccccaccggagtggagtcctgctctcagttggtgcctgaggcaccgcggcgcgtgacttcaagggccaaaggaatccccaagaaaaagaaagctgtaagcttccacggagtcgagccccagatgagtcaccagccgatgcactggtgtctgaatcttaaaaggtctagtgcctgcaccaacgtgagccttctgaacctcgccgctatggaacctactgatagcaccggaacagatagtaccgtagaggacctctccgggcagctgaccttggctggaccaccagcttccccgaccttgccatgggaccctgacgatgccgacattacagaaattctgtcaggcgtgaattccggtctggtgcgagcaaaagattccattacaagtctcaaagagaaaaccaatcgcgtgaatcagcatgtccaaagtctgcagagtgagtgctcagttttgagcgaaaacttggaaaggagacgtcaggaagccgaggaactggaaggctactgtatccagctcaaggaaaactgctggaaagtgacgcgatctgtagaagatgctgaaattaagaccaatgtcttgaagcaaaattctgctctcctggaagaaaaattgaggtacttacagcagcagttacaagacgagaccccaaggaggcaagaggctgaattacaagagcccgaggagaaacaagagcctgaagaaaagcaggaaccagaggagaagcagaagcctgaggctggcctctcatggaattcattgggccccgctgccacctctcaggggtgccccggcccgcccggtagccccgacaaacctagccgcccccacggcttagttcccgctggttggggaatgggcccaagggccggcgagggaccctacgtctctgagcaagaactgcagaagctgtttaccggcattgaggagctgaggcgcgaggtcagtagtcttaccgcgcgttggcaccaagaggaaggtgcagtgcaggaggcactgcgactgctgggcggactcggagggcgcgtagatgggtttctcggacaatgggagcgtgcacagagagagcaggcacagaccgcgagggatctgcaagaactcaggggaagggcagatgaattatgtactatggtggagaggtccgcagtgagcgtggcatccctccgctccgaattggaagggttgggacctctgaaacccatccttgaggagtttgggcgccagttccagaacagtcgtagggggcctgacctgagtatgaatctcgaccgatcccaccagggcaattgcgcccggtgtgcttctcaaggtagccagctttctaccgagagcctccagcaacttttagatagagcccttacctccctggtcgatgaagtcaaacagagaggcctcacgcctgcatgtcccagctgtcagcgcctgcacaagaaaatcttggaactcgaacgtcaggcgctggcgaagcacgtgagggccgaggctctgtcatccaccctgcgacttgcgcaggacgaagccctgcgtgctaaaaatttactgctcaccgacaagatgaaacccgaagaaaaaatggccacgcttgaccacctgcatctcaagatgtgtagcctgcatgatcacctgtctaacctcccgctagagggaagtacggggaccatgggtggggggtcgtcagccggcacgccccccaaacaggggggctccgctcccgagcaatag

SEQ ID NO: 22864 - DNA, 2541 bp, synthetic construct
  source 1..2541: mol_type = other DNA; note = Synthetic coding sequence
atgagcagcagccacttcgccagccggcaccggaaggacatcagcactgagatgattcggacgaaaatcgctcaccgtaaatcactttctcagaaagagaataggcacaaagagtatgaacggaataggcactttggtttgaaggatgtcaacatccctacgctggagggccggattttggtggagctcgacgagacttctcaggggcttgtgccggagaaaacaaacgtgaaacctcgtgctatgaagacaatcctgggggatcaacggaaacaaatgctgcagaagtataaggaagagaagcagctccagaagttgaaggagcaaagagaaaaagctaagaggggcatttttaaagttggccgttatcgtcctgacatgccctgtttcctactgagcaaccaaaacgctgttaaagcggaacctaaaaaggcgatcccatcctctgtacgcatcacccgcagcaaggctaaagaccagatggagcagactaaaattgacaatgaaagcgatgtgagggccatccgcccagggccacgtcagaccagcgaaaagaaggtgtccgacaaggagaagaaagtggtccagcccgtcatgcctacctccctcaggatgactcggtcggctacccaggctgccaaacaagttccccgaaccgtgtccagcacgacggctcgcaagccagtgacccgagcagccaatgaaaatgaacctgaaggcaaggtgccctcgaaggggcggcccgctaaaaacgtggagactaagcccgataagggcatctcctgtaaggttgactccgaagaaaataccctcaactcccagaccaacgcaacttcagggatgaaccccgatggagtgctgtcaaagatggagaatctgcccgagattaacacagctaagatcaagggaaaaaatagttttgccccaaaagatttcatgtttcagcctctggacgggctgaagacttatcaggttactcctatgaccccgcggtcagcgaatgcttttctaacacccagctacacatggactccattgaagaccgaagtggacgaaagtcaggctactaaggagatccttgcccagaaatgtaaaacctattccaccaaaacaattcagcaggatagcaataaacttccatgtcccctcggccccctaaccgtctggcatgaggagcacgttctgaacaagaatgaggctactacaaaaaatctgaatgggctgcctatcaaagaggtgcccagtctagagcggaatgagggccgtattgcccagccccatcatggcgttccctatttcagaaacatcctgcaatcagagacagagaagctcaccagtcattgtttcgagtgggatcggaagctcgaactggacattccagacgatgcaaaagacctcatcagaaccgctgtaggtcaaacccgtctgttaatgaaggaacgtttcaagcagtttgagggcctagtagacgactgcgagtataagcgtggcattaaggaaactacctgtacagacctagacggcttttgggacatggtttcattccagattgaggacgtgatccataaatttaacaaccttattaaattagaagagagcggctggcaagtgaacaacaacatgaatcataatatgaacaagaacgtgtttagaaagaaagttgtgagcggtatcgcctcgaaacctaaacaggatgatgccggtcgcatcgccgccagaaataggttagcagctataaagaacgccatgcgtgagaggatccgccaagaagagtgcgccgaaactgcagtttcagtgatacccaaagaggtggataaaattgtgtttgacgccggattctttcgggtggagagccccgtgaaattattttcagggctgagcgtctcatctgaggggccatcgcagagattggggacgcccaagtcagtgaataaagcagtctcacagtcaaggaatgagatgggcatccctcagcagacgacgagccctgagaatgcaggtccacaaaatacgaaaagcgaacatgtgaaaaaaacactgtttctatccatccccgagtcaagaagttcaatcgaggatgcccagtgtcctggcttgcctgacctgattgaagagaaccacgtggtgaacaaaacagacctgaaggtggattgtctgagcagcgagaggatgtccttaccattgttagctggaggcgtggccgatgatataaacactaataagaaggagggcatcagcgacgttgtggaaggtatggagctgaacagttctataacttcccaggatgtactgatgtcttctcccgagaagaataccgccagtcagaatagcatcctggaggagggggagaccaagatctctcaatctgagctgttcgacaataagagtctgactacggagtgtcacctcctggattcaccggggctaaactgctccaatccgttcacacagctggagagacggcaccaggagcatgcaaggcacatctcgtttggcggaaatctgatcacatttagcccccttcagccgggggagttttag

SEQ ID NO: 22865 - DNA, 1128 bp, synthetic construct
  source 1..1128: mol_type = other DNA; note = Synthetic coding sequence
atggccagcgccccctggcccgagcgggtgccccggctgctggcccctaggttgccttcttatccacctcctcctcctaccgtgggcctgcggtctatggagcaggaggaaacttatctggagctatacctggatcagtgtgccgcccaggacgggctggcaccgccgagaagccccttattctcccccgtcgtgccgtacgatatgtatatactgaatgcttccaacccagataccgctttcaactctaatcccgaggtcaaagaaacaagtggagatttcagttctgtggacctctctttcctccctgatgaagtcactcaggagaataaagaccagccagtgatcagtaagcacgagacggaggaaaattcggagtctcagtcgccacaatctcggctgcccagcccttcagaacaagacgttggactgggcttaaactctagctccctgtccaattcccatagtcagctccacccaggagacacagattccgttcagcctagccccgaaaaacccaattcagatagcctttcactggcctcgattacgcctatgacaccaatgacccccatctcagaatgttgtggtatcgttccacagctccagaacatcgtcagtacagtaaaccttgcctgcaagctggacctcaagaagatcgctttgcatgccaaaaatgccgagtataacccaaagcgcttcgctgcggtcatcatgagaatcagggaaccacgaacgacagcccttatatttagctcaggtaaaatggtgtgcacgggagcaaagagcgaggaacagtctcgcctcgcagcgcgcaagtacgcccgcgtagtgcagaaacttggcttcccagccaggtttctggattttaagattcagaacatggtgggctcctgtgatgtccgttttcctattcgactggaggggttagtgttaacacatcaacagttcagttcctacgagccagaactgtttccaggtctcatctatcggatggtgaagccccggattgtcttacttatctttgtatcaggcaaagtggtcctgaccggggctaaggaacgttccgagatatacgaggcttttgaaaacatctatcccatccttaaaggtttcaagaaagcatag

SEQ ID NO: 22866 - DNA, 633 bp, synthetic construct
  source 1..633: mol_type = other DNA; note = Synthetic coding sequence
atgcaggccgagggccagggcaccggcggcagcaccggcgacgccgacggcccgggaggaccaggaatacctgacggaccaggaggaaacgccggaggccctggagaagccggggcaactggtgggcgtggcccccggggggcgggggcggcgcgcgcgagcggtcctcgaggaggcgcccctaggggcccgcacgggggcgctgcatcagcacaggacgggcgctgcccatgcggagctaggagacccgattctagactacttcagctccacattacaatgccctttagctcccctatggaggctgagctggttcgacgcatcctgtcccgagacgccgcaccactgcctcgccctggagccgtgttgaaagattttacggtatccggaaatctgctctttatgagcgtcagggaccaggatcgcgagggtgcaggaaggatgagagtggtgggctggggcttgggctccgcgtctccagaaggccagaaggcacgtgatctgcggactccaaaacacaaggtgagcgaacagcgcccagggacgcccggacccccacctcctgagggagcccaaggagatggctgtcggggtgttgctttcaacgtcatgtttagtgctcctcacatctag

SEQ ID NO: 22867 - DNA, 582 bp, synthetic construct
  source 1..582: mol_type = other DNA; note = Synthetic coding sequence
atggtggtgctgcgggccggcaagaagaccttcctgccccccctgtgtcgtgccttcgcctgccgcgggtgtcagttggcacccgaacgaggcgccgagcgccgagatacagcaccatccggcgtcagccggttctgccccccccggaagtcctgccacgactggatcggaccgcccgataagtacagcaatctacgacctgtgcatttctatatccccgagaatgaaagccccctggaacagaagttaaggaagttgcggcaggagactcaggaatggaaccagcagttctgggccaaccaaaatctcaccttcagcaaagaaaaggaggaatttatccattcccggctcaagacgaagggcctcggactgcggaccgaaagcgggcagaaagccaccctgaacgccgaagagatggctgacttctataaggagttcttgagcaagaattttcagaagcacatgtattataaccgagattggtacaagaggaactttgccataaccttttttatgggaaaggtcgctctggaaagaatatggaataaactaaaacaaaaacagaaaaaacgttctaactag

SEQ ID NO: 22868 - DNA, 1383 bp, synthetic construct
  source 1..1383: mol_type = other DNA; note = Synthetic coding sequence
atggccaacgaccccctggagggcttccacgaggtgaacctggccagccccacctccccggatctcctgggcgtgtacgagtccggtactcaggagcagactacgtccccgtcggtcatctaccgtccccatccttcagcactttcctcagttcctatccaggctaacgctctggacgtcagcgaactgcctacacagcctgtatactctagtccgcggagattaaactgcgccgaaattagtagcataagcttccacgtgactgatcccgctccatgctcaacatctggcgtgacggccggacttacaaagctgacaacacgcaaagataattacaatgctgaaagggagttcctccagggcgctaccattaccgaggcttgcgacggaagcgatgatatattcggtttatctactgattctttatcacgcctgcggtccccatctgttttggaagtccgcgagaaagggtatgagaggctcaaggaggagttggcgaaggctcagagggagctgaaattgaaggatgaagagtgtgaacgcctcagtaaagtgagagatcagctgggtcaagaattggaggaactcacggccagcctttttgaagaggcacacaagatggtgagagaggccaacataaagcaagcaactgcagagaagcaattgaaggaggcgcaggggaagatcgatgttctccaagcagaggtggccgctctgaagactctggtgctgtcatcaagccccaccagccccacacaggaacctctgccgggcggcaaaactccgttcaaaaaaggccatacacgaaacaaatcaacatccagcgctatgagtggatctcaccaggatctgtctgtcatccagccaatcgtgaaggattgcaaggaagctgacttatctctgtataacgaattccgcctgtggaaagacgagcccacgatggatcgtacttgcccctttttagataaaatctaccaggaagatatctttccatgcttgaccttcagcaagtctgagttggcgtccgccgtcctggaggccgtggaaaacaatacgctctctattgagcccgtcggcctccagcccattcgctttgtaaaggcaagtgctgtggagtgcggaggaccaaagaagtgcgcgttaacaggccaatccaaatcttgcaaacatcggatcaagctgggagacagctctaattactactatatctcccccttctgtcgctaccgcatcaccagtgtttgcaatttctttacctatattcgctatatccagcagggtttagttaaacagcaggacgtcgaccaaatgttctgggaagtgatgcagctcaggaaagagatgtctttagccaagttaggatactttaaagaggagctctag

SEQ ID NO: 22869 - DNA, 981 bp, synthetic construct
  source 1..981: mol_type = other DNA; note = Synthetic coding sequence
atggccaccctggtggagctgcccgacagcgtgctgctggagatctttagctatcttccagtgagggatcggatcagaattagcagggtttgccatcggtggaaaaggcttgttgacgataggtggttgtggcggcatgtcgacctcactctctataccatgaggcctaaagtcatgtggcatctgctgagacgatatatggccagtcgcctgcactcccttcgaatgggcggataccttttttctgggagccaggccccccagctgtccccagctcttctccgagccctcggacagaagtgccccaacctcaagagactgtgcctacatgtggcagatctcagcatggttcccatcacctccctgccctctactttgcggaccctggaattgcactcgtgtgagatctccatggcttggctccacaaacagcaagaccccaccgtgttacctctgctcgagtgtatagtattagaccgggtcccagccttcagagatgaacatctgcagggcctgactaggttccgagcccttcgcagtctcgtcctcggcggtacataccgggtgacagagactggcttggacgcagggttacaggagctctcctatctccagcgactggaagttctgggttgtacgctttccgccgatagcacattgcttgcaatatcaaggcatcttcgcgacgttagaaagattcggctcacggtgagaggactgtcagctcctggattagccgtgctcgagggaatgccagcgctggaaagcctttgcttgcaaggccccttggtgacgcctgagatgccatctcctaccgaaattctgtcgtcctgcctgaccatgcctaaattaagggtcctggagttgcaagggctgggatgggaaggacaggaagctgaaaaaatcctgtgcaagggcctcccccattgcatggtcattgttcgggcatgccccaaggagtctatggactggtggatgtag

SEQ ID NO: 22870 - DNA, 3090 bp, synthetic construct
  source 1..3090: mol_type = other DNA; note = Synthetic coding sequence
atggccagcgaggccgtgaaggtggtggtgcggtgccggcccatgaaccagagagagcgggaactgcgctgccagccagtggttaccgtcgattgcgcacgtgcacagtgctgtatacagaatccaggcgccgccgacgagccgcccaaacaattcacctttgacggggcgtaccatgtcgaccatgtcaccgagcagatctacaacgaaattgcgtatcccctcgtcgagggggtgaccgagggctacaacggaactatattcgcctatggccagaccggctctggaaaaagcttcacgatgcagggactgccagaccccccttcacagagagggattattccccgagccttcgagcatgtttttgagagcgtacagtgcgccgaaaacaccaagtttctggttcgggcttcatatttggaaatctataatgaagacgtcagagacctcctgggcgcagacactaaacaaaagctggaacttaaggagcaccctgaaaagggggtctacgtgaaaggactgtccatgcacaccgtccactcggtcgcgcagtgcgagcacatcatggaaacaggttggaaaaataggtcagtgggctacactttgatgaataaggacagtagtcgaagtcacagcatcttcaccattagcattgaaatgtcagcagtggacgagaggggcaaggatcatctgagggcaggtaagcttaatctggttgatctagccgggagtgagcgacagagcaagactggcgcaaccggggaaaggctaaaagaagctacaaaaatcaacctctctcttagcgccttgggcaacgtcatctctgcactcgtagacggccggtgtaaacatgtcccatatagggattctaagctgacaagacttttacaggactcactgggcggtaacaccaaaactcttatggtcgcatgtctatccccggccgacaacaactacgacgagacactttcaaccctgcgatatgcaaacagagcaaaaaatatcaggaataagcctaggatcaatgaggatcccaaggacgctctcttaagggaataccaagaggagataaagaaactgaaagcgattcttactcaacaaatgtcaccgagctccctgtcagcccttctgtctagacaggtgccaccagaccctgtgcaggttgaggaaaaactgctcccccagcccgtgatccagcatgacgtggaggctgaaaaacagctgataagggaggaatacgaggagagacttgctaggctgaaagccgactataaagcggaacaggagtccagagcaaggctcgaggaagacatcactgcgatgcgaaactcgtatgatgtccgcctgagtaccctcgaagaaaacttgcggaaagaaactgaggcagtgcttcaagtgggggtactctataaggccgaggtcatgagtcgggccgagtttgcttcttctgctgaatatccgccagctttccagtacgagaccgtggtcaaacctaaggtgttttcaactaccgataccttgccctcggatgatgtgagcaagacccaggtcagttctcggtttgcggaactgccgaaagtcgagccttccaaatctgagataagcctaggcagctctgaatcgagctctctggaagaaacctctgtgagcgaggcctttcctggtcccgaggaacccagtaatgtggaggtcagtatgcctacagaggagtcccggtcaaggtatttcttagacgagtgtttgggtcaggaggcagcgggccacctgctgggtgaacaaaattacctccctcaggaggagccccaggaggtccccctacaaggactgctagggctccaggatcctttcgcagaagtcgaggccaagctggctaggctgagctctaccgtggcacgcactgacgcccctcaagcggatgtgccaaaagtaccagtgcaagtgcctgctccaaccgatcttcttgagccttccgatgctcgacctgaagcggaagccgccgatgactttccacctcgccccgaggtggacctcgcctctgaggtcgcactggaagtggtcagaaccgctgagcctggcgtatggctggaggcgcaagcaccagtcgctttagtagctcaaccagagccacttcccgctaccgctggagtgaagcgagagagtgtgggcatggaagtggctgtactcacggatgaccccttgcctgtggtggatcagcagcaagtcctcgccaggctccaactcctcgagcaacaggtcgtcggcggtgagcaggccaaaaataaggatcttaaagagaaacacaagcgcagaaagcgctatgcagacgagagaaggaagcaactagtggcagcccttcagaacagtgacgaagacagcggcgactgggtgctcttgaacgtttacgactcaatccaggaggaagttcgcgcaaaatcaaaattgctggagaaaatgcagaggaaactgcgggccgctgaggtggagataaaagatttgcagagtgagtttcaactggagaagatcgattacttggctaccattaggcgccaagaacgggatagcatgttgttacagcagctgctggaacaagtgcagccattaatccgtcgtgattgcaactatagtaacttggagaaaattctgagagagtcatgttgggacgaagacaacggcttttggaagattcctcaccccgtgataactaaaacttcccttcccgtggccgtgagcaccggtccacagaataagcccgcacggaaaacaagcgcggctgataatggtgagcctaacatggaggacgacagatatcgcctgatgctttctaggtcaaactctgagaatattgccagtaactattttcgttctaaacgtgcctcacaaatcctcagcactgacgccaggaagagcctcacacaccacaactctcctcctggcctgtcttgcccgctgagtaataactcggcgattccacctacccaggcccctgaaatgccccagcccagaccatttcggcttgagtcccttgatattccattcaccaaggccaaacgcaaaaaatcaaagtccaacttcggctctgagcctctctag

SEQ ID NO: 22871 - DNA, 417 bp, synthetic construct
  source 1..417: mol_type = other DNA; note = Synthetic coding sequence
atgatcctgcagcagcccctgcagcggggcccccagggcggcgcccagcgcctaccacgggccgccctaggcgtgacctggggactcgacgcgtccagtcctcttaggggcgccgttcccatgagcacgaagcggcgcctggaagaggaacaagagccattgagaaagcagttcctgagcgaggagaacatggccacgcacttcagtcaactgagtctgcacaatgaccacccatattgcagccctccgatgacgttctccccagccctacccccactgaggtcgccctgcagtgagctgcttctctggaggtacccaggatccttgattcctgaggcacttcgactgctaaggctgggagacactccaagcccgccttatcctgcaacacctgcaggtgatatcatggaattgtag

SEQ ID NO: 22872 - DNA, 573 bp, synthetic construct
  source 1..573: mol_type = other DNA; note = Synthetic coding sequence
atgttccaggtgcccgacagcgagggcggccgggccggcagccgggccatgaagcccccaggaggcgaatctagtaacctgttcggctcacccgaggaggccacccctagcagccgccccaatagaatggcgagtaatatattcggcccaaccgaggaacctcaaaacatacccaagaggaccaatccacctggtggcaagggcagcggaatttttgatgagtctactcctgtgcagacacgccagcacttgaaccccccaggcggcaaaacaagcgatatctttggttcccccgtgacggccacgagcagacttgcgcaccccaataaacctaaggaccatgtatttctgtgtgaaggtgaggagccgaaaagtgatctaaaggctgcccgctcaatcccagccggcgcggagcccggcgaaaaagggtccgctcgtaaagcaggtcccgctaaggaacaggagcccatgccgacagtggacagtcacgagccgcggctcggaccaaggcccaggagccacaacaaggtgctaaatccaccaggagggaagtcaagtatctccttctattag

SEQ ID NO: 22873 - DNA, 690 bp, synthetic construct
  source 1..690: mol_type = other DNA; note = Synthetic coding sequence
atgacctgctgcagccaggtgcccccccggcggcggcccagcctggccctgtctccgcggctggattgtaatggactaaacggtgtgcccgggtctatttgggacttcgtctccgggtctttcagtccctcaccatcccctattcttagcgccgggccaccatcttcctcatccgccagtccgaacggagccgagttagcacgggtgaggaggcagctcgatgaagctaagaggaaaatacgtcaatgggaggagtcttggcagcaggtgaaacaggtgtgtgatgcttggcagcgggaagcgcaggaggctaaagagcgtgcgcgagtcgctgactccgaccggcaattggcattgcagaagaaggaggaggtggaggcacaggtgaagcagctccaggaggaattggaaggtctgggcgtagcaagcacgctaccagggctgcgcgggtgcggcgacattggtactattcctttgcctaagttgcacagtcttcagagccagctgagactggatctcgaagcagtggatggggtcatcttccagctacgggctaaacagtgtgtggcttgcagagaacgggctcacggagcggtcttaagaccctgtcagcatcacatactttgcgagccatgcgccgccactgctcctgagtgcccctattgtaagggacaacctctgcagtggtag

SEQ ID NO: 22874 - DNA, 5460 bp, synthetic construct
  source 1..5460: mol_type = other DNA; note = Synthetic coding sequence
atggccagcatcacccagctgttcgacgacctgtgcgaggccctgctcccagccgccaagacccacctgggacaacggtcggtcaatcggaagagggctaagaggtctctcaagaaggtggcgtataatgctctttttaccaatctcttccaggacgagactcagcagcttcagcctgacatgagcaagttgcctgccagaaataaaatcctcatgctctcctttgacctccgtgtgggcggactggggccgaaagctgataggctagaggagctcgtggaggagctagaagcggccccatgctgcccattgttggaggtcggctccgttttagacttactcgttcagctagcgggtagcgggcctccccaggtgctgcccaggaagagggactactttctaaacaataagcacgtgggacggaacgtcccttattctggttacgattgcgatgacttaagcgtgtttgagatggatgtccagtccctgatctcgagggaggagtgcctgtgccattccatgatccaggagactctgcaggtgatggaagccgcccctggaacaggtctccccaccgtcggactgtttagttttggagatccatgtggcgaccgcttcgaaagggacactcgagttagcttgtttggagcccttgtccactcacgcacctacgatatggacgtgcgtttaggccttccacccgtacctgataatgcagacctgtctggactggctattaaggttccaccttcagtcgaccagtgggaagacgagggcttccaatcagcctccaacctgacacccgacagccagtccgagccgtcagtcactccagatgtggacttgtgggaggcggcactgacatacgaagcctcaaagagaagatgttgggaacgggtcggctgcccaccgggacaccgcgaggagccttatctgacagaggcgggcagagatgcattcgacaagttctgtagactccaccagggcgaactgcagcttcttgcgggaggggtgctgcaagcaccacagcctgtcctcgtcaaggagtgcgaacttgtcaaagacgttctaaatgtactcattggagtggtgtctgccacattcagcttatgtcagcccgcgcaggctttcgtggttaagcggggggtccacgtctcaggggcttcccccgagtccattagttccctcctgagcgaggtggcagagtacggcacgtgttatactcggctcagccacttcagcctgcaacctgtgctggactctctctattccaagggtctggttttccaagcctttacttccggactgaggaggtatttgcaatactacagagcctgcgtgttgagcacccctcctaccctttccctcttaaccataggttttctttttaaaaagcttggtcgccagctcagatatctggccgaactgtgtggcgtaggggccgtgctgcctggcacatgtggcggtggccctagggccgcattccccacgggcgtcaaactcttaagctatctttaccaggaggccttacacaactgcagcaacgagcactatcccgtgttactgtcccttctgaagacttcatgcgaaccctatactagattcattcacgattgggtgtacagcggggtgttcagagatgcttatggcgaattcatgatacaggtgaatcacgaatacttatcttttagggataaactctactggactcacggctatgtcctgatttccaaagaggtagaggactgcgtccctgtgttcctaaaacatattgcccatgacatctatgtgtgtggcaaaacaataaatctgctgaagctgtgttgcccacggcactacctgtgctggtcagacgtacctgtgcctagaatatctgtgatctttagcctggaagagttaaaagagattgagaaggactgcgccgtctatgtaggaagaatggaacgggtggcgagacactccagcgtctctaaagaagagaaagagctcagaatggagatcgcaaaacaggagctaattgcccatgctagggaagcagcttcaagagtactttcagccttgagtgatcgacagatgagcgaaaggatggcactagatgctcggaaaagggaacaattccaaagactcaaagagcagtttgtaaaggaccaggagagacggcaagctgctcggcaggaggaattggatgatgatttttcctatgccagagaattgcgcgatcgcgagcgccggcttaagtctctggaggaagagctggaacgcaaggcacggcaagctctcgtcgatcactattccaaactttctgccgaggccgcccgcagggagcagaaggccttgtggaggattcagcgacatcgtctggagagcgcacggcttagatttttactggaagacgagaagcatatccaggagatgctgaaggctgtgtccgaggcccaccagcctcaggagccacccgacgttctcttgtcagtgcacccgcaagtgactagcccaggacctgagcatcccgagggcggacaaggttgtgactctggcagtgcggaacaacattcaccggcttgggacggatggaaccgccctggccttcttacaccccagcccctcaagcccctggccgtgggagcgggcggacggggcctgcagcaggcagagggagccagacctttttccgatagtctgtcaattggggatttcctcccagtcggccccggcgcagaaccttccgtgcagaccggcatggtgcctttgcttgaggtggcactccagacgatcaatctggatctcccaccttccgcaccaggagaagcacccgcagcagcaagcactcagccttcacggcctcaggagtacgacttctcaacagttcttcgacccgctgtagcaacatcacccgcccctgggccactgcaagcagcagagtgcagcttgggaagctccggactacaattgtgggaggattcctgcggaaagatggacgcctgcggatccgctagcagggaaaccctcctgccttcacacccaccccgccgtgccgctctagaggagggatccagccaaccgacagaacggctcttcggccaggtctctgggggcggcctgccaactggggactatgcttccgagatcgccccaacccgccctagatggaatacacacggacacgtttctgatgccagcattcgcgtcggcgagaatgtgtcggacgtggcccccacgcagccccggtggaacacacacggacacgtgagtaacgcatccatcagcctcggcgagtccgtttctgatgttgcccctactcgcccccggtggaacatccatggacacgtgtctaacgcatctatccgagtgggcgaaaatgtgtctgacgtggctcctacgcggccccggtggaacacacacggccatgtctcaaacgcaagcatcagggttggtgagaacgtcagtgacgtagccccaacccggccccggtggaatactcatggacacgtttcagacgcttcaatctcacttggggagagtgtgagtgatatggcacctgccaggccacgctggaacacacatgggcatgtgtccgacgcctctatttccttgggggaatcagtgagcgatatggcccccactcggccgcgctggaacactcacggccacgtgtccgatactagtatccgcgtgggggagaacgtctccgatgtggcaccaattaggtccaggtgcaacactcacggccacgttagcgatgctagtattagtctgggtgagcctgtgagtgatgtcgtaagcacccggcccagatggaacacacatgttccaattccaccacctcatatggtgttaggcgctcttagcccagaggctgagccaaacaccccccgacctcagcagtcaccaccgggacacacatcccagagcgccctgagtctgggagctcagtccactgtgttggattgcgggcctaggttgcccgtggaggtgggaccctccctcagttcacctagctctggctgtggtgagggcagcatctcagtcggcgagaacgtgagcgacgttgcgccgacccagccatggtggcctaacactcccggtgactctgtgtccgaggagctcggacctgggcggtcaggggacacggaggacctttccccgaactggcctctgaactcccaagaagacacagctgcacaatctagcccgggtcggggggaggaagccgaagcctcagccgcagaagcccaggggggcgagcaagcgtatctagccggactcgccggccaatatcacctggaacgttatcccgatagttatgagagtatgtcagaacccccaatcgcacacctcctgcgcccagtgctacctcgtgccttcgcctttccagtggaccctcaagtccagtcagcagccgatgaaaccgcggttcagctttccgagctcctgaccctgccagtgcttatgaaacgctctatcacagccccattagctgcccatatttcactggtaaacaaggcagcagtggattatttcttcgtggaactccatctggaagcccattacgaggcactgagacacttcctgttgatggaagatggtgagttcgctcagtctctcagcgatctgctgttcgagaaactcggggcaggtcagacccctggtgaactgctaaatcctctggtgctgaactctgttctgagtaaggccttacagtgctctcttcatggagataccccgcacgcctccaatctttcactcgctctgaaatatctcccagaggtgttcgcccccaatgcaccagacgtgttgtcgtgtctggaactgagatataaagtcgattggcctctaaatatagtgataaccgagggctgcgtgagcaagtactccggggtcttcagttttctcctgcaactcaagctcatgatgtgggctctgaaggacgtctgctttcacctgaaacgcactgcgttgttatcccatatggcagggagtgtgcagtttcggcagctgcaactcttcaagcacgaaatgcagcatttcgtcaaagtgattcagggctatattgctaaccagatcctccatgtgacttggtgtgaattcagagccagactggccaccgtcggggatctcgaagagatccagcgcgcgcatgctgagtatctgcacaaggctgtattccgcggtctgctgactgaaaaagcagctccagttatgaacgtgattcactctatattctcactggttctcaagttccgcagtcagctgataagtcaagcttggggccctcctggaggcccacgcggcgccgagcaccctaacttcgcattgatgcagcagtcctataacacttttaagtactattcacatttcctgtttaaggtggtcactaagctggtaaaccggggctatcagcctcacctggaagattttcttctaaggatcaattttaacaattattatcaggacgcatag

SEQ ID NO: 22875 - DNA, 2250 bp, synthetic construct
  source 1..2250: mol_type = other DNA; note = Synthetic coding sequence
atgagcggcagccacacccccgcctgcggccccttcagcgccctgactccatcaatttggccgcaggagattttggcaaaatacactcagaaggaggagagcgccgagcagccggagttctactacgacgaatttggctttcgcgtctacaaggaggaaggcgacgagccaggcagcagtctgctggcgaatagtcctcttatggaggacgcgcctcagagactgcgctggcaggcacacttggagttcacacataaccacgatgtgggggacctaacatgggacaaaattgcagtgtctctccctcggtctgaaaaactgagatccctggttctggctggtatcccacatggaatgcggccccagctgtggatgcgcctcagcggtgctctccagaaaaaacgcaacagcgaactgagctatagggaaatcgtgaaaaatagttcaaatgacgagacaatagcggctaaacagatcgaaaaggaccttctgaggaccatgccatcaaatgcatgcttcgcgtcgatggggtcaattggggtcccacgtttgcggagggtgctaagagcattggcctggctctaccctgagattgggtattgtcaaggcacaggaatggttgccgcctgtctgctgctttttctagaggaggaggatgctttttggatgatgagcgcaattatagaggacttgctgccagcttcctatttttctactaccctgctaggcgtccagaccgaccaacgtgtgctcagacacctgatcgtgcagtacctgccccgacttgacaaactgctgcaagagcatgacattgagctgagcctaatcacactgcattggtttctgacagcatttgccagcgtagtcgatatcaaattgctgctccggatttgggatctgtttttttacgaaggctcaagagtgctctttcaactgactctggggatgctacatttgaaggaggaggaactaatacagtccgagaattctgcctcaatattcaacacactctctgacatccctagccagatggaggatgccgagctgctgctgggggtagccatgcggctggcaggttcactgactgacgttgctgtggaaacgcagagacgcaagcatttggcctacctcattgctgaccaggggcagctgctgggagctggcactttgaccaatttatcccaagtcgtgcgccggaggacccagcggaggaagagcaccatcacggcccttttatttggggaagatgaccttgaggccctgaaggcgaagaacataaaacagactgagctggtagccgatctgcgggaggcaattctgcgcgtcgccaggcattttcagtgtaccgatcctaagaattgtagcgtcgaactgactccagactattctatggagtctcaccaaagggatcatgagaactacgtggcctgctctaggagccacaggagacgcgccaaagccctgctggatttcgaacggcatgacgacgatgagctcggcttcagaaagaacgatattattacaatcgtctcacaaaaggatgagcactgctgggtgggcgagctcaacggattacgcgggtggttccctgcgaagttcgtcgaagtactcgacgagaggagcaaggaatactctattgctggcgacgacagcgtcaccgaaggagtcaccgacctggtcaggggcactctgtgcccagctctcaaggccttgttcgagcacggcttgaagaagccttctctgctggggggcgcgtgccacccatggctattcatcgaggaggcagctggccgcgaagtggagcgagacttcgcatcagtatacagtagactggttctctgtaagacttttcgtcttgacgaggatggtaaggtactcacccctgaagagctgctgtacagagcagtgcagtcggtgaatgttacccatgacgccgttcacgcgcagatggacgtcaaactgcgatcgctgatatgtgtcgggctcaacgaacaggtattacacctgtggctggaagtgctttgcagtagccttcctacggttgaaaaatggtaccagccctggtccttcctgcgttcacccggttgggttcagattaagtgtgaattaagggtgctgtgctgtttcgctttttctttgtcacaagactgggagctgcctgctaagagagaggcccaacaaccactgaaggagggcgtccgcgatatgctcgttaaacatcatctattctcttgggacgttgacggatag

SEQ ID NO: 22876 - DNA, 2097 bp, synthetic construct
  source 1..2097: mol_type = other DNA; note = Synthetic coding sequence
atgctgagccccaagatccggcaggcccggcgggcccggagcaagagccttgtgatgggggaacagtcacggtcccccggccggatgccttgcccccaccgcctcggcccagtccttaaagctgggtggttgaagaagcagcgttcaattatgaagaactggcagcagcgctggtttgtactgaggggtgaccagctcttttactacaaggataaagatgaaatcaaaccacaaggtttcatctcactacagggtacgcaggtcacagagctacctcctggaccagaggacccaggaaaacatcttttcgagatcagccctggaggcgctggagaacgtgaaaaggtgcccgcaaacccagaggctctgctactcatggctagtagccaacgggatatggaggattgggtccaggctatcagaagagtaatctgggcgccactgggtggggggatcttcggacaaaggttggaggaaactgtccaccatgaaaggaagtatggccctcgtctagccccgttactagtcgagcaatgcgtcgacttcatcagggaaaggggcttgaccgaggaaggacttttccgaatgcctggacaggccaatctggtaagggacctccaggactcattcgattgtggcgaaaaacctctcttcgactccactactgatgtacataccgtggcctcccttttaaagctgtatctccgcgagttgccagaacctgttgtgcccttcgccagatatgaagattttctaagttgcgcacagctgcttaccaaagatgaaggggaggggactctggaattggcaaagcaggtcagtaatttgccacaagctaattacaatctgctgcgatacatttgcaagtttctggacgaagttcaggcttattccaatgttaataaaatgagcgtgcagaacttagccacggtttttggacccaacatactgaggccacaggttgaggaccccgtgaccataatggagggcacaagcctggtgcaacaccttatgaccgtcctgatccgtaaacattcccagctctttacggcccctgtgccggaaggccctacaagccctagaggcggtctgcagtgcgctgtggggtgggggagcgaggaggttacaagggactcccagggggagcctgggggaccggggttgcccgcacaccggacctcttccctggacggcgcggccgttgctgtcctctctaggacagccccaactggtcccggatcccggtgcagtccagggaagaaagtgcagaccctgccctcttggaagagctctttcaggcagcctcgtagcctctcaggttctcctaagggcggcggatcctcactcgaagtgccgataataagctccgggggcaattggctaatgaacggcctctcctctctgcgtgggcaccgacgggcttcatccggcgatcgcctcaaagacagcggatccgttcagcgcctgagcacgtacgacaatgtgccggccccaggcctggttcccggcataccgtcggtcgccagcatggcttggagtggcgcctcatcctctgaatcttcagtggggggaagcctctctagctgcacagcgtgtcgagctagcgactcctcagctcggagctcactgcacacagattgggctctcgagccatcaccgcttccttcctcatctgaagatcccaaaagccttgatctggaccattccatggacgaagcaggggctggtgcttcaaattctgaaccaagcgaacctgactcacctacaagggaacacgccagacgctcagaagcacttcaagggctggtgaccgagttgcgcgcagagctgtgtcggcagaggaccgagtatgagcggtccgtaaaaagaattgaagaaggatcagcagatctgagaaagaggatgtccaggttagaggaggagctcgaccaagaaaaaaagaagtatataatgctggaaataaagctcaggaactccgaacgggctagagaggatgcggagaggagaaatcagcttctgcagagagagatggaggagttttttagcacactcggttcacttactgtgggcgccaagggggcccgagctcctaaatag

SEQ ID NO: 22877 - DNA, 180 bp, synthetic construct
  source 1..180: mol_type = other DNA; note = Synthetic coding sequence
atgacccggggcaaccagcgggagctggcccggcagaagaacatgaagaagcagtcggatagtgtgaaaggtaaaaggagagatgatggtctcagcgcggctgcgagaaagcagagagattctgagataatgcagcagaagcaaaagaaagccaatgagaagaaggaagagccaaaatag

SEQ ID NO: 22878 - DNA, 372 bp, synthetic construct
  source 1..372: mol_type = other DNA; note = Synthetic coding sequence
atggcccggtacgaggaggtgagcgtgagcggcttcgaggagttccatcgggctgtagagcaacacaatggaaaaacgatcttcgcttactttaccggcagcaaggatgcaggcggcaaaagctggtgcccagattgtgtccaggctgaacctgtagtgcgggaaggtctgaaacatatttccgaggggtgcgtgttcatttactgtcaggtgggcgaaaagccttattggaaggaccctaacaatgatttcaggaaaaatttaaaagtgactgccgtgccaacactcttgaaatacggcactccacaaaaactggttgaatctgagtgtcttcaggctaacctggtggagatgctgttctccgaggactag

SEQ ID NO: 22879 - DNA, 1401 bp, synthetic construct
  source 1..1401: mol_type = other DNA; note = Synthetic coding sequence
atgggctggatcaccgaggacctgatccggcggaacgccgagcacaacgactgcgtcatcttcagcctggaggagttgagcctacaccagcaagagatcgagcgcctggaacacattgacaaatggtgtagggatctcaagatactgtatctgcagaacaacctgatcggtaaaatagaaaacgtcagtaagttgaagaagttggagtaccttaacttggccctgaacaacatcgagaaaattgagaatctggagggatgtgaagagctcgcaaaattggacctcacagtgaatttcatcggcgagttatcctccatcaagaatcttcagcataacattcacctgaaagaattgttcctgatgggtaatccttgcgcatcatttgaccattatcgggaattcgtcgttgctaccctgccacaattaaagtggttggatggcaaagaaatcgaaccaagtgagaggattaaggcactgcaagattattccgttatcgagccgcagatacgtgagcaagaaaaggatcattgcctcaagcgtgcaaagctcaaagaagaagcccagcgtaagcatcaagaagaggacaagaatgaagacaagaggagtaacgccgggttcgacggcaggtggtacactgatataaacgccacactgagttctctggaatcaaaagatcacctgcaggcgcctgacacagaagagcataatacaaaaaaactggacaactcagaagatgatctggagttctggaacaagccgtgcctgttcacacccgaatcaaggcttgagaccctgcgccacatggaaaagcaacgaaagaagcaggagaagctatctgagaaaaaaaagaaggtcaagccccctagaacactcataactgaggatggtaaggccttaaacgtgaacgagcccaagattgattttagccttaaagataacgaaaagcaaataattctggatctagcggtgtatcggtacatggacacttcccttatcgacgttgatgtgcagcctacatacgttcgagttatgattaaggggaaacccttccagctggtattgcccgctgaagtcaaaccagatagtagctcagctaagaggtcgcagacaaccggacacttggttatttgtatgcctaaagtgggagaagtgataacgggcgggcagagggcattcaagagcatgaagaccactagtgatcgaagcagagaacagaccaatacccgttcaaaacacatggagaaactagaggtcgatccgtctaagcactccttcccagacgtgacaaatattgtgcaagagaaaaaacacacccccagaaggaggcctgagcctaaaatcattccatccgaagaggatccaacattcgaggataaccctgaggtccctcccctgatttag

SEQ ID NO: 22880 - DNA, 1050 bp, synthetic construct
  source 1..1050: mol_type = other DNA; note = Synthetic coding sequence
atggaggacccccagagcaaggagcccgccggcgaggccgtggccttagctctgctggaaagcccccggcccgaggggggggaggagcccccccggcccagcccagaggagacccaacaatgtaagttcgacgggcaagagaccaagggcagcaagtttataacctccagcgccagcgacttttctgaccctgtgtacaaagagatcgcgattaccaacggttgtataaatcggatgagtaaagaggagctgcgagccaaactgtctgaattcaaactagaaactagaggggtcaaggatgttcttaaaaaacggttaaagaattactacaaaaagcagaaattgatgcttaaggagtcgaacttcgcagatagctattacgactatatttgcatcattgatttcgaggctacatgcgaggaaggtaaccctcctgagtttgtgcacgagattattgagttccccgtagtgttgctgaacacccacacactggaaatcgaggacaccttccagcaatatgtgaggccagagatcaatacccaattgagcgatttctgtatctcgttaaccggaataacccaggaccaggtagacagggcagacacattccctcaggttctgaagaaggtcattgactggatgaaactgaaagaactggggacaaaatataaatatagcctgctcacagacgggtcctgggatatgtccaagttcctgaacatccagtgccaactaagcagactgaagtacccaccattcgctaagaaatggatcaatataaggaagtcatatggcaacttctataaagtcccacgcagccagaccaaactgaccattatgctagaaaagctcggtatggactacgatggacggccgcattgcgggctggacgattctaagaacattgctcggatcgctgtgcgtatgctgcaggacgggtgcgagctacgaatcaacgaaaagatgcacgccgggcaacttatgagcgtcagttccagcctccctatcgaaggcacgccaccaccccagatgccacatttccgaaaatag

SEQ ID NO: 22881 - DNA, 843 bp, synthetic construct
  source 1..843: mol_type = other DNA; note = Synthetic coding sequence
atgctgagcgccgtggcccggggctaccagggctggttccacccctgcgcacgcttatcagtgcggatgagttctacaggaattgacaggaaaggagtgctggcgaatagagtggctgtggtgaccggctccacctctgggatcggattcgcaattgcccggcgcctggccagagacggcgcacacgttgtcattagtagcaggaaacagcaaaatgtcgaccgggctatggctaagctacagggcgagggcttatccgtcgctggcatcgtttgtcacgtaggaaaggctgaagatcgcgaacagctagtcgctaaagcattagaacattgcggcggcgtggatttcctcgtatgtagcgcgggggtgaatccacttgtggggagcacgcttgggactagtgagcaaatttgggacaagattttgtctgttaacgtcaagtccccggctctactgctgagtcagctcctgccgtacatggaaaatcgcagaggggccgtgattctggtgtcttcaatcgccgcctacaaccccgtggtcgctctgggtgtgtataatgtaagcaaaacggccctgctgggcctcaccaggacactcgccctggagttagcccccaaagacatccgtgtaaactgtgtggtccctggtatcatcaaaaccgacttcagcaaggtttttcacgggaatgagtctctatggaagaacttcaaggagcatcatcagttacagcggattggcgagagtgaggattgcgcagggatcgtttccttcctgtgctcccccgatgcttcatatgtcaatggggagaatatagctgtcgctggctactcaacacgactttag

SEQ ID NO: 22882 - DNA, 909 bp, synthetic construct
  source 1..909: mol_type = other DNA; note = Synthetic coding sequence
atggtgaccgagcaggaggtggacgccatcggccagaccctggtggacccaaagcagcccttgcaagctcgcttcagagccctgttcacactcaggggccttgggggccctggtgccatcgcgtggatctctcaagcttttgacgacgactctgccttactcaaacatgaactggcctattgtcttggacagatgcaggatgcaagagccatccctatgctggtggatgtgttacaggatacccgacaagagcccatggtcagacatgaagcgggggaggccctaggcgcaatcggagatcctgaagtgttagaaattctcaaacagtacagcagcgatccagtcatagaggtagcagaaacatgtcaactggccgtgaggaggctcgaatggctacaacagcacggcggtgaaccagccgcaggaccatatctcagcgtggatcccgccccccccgccgaggagagggacgtgggccgattgcgcgaagcactcctcgacgagagccggccgctcttcgagcgctaccgcgcaatgtttgcccttagaaatgctggaggcgaagaggcagcactggcgctggccgagggactacactgtgggagtgctttgttcagacacgaggtcggctacgtgttaggccaattgcagcacgaagctgcggtcccgcagctggctgccgctctggcacgatgcacagaaaaccccatggtgagacacgaatgtgccgaggctctgggagctattgcacggcctgcctgtctcgctgctctgcaagcacacgccgacgaccctgaacgcgtagtgagagagtcttgcgaagtagctctggatatgtacgagcacgagacaggacgcgcgtttcagtacgccgacgggttggagcagcttaggggcgctccctcttag

SEQ ID NO: 22883 - DNA, 3384 bp, synthetic construct
  source 1..3384: mol_type = other DNA; note = Synthetic coding sequence
atggaggtgcaggtgagccaggccagcctgggcttcgagctgaccagtgtagaaaagtccctgcgggagtggtcacgtctcagccgggaggtgatcgcttggctgtgcccttcaagccccaatttcatcctgaactttccgcccccacccagtgcttcttcggtgagcatggtacagcttttctcttccccgttcggctaccagagcccatccggacacagcgaagaagaacgtgagggcaatatgaagagcgccaaaccccaggtaaatcactcacagcatggagaatcacagcgagccttgtccccacttcaatccacactatcatccgcagcaagcccatcacaagcctacgagacctacattgaaaatggcctgatatgtctgaaacacaaaatcagaaacattgagaaaaagaaactcaagctggaagactataaggacaggttgaagagcggggagcatttgaatcctgatcagctggaggccgttgagaagtatgaagaggtgctgcataatctggagttcgctaaagagttgcagaagaccttctccggactgtccttagatcttttaaaggcacagaagaaggctcagagaagagagcatatgttgaaactcgaagccgaaaaaaaaaagttgaggactatcctccaggtacagtacgtccttcagaacttgactcaagaacatgtacaaaaggatttcaagggtgggctaaacggggccgtatatctaccatccaaagaactggattacctgattaaattttcaaagcttacttgtcctgaacgaaatgaaagtctttcagtggaggatcaaatggagcagtcttcactgtacttttgggacctgctggaaggcagcgagaaggctgtggtcggcacaacttataaacatctgaaagatctcctatctaaactgctgaatagcggatactttgaatccatccccgtccccaagaatgcaaaggagaaagaagttccacttgaggaagaaatgcttattcagtccgagaaaaagacgcagctgtctaaaaccgagtcagtgaaggaaagtgaaagcttaatggaattcgcccaacccgagatacaaccccaggagttcttgaataggagatacatgacggaagttgattattccaacaagcagggtgaggaacagccatgggaagctgactatgccagaaaacctaacctgcccaaacgctgggatatgctgactgagccagatgggcaggaaaaaaaacaagaaagttttaagagctgggaagccagtggcaaacaccaggaggtaagtaaacctgcagtgtcactggagcaaagaaaacaggatacaagtaagctaaggagcaccttgcccgaagaacagaaaaaacaagaaattagtaagtcaaagcctagtcctagtcagtggaagcaggatactcccaagtccaaggcgggctatgttcaggaagagcagaagaaacaggaaacaccaaagctctggcctgtccagttgcagaaggagcaggaccccaagaagcaaaccccaaagagttggacaccatcaatgcagagcgaacagaataccactaagtcctggaccactccgatgtgtgaagaacaagattccaagcagccggagaccccaaagtcatgggagaacaatgtggaatcccagaaacacagcctgactagtcagtcccagattagtcccaagtcctggggcgtggctacagcatctctgatccccaacgatcagctgttgccccggaaactgaatacagagcctaaagacgtgccgaagcctgtacatcagcccgtgggatcttcctctacactacctaaggatcctgtgctgcgaaaggaaaaactgcaggaccttatgacccagattcaagggacttgtaatttcatgcaggagagcgtgttggattttgacaagccaagttcggctattccaacaagccagcctccctccgccacccctggctcacctgtggcctctaaggagcagaatctttctagtcaatccgatttcttgcaggagccacttcaggccacatcctctcctgtgacttgttcctctaatgcatgcttggttactaccgaccaggccagtagcggcagtgagaccgaatttatgacctcagaaactcccgaagccgcaattccccccggcaaacaaccatcctccttggcctcaccaaatccacccatggcgaagggttctgaacaggggttccagtctccgccagcgagttcatctagtgtgacaatcaatactgcgccgtttcaggccatgcagacagttttcaatgtcaacgcccctctgccccccagaaaggagcaggagattaaggagagcccttacagccctggttataaccagagtttcactacggcctctacacagacccccccacaatgtcagctgccatcaattcacgtggagcagactgtccactcccaagaaaccgccgccaattatcaccccgatgggaccatccaagtctcaaatggatcactggccttctatcctgcccagacgaacgtgttcccccgacccacccaaccattcgtcaattctagaggcagcgtgagaggatgcacacgaggaggtcggttaatcaccaactcctatcgaagccccggaggctacaaaggatttgatacttaccggggcctgcccagcatttccaatgggaactactcccagctgcagttccaggctcgtgagtatagcggtgctccctactcgcaacgcgacaatttccagcagtgctacaagaggggaggtacctctggtggaccgcgagcgaattcccgggctggttggtcggatagttcgcaggtgagttcaccagagcgcgacaacgagacatttaattccggtgatagtggacaaggtgactcacgtagcatgaccccagttgatgtgccagtaacaaacccggccgctacgattctccctgtacacgtctatcctctgcctcagcagatgagagtggccttcagtgctgcaagaacgtccaatcttgctcctggaactctggatcagccgatcgtgttcgatctccttcttaataacctaggagagactttcgatctccaactgggaaggttcaattgtcccgttaacggtacgtacgttttcatttttcacatgctcaagctagcggtcaacgtgccactatacgttaacctgatgaaaaacgaagaggtactcgtgagtgcttacgccaacgatggagcccccgatcacgagactgcctcaaaccacgctatcctccagttattccagggcgatcaaatctggttgagacttcacaggggagccatctacggttcttcttggaagtactctaccttctccggctacctgttgtaccaggattag

SEQ ID NO: 22884 - DNA, 2448 bp, synthetic construct
  source 1..2448: mol_type = other DNA; note = Synthetic coding sequence
atggaggtgcgggccagcctgcagaaggtgagcggcagcagcgacagcgtcgccacaatgaattcagaggagttcgtcctcgtgccgcagtacgccgatgacaacagtaccaaacacgaagagaagcctcagctgaagattgtaagtaatggtgatgagcagctggaaaaagctatggaagagatcctgagagattcagagaaacgaccatcttccctgctggttgattgtcagagttcatctgagatatctgaccactcctttggggacatacccgcaagccagacaaacaagcccagcctccagctgatcctggaccccagcaatacagagatcagcacaccccgaccaagcagtcccggaggtctgccagaggaggattctgtactattcaacaagctgacgtatcttggctgcatgaaagtcagctccccaagaaatgaagtggaggccttgagagccatggccactatgaagagctcatcccagtaccccttccccgttacactctatgtcccgaacgtccctgaaggttcagtgaggatcatcgaccagtcctccaatgttgaaatcgcctcttttcctatatataaggttctgttttgtgccaggggtcacgatggaaccactgagagtaactgctttgcgtttacagaatcctcccatggatcagaggaattccagattcacgtttttagttgtgagatcaaagaggctgtgtccaggatcctttactccttttgtacagcttttaagaggagctctagacaagtcagcgatgtgaaggactccgtcatacctacacccgactctgacgtgtttacgttctccgtttctctggaggtgaaggaggacgacggcaaggggaacttcagccccgttccgaaggacagagacaaattctacttcaaacttaagcagggtattgaaaagaaggtcgtgatcactgtccaacaactgtcaaacaaagaactagccatagagaggtgtttcgggatgcttctcagccccgggaggaatgtaaaaaattctgacatgcacttgctggacatggaaagcatgggaaaatcctacgacggacgagcgtacgtaatcacgggcatgtggaaccccaatgcaccagtgtttcttgccctcaatgaggagacccctaaagataagcaagtatacatgactgttgcagtcgacatggtcgtgacagaagtggtggagcctgtccgatttctgctcgaaactgtagtcagagtctatccagccaatgagcgattctggtatttctctcgcaaaacattcacagaaacattcttcatgaggctgaagcagagcgagggcaagggacatacaaacgccggcgatgccatctacgaggttgtgtccctccagcgggagtccgacaaagaggagcccgttacacctacctccggcgggggtccaatgtccccgcaggacgatgaggctgaggaagaaagcgacaacgagctcagttctggcacgggggatgtctctaaggattgtcccgagaagatactgtatagctggggtgaacttctaggcaagtggcactccaatctgggtgcccggcctaaagggctgtcgaccttggtgaaatccggcgtgccagaggcattgagggccgaagtctggcagttactcgccggctgccacgacaatcaggccatgttggataggtaccgcatcctaatcacaaaggactcagcccaagagtccgtaatcacgcgagacatccacagaacctttccagcacacgattatttcaaggatactgggggagatgggcaggagagcctgtataagatctgtaaggcgtacagcgtgtatgatgaagatatcggttactgccagggccaatcgttcctcgctgctgtgctgctgctccacatgcccgaggaacaggccttttgtgttctggtgaaaattatgtatgactacgggcttcgcgacctgtacaggaataactttgaggatctgcactgcaagttttatcagctggagcggctgatgcaagaacaactcccagatctgcactcccatttctcagacctgaacttggaggctcacatgtatgcaagtcaatggtttttgaccctgttcacggcaaagtttccactgtgcatggtgttccacattatcgatctactgctgtgcgaaggtctgaacattatttttcacgtagcattggcgttgctgaaaacatccaaagaggatctgctgcaggccgatttcgaaggagccctgaagttctttcgtgtacagcttcctaagcggtaccgggcagaagagaatgccaggcggctaatggaacaagcctgtaacataaaggtgcctacaaagaagctcaaaaagtatgagaaggagtatcaaacaatgcgcgagagccagctgcagcaagaagacccaatggaccgctataagtttgtgtatttatag

SEQ ID NO: 22885 - DNA, 639 bp, synthetic construct
  source 1..639: mol_type = other DNA; note = Synthetic coding sequence
atggcccagaccgacaagcccacctgcatcccccccgagctgcccaagatgctcaaggaattcgccaaagccgcaattcgggctcagccccaagacttgatacagtggggggctgattattttgaagccttgagccgtggggaaacccctccagtacgggagcgatccgaaagggtggcactctgtaactgggccgaattaactccggaactgctcaaaatcctgcactcccaggttgctggaaggctgattatccgtgccgaagaattggcccagatgtggaaggtagttaatctgccaactgatttgtttaacagcgtgatgaacgtcggcagattcaccgaggaaatagagtggctcaaatttctcgcactcgcatgttctgcactgggggtgacaattaccaaaacgctgaaaatcgtgtgcgaggtactgtcctgtgaccataatggcggcctcccccggattcccttcagtacttttcaatttctgtacacttacatcgccgaggtggacggagaaatttgcgccagccacgtatctcggatgctaaactatatcgagcaggaggtaattggccccgatggcctgataaccgtgaatgattttacacagaatccgagggtttggctagagtag

SEQ ID NO: 22886 - DNA, 1938 bp, synthetic construct
  source 1..1938: mol_type = other DNA; note = Synthetic coding sequence
atggccagcctgctgcaggaccagctgaccaccgaccaggacctgttgctgatgcaggaaggcatgcctatgcggaaggtaaggtctaaatcctggaaaaaactgagatactttagactccagaacgatggtatgacagtgtggcacgcccgccaggcccgcgggagcgcgaaaccctccttctccatttccgacgtggaaacaattagaaacggacacgattcagagttattgagatctctggccgaagaactaccattagagcagggattcactattgttttccacgggaggcggtcaaatctggacctcatggctaactctgtggaagaggctcagatctggatgagaggcctccaacttctggtggatcttgtaacctccatggaccatcaggagcgactggatcagtggctcagcgactggttccagagaggtgacaagaaccaggatggcaaaatgagctttcaggaggtgcagaggctccttcatctgatgaatgttgagatggatcaggaatatgcttttagcctgtttcaggcagctgacacctcacagtccgggactctcgagggagaggaattcgtgcagttctataaagctctcaccaaaagggcggaagttcaggagctgtttgaaagtttttctgccgacggtcagaagctaaccctcctggaattcctggactttttacaagaggagcagaaggaaagagactgcacctcagagcttgcactggagttgattgaccggtacgaaccctcggatagcggtaagctgcgacacgtgttgtccatggacggattcttgagttacttgtgctccaaggatggagatattttcaaccccgcatgcctgccaatatatcaggacatgactcagcctctcaaccattactttatttgttcctcccacaacacctatctagtgggagatcagctgtgtggacagtctagtgtcgagggctacatccgtgcacttaagcgaggatgtaggtgcgtagaggtggatgtttgggatggcccaagcggggagcccgttgtttaccatggccacaccttgacgagtcgaattctctttaaggacgttgtggccaccgtagcccaatacgcttttcagacctccgattatcctgtaattctcagtctcgagacccattgttcctgggagcagcagcagacaatggctagacatctgaccgagattctcggggaacaattactgagcacaacgcttgatggggttctccccacccaacttccatcaccagaggagctgagaaggaagatcctcgtgaagggaaagaaactgaccctggaagaggatctcgagtatgaggaagaagaagccgagccagagttggaggagagcgagttagctctcgaatcccaatttgagacagagccagaaccgcaggagcagaatcttcagaacaaagataagaagaagaagtcaaagccaatcctttgtcccgctctatcctcactcgttatttacttaaaaagcgtgtcctttcggtcttttacgcactccaaagagcattatcacttttacgaaatttcttctttcagtgagactaaggctaagcggttgatcaaagaagctggcaatgaatttgtgcaacacaacacctggcagctttcaagggtctacccctccggtcttcgaacagatagcagtaattacaacccacaggaactctggaatgctggatgccaaatggtggctatgaatatgcagacagctgggctcgagatggatatctgcgacggccactttcggcagaatggcggatgtgggtatgtgctaaagcctgacttccttcgggatatacagagcagcttccaccctgaaaaaccaatcagtccttttaaggctcagaccctgagtatcccttataggcaccttcaactcatcttcccaatcaactctgtatag

SEQ ID NO: 22887 - DNA, 7554 bp, synthetic construct
  source 1..7554: mol_type = other DNA; note = Synthetic coding sequence
atggtgggcgagcggcacgccggcgacctgatggtgcccctgggccctaggctgcaggcctatcctgaggaattaattagacagagacctggacacgacggacacccagagtacttgatccgctggagtgtactgaaatgtggtgaggtgggtaaagtgggcgttgaggagggaaaggcagaacacatccttatgtggttgtctgctcctgaagtgtacgctaattgccctggtcttctaggggagcgcgcccttagcaagggactgcagcatgagccagctggcgtatctggctccttcccacgggatccaggcgggttggatgaagttgcaatgggagagatggaagccgatgttcaagccctcgttaggcgcgcagccaggcagttagccgaatctggcacgccatccctgactgccgctgttttacatactatccatgtgctcagtgcctacgccagcattggccccctcacgggtgtgtttcgcgaaactggggcgctcgatttactcatgcacatgctgtgtaatcccgagccacagatccgacgaagcgcgggaaaaatgctccaagctctggccgcccatgacgctggtagcagggcccacgtgcttttgagtttgagtcagcaggacggtatcgagcagcacatggacttcgattcccgatatacgttgttggagctctttgccgagaccactagcagtgaagagcattgcatggccttcgaaggtatccatctgccgcagatccccggcaagcttctgttcagccttgttaagagatatctttgcgttaccagtctactggaccagctgaactcttcaccagagctcggagcaggagatcagagctccccttgcgcaaccagagagaaaagccgaggccagcgcgaattggagttctcgatggctgtgggaaacctgatttctgaactcgtgagatctatgggttgggcccgcaatcttagtgagcaaggaatgtcacccccacgccccacccgttccattttccagccctatataagcgggccgtcactgctgctccctactatcgtaaccactccgagaaggcaaggctgggttttccggcagaggtcagaattctcgagtagatccggatacggtgagtatgttcagcagactctccagcccggcatgagggtgcgaatgctggatgactatgaggagatttccgctggggatgaaggagagtttagacagtctaacaacggcatccccccagtccaggtcttctggcagtctactggccggacttattgggtgcactggcacatgctggagatcttgggccccgaggaggccactgaagataaggctagcgccgcggtggaaaagggtgccggagcaaccgtgctcggaacagcttttcctagttgggattggaatcctatggacggactctaccccttgccatacctccagcccgaaccgcagaagaacgagagggttggctacctcacacaggccgaatggtgggagctcctctttttcattaagaagctggacctgtgcgagcagcagccaatcttccaaaacctttggaagaatctggacgagacattgggggaaaaagctctgggggagatcagtgtcagcgtggagatggccgaatctctgctccaggtgctatcctcacggtttgaggggagcactcttaacgatctgcttaattcgcagatatacaccaagtacggcctacttagtaacgagccttcatcaagctctacttcaaggaaccattcatgcactcctgacccggaagaggagagcaagtcggaagccagtttcagcgaggaggagactgaatctctgaaagccaaagccgaagcaccaaagacagaggctgaacctactaaaactaggactgagacgcctatggcgcagtcagactcccaattattcaatcagctgttggtgaccgaaggcatgactcttccaacggagatgaaagaggcggcatccgaaatggccagggccctaagaggacccgggcccaggagttcattggaccagcacgtcgcagccgtcgtggcaactgtgcagattagttccctcgataccaatttgcagctgtctggattgtcagctctcagccaggccgtcgaggaggtcactgagcgtgatcatccacttgtccgcccagaccgctccctcagagagaagctggtgaagatgctcgttgaacttcttaccaaccaggttggggagaagatggtggtcgttcaggcactgcgtctgctttatttgctgatgaccaaacacgagtggcgcccgctgttcgccagggaaggaggaatctacgccgttctggtctgcatgcaagagtataaaacctccgtgcttgtgcagcaggccggactcgctgccctgaaaatgctggcagtggcctcatcatctgaaattcctacatttgtgactgggagagactcgattcactccttatttgacgctcagatgacacgcgaaatatttgcctctattgactctgcaacgcgacccggttctgaaagcttgctgctgacggtacctgccgccgttattctgatgctcaatacagaaggatgtagctctgccgcgcgtaatggtcttctccttctcaacctgctactctgcaaccaccatactctgggagatcagattatcacacaggagcttcgagataccctgttccggcattcaggaattgcaccaagaaccgaacccatgcctacaaccaggaccatcctcatgatgttgttgaaccgctacagtgaaccgccaggatcaccagagcgggccgccctggagactccgatcattcagggccaggacgggtcaccagaactactgattaggtccctggtgggcggtccgtcagctgaactgctgttggacctggagcgggtgctgtgcagggaagggagtccagggggagcggttcgccccctgcttaaaagactccaacaagagacccagccgttcctgctcctcctgcggactcttgatgcccccggccccaacaaaactctgctgctgtctgtgctccgcgtgatcacccgtctgttagacttccctgaggcaatggtgttaccctggcacgaagtcctagagccttgccttaactgtttaagtggcccttcttccgactctgagattgttcaggagctgacatgtttcttgcatcggctcgcaagtatgcataaagactacgccgtagtcctatgctgcctgggagcaaaagagatcctgtccaaagttttagacaaacactcagcacaactgctgttaggctgcgagctcagagatctggtgactgagtgtgagaagtatgcccagttatattccaacttgacatccagcatacttgccggatgtatccagatggttttaggacaaattgaggatcaccggcgcacgcatcagcccatcaatatcccttttttcgacgtgtttctgagacacctctgccagggaagtagcgtcgaagtgaaggaggacaagtgctgggaaaaagttgaggtgagctcaaatcctcaccgtgcatctaagctgacggaccataatcccaagacatactgggaatcgaatggctctactggttcccactatatcaccctccatatgcatcggggcgttttggtccgccagctcacccttcttgtcgccagtgaagactcttcctacatgccagcaagagtggtcgtattcgggggagacagtacgtcatgcataggtaccgagctgaacactgtcaacgtaatgccatctgctagcagggttattctgctggagaacctcaaccggttttggccaatcattcagatcaggattaagagatgccagcagggcggcatagacacaagagtacgcggggtggaagtccttggaccgaagcccaccttttggcctctgtttcgggagcagttatgcaggcgtacatgcctcttctacacaataagggcccaggcatggtctcgcgacatcgctgaggatcacaggaggttgcttcagttgtgtcctcgtttgaaccgggtcctgcgccacgaacagaactttgccgacagattcctacccgatgatgaggccgcgcaggcacttggaaaaacttgttgggaagcactggttagtccattggtgcagaacatcaccagcccagacgctgaaggggtttccgcactgggctggctccttgaccagtatctcgagcagagggaaactagtcgtaatccgctgagtagagcagcctcctttgcctctcgcgtgagacgactgtgtcatctgctcgtgcacgtagaacccccaccgggtccgtccccagagccatccacacggcccttttcaaagaactccaaaggtcgcgatcgatcccccgccccctctcccgtgctgccctctagttcactcagaaacattacacagtgttggcttagtgtcgtccaggaacaagtgagccggtttcttgccgctgcttggagagcacccgattttgttccccgatactgcaagctttatgagcacttacaacgggcaggatccgagctgttcggacccagagcggccttcatgctcgcacttcgctctggattttccggggcacttcttcagcagtcttttctgacagcagcccacatgagtgagcagttcgcccgttatattgatcagcaaatacaaggtggactcattggaggagctccgggagtcgagatgcttggccagcttcaaaggcatttggagccaatcatggtcctgtcagggttagagctggccactactttcgagcatttctatcagcattacatggctgataggttacttagctttggcagttcatggctggagggagctgtgcttgaacagattggactgtgttttcctaatcgattacctcagctgatgctgcagtccctctcaacatctgaggaattgcagagacagttccacctgtttcagctgcagagactggataagctgtttcttgagcaggaggatgaagaggagaagcgcctcgaggaagaggaggaagaagaggaggaggaagaggctgagaaggagctgttcattgaggacccgtcacctgccatatctattctggttctcagccccagatgctggcctgtgtcccccctgtgctatctctatcacccccgcaagtgcctgccgactgagttctgtgacgccctggaccggtttagcagcttctactcacagtcacagaatcacccagtcctggatatgggaccgcaccgtagactgcagtggacttggttgggccgtgccgaactccagttcggcaaacagattctccacgtgagcaccgtgcagatgtggctgctcctgaagtttaaccagactgaagaggtgagtgtcgaaacgctgcttaaggacagcgatctgtctcccgaactccttctacaggctctggtgcccttaacctccggaaatggcccgctcacccttcacgagggccaggactttccccatgggggcgtgctgcggctgcatgaaccagggccccaacgcagcggggaagccttgtggctgattccccctcaggcatacctgaatgtggagaaggacgagggtcgcacactggagcagaaaaggaacctgctgtcctgcctgcttgtgagaatcctgaaagcccacggagagaaggggctacacatcgaccagttagtgtgcttggtacttgaggcatggcagaaaggacctaacccacctggcacacttggacatactgtggccgggggagttgcctgcacatcgactgacgtgttgtcatgcattcttcaccttttaggtcaggggtacgttaagagacgcgatgataggccccagatactaatgtacgcagccccagagcccatggggccatgtcggggtcaagccgacgtgcccttttgcggttcgcagagcgagacctccaaaccatcaccggaagccgtggctacactggcttcgctgcagctgccagccgggcgcacgatgtccccgcaggaggtggagggattaatgaaacaaactgtgcggcaggttcaagagactctaaatctggaacccgatgtggcccagcatctgttggcccacagtcactggggagctgagcagttactgcaaagctattctgaggatcccgaaccacttctgcttgcggctggcctgtgtgtgcaccaagcccaggccgtcccagtgcgcccggaccattgtccagtgtgcgtctcacctctgggctgcgacgacgatctcccgtccctgtgttgtatgcattactgttgtaagtcttgttggaacgagtatttaaccaccagaatcgaacagaatctggtgctgaattgcacttgtcctatcgccgattgcccggctcagccaacaggtgcctttattagagctatcgtctctagccccgaggtgatatctaaatatgagaaagctctgctcagaggctacgtggagtcatgctctaatttgacttggtgcactaacccgcaaggatgtgatagaatcctgtgccgccagggacttggctgcggcaccacttgttcaaagtgcgggtgggctagttgttttaactgtagtttccccgaagcacactatccagccagctgtggacatatgtcccagtgggttgacgacggaggatactacgacgggatgagcgtggaggctcaaagcaaacacctagccaaattaatcagcaaaagatgtccaagctgccaagctccaattgagaaaaatgaagggtgcttgcacatgacatgcgctaaatgtaatcatggcttttgctggagatgtctcaaaagctggaaacccaaccacaaagactactacaattgcagcgccatggtgagcaaggccgcccggcaggaaaaaagattccaggattacaatgaacgctgcacttttcatcaccaggcccgtgagttcgcagtgaacttacgcaatcgggtatccgccatccatgaggtgccccctcctagaagttttacttttcttaacgacgcatgccaaggtctcgagcaggctagaaaggtgcttgcatacgcctgtgtatacagcttctactcccaggacgccgaatacatggatgtggtcgaacagcaaacagagaatctcgagttacacactaacgctcttcagattctgctagaggaaaccctactgcggtgtagagacctggcctcttccctgaggcttcttcgcgccgattgtctcagtaccggaatggaactattgcgaagaattcaggaacgactcttggccatccttcagcactcggcacaggacttcagggttgggctgcagagtccatccgtggaggcctgggaagcaaaaggcccgaacatgccaggtagtcaacctcaggcatctagcggacccgaagctgaggaggaagaagaggacgacgaggacgatgtaccggagtggcagcaggatgaattcgacgaggaactagataacgacagctttagttacgatgagtcagagaacctggaccaagagacctttttcttcggtgacgaagaggaggatgaagacgaagcctacgactag

SEQ ID NO: 22888 - DNA, 1476 bp, synthetic construct
  source 1..1476: mol_type = other DNA; note = Synthetic coding sequence
atggaggagatccccgcccaggaggccgccggcagcccccgggtgcagttccagtctctggagacacaaagcgagtgcctgtcgcccgagccacaattcgtccaagacaccgacatggaacagggcctcaccggcgacggagagaccagggaggagaataagctgctgattccaaaacagaaaatctccgaggaggtccatagctataaggtccgtgtcggcaggctcaagcatgatatcacacaggtccctgagactcgggaggtgtacaagtcagaggacaggctagagcggctgcaggagatattgcgcaaatttctctacttggagcgggaattccgtcaaattaccatctcaaaagagacctttacttcggaaaagaataacgaatgccacgagcccgaaaagtcttttagcttggacagcactattgatgctgatcagagggtactgcgcatccagaataccgatgacaacgataagtacgacatgtccttcaaccagaattcggcgtccggcaagcacgaacacctgaacttgactgaggactttcagtccagcgaatgcaaggaatcacttatggatctctcgcaccttaataagtgggaatccatcccaaacaccgagaagtcatataaatgcgatgtctgtggcaagatttttcatcagagtagcgctctgacccgacaccaacggatccacactagggaaaaaccctacaaatgcaaagagtgcgaaaagagcttttctcagagctcttccctaagcagacacaagcgaatacatacccgagagaagccatacaaatgtgaggcaagcgataaaagctgtgaggccagcgataagtcttgtagcccctcctctggtataatccaacacaaaaaaatccatacacgggcaaaatcctacaaatgcagctcctgtgaaagagttttcagccggagcgtgcatttgacccagcaccagaaaatccacaaagagatgccatgcaagtgcactgtatgtggatcggatttctgtcacacttcatatctgctggagcatcaaagggttcaccacgaggagaaggcctacgaatatgatgaatacggcctggcatacattaaacagcaagggatccatttcagggagaaaccttacacatgttcagagtgcggaaaagattttcggctaaacagccatttgatccagcaccaacgaatacacaccggcgagaaagctcatgagtgcaacgaatgtggcaaagctttctcccagacatcttgtctcattcagcatcacaaaatgcacagaaaggagaaatcatacgaatgtaacgagtatgaagggagcttctcccacagctctgatctaattttacagcaggaagtgcttacaaggcagaaggcattcgactgcgatgtgtgggaaaaaaacagctctcaacgggcccacctagtccagcatcaatccattcataccaaggagaattcatag

SEQ ID NO: 22889 - DNA, 2709 bp, synthetic construct
  source 1..2709: mol_type = other DNA; note = Synthetic coding sequence
atgagcgagttccggatccaccacgacgtgaacgagctgctgagcctcctcagagtccatgggggcgacggcgctgaagtgtacattgacctgttgcagaaaaacaggacaccgtacgtgacgaccactgtctccgcacatagcgccaaggtcaagatagccgagttctcacgaacgcccgaggacttcctgaaaaagtacgatgagctgaaatcgaagaacactcgaaaccttgatcctctggtatatctgctcagtaaactgacagaagataaagaaactttacagtatttacagcagaacgcaaaagaacgcgccgaactagcagctgctgcagtcggcagcagcaccacaagcatcaacgttccggctgccgccagcaagatctcgatgcaagagctggaggaattgcggaagcagctggggtccgtcgctactggctctacactgcaacagtcccttgagctgaaacgaaaaatgcttcgggataaacagaataagaagaatagcggtcagcacttgcctattttccccgcctgggtctatgagagacctgctctgatcggcgacttcctcataggcgctggtatctctaccgatactgccctgcccatcggaactttacctctcgcttcgcaggaatccgccgtcgtcgaagatttactatatgtattggttggagtggacggccgctacgtttcagcccagcccctggccgggcgacaatctagaaccttcctggttgatcccaacctggatctgtcaattagggagctcgtgcatcgaatcctgcctgtggctgcttcctactctgctgtcaccagatttatagaagagaagtcgagcttcgaatatggccaggtgaaccacgctcttgccgccgccatgcgaactttggtgaaagaacatttaattctcgtgagccagctcgaacagctgcacaggcagggacttctgtccctgcaaaagctgtggttctatattcaacccgcgatgaggactatggacatactggcatccctcgcaacaagcgtggataagggagagtgtcttggaggctctactttgagtctgctgcacgacagaagtttcagctatactggtgactctcaggcccaggagctttgcctctacttgaccaaagcggcaagcgccccctactttgaagtcctggaaaagtggatatatcgagggattatccatgacccatattctgagtttatggtcgaggaacacgagctgagaaaggaaaggatccaagaagattataacgacaagtactgggatcagcgttataccattgtccagcaacaaattccatcttttctgcagaaaatggccgacaagattctctctacagggaagtatctgaatgtcgtaagagaatgcggtcacgatgtaacttgcccagtggcaaaagagatcatctacactctgaaggaaagagcctacgtcgagcagattgaaaaagcattcaattacgccagtaaagtgttgctggactttctgatggaggagaaggagctggtggcccacctgagaagcattaagaggtatttcttaatggaccagggcgatttttttgtccattttatggatctagcagaagaagagctccgtaaacccgttgaagacatcaccccccccaggctggaggcactgctggaactcgcgttgaggatgagcaccgccaatacagatcctttcaaagatgatctgaagatagatctgatgccccatgacttaattacacagctgctcagagtattagcaatcgagaccaaacaggagaaagctatggcgcatgccgaccccactgagttggccctgtctggtcttgaagcattctcctttgattacatagttaaatggcctctgtcactcatcattaaccgcaaagccctgactcgctatcagatgctctttaggcacatgttctactgtaagcacgtcgagcggcagctttgctccgtctggatctccaacaagacagctaagcaacatagcctccactctgcccagtggttcgctggtgccttcactctgcgccagagaatgctaaattttgtacagaatatccagtactacatgatgtttgaggtgatggaacctacatggcacatcctggagaaaaacctcaagtctgcatccaatattgatgatgtccttggccatcacaccggcttccttgacacatgccttaaggattgcatgctgactaatcctgagcttttgaaggtctttagtaagctgatgagcgtttgcgtcatgttcaccaattgcatgcaaaaattcacccagtccatgaagctagatggagaacttggtggtcaaacactggaacactccacagtcctgggcctccccgccggcgcagaggagagggctcgaaaggaactagctcggaaacatctcgccgagcatgccgatacagtgcagttggtgtctggcttcgaggccacaattaataagttcgataagaacttttccgctcacctgctagatctgctcgctagactgagtatatactccacgtctgattgtgaacatggaatggcctcggttattagcagactggacttcaacgggttttataccgagaggttagagcggctgagtgctgagcgatcgcagaaggcaacgccacaggtgcccgtcctgcgcggcccccctgcccctgctccaagagtcgctgttactgcccaatag

SEQ ID NO: 22890 - DNA, 2289 bp, synthetic construct
  source 1..2289: mol_type = other DNA; note = Synthetic coding sequence
atggccatgcaggagaagtaccccaccgagggcatcagccacgtgacctctccctcttcagacgtaattcagaagggctctagcctgggcacagagtggcagacacccgtgatctccgagccttttcgctcgaggttcagccgctgctctagcgtagcggactccggcgataccgcgattggaacctcgtgtagtgatatcgctgaggatttctgttcctcctccggatctccacccttccagcctattaagagtcacgtcacgatcccaaccgctcacgtgatgccatctactctaggcaccagcccagcgaaacctaacagcactccagtgggcccatccagttccaagctgcccctgtccggactggctgagtcagtggggatgacccggaacggagacttaggagcaatgaagcactcccctgggctttctagagacctcatgtatttcagcggggcgacgggagagaacggcatagaacaaagctggttccctgccgtggggcatgagagacaagaagaggcccggaaattcgatattccctccatggaatctactctaaatcagagtgcaatgatggaaacactctatagcgatccacaccacagggtgcgattccataacccaagaacatccacatctaaggaactctacagggtcctccctgaagctaagaaagcccccggatccggcgcagtgttcgaacgcaatgggccccacagcaattcctcaggcgtcttacctttgggacttcaacctgccccagggctctctaaacctctaccatcacaggtctggcagccgtctcccgacacttggcacccccgtgaacagagttgcgagcttagtacctgtaggcaacagctggagttgattcggctgcagatggaacaaatgcaactgcagaatggcgcaatttgccaccaccctgccgcatttggtccctcgcttccaatactggagccagcccaatggatttccattctgaactcgaatgagcacttacttaaggaaaaagagttgctgattgacaaacaaagaaaacacatttcccaactcgaacaaaaggtgagagagagcgaactccaggtccacagcgctttgttgggccgccccgcaccttttggagatgtgtgcctgttgaggctgcaggaactgcagcgggagaatacgttcttgagagctcagtttgctcagaagaccgaggcactgagtcgggaaaagattgatttagagaagaaactgagcgccagcgaggtcgaagtgcagctaattagagagagcctgaaggttgccctgcagaaacattctgaagaggtaaaaaaacaggaggaaagggtgaagggcagggacaaacatatcaacaacctgaagaaaaagtgccagaaggaatcggaacagaatcgcgagaagcagcagagaatagagacactggaaagatatctggcagacctgcccacacttgaggatcatcaaaagcagagtcagcagctgaaggattccgagcttaagtcaaccgaactgcaggagaaagttactgagcttgagagcctattggaggaaacccaggcgatttgccgagagaaggagattcagctggaaagcctgcggcagagggaggccgagttcagtagcgctggacacagtcttcaagacaaacagtcggtggaggaaacgagtggggagggacccgaggtagagatggaatcttggcagaagagatatgattccctgcagaagatcgtggaaaaacagcaacagaaaatggatcaactccgaagccaagtgcaatccctggagcaggaggtagcccaggaagagggaacatcacaggctttgcgggaggaggctcagagacgtgacagcgctctgcaacagctacgcactgccgtaaaggaactgtccgtgcagaatcaggacttgatagagaaaaacctgacgcttcaagagcatctgcggcaggcacagccagggagtcccccttcacccgataccgcccaactggccctcgaattgcaccaagagctcgctagctgtctgcaggacctccaggctgtctgctctattgttacccagagagcccagggccacgatccaaacctgtccttgttgcttggtatccactccgcccagcaccctgaaactcagctcgacctgcagaaaccagatgttatcaagcgcaaattggaggaagtccagcagctgaggagagatatcgaggatctccggaccaccatgtctgatagatacgcccaggacatgggagagaattgtgttacccagtag

SEQ ID NO: 22891 - DNA, 1443 bp, synthetic construct
  source 1..1443: mol_type = other DNA; note = Synthetic coding sequence
atgatcgtggccgacagcgagtgccgggccgagctgaaggactacctcagattcgcccctggtggggtcggggactcgggcccgggggaagaacagagagagtccagggcccggcggggcccccgaggacctagcgccttcatcccagtggaggaggtcctgcgggagggtgccgaaagtctggaacaacacctaggactcgaggccctgatgagctcaggccgcgtggacaatttggcagttgttatgggcctgcatcctgactactttacatcgttttggaggttacattacctccttctgcatactgacggtccattggcttcctcgtggagacattacattgccatcatggcagccgctcgccaccagtgctcttacctagttggcagtcacatggcagagttcctgcagacagggggggacccagaatggttgttaggattgcaccgggctcctgagaaactgcggaagttatccgaaattaataagttgttggcacaccgcccttggctgatcacgaaggaacacatacaagccctgctaaagaccggggaacacacgtggagtcttgcagagcttatccaggccttagtactgctcactcactgccacagtctttcaagtttcgtcttcggttgcggcatcctgcccgagggggacgccgacggcagtcccgccccacaagccccgactcccccctctgaacaatcctcccccccttctcgggaccctcttaataatagcggcggctttgagtctgccagagatgtggaagccctcatggaacgcatgcagcagctgcaggaatcgttgctgcgcgatgaggggacctcacaggaggagatggaaagtaggtttgagcttgaaaagagcgagagcctgcttgtgactccgtctgctgacatcctcgagccatcccctcaccctgatatgttatgtttcgtagaggaccctacgttcggctatgaagatttcaccaggcggggtgcccaggcacctccaacattcagagcccaggattatacgtgggaagatcacgggtattccctcatccagcgtctctaccctgaagggggacagcttctagatgagaaattccaagcagcctacagcctaacctacaatacaattgcgatgcatagcggagtcgatacaagcgtcttgcgcagggctatttggaattacatccactgcgtatttggtatccgctatgatgactacgattatggggaagtcaaccagcttctagagcggaacctgaaggtatacatcaaaaccgtggcttgttacccagagaaaacaaccaggcgaatgtacaacttgttttggcgccacttcagacacagcgagaaagtgcacgtcaacttactgttactggaagccagaatgcaagccgctttgctgtacgccctgcgcgccataacccgatatatgacctag

SEQ ID NO: 22892 - DNA, 633 bp, synthetic construct
  source 1..633: mol_type = other DNA; note = Synthetic coding sequence
atgcccggcgtgaagctgaccacccaggcctactgcaagatggtgctccacggcgcaaagtatccccactgtgccgtgaacggactcctggtcgctgaaaaacaaaagcccaggaaagagcacctgccactcgggggcccaggagctcaccacaccctcttcgtggactgtatacctctctttcacggcacccttgctttggcccccatgctggaggtggcactcacactgatagactcctggtgtaaagatcactcatacgtcattgccggatattatcaagctaacgaacgcgttaaggatgccagccctaatcaggttgcagaaaaagtggctagtcgaatagcagagggattctcggatacagccctgatcatggtggataacactaagttcactatggactgcgtggcgccaactatccacgtctatgagcatcatgagaacaggtggagatgtcgagatccacatcatgattactgtgaggattggcctgaagcccagagaataagcgcgtcccttctggatagcaggtcctatgaaacccttgtcgatttcgataaccatctcgatgacatccgtaatgattggaccaatcccgagatcaacaaagctgtgctgcatctgtgttag

SEQ ID NO: 22893 - DNA, 1059 bp, synthetic construct
  source 1..1059: mol_type = other DNA; note = Synthetic coding sequence
atgaccgaggccggcaagctgcccctgcccctgcccccccggctggactggttcgtgcatacccaaatgggccaactggctcaggacggcgtgccagagtggttccacggagccatatctcgcgaagacgctgagaacctcctggaaagtcagccactagggtctttcctgatcagggtttctcatagccatgtggggtatactctgagctacaaagcccagtctagttgctgccattttatggtaaaactgctggacgatggcacctttatgattcctggcgaaaaagtagcgcacacaagtctcgacgcactcgtgaccttccatcaacagaaacccattgagccacggcgtgagctgctgactcagccttgccggcagaaagacccagcaaacgtggattacgaagacctcttcctctactccaacgccgttgcggaggaagcagcctgccccgtttctgccccagaggaggcgagtccaaaaccggttctctgtcaccagagtaaggagcggaagccgtccgctgaaatgaatagaatcactactaaggaagctacttcatcctgtcctcctaagtcccccctcggagaaacccggcagaagctgtggcgatcccttaaaatgctgcccgagcgggggcaacgggtgcggcagcagctgaaatctcacctggcaacagtgaacttaagcagcctgctggacgtccgccggtcaaccgtcatatcaggtcctgggacgggcaaaggtagccaggatcactctggcgatcccacatctggagaccgcggttataccgatccgtgcgtagccactagtttaaagtctccaagccagcctcaggcccctaaagataggaaagtccctacacgcaaagcagaaaggagcgtgtcttgcattgaagttactcccggcgaccgcagctggcatcagatggttgttcgagctctttcaagccaggagtccaaacccgagcatcagggcctcgccgagcctgagaatgaccagctcccagaggaataccagcaacctcctcccttcgcacctgggtactgctag

SEQ ID NO: 22894 - DNA, 480 bp, synthetic construct
  source 1..480: mol_type = other DNA; note = Synthetic coding sequence
atgacccactgctgcagcccctgctgccagcccacctgctgccggactacttgctggaaacctactaccgtgaccacttgttccagtactccctgttgccagccaagctgttgcgtaagcagctgttgccaaccatgctgtcgacccacatgttgtcagaacacatgctgccaacccatatgcgtgacctcctgctgtcagcctagctgttgctctacaccttgctgtcaaccaacgtgttgtggacagactagctgtgggagctcttgcggacagtctagcagctgcgctccagtgtattgtcgaagaacgtgctaccaccctactacagtctgcctgcccgggtgtttaaaccagtcatgcggatctaattgctgtcagccttgctgtagacccgcttgctgcgagaccacctgctgccgcactacctgcttccagccgacctgtgtgagtagctgttgtcagccttcttgttgctag

SEQ ID NO: 22895 - DNA, 615 bp, synthetic construct
  source 1..615: mol_type = other DNA; note = Synthetic coding sequence
atggaccccaaggaccggaagaagatccagttcagcgtgcccgccccgccctctcagctggatccaagacaggtcgaaatgattcggcggagacggcctacgcctgctatgctttttaggctcagcgagcattcgtccccagaggaggaagcaagccctcaccaaagggcaagcggtgagggacatcacctcaagagcaagcgccctaacccttgtgcttatactcccccttctctgaaggcggtccagcgcatcgctgagtcccacctgcagtccatttcaaatctgaacgagaaccaggcttccgaagaggaggatgagttgggagaattacgcgagcttgggtaccctagggaagaggacgaggaggaggaggaagacgatgaagaggaggaagaggaggaagattctcaagctgaagtactgaaagtgatacgtcaaagcgcaggccaaaagaccacgtgtggtcagggcttagaaggtccatgggagcgtccaccccccctggatgagtccgagcgggatggaggttcagaagatcaggtggaggaccccgccctcagtgagccaggcgaagagcctcagaggccttccccgagcgagcctgggacttag

SEQ ID NO: 22896 - DNA, 2061 bp, synthetic construct
  source 1..2061: mol_type = other DNA; note = Synthetic coding sequence
atgaccgacgccctgctgcccgccgccccccagcccctggagaaggagaacgacggctacttcaggaaaggatgcaaccctctggcccagactggtcggagcaagttgcagaatcaaagggcagccttgaaccaacagatcctgaaggcagtacgcatgagaaccggagcagagaacctccttaaggtggccaccaacagtaaggttcgggaacaggtgcggctggagctctcttttgtgaactccgacttacaaatgctgaaagaagagctggaaggtttaaacatatctgttggagtgtaccagaacacagaagaggcatttaccatccctctcatacccttggggttaaaggagacaaaagacgtggatttcgccgttgtgctgaaggactttattcttgagcattacagcgaagacggttacctctacgaggacgaaattgctgatttaatggacctccgtcaagcttgtcgaaccccctcaagggatgaggctggggtagaactcctaatgacgtacttcatacagcttggattcgtggagtcccgattctttccccccactcgccaaatgggcctcctgtttacatggtatgacagtctcactggggtaccggtgtcccaacagaacctgctgttagaaaaagctagtgtgctctttaatacaggtgctctgtacactcaaataggcacacgctgtgatcgccagactcaggcaggtcttgagagtgcaatcgacgcattccagagggctgccggggttcttaattatttgaaggatacattcacccacacaccgagctacgatatgagcccggcaatgctgtctgtgctcgtcaagatgatgctcgctcaggcccaggaatcagtgttcgaaaagatcagcctgcccggcatccgcaatgagttctttatgttggtgaaagtggcacaggaggctgctaaagtcggtgaagtgtaccaacagcttcatgctgctatgtcgcaggcgccagtgaaagaaaatattccctactcatgggcgagtctggcgtgcgtcaaggcgcaccattatgctgcccttgctcactattttaccgccattctcttaatcgaccaccaggtgaaaccaggaacagacttggatcatcaggagaagtgtttgagtcagctgtacgaccacatgccagaagggttaactcccctggccaccctcaaaaatgatcagcagcgacgtcagctcggaaagtcccatctccgtagggctatggcccaccacgaggaatcagtcagagaggcaagcttgtgcaaaaagctcagatccatcgaagtccttcaaaaggtgctgtgtgccgctcaggaacgtagccgcctcacatatgcccaacatcaagaagaagacgatctcctcaatcttattgacgcacccagcgtcgtggctaaaacagagcaggaggtggatatcatacttcctcagtttagcaagctcacagtgaccgacttcttccagaaactgggccccctgagcgttttcagcgccaataaacggtggactccacccagatcaatcaggtttactgcagaagagggtgacctaggcttcaccctgcgtggaaatgcgcccgtacaagtgcattttcttgacccttattgcagtgccagcgtggctggagcaagggaaggagactacattgtgtccattcagctcgtggactgcaagtggcttacgctgtccgaagtgatgaaactgctgaaatcattcggggaagatgaaatcgagatgaaagttgttagcctgctggactcaacaagcagtatgcacaacaagagcgccacttattcggtggggatgcaaaagacttacagcatgatctgcctggctattgatgacgacgataaaactgataagacaaagaagatttctaagaagctgagcttcctttcctggggcactaacaagaatcggcagaagagcgctagcacattgtgcctgcccagcgtcggagcagcacgcccacaagtaaagaagaaactgccatctcccttcagcctattgaatagcgatagctcatggtactag

SEQ ID NO: 22897 - DNA, 1254 bp, synthetic construct
  source 1..1254: mol_type = other DNA; note = Synthetic coding sequence
atgcccctgtacgagggcctgggcagcggcggcgagaagaccgccgtggttattgacctcggggaagcttttacgaagtgtggcttcgccggggagacaggcccgcgatgtattatcccatccgtcattaaacgtgcaggcatgccaaaacctgtgcgtgtagtgcagtacaacatcaatacagaagagctgtacagttacctcaaggaatttattcatatcttgtattttagacatctcctggttaacccccgtgatcggcgcgtggtgataatagagtccgtactgtgtccaagtcattttcgcgagactctgacaagagttttattcaagtactttgaagtgccctcagtgctgttagctccttctcatctaatggctctcctgacactggggattaacagtgcgatggtgctcgattgtgggtaccgcgagtctctcgtgctacccatttatgaggggatccctgtgctgaattgctggggtgccctccccctgggcggcaaggctcttcacaaggagctggagacacagcttcttgagcaatgcacagtagacaccagtgtagccaaagagcagtcacttccttccgtgatgggctccgtgcccgagggcgtattggaagacataaaagcccgtacatgttttgtgtcagaccttaagcggggacttaagatccaggccgcaaagttcaacatcgacggtaataatgagcgcccaagccccccccccaacgtcgactacccgctcgacggtgagaaaattctgcacattttaggtagcatacgcgacagtgtggtcgagattctttttgaacaggataacgaagagcagagcgtggcaacactgatacttgatagtttaatacagtgtcctattgacaccaggaaacagttggctgaaaatctggtggtgatcggcggaaccagcatgcttccaggtttcctccacagactcttagccgagattcggtacttagttgagaagcctaagtataagaaggccctgggcaccaagacctttcgaatacacacaccgccggcaaaggccaactgcgtggcctggttaggcggcgccatctttggtgctctgcaggacatcttgggctctagaagcgtgagcaaagagtattataatcagactggaaggattcctgactggtgctcgttgaataaccctcccctggaaatgatgtttgacgtcggaaagacacagcccccgctgatgaagcgcgccttttcaaccgagaaatag

SEQ ID NO: 22898 - DNA, 2643 bp, synthetic construct
  source 1..2643: mol_type = other DNA; note = Synthetic coding sequence
atgagccagcccgccggcggccggcggaagccccggaccctgggcccgcccgtgtgtagtattaggcccttcaagagctccgaacagtacttggaagcaatgaaggaggacctggcagagtggctcagagacttgtacggtctggacatcgacgccgccaatttcctccaggtactagaaactggcctggtgttgtgccagcatgccaacgtggtcacggatgcagctctagcttttctcgctgaggctcctgcccaagcccagaaaattcctatgcctcgagtgggtgttagttgcaatggcgctgctcagcctggcacattccaggcgagggacaatgtcagtaatttcatccaatggtgccgaaaagaaatgggaatccaagaagtgctgatgttcgagaccgaggatcttgtactgagaaaaaacgtgaaaaatgttgtgctgtgtttgctcgaactgggaagacgggcctggagattcggtgtcgcggctcccactctggtccagcttgaagaagagatcgaggaagaggtacggcgagaactggctttaccgcccccagacccgagcccaccagcaccccctcgccgacagccctgtcattttcgaaatcttgatcaaatggtgcagtctctcgtgagccactgcacttgtcccgtgcagttctcaatggttaaggtgtctgaggggaagtatcgggttggagattctaatacgctgatcttcatcaggatcctgagaaaccacgttatggtccgagtgggtggcgggtgggacactttaggccactacctcgataaacacgacccctgccgctgcaccagcttgagccacaaaccggggtccttcctgaagccccccgcaccccctgtgcagcatgaggtgcgcgttcaggacgggccttctcaaacccagccgaccatgactatcagcagatcacagtcaccacctcctcccgttgactggaagacctatacttcctccgacagacgactgcgcccccccaccccctcttcgcctagacccagacgggagcgaggcgcaggcacgggggcctctagggaaatggctccattcttgcgctgtcaggaaaggtctttgatcccaagctggaggcagccaacagctggagactctccaccttccccgcagtccagctcaacccagaaaggaagagatccccagtgtacaagctcggggaagcgcgaagagcggtaccctccagaactgccacgggggcgcatacctaccagctgggtgcatgaggagaccgattcctggggaaccgatgcagggaatcccaccccgcagaggctccgagcaattgaagccaccacgaagggcatcagtgctaggggtccatctccattaccgcgctcctttggcccagcggaatgtctcgggttgaggctgcctctacgagacgaggccaaaggcgcctttttccaatttagggaacccgagtccgtgaggagcccaacgcccgtgcaggggttgacaaaaattccaatcaggcttccacctgctcgtccccccacgcccggcagaagttttcccggggccactagcggaagcccccggacagagctgggtcgagaccctatccccctacgggctgtaactgtggatttggcgggctccactcatggggactgcagtgtcgaggttaggcaggaagatcagcagttagacattcaggtcatggccgaggcacgcgaatcttgggacctaggtctgcaggagcaagagggtagatatacacctctcccattgggaggaaataaagagcaggctatctattgctccctggaagaggagattctgggcaacatgaaactgttggaagtgcgatccgcctgtcctcaaggaacccgcagcggcgtcatcccacgttccggcgtttacattcctagactcgccgggcagtggcctgagccaggaggaccttatgataaggccatccaggagttggcacaggggagcccatctctgcttaaagtcgacctggaagcgtggaaggccgctcccaccgggtctccaaaaccggccgtgacccctggcccgggctcactgaagggaaaactgggcgctcgtcaaagcggtcctaggacaaaggcctctctcagcgccaaggggactcacatgagaaaagtgcctccacaaggcggacaagactgttccgctagcacggtgagcgcgtcacctgaggctccaaccccatctccgctggaccccaactctgataaagcgaaagcctgtctgtccaagggacgacggacactgcgcaagcctaaacgagttccatctatatacaaactcaaactccgaccaagaatccggcctcgtagagatcatcgccctgaaaagcagcccagtcgtattccccgccccttagcatatgtgttcctgggacccgcacgtcagcccccaaaagaccggctcttgcgggctgttctcggatccaaaggtggagaagccagtagggttgacggagcctcagttggggaggaagaggaggagggtaaggaagaaaaggaacctgctgccccccttgaaagctcaccccagccaccagaggggctgcaaccccactggctcaatcaggctccactgccaccagaagaggaatcatgggtgtag

SEQ ID NO: 22899 - DNA, 14262 bp, synthetic construct
  source 1..14262: mol_type = other DNA; note = Synthetic coding sequence
atggtgcccgaggagcggcgggtgggcctgagcagcgacgagaccagctccgacagccttaaaagctggcacagcatctgcgtgctggacagtaaagagcaaccactcgcttgtcagcagaaacaacgacagtttgtaaaacctgtaactgagtccgaacaaccaaccgtgctggaattgctgctggctgaacttcgaactctgttttcagctgtgctccaggattcaagcccagccgcctggcgttatctgcatgcagttctggggctgctcccgccataccgcgaactgttggtaggacacttggatctgctcccatttcttgaacagctatactgctgggcgccttgggttcagactcaccttcacctcgaccttctaggtgctatcgtacaggcatttcctcccgacagctctctgctggacagtgcatcccatgccgattgctgtccacaaaaaagacggctccatcaccggccgccatgtcccgcctgccctttcgtacaagcccagtggtcacgtcagcaggtgaaagaggaactggccacttggctaaggcctcttaccctgccagagctgcagaggtgcttaggtatcgtgggagctcaggtcgcgctggaagaagccgtctggctcgacggcctgagcttactgccgttagccctggccgctgacatcccagtgaggtacgaaagttctgatacagataatgcagaggtggaacccgttggaaggaaagagacacgcagtcagttggactacgaggtgcccagggagaaggctttccagaaatctagcaccgggttctccccagagaccagttttctggatagccaggtgatgactgccctgaagatggaacggtacctcaaaaagattcattttctatatcttaacgtagcgccttccaggtattttcgcccttactcgctcatggtggttccacccgacaaggttaatcccgaacactatattttctccccctttgggatacttcacgttcatccagtcgaggggagcgaaaccatgaccctgggcacatggcatcaccactgtgtgctttggcagcaactacaatttatcccgtttttcaaatattgtctcctccggaaatcatttacctgctggaaaaagaacgtgcggctgcagggacttcatcggctacagaagtttctagagaatcacctgctgctggccgtgccccactttggcgcgggccttctgcacatttctagattgttacaggagctccatagtgtatcatggttgccccaggaactggaccgctgctatgagctgctggatttgcagaccgccctggcggaggaaaagcacaaggctctgcgactgcttcaccgctgcctaaacctatgcacctcaatcctgcggctcgtgcacgaggatacctaccacatgcaacagtgtctgcaagaaagagtccagaactgtgacagaattcggactggacagggatccatctatcttcagcgagtgcagcataaacaactggagcagaaactcaagcaggctgaggcatggtggctccagctgggtaagttcgccagactagtggactatatgatatgtcaatcactgatcagcgttctggaagagcagatcactagcttcgtagctaacattctgcaggctccccgtcagaagccgtttctgtcctcccaactggtatttgatgatcatggacagttatctcacgttccgtgcgtcgaaaacatgattcaaaccctgaccggggggctgcaatcagtgaagacttcagcgcttcaggtggtgcagagtgcagaccttaagacgtccagtgacagtctctattctgaggaggaagacgaggaagaagatagtaaggatgagtttcttatgcctaagttccagggccagccgtcagacgcagtgagcattttctgtggtccaaatgtgggactggtgtggccttggaagtcccatccaattgcagggatcttggaggtgagaggctgccgcctcagaggccagtattttcctcacaactacaaacagttggaagaggatctcgacaacaaccccaagattcaacaagctttgaacatccagcaagtactcttggagggagtgctgtgtaaggtccaggagttctgccgtgaacatcactggatcacaggcatttatgagttcctgcagtcctggggtccgcagaagctcgaggacatgagaggcggccctattaagaattacgtaacgcttgtctccaggctcaacgtgtggcaagctcgggttagttcgatgccaatcgaacttttgacaaaaggtggcctgctgctgctgtcatgccatgatgtccaggctgaaatggaatcaaaactcaacagtataaggaaagatatccttgcgcatgtacagaacgaatgttggaacttgtcacagcaactcatgaccgagctgacagattttatgcatattttccgcactatcaatagtgacattcacgcgatagcccagtgtacgcagaagctcaatgaggcaaacgagcaatacgtcgaactggaagaacggatggaatacgtgagagccttgcatgaactgattcgcaatcatttctccctgttctccgccgaaaacgaagcgttggatatcagcgttaggcgccagttcggggaatcacctatccctccttgccccccacctccccaaccgcacctgctccactgtcccctgctcgccccacagttgcttgacatgtgggaagccttccaatttgaaaagtcacaggccagcgagttcctcttaagcaaacgccacgcaatcatgcctaagctgcagcagctcatggccgctgccctcgctgaattggaggggctgctcgctaaggctctatcaggacccttcatggacccgacacaagatcagcgttcaactgagcatcagctggttagtttggaacgccaattccaaaacactgtttccgatctctctgagctgcaccacgcgtacgccatatttactgaggatgagactcctgtccccctgcccatttgcggaaccaggcctatagtccagcagcaaaggatctggcatctgtatagagtgatatcagagaatattagcgaatggaaatgtatggcctttgccaaattttcccccgccatggctcaggaaaaaacagaaggttggctcactgaggcagcacgtatgagcacaacactcgaattgcactctcctgtgctacagcattgtatgcggatcctcggcgaatttcgctcgtacctgcctctactcacaaagctgggatccctgcacccacagtctcttaattgccagtgccttctcagagccctggggctggggagcctgcagacgattgagctgctcacacttgggcagctcctgacttacccgctgttggagtttgctgaccggatcaaccaggtgtggcagaatgaaaacgagcgtattcacgcccaagagactattaggcgacttcagcggtattgggaggctaggcaattacgcttgttgaactttatcttgcacgtaccctacgagccgccggcttcggagaggagtaaacgccaggttctgagatcaccccaatgggaggtggtggataaagatagcgggacttttattctaagcgactactccaatctacaggattccattcaggagtctttacaggtcctaagtaagatcctggccattgaaaaatctggcgacctaaacaaaattgctctggagtgggtcgcaatcatgcacgggctgggggcgctgttggaagtctggttaaccttccagcagaaatggattttcctgaataaggtgctgcatgagatgaaaatccagtttcctaacgctgatttgaactcgaggttcaaggtaatggacgaccagtataggacactgatgaggatctccgttgccgaccccatggtgcttagcctggtggtgcccagcgccgagaggagcccttatttccagggacagcagctgcaacagttattgcaggccggttcagtggaattggaaggaatcatcatgtccttagaatccgtactatatggcgtctgcgcgcattttccccggctcttcttcctgtcggattctgaacttgtggcactgctcgccgcccgattggagtcttgtgaagcccagctgtgggtccgccgatgttttcctcacgtccacgctgtatcatttcggagttgtcccacaggggagaagaacacggacgactgggagtcgtctcctaacacacagacacaagtggaagcactggctgttctaggtgcaggtggcgaggaggttaagctgcaggggccattaccactgcatccagatctgcccaaatggctggccagtctcgaaaaatgtctccggttagccctcgtgcacatgctccaaggttgtgtcgccgctcggctagctcggggccctagccttggggaggccctaaagcagcttcctaaacagaataaattgtacctacagctgtacgtccaacactggattgatttggtccaagcatttccctggcagtgtgtgcttgtcgctgaggaggtcgtttggcgagcagagatggaagaggcactgctggaatggggcacactcgctatggtgtcgatgcacatgaggaagttggaggtgttagttaatttcatgcgcgcacagcgggctagccagggaggacaatcccttccgtccgtgcgccagacatccttgctctctgccctgctggtgatggccgtgacgcatagggacatcgctcaactgcttgagcaacatcaagtgtccgatctcacagattttcactgggttcgccaattaaagtaccatctgggatctccacacatcattccaaaatccccactccaaagtcttaagacaatcgcttcaagtgaacccagcctgtcacccgccgcctgctggatagacgtgcttggaagaagttttctctacaattacgaataccttgggccaagattgggcccgctgccatctttgctgcctgagaggcccgccttagtactgctgctagccctggaagaagtagcctgcgggaccgtattaggccccaatggggtgggcaagcgtgccattgttaatagcctcgcgcaggcacttggcaggcagctggtgatgctaccatgcagcccacaaatcgaggcccaatgtcttagcaattatctgaatggcgctctccaaggaggggcatggttgttgctggaaaaggtccaccagcttccgcccgggctcctctctgctttggggcagcgtcttggggagctgcaccatctgtacgcccccctttatcaagaggccagtaggaacaccagtactattgaccccactcagccccagctgctcggaagttccttcttcgaaaaacatcacgtgagcgtgcggctcggctacggatgcctactagttcttcgcgcccttagttctgctgtcccagccaacctccatttactcctcaggcctgtggcccttgccttgcccgacctgagacaggtggcagagctgactctgttgggggctggcatgagagacgcctttcagatggccactcgtctgagcaagtttttcagcctagaacgggagctcgtgtccggtcctctgccatgccgtctgcccctcttgaagcagatcctggaagatacaattagaacactcaacgtgaccaaggaggaaccaaagtgtcagaagcccaggagtctcgcggcaatagaggaggccgcattgctgcgtagccctttgtttagcatccttaatggcctccacctccataatctgcgcggtttgctgtgcgctctgtttcccagcgcttctcaagttctggccgaaccaatgacatacaagctgatgaaaccacttgtagttgaagaactccaacaggtgggcctggatcccagcccagacattctgggatccttagaacagctgtcacaagctctctcccgggcgtctggaatcctgctccttgggccagcgggctctggtaaaacaacttgctggcatagtctattcaaaatccagaaccgacttgcggccatggaagacacgagtacacagggttgccaaccggtggagattactcatctctacccgtccggcctgagccctcaagagttcttgggctggctggaaggcagttgctggcatcacgggatcttccccaaggttttaagagcagcgggccaatgcaacaacatgggccaaaagcgacagacggaggagtccattgggattcaacattggatcatctgcgacggggcctccaacggagcctggctggactctatcacctgcttgctgagtgaattgccgcaactgtccctccctagcggccagcagatcgctcgccctcccggtacctttttactgatggaagttgccgatactaccgggatcagtccaaccgtggtcggctgctgtgcccttgtgtggtgcggcggcgagcaaacgtggcagtgtattctaagtgctctgatggcttccctgccatacgaatatcgattgcagcaccgaacggtggccgagctcaatcacatggccgaggtgctggtgccagcaacattgagattcttaacttgccagggagttagctcattgttacaagtccatggccagcaggctgtgtgcgctggcgtcgccgaggtgacctccatggctagaatcctgcactccctgcttgatctgcacctgcgcctgaaggaggagaaagctcccggccccgaagatctaagttattctgaccccgtggctcaatcattcaggtccagcaaaagctctttcctcaatcggagccaggttgactcggacgacgtgcccgacaaatgcagagagcatctgctcgctgtgtcgagctttctctttgctcttatatggggctttggcgcgcacttgccttccaggttttggcctatcttcgacacattcatccgggatagcatctctcggctgtccaattatcccgaaccccctcccagtgccttagtgtttgacctgcacgtgtctcccgaggacgggacactggtcccctttactggacaatatctgtcctctcatattaaagggaccctgggaacctttcaccctagcattcagaccgaacgcctgctgtatgttgtggacctgctcctgtccgggggccagcctgtgctcctcgcgggagaggccgctaccggaaagtctgcatttgtggaggtactggtagagccgcaccacccctacatatactcacctattcatcccgctttttctagctcccatctacggctactcctgtcccgggggattcaaggccagacccaggcaagcccgcagcccgggcatcaccaagacagcaaaccgagcctgctgttcctgctcgaggaccttcacctagcgactagcgaccctgagaaatcctgtcaaccagtccttgaaacactcagacaagccatggatggaaccgtctatgcccatagcacgctcgaattacagactctgcaacctacggtgaactttctggccaccgtaaccgttccagggtattgcgaacgaccgctgtgcccaaggctgttcagactgtttacggtgcttgcccttgagtccatgactcaggcgactctgctggagcggcacgtccccatcatccaggcatggttagagagatttccttccgtggaacgggagcgggcactcgcccggggcttagtgcgagcttccgtagaggcatgggaagcagtgtgtaactgctttatgccctcacctcttcatcctcactaccattttagcctgcatagtgtgagccatctgctaagtagtctgcagctcttaccaaaccgaaccggcagtcgaggcttcgtcgactacccaaaccatcaggagcacctgaggagagtctcaggtctgaggggaacgtgcctgaccgttatgatggccactcgtaacgtggtaaggttgtggttgcacgaggcacagcggacattctgtgataggttggattcgcccagggagcgcagctactgtgccaagctactgctggtcgttgcccagagcgtcttttgctgtggacccggtccacagcaccttggtaaagatcaccaagagtctgaggaggaggaggaagaggagcgggtaccagaagttgagtccgagggcgaactggcacagtgggaagatttttcaaactctaatagcgagacggaggaggaggaagaaccctacggcctgcaagtcgctcgggtttctaacagccgggatccttccctcacacctagcataggccctgtgtcgaggggcatgaaggaatctatcagccacaagatccgccaggagaagggaactagggctagcaactaccgtcttcaggtgagacggtcgtttaagacgtggtggcaaaaaaagcctcaaatggatctgatctcacccttgctactcccagtactgctgcttcacccacaggaaaagccttccgacctggtgttttctcaggaattgatcttgggacccaattctgaaacgcccaatctatacttggaacggcagtgggaaaagttggaggagcaacttgctaccagcgcagctcaacttaaattaagtcctcacctagcgcgctgtcattccatggcgcagcacgtggctaggctggtccgagtgctagccaggccccgccagcatggcctgctgctgagtggcgccctgggcacaggtcgccacacagccattacgctggcaagcagcatatgccaggcccatttctttcacctcccatctggaagcgaggaagctattttacagtgcctccgcgatgcaagctggcacgcggggatgctctcccagccagtggcactgctggtcccctccggcgtagacttgaccaccctgcaccgactgctggccctggctaccagtggcagcttccctgggcagtacactgaggcagatctggaccgcatcggagagcatcttccacgggagaaccttggagtgaaacagaacatcaaaaaagagatggtgctgcagagattccatcagcaggtttgtagccatctgcatctttttttcttgatcggggacaagcaggcccacaaacagcttccttccacgctgttcctgagattgcttcaactggcaaccgcctccatcgataggtacgaaccctgggatcaggcagctctcgctaaagtggcccagcatcatctggaaggtgcccaaagcgtcccactggatgatgggagctggaagtacccggaccttcaggcatcgatcccgtccgtcgcaaaggcaatggccttaatccacctgtccgcaacccactatcatgagcacctttgccccgcacttcccctcgtcacgcccaagaccttcttagattttctcgacacattcttgatgctccagcaacaaactatcttgaaaatcaagaataaagcccagcgggttcagaatgccttggaaaatctgagaatgctgatcaaggaacatggaacacatgccaacctaatattcgatctggaacagcaattaaaggatagcggcaaatccctcagcatgttccagcaacagctggagcaaagcaagctgctgtacaagcaacagctcgaggaatgtagacatcaggaaaacctgatcgagaaccttgctaggcagagagatgcccttcaggcccagcgagaagctttcttggagcagatgagtaaggcatttttagagcccctaagtcagctgcaggtcgccgactttgaggagatccgaagctatagggccccgccagagtctgtggtgcgcgtgactgacgctatgtgtgacctatttcaccatgagacaggctgggcatctgcaaagcaattgttgtgcactgaggacttctaccaggagctggtgttcttcccaaaagagaaaatcacggacagcgagctcattaagctccacctgattctgaaggctcccggcatggacgacgccgcacttagagcggtatcacggcctgcagcttcgctggccgcctggctatgggccgttttgcactacggtctggcacattgccggggcttgcccacagaccttctgttgcagcaggtcgaggccaccctcacccgagagcaggcaaggctcggttactatcagttccaagcccaggagacgctggagcacaatcttgctttggccaaaatggtggaggatgctcaggcgagtcacaattgtgtcgctaagaccctcagtcaagcacagtgtggccagtatcacaaatggccgatgaaggccgcccttcttacacccatgagagcctggacaacccaactgcagaaactcaagggacgatgtatgactgtgttcggtgatactctactctgttccgcggcgataatctatttaggccctttccctcctctgcggcggcaggagctgctggacgagtggttagccctgtgcagagggtttcaggaggctctgggccccgatgatgtggcccaagctctaaagcggaagcaaaagagcgtgtccattcctcccaagaatcccttactagctacacatagtccatttagtattctaagtctccttagttcggagtccgagcagtaccagtgggatggaaacctcaagccgcaggccaagtccgctcatttggctggcttgcttctccggagcccgactcactacagttcttgcaggtggccactgcttttagaccccagcaacgaagcgcttatctggttggacccccttcctttggaagagaaccggtcgttcgctccagccttaacagaaggccggggcaagggcctaatgcgaaatcagaaacgcgaaagcaagacagacatgaaggaagaagacgacgagagtgaggagtcaaacgaggccgaggatcagactaaggaacagaaagctgaagagcgcaaaaatgagcaagaaaaagagcaagaagaaaacgaggagaaggaagaagagaaaacagagagccaggggtccaaacctgcttatgagacccagctcccatcccttccctacctgagtgttctgtccggcgccgaccctgagctgggctcccagctccaggaggcagctgcctgtggcctgccggtgctgctcacaaatgtggaactgggtctgggatgcgaggaactgcagtggctgttacagagagaacaactgtctcctccgcaggtgcaacccggattttgcctttatctttcgaccacgttgagcctgtgcgccatggaaaaagtgctaggatgcgaattactcaaaggcctcaatgtgttagacctcggactaaatatggagatcctggaggagcagatgttgcacgagatcttatgtagggagtatcctgaactggagactcggtggcaggacctcaaaattagggcacttgacacatgcaaagccgttgaggctgctgaagagcgcctgcttaccatgctgcttttccagaaccctaagcggcaaaagccggctaagtttctgagaaatattgttcgggctcagggcaaattgtgccagctgcgtgcccactgtgaagagctggagggacagaagctccaggaaatggtgctctgggctccatataggccagtggtgtggcatggcatggcaatggtgaaggctctgtctcagctacagaacctcctcccactattctgtatgagcccagagaattggcttgccgttacaaagcaggccctggatagcatgaagccacgggagatcaatcatggagaggacctcgcctcgcacttgcttcagctgagggcacatcttacccgacagttgctgggatctaccgtgactgccctgggactgacacaggttcctttagtaggggccttgggtgcactggccctgcttcaggccaccggcaaagcctctgaactggagcggctagcgctgtggcccggcttggcagcttctccatccactgttcacagcaagccagttagcgatgtggctcggcctgcttggttggggcctaaagcatggcacgaatgcgaaatgcttgaactccttccccctttcgtcggcctgtgcgcctcgctggctggccactcttctgcttggcaggcttacttgtccctcagctcaacagtcctgggtcccgcccccggccccggtccagagcctctctctttactgcagaaactgattctctggcgggtgctgcggcccgagtgcttagccggagccttagccgactttacgacatcccttctcggcagaccactcgatgaaaacacctacgccccaacaatgccatttaaacactcacaggctacccagccaatgctgatcttgttgcccccaccaggtcacccttctgcaaccctgcatcctctgaccgttatccaaaagctggcagctaaatatcagcagggacagaagcagttacaggtgattgctttgggaagcgaagcgtgggaccccgtgtctgttgtcgtaagtaccctgtctcaagctatgtatgaagggcactggctggtcttggataattgccacttaatgccacactggccaaaggagctgctgcagctcttactagaattacttggccgagccaaagtggtcgctgatttggaatctgagcagctccttgatcaacctgaatcaagaaatgtcagcaccgtgcatcgggactttcggctgtggctaattgttccagccgaaagttctgcctccctgccagctgtgttgacacagcacagtatgcccgtgttctggaaccagtctctcgaactgggccacgttttgatcgattcagtggaacttgctcaacaggtgttatacatgcagccccctactcaggccctgcctctactgctactccacggcctcctgcttcaccgacagctgtatgggacaaggctccaggctcacaggggcaggtggtcacaagtgacactgactcaggtgctgcagacccaggaccagctttgggccagcttgagcaacccccgggccgccatgcaagaactagccgcttccgtcttttatggcggaccactgggcgatacagaggacagagaagctctcattagtctcacacaggcctgcttatcaccttcctctggatcctgggttcagccccatacaccacaatccctgctggcaactctcatgcctctacccgagctgagagaactggacgcaatggccgaatgtaaggcccagatgcatctgctcccttctccacctgaaccccgactgtgtggcctgagtgaggggcctcaggcctggcttctaaggaggcagtctcgcgctcttctctctgccctccaacggagcagcccagtatgggtgccagaatctagaaggggtgcacagctcgccgagaggcgcctccgacagaggctggtgcaggttaaccgaagactggagagcttgcaggatctgttgacccacgttatccgacaggatgagtccgacgcaccctggagtgtattagggcctaatgcgcggagacctttagaaggtgttctggagaccgaggctctggaactgtcacaactggtcggcacactgcagcgcgatctggactgccttctccagcagttgaaaggggcgcccccctgtccctctagacgctgcgccgccgtcgcacatgcactctggacaggacgcctgcccctgccgtggcgacctcatgccccggccggaccccaacccccttggcactggttgaggcagttaagtagacgggggcaactgctggtgcggtatctgggggtcggagcagacgctagctctgatgtgcccgaacgggtgtttcacctaagcgcctttagacaccccagaagactattactagcgttgcgcggggaagcggcccttgaccagaatgtgccaagttcaaactttccgggatctcggggctctgtttccagccaactgcagtacaagagactcgagatgaatagcaatcccctccacttccgagtcgaaaacggcccaaatccaactgtgcccgagcgtgggctgctcctgatcggcctgcaggtactgcatgcggagtgggaccctatcgccggcgccctccaggatagtccatcttcgcagccctctccactgcccccagtatcaatctccacacaggcgccaggcaccagtgacttacccgcccccgctgatctaacagtgtattcatgtcctgtatatatgggtgggccattggggaccgctaaactccaatccagaaacatcgtgatgcaccttccactcccaacaaaattgactcccaacacctgtgttcaacgacgggtgcacgtgtgttccccaccgctgagttag

SEQ ID NO: 22900 - DNA, 1179 bp, synthetic construct
  source 1..1179: mol_type = other DNA; note = Synthetic coding sequence
atggacctgttcggcgacctgcccgagcccgagcggagcccccggccagccgccggtaaagaagcccaaaagggcccactgttgttcgacgatttaccacctgcaagttcaacagatagcgggagtggcggccccctgttatttgacgatctgccccccgcaagttcaggcgacagtgggtccttggctacttccatcagccaaatggttaagacagagggcaagggagcaaaaaggaagaccagcgaagaagaaaagaatggctcagaggagctggttgaaaagaaggtgtgcaaagcctcctcagtcatttttggtttgaagggttatgtggctgagcggaaaggtgagagggaggaaatgcaagacgcccatgtgattctgaatgatatcactgaagagtgccgaccaccttcttccctgatcacccgggtgagctattttgccgtctttgacggccatggtgggatcagagccagcaagtttgccgcccagaacctgcaccagaacctcatccgaaagttccctaaaggcgacgtcataagtgtcgagaaaacagtcaagagatgtttgttagatacatttaaacacactgatgaagagttcctgaagcaggcgtcctcccagaagcccgcctggaaggacggctccacggcaacatgtgttctggcggtagataatattctttacatagccaatctcggggacagtagagccatcctctgccggtacaacgaggagtcccagaagcatgccgcccttagcctgagcaaagagcataaccccactcagtatgaagagagaatgagaattcagaaggctggggggaacgtgagggatgggcgtgtgctgggcgtcctcgaagtgtcccgatccatcggggatggccaatacaagaggtgtggggtgacttctgtgcccgatataagaagatgtcagttaaccccaaacgatagattcatccttttagcctgcgacgggctatttaaagttttcacccctgaagaagctgtgaacttcattctgtcatgccttgaagacgagaaaatacaaacgcgcgaaggcaaaagcgctgcggacgcccgctatgaagccgcttgtaaccgacttgcaaacaaggcagtccaaagagggagcgctgataatgtgactgtgatggtagtgagaattggccattag

SEQ ID NO: 22901 - DNA, 2193 bp, synthetic construct
  source 1..2193: mol_type = other DNA; note = Synthetic coding sequence
atgttcggccggaagcggagcgtgagcttcggcggcttcggctggattgacaagacgatgctggctagcctgaaggtgaagaaacaggaactagcaaattccagtgacgcgactctgcccgaccggcccttatcacctcccctgacagctcctcccaccatgaagagctctgagttttttgagatgctagaaaaaatgcaggggatcaaactggaggagcaaaaacctggaccacaaaagaataaagacgactatattccatatcccagtatcgatgaagtggtcgagaagggggggccttacccccaggtgattcttccccagtttggcggatattggatcgaagatcctgagaacgtaggcacccctacctcactaggatcatcaatatgcgaagaagaagaggaggacaacttgtcccctaacactttcgggtacaagctggagtgtaagggtgaagcccgggcttatcgtagacacttcctgggcaaagatcatttaaacttttactgtacgggtagctcactaggtaacctgattctctccgtaaagtgtgaggaagctgaagggattgagtatcttcgcgtgatactgcggagtaaacttaagacggtacatgagagaattcctctcgcaggcctcagcaaacttccctccgtccctcagatcgccaaagcgttttgcgacgacgcggtcggacttagatttaacccggtgttatatcccaaggcctctcagatgattgtgtcctacgacgaacatgaggtgaataacacgtttaagttcggtgtaatttatcaaaaagcccggcaaacactcgaggaggagctttttggcaacaacgaggagtctcctgcatttaaggaattcctcgacctgttgggtgacacaattactctgcaagactttaaggggttccgcggcgggctagatgtgacccacgggcagacgggagtcgaaagcgtttacaccacattcagggatcgcgagataatgttccacgtgtctaccaagctgccctttacggatggcgacgcccagcagctgcagcgcaaaagacacatcggcaacgacattgtggccattatctttcaggaggagaacacaccttttgttcccgacatgatcgcttctaattttctccacgcatatatcgttgtccaggtagagacccccggaacagagaccccctcttacaaggtgtctgtcacggcgagagaggatgtgcccacgtttggaccgcccctgccttcaccgccagtattccaaaaaggccctgagttccgagaattcctgctcaccaagcttacgaatgccgagaacgcatgttgtaagtctgataagtttgccaagcttgaggaccggacccgcgccgccttactggacaacctgcacgatgagctgcatgcccatacacaagccatgctgggtttgggtcccgaggaggacaagtttgaaaacgggggccacggtgggttcctggagtctttcaagagggccattcgcgtgcggtctcacagcatggagacgatggtgggtggtcaaaagaagtcgcattcaggaggaatcccgggaagcctcagcggcggtatatcacacaactcaatggaggtcacaaaaactaccttctcgcccccagtggttgcagccacagtgaaaaatcaatcgagatcaccgataaaacggcgcagcggcttgtttcctcgtctccacaccggatctgagggccagggagactcccgtgctcgttgtgactcaacctccagtactccaaagactcccgatggagggcacagctctcaggagatcaagagcgagacgtcaagcaatcctagctcccctgaaatctgccccaataaggaaaaaccatttatgaagttaaaggagaacggcagggctatctccagaagttcttcctccacatccagcgtgagcagcacagcgggcgagggcgaggccatggaagaaggagactcgggcgggagccagccgagcacaacctctcccttcaagcaggaggtgtttgtctattcaccatcaccctctagcgaaagtcctagcctcggagccgcagcgacaccaataatcatgagccggtcgcctacagacgccaaatccaggaactcacctcgctccaatttaaaattcagattcgataaactgtcacacgctagtagtggcgctggtcactag

SEQ ID NO: 22902 - DNA, 1110 bp, synthetic construct
  source 1..1110: mol_type = other DNA; note = Synthetic coding sequence
atgtggagcggccggaagctgggcagcagcggcggctggttcctgcgggttttgggccctggcgggtgtaacactaaggctgcccgtccgcttattagctcggccgtgtatgtgaagaatcagctaagcgggaccctgcagataaagcctggtgtattcaacgaatatcgaacaatctggttcaagagctaccgcactatcttcagctgtctaaatcggatcaagagcttccgctatccttgggcccgactctatagcacttcgcagaccactgttgatagtggcgaggtcaaaacctttctggctctggcccacaagtggtgggacgaacagggcgtatatgcgcccctgcattcaatgaacgacctgagggtgccattcatcagggacaatctgctgaagactatccccaaccaccagcccggcaaacctctgcttggcatgaagatcctggacgtgggttgcggcggcgggcttcttacagagcccttgggacgattaggagcaagcgtaatcggaattgatcctgtggacgagaacattaagacagcacagtgccacaagtcattcgatccagtgctggacaaaaggatcgaatacagagtctgctcgctcgaggagatagtggaggagaccgcagagactttcgacgccgtggtagcatccgaggtcgtcgaacacgtgatagaccttgaaacctttcttcagtgctgctgccaagtgttgaagcctgggggtagtttgtttatcactactatcaacaaaactcagctgagctacgcattaggtattgtctttagtgaacagatcgcaagcatcgtcccgaaggggactcatacctgggagaaattcgtttcccctgaaaccctggaatccatcctcgaaagcaatggcctgtccgttcagacagtcgtcggtatgctgtacaatccttttagcggctattggcattggagtgagaatacaagtctcaactacgccgcttacgctgtgaagtctcgtgtgcaggaacatcccgcgtccgctgaattcgtgctgaaaggggagacggaagagctgcaggccaatgcttgcaccaaccccgcagttcacgagaagttgaagaaatag

SEQ ID NO: 22903 - DNA, 1782 bp, synthetic construct
  source 1..1782: mol_type = other DNA; note = Synthetic coding sequence
atggagggctgcatgggcgaggagagcttccagatgtgggagctgaatcgacggctagaagcttacctggcccgagttaaagcactcgaggagcagaacgaactacttagcgcagaattaggcggtctcagagctcaaagcgccgacacttcttggcgggcccacgctgacgatgagcttgctgcgctgcgggctttggttgaccagcggtggcgtgagaaacatgcggcagaagtcgcccgagacaacctcgctgaagaactcgagggcgttgccggacggtgccaacaacttcggctggcaagagagcggaccacggaagaggtggcccgcaataggagagccgttgaggccgaaaagtgcgcacgggcctggcttagttcacaggtcgccgagcttgaacgagaactggaagcccttcgcgtggcccacgaagaggagcgggtcggcctgaatgctcaagcagcctgtgcaccacgctgtccagcccctccccgggggccacctgctccagcgccagaagttgaggagttggcaagaaggctcggagaagcctggcgtggagcagtccgtggctatcaggaacgcgtcgcacatatggaaacctctctgggccaggcccgggagcgactgggcagagccgtacaaggcgcccgcgaaggtagacttgagttacagcagctacaagccgaacggggtggccttttggaacggagggccgccctagagcagagacttgaaggtaggtggcaggaacggctgagagcaaccgaaaaatttcaactggctgtggaggcccttgagcaggaaaaacaggggctgcagtcacagattgctcaggtgctggaaggacggcaacaacttgcacacctgaaaatgtccctgtcgcttgaggtggccacatacagaactctgctcgaagctgagaacagtcggctgcaaacccccggcggtgggagcaaaacctcactatcttttcaggatcctaagctagaactgcagttcccccggactccagagggacggagattgggatcgctccttcctgttctgagtcccacctccttaccatccccattgcctgcgacactggagactcccgtgccggcatttttgaagaatcaggaatttctccaggctcggaccccaacactggcatccacccccattcccccaaccccgcaggctccatcaccagccgtggacgccgagatccgagcgcaggacgcccccttgtctctgctccagacacagggcgggagaaagcaggctcccgagccactgcgtgcagaggcccgggttgctatacccgcgtcagttttgccgggaccagaagagccaggaggtcaacgccaagaagcatctacaggccagtcgccagaagatcacgcttcactagcacccccactcagtcctgatcacagcagcctggaggctaaggacggggagtccggcggctctagggtcttctccatttgtcgtggggagggggaagggcagatttggggccttgtggagaaagagacggccattgaaggtaaggtcgtctcctccctccagcaggagatctgggaagaagaggacctaaataggaaagaaatacaggactcacaggtcccattggagaaggaaaccttgaagtctttaggcgaggaaattcaggagtccctaaaaactcttgaaaaccaatcacacgagactcttgagcgggaaaaccaagagtgtcctcgtagcttggaagaagaccttgagactctaaaaagtctggaaaagaaaaagtag

SEQ ID NO: 22904 - DNA, 3456 bp, synthetic construct
  source 1..3456: mol_type = other DNA; note = Synthetic coding sequence
atgatggccgccgccctgggcccccccgaggtgatcgcccagctggagaatgccgcaaaagtgctgatggcgccgccatccatggtaaacaacgagcagaggcaacatgcagagcatatcttcttgtcgtttagaaaaagtaagtcgccttttgcagtgtgcaagcacatcctggaaaccagcaaggtggactacgtcctgttccaggccgctacagctatcatggaggcagtggttcgtgagtggattctgctcgagaaaggctctatcgagtctctgcgcaccttcctgcttacttacgtcctgcagagaccaaacctccagaagtacgtccgggagcagattctcctggccgttgcagtgatcgtaaaacgggggtcgctggacaagtctatcgattgtaaatctatcttccacgaggtgtcacagttaatcagtagcggcaaccccactgtccagacactagcctgtagcatcctgactgccctgctatccgaattttcctccagctcaaaaacaagcaatatcggcctcagcatggagtttcacggaaactgcaaacgagtgttccaggaagaagacctgagacagatttttatgcttactgtggaagtccttcaagaattcagccgaagggagaacctcaacgctcagatgtcaagcgtgttccagcggtacctagctctcgccaaccaggtcctcagctggaacttcctgccaccgaatctgggccgtcactacattgccatgttcgagagctctcagaacgttctgttaaagccaacggaatcgtggagggagaccttgctcgactctcgcgtcatggagttattcttcacagtgcatcgtaagataagggaagattctgatatggcccaggactcactgcagtgtttggctcagttagcaagcctgcacggccctatctttcccgatgagggcagtcaggtggactaccttgcgcacttcatcgaaggcttgctgaatacaattaacgggatcgagattgaggatagtgaagccgttggcatatcctccatcatctcaaatctcataacagtgttcccaagaaacgtattgaccgccataccctcagaacttttttctagtttcgtgaattgtctcacccatctcacatgcagctttggtaggagcgcggctctcgaggaagttctggacaaggacgatatggtgtacatggaagcatatgataaactgcttgaaagttggctgaccttagtccaagatgacaagcacttccacaaagggttcttcacccagcacgctgtccaggtgtttaattcctacatacagtgtcatttggccgccccggatggaacccgcaaccttacggcaaatggggtggccagcagagaagaggaggagatttccgaactgcaagaggatgatagggaccaattctctgaccaactcgcctccgttggaatgctgggacgcatcgccgccgagcactgtatcccactgctcacctcccttttggaggagcgggtgaccagactccatggacagctccagagacatcagcagcagcttcttgccagtcccggctcgtcgacagttgataacaaaatgttggacgatctctacgaggatatccattggctgatcttggtcactgggtatctgcttgccgacgatacccagggtgagacacctctcattcccccggaaattatggaatactccataaagcacagctctgaagttgatattaacaccacgctacagattctgggctcaccaggggaaaaagctagcagcatcccagggtacaatcggacagactccgtaatccggctgttgtccgccatcctgagagtgtccgaagtggagtcacgcgccatcagagcggatctgactcatctattgagcccccaaatgggcaaagatatagtctggttcctgaagagatgggccaaaacatacctgttagtggacgagaagctatatgaccagattagcctgcctttttcgacggctttcggtgctgacaccgagggatctcagtggatcatagggtacctcctgcagaaagtgatcagcaacctatccgtctggtcctcagagcaagacctggcaaacgatacggtacagctcctcgttactttggtggaacgacgcgagcgcgccaatctggtcatacagtgtgaaaactggtggaatctggcaaagcagtttgcgagtaggagcccgccgcttaacttcctaagttcccccgtgcaacgcaccctaatgaaagcccttgtactgggcggcttcgcccatatggataccgagaccaagcagcagtattggacggaggtgctacaacctctccagcagcggttcctccgggtcatcaaccaagagaatttccaacagatgtgccaacaagaggaggtgaaacaggagattactgccacccttgaagccctgtgcggtatcgcggaggcgacccagatagataacgtggcgatcctcttcaacttcttgatggacttcctgacaaactgcatcggtctgatggaggtatataagaacacaccagagacagtgaatctgataattgaagtctttgtggaggtggcacataagcagatttgctacctgggggagagtaaggcaatgaacctgtacgaagcatgcttaacccttcttcaagtctatagtaaaaataacctaggccgccaacggatcgatgtcaccgctgaagaggagcagtaccaggacctgcttctcattatggaacttttaacaaacctgctcagcaaggaatttatagatttttctgatacagacgaggtctttcgtgggcatgaacccggacaagcagcgaatcggtcagtctccgctgccgacgtagtactgtatggggtcaacctgatacttccgctgatgtcgcaagacttgctgaagttccctacgctgtgtaaccaatattacaaactgatcactttcatttgcgagatttttcctgagaagatcccacagctgcccgaggacttgtttaaaagcctgatgtacagcttagagctcgggatgacgtccatgtcttccgaggtctgtcagctttgtctggaagccctgacacctctcgcggaacagtgcgccaaggctcaggagaccgattccccactgttcttggccacgagacactttctaaagttggtgtttgatatgctggtgttacagaagcataacactgagatgacaacagcagccggtgaggctttttacactcttgtttgtcttcatcaggcagaatactctgaactggtggagacgctgctgtcgagccagcaggatccggtgatttatcagagacttgccgacgctttcaacaagctgactgcttcttccactccccccaccttagaccgaaagcagaagatggccttcttgaagagtctcgaggagttcatggctaatgtcggcggcctattgtgtgtgaaatag

SEQ ID NO: 22905 - DNA, 1578 bp, synthetic construct
  source 1..1578: mol_type = other DNA; note = Synthetic coding sequence
atggccgccggcggcagcggcggccgggccagctgcccccccggcgtcggagtgggacccgggactggcgggagccccggcccctccgctaacgcagccgcaaccccagcccccggcaacgcagctgctgccgcggcagctgcagcagcagctgctgcagcgccaggacctacacctcctgccccaccggggccgggcaccgatgcacaggccgcaggagctgagcgggcagaggaggccgctgggcccggggcagcggctctgcagagggaggccgcctataattggcaggcctccaagcctacagttcaagagagatttgctttcctgttcaataacgaagtcctgtgcgatgtacacttcctggtgggaaaaggtctgtccagccagcgtatccctgctcaccgcttcgtgcttgccgtgggtagcgcggtatttgatgctatgttcaacggtgggatggcgaccaccagcactgagatcgagctgccagacgtcgagccagctgcgttcctcgccctgctgaagttcttgtacagtgatgaggtacagatcggacctgagacagtaatgacaactttgtacaccgccaaaaagtacgctgtgcccgctctggaagcccactgcgtggaattccttaagaagaacttgagagctgataacgctttcatgctgctaactcaagcgcggcttttcgatgaaccccagttagcctccctgtgcttggaaaacatcgacaaaaatacagcagacgccatcacagccgaaggctttacagatatcgatctggatacacttgttgccgttcttgagcgagatacgctggggatacgagaagtaagactgttcaacgccgtggtgcggtggtcggaggccgagtgccaacggcagcaactgcaggttaccccggaaaaccgccggaaagtccttggaaaggcccttgggctgatcaggttcccgttgatgaccatcgaggaatttgctgccggccctgctcagtccgggatcctcgtcgacagagaggtagtgagcctctttctccatttcaccgtaaaccctaaaccaagggtggagtttatcgataggccacgctgctgtcttagaggaaaagaatgctctatcaaccggttccagcaggtcgagagtaggtggggttatagtggcacctccgataggattcggttctccgtgaacaagcggatcttcgtggtcgggtttgggttgtacgggagcattcacgggccaactgattaccaggtaaacattcagatcatccacactgacagcaatactgtactgggacagaatgataccggcttttcatgtgatggctcagcctccacctttagggttatgttcaaggagcctgtggaagtgctgccgaatgttaactacaccgcctgcgccactcttaagggcccggattctcattacggcacgaagggcttgcggaaagtaacacacgagagccccactacaggggctaaaacgtgcttcaccttttgctacgccgccggaaataataacgggaccagcgtagaagacggccaaatccccgaggtaatattctacacctag

SEQ ID NO: 22906 - DNA, 525 bp, synthetic construct
  source 1..525: mol_type = other DNA; note = Synthetic coding sequence
atggccaccgtggccgagctgaaggccgtgctgaaggacaccctggagaagaagggggtgctaggccacttgaaggcacgaatccgggccgaagtttttaacgcactggacgacgacagggagcccagaccaagcctttcccacgaaaacctgttaatcaacgagctcatccgcgaatatcttgagttcaacaagtacaagtacacagcttccgttttgatcgccgagagcgggcaacctgtggttccactggacaggcaatttctcatacacgagcttaatgctttcgaagagtccaaagacaacactattccattgctgtatgggatcctggctcacttcttaaggggtactaaggacggcatacagaacgcctttctcaaaggcccttcattacagcctagcgatccttcgctcgggagacagccttcccgcagaaagcccatggacgaccatctgagaaaggaggagcagaaatccacaaacatagaggatttgcacgttagtcaggccgtgaatcgttag

SEQ ID NO: 22907 - DNA, 1257 bp, synthetic construct
  source 1..1257: mol_type = other DNA; note = Synthetic coding sequence
atggccggcagcctgcccccctgcgtggtggactgcggcaccggctacacaaaactgggatacgccggaaacactgagcctcaattcattattcccagctgtatagccatcagggaaagcgcaaaagtggtcgatcaggcgcaacgtagggtgctgcgtggagttgatgatctcgattttttcattggcgacgaagccattgacaagccaacctacgctacgaaatggccaattcggcacggtattatcgaagactgggatctgatggaaagattcatggagcaagtagttttcaagtatctgagggccgagccagaagaccactactttctgatgactgagcctccattgaataccccagagaatcgcgagtatttagctgagattatgttcgaatccttcaacgtgcctggcttatatattgccgtccaggccgtgctcgccctcgcagcttcgtggaccagccgccaagtcggagaacgtactttgaccggaatcgtcatcgactctggggacggagtgacacacgtgataccagtggctgaggggtatgtaattggatcctgtatcaagcatattccaatcgctggtagagatattacatatttcattcaacagctgttacgggaaagagaggtgggcattccccccgaacagtctctggaaaccgcgaaagccatcaaggagaagtattgttatatttgtcccgacattgtcaaagagtttgctaagtatgatgtagatccccggaaatggatcaaacagtacaccggcataaatgcaattaaccagaagaagttcgttatagacgtcggatacgagcgtttcctaggccccgaaatctttttccaccctgaattcgctaatccagattttatggaatcaatcagcgacgtcgtcgacgaggtaattcaaaattgtccaattgatgtgcgccgccctctgtataagaatgtggtgttgtccggcggctccaccatgttcagggattttggccgcaggctgcagagggacctgaagcgtgtcgtcgatgcccggctcagactgtccgaggaactttccggaggccgcataaaaccaaagccggtcgaggtgcaagtggtaacacatcatatgcagcggtacgccgtctggtttggaggaagcatgctggcgagcactcccgagttcttccaggtgtgtcacaccaagaaggactatgaggagtacgggccctcaatctgccgacacaacccagtgttcggagtgatgagctag

SEQ ID NO: 22908 - DNA, 1044 bp, synthetic construct
  source 1..1044: mol_type = other DNA; note = Synthetic coding sequence
atggccgccgccgagcccgccagcagcggccagcaggcccccgccggtcaaggccagggacagcggccccccccccaacccccgcaggcccaggcccctcagcctccaccccccccacagttgggcggggccggtgggggctcaagtcgccacgagaaaagcctcgggctgctcaccacgaagttcgtgtcactgctgcaggaggctaaagatggtgtcctggacctaaaagccgccgcggatacactggcagtccggcaaaagagacgcatttatgatattacaaatgttctggagggcattgatctgattgaaaaaaaatccaaaaactccattcagtggaagggggtgggagcagggtgcaacaccaaagaagtaattgacagacttaggtatttaaaagcagaaattgaagacttggaacttaaggagcgggaactagatcaacagaaactttggctgcagcagtcaataaagaacgtcatggatgactccataaacaatagaactttctcctacgttactcatgaggatatttgcaattgtttcaatggggatacgctgctcgccatccaggccccttctggcactcagttggaagtaccaattcctgaaatggggcagaatggtcagaagaaataccagattaatcttaagtctcattctggtcccatccatgtgcttctcatcaacaaagagtctagtagctccaagcccgtcgtgtttcccgttcccccaccagatgatcttacgcaaccctcctcccaaagcttgacaccagtgacaccgcagaagtctagtatggcaacacagaacctccccgaacagcatgtatccgagagaagccaggcgcttcagcagacatccgccaccgatatttcttctgctggatctatcagcggagacattattgatgaattaatgagcagtgatgtctttcccctgctgagactcagccccacccctgcagacgattacaattttaatctagatgacaacgaaggagtgtgtgatcttttcgatgttcagatattaaattactag

SEQ ID NO: 22909 - DNA, 636 bp, synthetic construct
  source 1..636: mol_type = other DNA; note = Synthetic coding sequence
atgtgccccggcaactggctgtgggccagcatgaccttcatggccagattttccagatcttccagtcgcagccccgtgcgtactaggggcacgctggaggagatgcccacggttcagcacccattcctgaatgtgtttgagctggagagactgttgtacacaggaaaaaccgcctgtaaccatgcagacgaggtatggccaggcctgtacctgggggatcaggatatggccaacaaccgaagggaacttcggcggttgggcattactcacgtgctgaacgcatctcactccaggtggaggggcacacccgaagcctacgaagggttgggtatccggtacctgggagtggaggctcacgactcaccagctttcgatatgtcaatccacttccagacagcagcagattttatccatcgcgcgctctcccaaccggggggaaaaattttagttcactgtgcagtcggcgtgagtcggagcgcaactttagtgctggcctacctgatgctgtaccatcatctgaccttggtggaggccatcaaaaaagtcaaagatcatagaggaatcatccccaatcgtggcttcttaaggcagctgttggctttagatcgtaggctgaggcagggactagaagcttag

SEQ ID NO: 22910 - DNA, 948 bp, synthetic construct
  source 1..948: mol_type = other DNA; note = Synthetic coding sequence
atgcccggcctgagctgccggttctaccagcacaagttccccgaggtagaagacgtcgtgatggtgaacgtgagatcaatcgccgagatgggagcctacgtgtccctcctggaatacaataatatcgagggaatgatcctgctgagcgagctgagtcgccggcgcattcgctccattaacaagctgatcaggattggtcgaaacgagtgcgtggtggttattcgggtagataaggaaaagggctacatagatctgagtaagcggcgcgttagcccagaggaagctatcaagtgcgaggacaaattcacaaagagcaagactgtgtacagtatcttgcgccacgtggcagaagttttggagtacaccaaggatgagcaactggaatctctgttccagcggaccgcatgggtattcgacgacaagtacaaaagaccaggatacggagcatatgacgcattcaagcatgccgtgtccgatccgagcattctcgattcattggacctaaacgaggacgagcgtgaggtgctcattaataatattaataggcggctcacaccacaggcagttaaaataagggccgacatagaagttgcctgttacggctacgaaggtattgatgcggtcaaggaagctctgcgagctggactcaattgctctactgaaaatatgccgattaaaatcaaccttattgcccccccccggtacgtgatgacgacaacaaccctggagcggaccgaagggctctctgtcttgtctcaggccatggccgtaataaaagagaaaatcgaggagaaaaggggggtgttcaacgtgcaaatggagcctaaggtcgtcacagataccgatgagaccgagttggcccgacagatggaaagactggagcgagagaatgccgaagtcgacggtgatgatgacgctgaagagatggaggccaaggcagaagattag

SEQ ID NO: 22911 - DNA, 318 bp, synthetic construct
  source 1..318: mol_type = other DNA; note = Synthetic coding sequence
atggccggccaggaggaccccgtgcagcgggagatccaccaggactgggcaaatagggagtatatcgagatcattacctcaagcataaagaaaattgcagatttcctgaactcctttgacatgtcgtgcagatcaaggctcgctactctgaatgagaagctgaccgctttggagaggcggatcgagtacatcgaggctcgcgtgacaaagggagaaacattgagaacggttccttgctgctgctgggaagtggccctacacaatactgggcacatgggtaaggcccctgccgccttctcctccttcctgtctccctag

SEQ ID NO: 22912 - DNA, 1902 bp, synthetic construct
  source 1..1902: mol_type = other DNA; note = Synthetic coding sequence
atggccgccgccgccgccgccgccaccaccgccgcctgcagcagcgggagcgcgggtactgacgccgccggggcgagcggcttacaacagccaccaccccagcctcagccccagcctgccgcagccgctccagcccagcctccccctgagccaccacgcaaaccccggatggaccctcgtcgaagacaggcggctcttagttttttgactaatatctccttggacgggagacttcctccccaggatgcagaatggggcggtggggaagaaggaggggcagctaagccaggtgccggtggtgcttgtggtgcccgtaccaggttttctctcctggctgccgctgagagagggggttgcatcgccctcgcagcaccaggcacgcccgcggcaggcctggctgcggggtcaggcccctgcctgccccagccctccagtctgccccctttaattccaggcggccacgcaacggtcagcggccccggggtcgcccgcggctttgcaagccctctgggtgccggtagagcaagcggtgagcagtggcagccgccaagacccgccccccttgcagcatgtgctcagctacagctccttgacggctcaggtgcagctggtcaggaagagttggaagaggatgatgccttcatcagcgtacaagtccctgccgctgccttcctgggctcaggcactcctggatccgggtctggttcaagaggccgcctgaatagcttcacccagggcattctgccaatcgctttcagtcgcccgacttcacagaactactgcagcctagagcagcctggtcagggcggaagtactagtgccttcgagcaacttcaacgctcccgtagaagattgatctctcagcgttcatccttggaaacattggaagatatcgaagagaatgctcctctcaggagatgtagaacactgagcgggagtcccagaccaaagaacttcaaaaaaatccacttcataaaaaatatgcggcagcacgatacccgaaatggacgtattgttctgatttctggtcgccgatctttttgctccatctttagcgtcctgccctaccgcgactcgacacaagtgggggatctgaagctcgacggggggcgtcagtcgacaggtgccgttagccttaaggagataattggactcgaaggagtcgagcttggggctgatgggaaaacagtctcttacactcagtttcttctccctaccaacgcctttggagcccgccggaacaccattgattccaccagctccttttcccagttccgcaatttgtctcataggtcgttgtctatcggcagagccagtgggacccagggctccctggataccggaagtgatctgggagattttatggattatgaccctaatctcctggacgatccacagtggccgtgcggaaaacacaagcgggttctgatcttcccttcatacatgactaccgttatcgattatgtcaagcccagcgatctgaagaaggatatgaatgaaacatttaaggagaaattccctcatataaaactcaccctgtccaaaatccgttctcttaagcgtgagatgcgcaagctcgcgcaggaggattgcggcctggaggaacccactgttgccatggcttttgtctattttgagaagttggcactaaaaggcaaacttaacaagcagaataggaagctgtgtgctggcgcctgcgtgttgctcgccgctaaaataggcagcgatctaaagaaacacgaagtgaaacacctcatcgacaaacttgaggagaaatttcggttgaaccggcgggagttgattgccttcgaatttccagtgctggtcgccctagagtttgctctgcatctccccgaacatgaagtgatgccacactacaggcggttggtccagtcctcctag

SEQ ID NO: 22913 - DNA, 3423 bp, synthetic construct
  source 1..3423: mol_type = other DNA; note = Synthetic coding sequence
atgaccaccgccgtggagcggaagtacatcaacatccggaagcggttagaccagcttggctaccgacagactctgaccgtcgaatgcctgccattggtagaaaagctcttttcagacctggtccacacaaccgagtcactgcggcagtccaagctatcggctgtgaaagcagagaaggagtctgccaatttcgactttgtcctagagccatacaagctcgagaatgctcgcctttcacgggagaataacgaactttacttggagctgatgaaattgagagaacactcagatcagcacgttaaggagctcaaaacctccctgaaaaaatgcgcgcgggagacagctgaccttaaatttctcaacaaccagtatgcccacaagttgaagctgttagaaaaggagtccaaggctaagaatgaacgaatccagcagctccaggagaagaatctgcacgcagttgtccagactccaggtggaaaaaaacgctctatcgccttccggcgtcagcgcatgcagatcgacgagcctgtcccaccttctgaggtgtccagttacccagtgccccaacccgatgatccctacatcgcggatctgctacaggtggctgataatagaatacaggagctgcagcaggaggttcaccagctgcaagaaaaactcgccatgatggaatctggggttcgcgattactcaaagcagattgaactgagagagcgcgaaattgagcgcctgtcagtggcgttggacggaggcagatcacccgacgtgcttagtttagagtccaggaataagacgaacgagaagctaattgcgcatctgaacatccaggttgatttccttcagcaggcaaacaaggatctggagaaacgcataagagagctcatggagactaaggagacggtgacaagcgaggttgtcaatttgagcaataagaacgagaagctgtgccaggagctgaccgagatcgaccagctggcccagcagctggagcgacataaggaagaggttctggaaacagctgataaagaactgggtgaggccaagaaggaaataaagcgcaagctctctgagatgcaggacttagaggagaccatggcaaaactccagctcgagctgaacttgtgtcaaaaggaaaaagagcgtctttctgatgaactgctcgttaaaagtgacctggagacagtggttcatcagctcgagcaggaaaagcagcgtctgtcaaagaaagtagagagtttcgcagttaccgagcgccagctgacattagaagttgagagaatgcggcttgaacacggaattaaaaggcgtgaccggtcaccctcacgactcgacacttttctcaagggcatagaggaagaacgagattattacaagaaggagctcgaaaggctacaacacattatccagcgtagatcgtgttccaccagttactccgcccgggagaaatcaagtatctttcgtacccccgagaaaggagattacaactccgaaattcatcagatcactcgggagagggatgaactccagagaatgttggagcgatttgagaagtacatggaagatattcaaagcaatgttaagctgctcacagcagagcgcgataagttgtcagtcctttataacgaggctcaggaggagctgtcggctttacgcaaagagtcaactcagacaaccgctccccacaacattgtaagtctgatggagaaagaaaaagagcttgcgttgtcagacctccgtagaatcatggcggaaaaggaagccttgcgcgaaaaactggaacacattgaagaggtgtctctatttggcaagtctgagttggagaagaccatcgagcaccttacatgtgtaaaccatcagcttgaaagcgagaagtatgaactgaagtccaaagtcctgatcatgaaagaaacaatcgagagtttggagaacaagctgaaggtacaagcccagaaattcagccatgttgcgggcgactcatcccaccaaaagaccgaagttaattcgctgcggattgtcaacgagcagcttcagcgatccgtggacgattaccagcataggctgagcatcaagcgcggagagcttgaatccgctcaggcccagatcaagatcctggaagagaagatagacgagctgaatctcaagatgacaagccaggatgaggaagctcacgtcatgaagaagacgattggtgtcatagacaaagaaaaggatttccttcaagagaccgttgacgagaagactgagaagatcgccaatctccaagagaatctggctaataaggagaaggctgtggcccagatgaaaataatgattagtgaatgtgagagctccgtcaaccagctgaaggaaactcttgtgaatcgagaccgggagattaatagtttgaggagacagctggacgccgcacacaaggagctggatgaggtcggaaggagtagggagattgccttcaaggagaaccggcgtctgcaagacgaccttgctaccatggcccgtgagaaccaagagattagcctagagctagaggctgcagtccaggaaaaagaggaaatgaagagcagggtgcacaagtatattaccgaggtgagtcgttgggagtctctgatggcagccaaggaaaaggagaaccaggaccttctggacaggttccagatgttacacaaccgggcagaagattgggaagtcaaggcacatcaggcagagggggagagctcctctgtcagattggaactgttgagcattgataccgagaggagacacctccgggagcgggttgagctgctggaaaaggagattcaggaacacatcaatgctcatcatgcctacgaaagccaaataagcagcatggcaaaggccatgagccgactggaggaagagttgcggcaccaggaggatgagaaggctaccgtactaaatgatctttctagcctaagagagctgtgtattaaactggacagtggtaaagacataatgacgcaacagctaaattctaaaaacctggagttcgagagggtagtcgttgagctcgaaaatgtgaaatccgaaagcgacctgctgaagaagcaactatccaacgagcgtcacacagttaaaaacttggagtcactgttagcaaccaatcgggacaaggaatttcacagccacctgaccagtcatgagaaggacaccgagatacaattgctcaaagagaaacttacactttccgagtctaaacttacatctcagtcacgggaaaatacaatgctccgtgccaaggttgcccagttgcagactgattatgacgctttgaaaagacagatctctaccgagcgctacgagcgggaaagagccatccaggagatgagacggcacggcctcgcaacaccccctctgtcctccaccctccggtccccctcacacagccctgagcacaggaatgtgtag

SEQ ID NO: 22914 - DNA, 1512 bp, synthetic construct
  source 1..1512: mol_type = other DNA; note = Synthetic coding sequence
atgcccaacgtggccgagaccgagcggagcaacgacagcggcaacggggagcacaaaagtgaaaggaagtctccggaggaaaatctgcagggggctgtaaaatccttttgtacatccgcatcaggggctccattgggccccaaaggcgatggccactacccatggtcttgccccgtgacacacactagagagaagatctatgcgatctgtagcgattatgcctttctgaaccaggccaccagcatctataagactcctaacccaagtcgatcaccctgcctccctgattcgaccagcttgtcagccggtaataacagctcgcgatacatcggaatccctacaagtacatcagaaatcatctacaacgaggagaactctctggagaacctgagtaacagcctggggaaattgccactggcttgggaaatcgataaatcagaattcgacggcgttaccacaaactccaaacataagagtggtaatgccaaaaagcaggtgagcaagaggaagacttccgataagaaaggaagatatcaaaaggagtgtccacagcactcgccgcttgaagacatcaaacagcgtaaggtgctggaccttaggcgctggtattgcatctcacgtcctcagtataaaacttcctgcggaatttcctcactgatatcctgctggaacttcctgtactcaacaatgggagccgggaacctgcctcctattacccaggaagaagccctgcacattttgggctttcagccaccctttgaagacataagattcggaccgttcactggaaatactaccctgatgcgatggtttcgccaaataaatgatcattttcacgtaaaagggtgctcctacgttctgtacaagcctcatgggaaaaacaaaacagcgggcgagactgcctctggcgccctaagtaaactgaccagagggcttaaggacgaatccttggcctatatttaccactgccagaaccattacttctgccccattggctttgaggccactcccgtgaaggcgaacaaagccttctctcggggcccactgtcgccacaagaagtagagtattggatcctaattggagagtcgtctagaaaacaccctgccatccactgcaaaaagtgggcggacattgtgaccgatctcaacacccagaatccagagtaccttgatatccggcatttggagcgcggactccagtatcggaagaccaaaaaagtggggggcaacttacactgtatcatcgctttccaacgactgaactggcaacggtttggcctttggaactttccctttggcacgatccgccaggagagccagcccccaacacatgcccaaggaattgccaaatctgagagcgaagataacatcagtaaaaagcagcatggcagacttgggaggtcatttagcgcttcctttcatcaggactccgcctggaaaaagatgtcctcaatacatgagcgtcgcaacagtggctatcaaggctactccgactatgatggaaacgactag

SEQ ID NO: 22915 - DNA, 813 bp, synthetic construct
  source 1..813: mol_type = other DNA; note = Synthetic coding sequence
atggaggccgaggagctggagcaggagcgggagcagctgcggctgcaactgtgggaggcgtattgccaggtccgctacttgtgctcccacctgagaggcaatgacagcgctgacagtgccgtttctactgattccagtatggatgaatcaagtgagacctccagtgctaaagacgttcctgctgggtctctgagaacagccctcaacgagctaaagcgcctgatacagtcaatcgtagatggcatggagccaactggttctagaagactcgacgatgattcacttgaggagcagatcagacagacaagtgaagattcacgagcattaagggaattaatggaaggggaaaggggcaagctccggcagagcctcgaggaattgcagagactgcactcccaggtgacactgctgagcgttgaaatgaccgcccttaaagaagaacgggatcggttgagagtgacctctgaagacaaggaacctaaggagcagctccaaaaggctatcagggatagagatgaggcgattgctaagaagaatgcagtggagctcgaactggctaagtgccggatggatatgatgtccctcaatagtcaattactcgacgctattcagcagaaactgaacctgtctcagcagcttgaagcctggcaggacgatatgcaccgcgttatagacagacagctaatggatactcatttaaaggagcgatcccagcccgcagccgccctctgtagagggcattccgccggtagaggcgacgagccatccatcgcggaggggaagcggctctttagtttctttcggaagatttag

SEQ ID NO: 22916 - DNA, 2379 bp, synthetic construct
  source 1..2379: mol_type = other DNA; note = Synthetic coding sequence
atgctgcccgccggcgagatcggcgccagccccgccgccccctgctgttcagaaagtggcgacgagaggaagaacctggaggaaaagagcgatataaacgtgacagtgctcattggctcaaaacaggtgagtgagggtactgacaatggggatcttccctcttacgtgtccgcattcattgaaaaggaagtggggaacgacctgaaatccctgaaaaaactggacaagctgatagaacagagaacagtgtccaagatgcagctggaggaacaggttttaactatttcgtcagagatccccaagagaatccgctccgctctcaaaaacgccgaagaatccaagcagttcctcaaccagtttttggagcaggaaactcaccttttctctgccatcaactctcatctccttaccgcccagccctggatggacgatcttggaacaatgatatcccagatagaagagatcgaacggcatctagcgtatctcaagtggatctctcaaatagaggagctttccgacaatatacaacaatacctgatgaccaacaacgtacccgaagctgcttcaacacttgtctcgatggccgaacttgacatcaagttacaggaatcgtcatgtacccacttactcgggtttatgcgcgctacggttaaattttggcataagattttaaaggacaagctcacttcagatttcgaagaaatcttagcccagttgcactggccattcatcgctcccccccagagtcagacggtgggtttgtcaaggcctgcctccgcaccggaaatttactcttacctggagacattgttctgccagcttctaaagttacagacatcagatgagcttttgactgaacctaagcagctcccagagaagtattctctcccggccagcccttccgtaatcttgccaatacaagttatgttgactcctctgcaaaagcgttttagatatcatttccggggcaatcgacagaccaatgttctgagcaaacctgaatggtacctcgcccaagtactgatgtggatcggcaaccacaccgagttcctggatgagaaaattcagcccattttggataaggtgggctcactggttaatgctaggctagagttcagccggggcctgatgatgctggtcctcgagaagcttgccactgacatcccttgcctgctgtacgatgacaatttgttctgtcacttggtagatgaggtgctcctgtttgagagggagctgcattccgttcatggctacccggggaccttcgcatcttgtatgcatattctcagtgaggagacatgcttccagagatggctgacggtcgaaaggaaattcgctctgcaaaaaatggacagcatgctgagtagtgaggccgcttgggtgtcccagtataaggatatcactgacgtcgacgagatgaaagtgcccgattgtgctgagaccttcatgactctgctcctggtaatcactgatcggtataagaatctccccacagcctctcgaaagttgcagttcctcgagttgcagaaagacctagtggacgatttcaggatcagactcacccaggtcatgaaagaggaaacccgagcctctctaggatttcggtactgcgctattctgaatgccgtcaattacatctccacagtgctcgccgactgggctgataacgtgttctttctgcagttacagcaggctgccctggaggttttcgccgagaataatacattatccaagctacaacttggccaactggcctcaatggagagttccgtgttcgacgatatgatcaatctgttagagaggctgaaacacgacatgttgacccgccaggtagatcatgtgttccgcgaagttaaagacgccgcaaagctgtacaagaaggaacgatggctcagtttgccatctcagtctgagcaggctgtgatgagtctgtcctcctccgcttgccctttgctcctaactctgcgggatcatctgctccagttggaacagcagctttgctttagcctgttcaaaatcttctggcagatgctggtcgaaaagctggacgtgtacatctaccaagagatcatcctcgctaaccactttaatgaaggaggggccgcccagctgcagttcgatatgacaaggaatctgtttccactgttctcccattattgtaaacgccccgaaaactacttcaaacatataaaagaagcttgtatcgtactcaacctcaatgtagggtccgctttactgctgaaggatgttcttcagagtgctagcggccaactgcctgcgactgccgctttgaacgaggtggggatctataaactagctcagcaggatgtggagatcttgctgaacctgcgcacaaattggcccaacacaggcaaatag

SEQ ID NO: 22917 - DNA, 1068 bp, synthetic construct
  source 1..1068: mol_type = other DNA; note = Synthetic coding sequence
gtgcggggcgtgcgggccgccaccgccgccgccgtggccgccaccgccgcaagcggtctgtccagacgcgaggctggtggtagagcaggagccgctgccgcggtggtccgcccacccggcagaaagtgtgggcgctgtcgacggctggccaatttccctggtcgcaagcggcggcgacgccgccggaaagggttgggggcgacgaccggtgggtgtggtgaagccgtctcgtccctgcacccggctccccattcacccagttcagtgcgcccagcgggcagaagagcccgccgccagagacgcggtgctggctctgctgagcgccctatgagtggagccggcgaagcactcgccccagggccagttggcccccagcgggtggctgaggccggcggcggtcagcttggctccacggcccaggggaaatgtgataaagataacactgagaaggatataacccaggctactaatagccacttcacccacggagagatgcaggatcagtctatttggggaaatccatcagacggcgaactcatcaggacccagccacagaggctaccccagttgcagacatctgcgcaggttcccagcggggaggagataggaaaaatcaagaacggccataccgggctttccaatggtaacggcatccaccatggggccaagcacgggagcgcagataaccgtaagcttagtgctccggtttcccagaaaatgcatcggaaaatccaatcttccctgagtgtgaattctgatatcagcaagaagtcaaaagtcaatgccgtattctctcagaaaaccgggtcatcacccgaggattgttgcgtgcactgtatcctcgcatgcctgttttgcgagttcctcacattgtgcaacatcgtcctgggacaggctagttgtgggatttgcactagcgaggcctgctgttgctgttgcggagatgaaatgggagacgattgtaactgtccctgcgatatggactgcggcattatggacgcatgctgcgaatcctccgattgcctggagatttgtatggagtgttgtggcatttgtttcccctcttag

SEQ ID NO: 22918 - DNA, 378 bp, synthetic construct
  source 1..378: mol_type = other DNA; note = Synthetic coding sequence
atgctgagccggctgctgaaggagcaccaggccaagcagaacgagcgtaaagagctgcaggagaagcggcggcgggaagccatcactgccgctacgtgtttaacagaggccctggtcgaccatcttaatgtcggggtcgcccaggcttacatgaatcaaaggaagctggatcatgaagtgaagacgctgcaggtgcaggcagcacaattcgccaagcaaaccgggcagtggattggtatggtcgaaaatttcaaccaggcgctgaaagagattggggatgttgaaaattgggcgcgaagtattgagttggacatgagaaccattgccacggctctggagtatgtctataagggtcaactccagtcagccccctcttag

SEQ ID NO: 22919 - DNA, 2337 bp, synthetic construct
  source 1..2337: mol_type = other DNA; note = Synthetic coding sequence
atgaccacccggcaggccaccaaggaccccctgctgcggggcgtgtctcccacgccatcaaagattcccgtcagaagtcaaaagcgaacccccttccccactgtcacgagctgcgctgtggaccaagaaaaccaggatcctcggaggtgggtacagaagcccccacttaacatccaaagaccactggtcgatagtgccgggccgaggcctaaggcgaggcatcaggctgagaccagccagcggctcgtgggcatcagtcagcctaggaacccactggaggaacttaggccaagccctagggggcagaatgtcggccctggaccgcctgcccagactgaggcacccggcaccattgaattcgtcgcagatcccgccgccctggccacaatactttctggggagggcgtgaaatcctgtcacctggggcggcagccgtcgctggccaagcgggtgttagtccgcgggagtcaggggggaaccactcaacgagtgcagggagtgcgcgcttcagcttacctggctccaagaacacctactcaccgcctggaccctgctcgcgcatcatgcttctcgaggttggagggccccgggcccagaggcaggaccctatgccctcagcgactgcaggctctgatctctccatctggcccctcctttcatccctctacgagaccctccttccaggagctgcgacgagaaacagcaggctctagtaggacgtctgtaagccaggcttctggcctcctcctggaaactccagttcagcctgcattctccctccccaaaggggagagagaggtggtgactcatagcgacgaaggaggtgtggcctctttgggactggcgcaaagggtgcccctgcgggaaaaccgagagatgagtcatacaagagactctcacgatagccatcttatgccgagccccgctcctgtggcccaacccttaccaggccatgtggtgccttgcccttctccatttggaagggcccagagggtgcctagtccaggcccccctacgcttacatcttatagcgtgcttcggcgtttgaccgttcaacctaagaccagattcacccccatgcccagcaccccccgggtgcagcaggcccaatggctccgaggcgtatctccccagagttgtagtgaggatccggccctgccctgggaacaggtcgctgtgcgtctctttgaccaggaatcttgtatccgatctctagagggtagtgggaaaccaccagtcgccacacccagcggtcctcactccaaccggaccccctcgttgcaggaagtcaagatccagaggataggcattctgcagcagctcctgagacaggaggtcgaggggcttgtggggggccagtgcgtgcctctgaatgggggaagctccttggacatggtcgaactccagcccctgctcaccgaaatcagcagaacactgaatgccactgaacacaacagtggaacgtctcacttgccgggtttacttaagcactctggcctgcctaagccatgccttcctgaagagtgcggagagccccagccttgcccacccgccgaaccaggacctcctgaagcgttctgccgaagcgaacccgaaatcccggagcccagccttcaggaacaattggaggtgccagaaccctaccccccagccgaacctcgccctcttgagagctgttgccgttctgaacccgaaataccagagtcgagccgacaagaacagttagaagttcctgaaccatgcccccccgccgagccgcggcctcttgaatcttactgtagaatagagccggagatccccgagtcctccaggcaggaacaactggaggtgcctgagccctgcccacccgctgagcccggacccctgcagccaagcacacagggacagtctggcccccctggcccttgcccaagagtggaattgggagcgtctgagccatgcacactggaacatcgatcgctagaaagcagtctgccaccttgttgttcacagtgggcccctgccacaaccagccttatcttctcaagtcagcaccccctgtgtgcaagtcctcccatctgtagtcttcagagtctgcgtcctcccgccggtcaggccggtctatctaatctagcgccgcgcaccttagccttgcgcgagcggttgaagtcatgtctgacagccatccactgcttccacgaggcacgcctcgacgatgagtgtgctttctatacctcaagggctccaccgagcgggcctactcgcgtctgtactaatccagttgcgacactcctggaatggcaggatgccctttgcttcattcccgtgggaagcgcggcccctcaggggagtccttag

SEQ ID NO: 22920 - DNA, 1803 bp, synthetic construct
  source 1..1803: mol_type = other DNA; note = Synthetic coding sequence
atgagctgccggagctaccgggtgagcagcggccaccgggtgggcaatttttctagctgcagtgctatgacaccccagaacctcaaccggttcagagcaaattccgtgtcctgttggagcggtcccggcttccgtggactggggtctttcgggtcccgcagcgtcatcaccttcggtagctacagtcctcgcattgctgccgttggatcccggccgatacactgtggggtacgtttcggcgccggttgcggcatggggttcggggatggacgaggagtgggcttgggaccgcgagcggatagttgtgtgggattgggttttggtgccggatctgggatcggatacgggtttggtggaccggggttcggatatagggtgggcggtgtgggggtgcctgccgccccctccatcactgcagtgaccgtcaacaagtccctcttgacccccttgaacctcgaaatagaccctaacgctcagagagtaaaaaaagacgagaaggagcagatcaagacattgaataacaaatttgcttccttcattgataaagtgaggtttctcgaacagcagaataaacttctggagaccaagtggagctttcttcaggaacagaaatgcatccgatccaacctcgaacctctgttcgaatcgtatatcaccaacctccgtaggcagcttgaggtcctcgtcagcgaccaggcccggctccaggccgaacggaaccacttacaggatgttctcgaagggttcaaaaaaaaatatgaagaagaagtcgtgtgtcgagctaatgctgagaatgaatttgttgccctcaagaaggatgtagatgcggcctttatgaacaaatctgacctggaagctaacgtcgataccctgacccaggaaatagatttcctgaaaaccctgtatatggaggagattcaactgctgcagtcccacatcagtgagacgtccgttatcgtcaagatggacaactcacgcgaccttaacctcgatggaattatagccgaggtgaaggcccagtacgaggaagtcgcgcgacgctcacgtgcggatgctgaggcttggtatcagaccaaatacgaggagatgcaggtcactgccggacaacactgtgacaatttgcgtaacattcgtaatgagatcaatgaactgactaggttgattcagcggctgaaggccgaaatcgagcatgctaaggcccagagggccaagctagaggcagccgtggcagaggccgagcaacagggcgaagctaccttatctgacgcaaaatgtaagttggcagatctggaatgcgccttgcagcaagctaaacaggacatggcccgccagctatgtgagtaccaggaactcatgaatgctaagctgggactcgatatcgaaatcgcaacttatcggcgcttgttggagggagaagaaagtagactgtgtgagggagtgggccccgtgaacatcagcgtgagttcgagcagaggcggtctggtctgtgggccggagccactcgtcgccggaagcacactgagccggggaggagtgacattctctgggtcaagctcggtctgcgcaactagcggcgtccttgcctcttgcggcccatccctgggcggcgcgcgcgtggcccccgcgaccggagatcttctgtcaactggaaccaggagcggctccatgttgatatcagaggcctgcgtacctagtgtaccgtgtcccctgccgactcagggaggcttttcatcttgtagcggtggacgtagctcatctgtgcgatttgtttccactacgacatcgtgcaggaccaagtattag

SEQ ID NO: 22921 - DNA, 1542 bp, synthetic construct
  source 1..1542: mol_type = other DNA; note = Synthetic coding sequence
atgagctaccacagcttccagcccggcagccggtgcggcagccagtccttctcatcctactcggccgttatgccacgaatggtgacccactacgctgtttcaaagggcccctgcagacctggaggtggcaggggcctccgcgctcttggctgtctgggctcgcgatcgctgtgcaatgttggtttcggccgccccagggtggcctcccgttgcggaggaaccttacccggctttggctaccgactcggtgctacctgtggcccttccgcttgcatcacccccgtgacaattaacgaaagcctactcgttccattggcccttgagattgatccaacagtccagagagttaaacgcgatgagaaggagcaaatcaagtgccttaacaataggtttgcctcgttcattaacaaggtgcgcttcttggagcaaaaaaataagctgctggagacgaagtggaacttcatgcagcagcagcgatgctgccaaacaaatatcgagccaatcttcgaggggtacatctcagctctgaggcggcaactggattgcgtttctggcgatagagtccggctcgagagcgagttgtgcagtttgcaggccgccttggaaggatacaaaaagaagtatgaggaagagcttagtcttagaccatgcgttgagaacgaatttgtcgccttgaagaaggatgtcgacactgcatttctgatgaaagcggaccttgagacaaacgcagaggctctagtgcaagaaattgattttttgaaaagcctatatgaggaagaaatctgccttctccagtcgcaaatctctgagacttcggtcatcgtgaaaatggacaatagccgggagctggacgtcgatggtattattgctgaaattaaagcccagtacgacgacattgcctcccgtagcaaggctgaggcagaagcttggtaccagtgtcggtacgaggaacttcgagtgactgctggaaaccattgcgacaatctgaggaatcgaaaaaatgagattcttgagatgaacaagttgattcagcggctgcagcaggaaacagaaaatgtgaaggcacagagatgcaaactggaaggagctattgcagaggctgaacagcagggcgaggcagccctaaatgatgccaaatgcaaactggctggactggaagaggctctgcagaaagctaagcaggatatggcatgtctccttaaagaatatcaagaggtgatgaatagtaagcttggccttgatattgagattgcaacctatagaaggctgctggaaggcgaagaacacaggctgtgcgagggcattggccccgtcaatattagcgtgtcaagcagtaagggcgcctttctgtacgaaccatgtggtgtgtctactcccgtgctctccaccggtgtgcttaggagcaacggagggtgctctatcgtgggtacgggggaactgtacgttccctgtgagccccaggggcttttgagctgtggatcaggcagaaagtcttctatgaccctcggcgccgggggcagttcaccctcccacaaacactag

SEQ ID NO: 22922 - DNA, 1632 bp, synthetic construct
  source 1..1632: mol_type = other DNA; note = Synthetic coding sequence
atgatgcccacccccgtgatcctgctgaaggagggcaccgacagctcacaggggatcccgcaacttgtgtccaacattagcgcatgccaagttatcgcagaggctgtgcgaaccacactagggcctagaggcatggataagctcatcgtcgatgggcggggaaaggccactatatcaaacgatggcgcaactattttaaagctactggatgtggttcatcctgcagccaaaactctggtggacattgctaaaagtcaagacgcagaagtcggagatgggaccacatctgttactctgttggccgccgagtttctcaagcaggtgaagccatacgttgaggagggtctgcacccccagataatcatccgcgcattccgcactgctactcagctcgcggtcaataaaatcaaggaaattgctgtgaccgtcaaaaaggccgacaaggtggaacagcggaagcttctggagaagtgtgcaatgacagctctgagttcgaagctgatatctcagcaaaaggcattcttcgccaagatggtggttgacgctgtgatgatgctagatgacctactgcagttgaagatgattggcattaaaaaggtccagggtggcgcgctcgaagactcacagttagttgccggtgtggcctttaaaaagaccttcagctatgctggctttgaaatgcagcccaagaaatatcacaacccaaaaatcgccttgctgaatgtcgaactggaacttaaggctgaaaaggacaatgctgagatccgcgtgcacaccgtggaggactaccaggcaatagtggatgcggaatggaacattctctacgacaaactagagaaaatccaccacagtggggcaaaagtagtgctgagtaaactccctatcggcgatgtggccacacaatactttgctgaccgtgacatgttctgcgctggaagagtgccagaagaggatctgaagcgtaccatgatggcatgtggagggtctatccagacttcggtaaatgccctgtcggctgacgtgctgggacgctgtcaggtgttcgaggagacccaaatcggaggtgaaagatacaatttcttcacaggctgcccgaaagcgaaaacttgcacgtttattctacgtgggggggccgaacagttcatggaggagacagaacggagcttgcatgatgctattatgatcgtgcgtcgggccatcaaaaatgacagcgtcgtcgccggggggggagctatagagatggaacttagcaaatacctgcgcgactacagcaggacaatcccaggcaaacaacagctgctgattggcgcttacgctaaggcactagaaattatcccgagacagctgtgcgataacgcaggattcgatgctactaacattctcaataagttaagggcacggcatgcccagggcggaacatggtacggcgtggatattaacaacgaagatatcgccgacaatttcgaagcattcgtatgggaacccgccatggtaagaatcaatgccctgacagccgccagcgaagccgcctgcctgatagtatccgtcgatgagacgatcaagaaccccagatccaccgtggacgccccgacggctgccggcagaggccggggcagaggtaggccgcactag

SEQ ID NO: 22923 - DNA, 1479 bp, synthetic construct
  source 1..1479: mol_type = other DNA; note = Synthetic coding sequence
atggcccccgtgggcgtggagaagaagctgctgctgggccccaacggtcctgcggtcgctgcagcgggagaccttacaagtgaggaagaagaaggtcagtcgctatggtctagcatactcagcgaggtgtcaacccgtgccagatctaagctgccatcgggcaagaatattctcgtgttcggagaagatgggtccggcaagaccacattgatgacaaaactccagggcgccgagcatgggaagaagggaagaggcttggaatatctgtacttgtccgtccacgatgaagatcgagatgaccacactcggtgcaatgtgtggatcctcgatggagacttgtatcataagggactgctcaaattcgcagtctcggctgagtctctccctgagactctcgttatctttgtggcagatatgagccgaccctggacagtgatggaatctctccaaaaatgggcatctgtcctgcgcgaacacatagacaaaatgaaaataccacccgaaaaaatgcgcgaactggagcgcaagtttgtaaaggattttcaggactatatggaaccagaggaagggtgtcagggcagtccacagagaagggggccgctgacgagcggcagtgacgaggagaacgtggcactgccgttaggggacaatgtgctgacccataacctcggaatcccggtgttggtggtgtgcacgaaatgcgatgccgtctctgtactcgaaaaagagcacgattaccgcgatgagcatctcgattttattcagtctcacctgcgcaggttttgtcttcagtatggggcagctcttatctatacgtcagtgaaggaggaaaagaatttggatttgctgtacaaatatatcgtgcacaagacatacggatttcactttaccactccggccctggtggttgagaaagatgccgtctttatcccagcaggatgggacaatgagaaaaagattgctatcttgcatgagaattttactaccgtgaagccagaagatgcttacgaagacttcattgtgaaacctcctgtcaggaagttggtgcacgacaaagagctggccgccgaagatgaacaggtatttctgatgaagcagcaatcacttctcgcgaagcagcccgccacaccaacacgggcctccgaatcccctgccagaggcccctctggctctccccgcacacagggcaggggaggacccgccagtgtgccctccagctcaccgggaactagcgtaaagaagcccgatccaaacataaagaacaatgccgcctcagagggcgtgcttgcatctttcttcaatagcctactgagcaaaaagacagggagccctgggtcaccgggggccgggggcgtccaatcaacagccaaaaaatctggtcaaaagacggtactgagcaacgtccaggaggagttggacagaatgacaagaaagcctgacagtatggtgactaatagttctactgagaacgaggcatag

SEQ ID NO: 22924 - DNA, 540 bp, synthetic construct
  source 1..540: mol_type = other DNA; note = Synthetic coding sequence
atggacaaggacttcgacaagctgcacgagttcgtggagatcatgaaagaaatgcagaaagatatggacgagaagatggatattttaattaatacccaaaaaaactataaacttccacttagaagggcgccgaaggaacaacaggaactgcggctcatgggtaagactcaccgagagccgcagttgcgccctaaaaaaatggatggtgcctctggggtgaatggggcaccgtgcgccctgcataaaaaaaccatggctccacaaaaaacaaagcaaggatctctcgacccattacaccactgcggcacttgctgcgagaagtgcctcctatgcgcactcaaaaacaactacaatcgcgccgcacccttgaaagaagcgcgccacctcctgaccgccaacagcatcgatcctagtgccgctttggttctgctgatcgagttcttgttactgaccctggtgactggggcagccgcaccagggcttgacgcttgtggccatcaaagaaacatgagggatgagataaacagcgagcgtcgctag

SEQ ID NO: 22925 - DNA, 3600 bp, synthetic construct
  source 1..3600: mol_type = other DNA; note = Synthetic coding sequence
atggccagcgccggcacccagcactacagcatcggcctgcggcagaagaattcattcaaacaaagtggccctagtgggactgttcccgcaaccccccctgagaaaccctccgaggggagagtgtggccccaggcccatcagcaggtaaaacccatttggaagcttgaaaagaaacaggtggaaactctgtctgcggggttgggccctgggctacttggcgtgcccccgcagcctgcttatttcttctgcccaagtacgctgtgcagctccggaacaaccgctgtcatcgcaggccatagctcttcttgttacctccatagcctgccagatctcttcaattcaactcttctgtacaggagatcctcttatcgccaaaaaccgtaccagcagctggagtctttttgcctaaggagcagtccaagtgagaaaagtccattcagcctcccccagaagagccttcctgtaagcctgaccgccaataaagcaacatcatccatggttttttccatggctcaaccaatggcttcatccagcacagagccctacctgtgcctggccgctgccggagagaatccatctggaaagtcactcgcgagcgcaattagcgggaagattccatccccactgagctcgagttataagccaatgctaaataacaactcttttatgtggcctaacagcacccctgtccccctgctgcaaactactcagggtcttaaacctgtgtccccacctaagatccagcccgtgtcttggcatcactcaggtgggactggtgactgtgcaccccaacccgtcgatcacaaggttccaaaatctattgggactgtccccgcagatgcctctgcccacattgcacttagtactgcaagtagccatgacacgagcacaactagcgttgcctcatcctggtacaacagaaacaacctcgccatgcgcgccgagcctctgtcttgcgcattagacgactcctcagattcacaggacccaaccaaggaaattagatttactgaggcagtccgcaaacttacagcccgagggtttgagaagatgcctcggcaggggtgtcagcttgagcagtcttccttcctgaaccctagcttccagtggaacgtgctgaaccgctcaagaagatggaaaccacctgcggtgaatcagcagttcccccaggaggatgccggcagtgtgcgccgcgtgttgcctggtgcctccgacacattaggactagataataccgtattctgtactaagcgaatttcaattcatctgctcgcttcccatgcatctggcttgaatcataaccccgcttgtgaaagcgtgatcgatagcagcgctttcggagagggaaaagcaccgggccccccattcccccagaccctgggaatcgccaatgtcgccacaagactgtcttctattcagcttggccagagtgagaaagagaggcccgaagaggcgagggaactcgatagttccgatagagatataagtagcgccacagacctgcagcccgatcaagctgagacagaagatactgaggaggagctggtggacgggttagaggactgctgctctcgggatgagaatgaggaagaagagggagattcagagtgcagtagcctgtctgctgtgtctccatcagagtcagtcgccatgatcagtaggtcttgcatggagatccttacaaaacccctttcaaaccacgagaaagtggttagacccgccctcatctattcgctattccccaacgtgcctcccacaatttacttcggcacgcgagatgaaagagtagagaaactcccctgggaacaacgcaagctgcttcgctggaaaatgagtaccgtgacgcccaacattgttaaacaaacaatcggaagaagccacttcaaaatcagtaaacgcaatgatgattggcttggctgttggggccaccatatgaagagcccgagcttcagatccatccgagaacaccagaaactgaatcatttcccaggctctttccagatcggccgcaaggacaggctgtggaggaacctgagcaggatgcagtcgcgcttcggaaaaaaagaattctctttttttcctcagagcttcattcttcctcaggacgccaaactgctcagaaaagcctgggagagctcatcaaggcagaaatggatcgtcaaacctccagccagtgcacgggggataggcattcaggtgatacataaatggtcccagctgcccaagagacgaccgctgctcgtgcagaggtaccttcacaaaccatatttaatttcgggaagcaaattcgatctgcggatttatgtatatgtaacttcttacgaccccttgcggatttatctgttttccgatggattggtgcgctttgcttcttgtaagtattctccttccatgaaaagtctgggaaacaaatttatgcacctcacaaattactcagtgaataaaaagaacgccgagtaccaagcaaacgcggacgagatggcatgccaggggcacaagtgggccctgaaggccttgtggaattacctctcacagaaaggagtcaatagcgatgctatctgggagaaaatcaaagacgtagtagttaagactattatatccagtgaaccctatgtgacctcccttctgaagatgtatgttaggcgtccttatagctgtcatgagctttttggatttgatataatgctggatgagaacctgaaaccttgggtgcttgaggtaaatatctccccatctctgcattcttcaagccccctggatatcagtataaaggggcagatgattcgggacttgctcaacctggcaggctttgttcttcccaacgccgaagatattatttcaagccccagcagctgcagcagctctaccacaagcctgcctacttcgccaggcgacaaatgcaggatggcccctgaacatgtcacagcccagaaaatgaagaaagcttactatttaactcaaaaaatcccggatcaggacttctacgctagcgtactagatgtgttaacgcctgacgacgttcgcattctggttgagatggaggacgagttcagtcggcgcgggcagtttgaaagaattttccctagccacatttcatcacgttaccttcggttttttgagcagccgcgatattttaatattctcaccacacagtgggagcagaaatatcacggaaacaaattaaagggcgttgacttgttgcggagctggtgttacaaaggcttccacatgggcgttgttagcgattccgctcccgtgtggagcttgcctactagtttacttacaatttctaaggacgatgtgatactgaatgccttctctaaaagcgagaccagcaaactgggtaaacagagctcctgtgaggtgtccctgctgctgtctgaagatggaaccacaccaaaaagtaagaaaacccaggcgggcttgtccccctacccccagaagccctcatcttcaaaggactccgaggacacttcaaaagaaccctctctgtccactcagaccctgccagtgattaagtgttcagggcagacaagtcgcctcagtgcaagcagcacctttcagtccattagtgatagtctgttggccgtcagcccatag

SEQ ID NO: 22926 - DNA, 2772 bp, synthetic construct
  source 1..2772: mol_type = other DNA; note = Synthetic coding sequence
atgctgcggcggggcagccaggccctgcggcggttcagcaccggccgggtgtattttaaaaacaagctgaagctcgccctcatcggtcagagcttattcgggcaggaagtctactctcacctgcggaaggaaggccatagggtggtcggtgtgtttaccgtgcccgataaggacgggaaagcagatcctctggccctggccgcagagaaagatggcactccagtcttcaaactgccgaagtggagggtcaaggggaagacaatcaaagaggtcgctgaagcttacaggagcgttggggccgagctgaacgtgctccccttctgtactcagtttatcccaatggacattatcgactcccccaaacatggatccatcatttatcatccctctatcttgcctcggcaccgcggtgcctctgctattaactggaccctgatcatgggagacaagaaagccggcttctctgtgttttgggccgatgatggactggacaccggtccgattttgctgcaaaggtcgtgcgatgttgaacctaatgatacagtggatgccttgtacaatcgttttcttttccctgagggaattaaagccatggtggaggccgtgcagttgattgcagatgggaaggccccccgcattccgcagcctgaggaaggggcaacatatgagggaatccagaaaaaagagaacgctgagatctcctgggatcagtccgccgaggtgcttcataattggattagaggtcatgataaagtgccgggtgcatggacagaaatcaatggacagatggtgacattttacggatcaacactgctgaactctagcgtccccccaggcgagcctttggaaatcaagggtgcgaagaaaccaggactggtaacaaagaatggcttagtgctttttggcaacgacggcaaggcgctgacggtccgcaaccttcaatttgaggacggcaagatgatacccgccagccagtacttttctaccggggagacaagcgttgttgaacttaccgcagaagaggtcaaagtcgcagagactatcaaagttatttgggccgggatcttaagcaatgtccccatcattgaggattccacggacttctttaagagtggcgcctcttctatggacgtcgccagactcgtggaggaaattaggcagaagtgcggcggcctacagctgcagaatgaggacgtgtacatggcgacaaagtttgagggttttattcagaaggtcgtgcggaagctgcgtggagaggaccaagaagtcgagctggtagtggactacatatccaaggaagtcaacgaaatcatggtgaagatgccttaccagtgttttattaatggacagttcaccgacgcagacgatggaaaaacttatgacacgatcaatcccacagacgggagcacaatttgcaaagtgagctacgcaagccttgccgacgtcgataaggccgtcgctgcagccaaggacgctttcgagaatggtgagtgggggcgaatgaacgcacgtgagcgggggcgcctgatgtataggctggcagacctgctggaggagaaccaggaagagctggcaacaattgaagccttagacagcggagccgtgtacacactggctctgaaaacacatattggtatgagtgtacagacctttaggtacttcgccggttggtgtgataagattcagggctctacaatccccattaaccaggcccgccccaaccgcaatcttacatttactaagaaggagcctctcggtgtgtgcgccatcattatcccttggaattaccctctgatgatgctggcatggaaatcagccgcttgcctagcggcagggaacacgctggttcttaagcccgcccaagttacccccctgactgcattgaagtttgccgagctgagcgttaaagctggcttccccaagggtgttatcaacattattcccggatcagggggcattgctggccaacgcctgtcagagcatccagacatccgaaaactgggcttcacaggatctactcccatcggtaagcagataatgaaatcttgtgccgtctctaacctgaagaaggtgtctctagagttaggcggcaaaagtcccctgattatttttaacgactgtgagcttgacaaagcagtccggatgggcatgggcgccgtgttcttcaataagggcgagaactgtatcgcggccggtcggttgtttgtcgaagagtctatacatgatgagtttgtcacaagagtcgttgaagagataaagaaaatgaaaattggcgaccccctggacaggtcaactgaccacggcccacagaatcataaagcccacttagaaaagctgcttcagtactgcgaaacgggggtcaaagaaggtgcaaccctggtgtacggcggcagacaggtgcagagacccggcttcttcatggagcccacagtcttcacagacgttgaagattacatgtacttggcgaaggaagagtcctttggccctatcatggtcattagcaagtttcagaatggcgacattgatggagtgcttcagcgcgctaatagcactgaatacggcctggccagtggcgtgttcacacgagatattaataaggccatgtatgtttccgagaagcttgaggcaggtacggtttttatcaatacatacaataaaacggacgtagcggctcctttcggtggagtgaagcagtccggtttcgggaaggatctgggtgaggaggccctcaacgagtacttgaaaaccaaaaccgttacactggagtactag

SEQ ID NO: 22927 - DNA, 1323 bp, synthetic construct
  source 1..1323: mol_type = other DNA; note = Synthetic coding sequence
atggagggcgtgctgtacaagtggaccaactacctgagcggctggcaacctcgatggttcttactctgcggtggaattctgtcttactacgattctcctgaggatgcctggaaagggtgcaaggggtctatacagatggccgtgtgtgaaatacaggttcactccgttgacaatacccgcatggatctgattatcccaggggagcaatatttctatcttaaagcgagatccgtggctgagaggcaacgatggttggtggccttggggtcagcaaaggcttgccttactgactcccgtactcagaaggagaaagagtttgctgagaacacagagaatcttaaaaccaaaatgtcggagctcaggctttactgcgacctcttagttcagcaggtcgataaaactaaggaagtcaccaccacgggagtgtctaacagtgaagaaggtattgacgtcggcactctactcaaatccacatgcaatacttttctcaaaaccctggaggaatgtatgcagatcgcgaacgcggcttttacttctgaactcctgtaccgtacacccccaggctctccccaacttgccatgctgaaatcctctaagatgaaacatcctattatcccaatccacaattccctcgaaagacaaatggaactgagcacatgcgaaaatggaagcttgaacatggaaataaatggtgaggaagagatactgatgaaaaataagaactccctgtatttgaagagcgccgagatcgattgctcaatctcctcagaagagaacacagacgacaacatcaccgtgcagggcgagatccggaaggaagacggcatggaaaatctaaagaaccatgacaataacttgactcagtccggcagtgactcgagctgttcgcccgaatgcctatgggaggaggggaaggaagtgatccccacctttttttccactatgaacacgtctttttctgatatcgagctcctggaggatagcggcatcccaaccgaggcctttctggcttcatgctacgctgtcgttccagtgctagacaagcttggtcctaccgtctttgcacccgttaagatggacctcgtcggtaacatcaagaaagtgaaccagaagtacatcactaacaaagaagagttcacaacgttacagaaaatagtattgcacgaggtggaagccgatgtggcccaagttcggaacagcgccaccgaggcccttctgtggctgaagcggggacttaagtttctgaaggggtttctgactgaggtgaaaaacggggagaaggacatacagaccgctctccgcaatcccaccgagaacacatag

SEQ ID NO: 22928 - DNA, 1272 bp, synthetic construct
  source 1..1272: mol_type = other DNA; note = Synthetic coding sequence
atggccatctgccagttcttcctgcagggccggtgccggttcggcgatagatgctggaacgaacatccaggggctagaggggccggaggaggtagacagcaacctcaacagcagccgtccggaaataatagaaggggctggaataccacaagccagcggtatagtaacgttattcagccatcaagcttttcaaaatccactccctggggagggagtagggaccaagagaagccgtactttagctcttttgactcaggagcgtcaaccaacagaaaggaggggttcggtctcagcgagaacccatttgcttcactgtctcccgacgaacaaaaggacgaaaaaaaattactcgaaggcatcgtcaaggacatggaggtgtgggaatccagcgggcaatggatgtttagtgtgtacagtccggtaaagaaaaaacctaatatcagcggttttaccgatatcagtcccgaggaactccggcttgaatatcataatttccttacttccaataatctacagtcttacctgaatagcgttcaacggctgatcaaccagtggaggaaccgtgtcaatgagttgaagtcgcttaacatcagtacaaaagtggctctgttaagcgacgtaaaggacggcgtgaatcaggcggctcctgcattcggcttcggctcttctcaggcagccactttcatgtcacctgggtttccagtcaataattcttcctccgacaacgcccagaacttctcatttaaaaccaactccggcttcgctgccgcgagttcaggttcccccgccgggttcggcagttcacccgcattcggtgccgctgcatccacaagttccggaatatctactagcgcccctgcctttggctttggaaagcctgaagtgaccagcgcagcgtcattctcttttaaatcgccagccgcctcaagtttcgggtctccgggattttctggactgcccgctagtctggctaccgggcctgttagagcacctgttgcacctgctttcggcggcgggagcagcgtggcgggcttcgggagccccggatcccacagccacaccgcattctccaaaccttcctcagatacatttgggaattcctccattagcacatcccttagtgccagtagctcaataatcgcaacagacaatgtgctattcactccccgagataagctcacagtggaagagttagaacagtttcagagcaagaagttcactttggggaaaattccgctgaagcctcctcctcttgagctgcttaatgtgtag

SEQ ID NO: 22929 - DNA, 1323 bp, synthetic construct
  source 1..1323: mol_type = other DNA; note = Synthetic coding sequence
atgatggccgacgaggaggaggaggtgaagcccatcctgcagaagttacaggagctcgtcgaccagctatattcctttagggattgctactttgaaactcactcagtggaagatgcaggcaggaagcagcaggacgtgcagaaggaaatggagaagaccctccagcagatggaagaggtggttgggagcgtacaaggaaaggcacaggttctgatgctcactggaaaagcattaaacgttacacctgattattctcccaaagctgaagagctgctttccaaggctgtgaaactcgaaccggagttagtggaggcttggaaccagctcggagaagtgtattggaagaagggcgatgttgctgctgcccacacatgttttagtggcgccctcacacactgtcgtaataaggtcagtttgcagaatttatcaatggtgctgcgccagctacgtaccgatacggaagatgagcacagccaccacgtgatggactccgtgaggcaggcaaagcttgccgtgcaaatggacgtgcacgatggaagatcctggtatatccttggaaactcctatctttctctatactttagcacaggacagaaccccaagatttcccaacaggcccttagcgcatacgcccaggcggaaaaggtagaccgaaaggcttcaagtaaccccgaccttcatttaaaccgggccacacttcacaagtatgaggaaagttacggagaggcactggaaggcttcagtagagccgccgctcttgaccccgcctggcctgagccaaggcagagggagcagcagttgctagaatttttggatcggttaacttccctgctggagagcaaaggaaaagtcaagacaaagaagctacaaagcatgctgggctccctccgacctgcacacctggggccttgcagcgatggccactaccagtctgcaagcgggcagaaagtgacccttgagctgaaacccctgtctaccttgcagcccggcgtaaactccggtgccgttattcttggaaaagtcgtattctccttaactactgaagagaaggtccctttcacctttggcctcgtggatagcgatggcccatgctacgcagtaatggtgtataatatcgtccagagttggggagtgttaatcggggatagtgttgctatccctgagcccaacctgcgtttgcaccgcattcagcacaaagggaaagactacagcttcagctcagtgagagtcgaaacaccactgctgttggttgtgaacggcaagccccagggctctagcagccaggctgtggccacagtggcctctcgcccacaatgcgagtag

SEQ ID NO: 22930 - DNA, 1341 bp, synthetic construct
  source 1..1341: mol_type = other DNA; note = Synthetic coding sequence
atggaggagaccatcaaggacccccccaccagcgccgtgctgctggatcactgccacttttcacaggtgattttcaatagcgtggaaaagttctatattcctggcggcgacgtcacatgccattatacatttacacagcacttcatccccaggaggaaggactggattggcatctttcgagtgggctggaaaaccactcgcgagtattatacgttcatgtgggtcactcttcccattgacctcaataacaaatccgctaagcagcaagaagtgcagtttaaggcctactatctgcctaaggacgatgagtactaccagttctgctatgtggacgaagatggtgtagttcgcggtgcctctataccattccagtttcgccccgaaaatgaggaggacatcctggtggtcacaacacagggcgaggtagaggaaattgaacagcataataaagagctctgcaaagagaatcaggagctgaaggactcatgcatatcactgcagaaacaaaacagcgatatgcaggccgaacttcagaaaaaacaggaagagctcgagacactccagtcgatcaataagaaactcgagctgaaggtgaaggagcagaaggactactgggagactgagttgttgcagcttaaggaacagaatcagaaaatgagttcagagaacgaaaaaatgggaatcagagttgatcaattgcaagcacaactgtccacccaggagaaggaaatggagaaactcgtacagggcgaccaggataagacggagcaattggaacagcttaagaaagagaatgatcacctttttctctctcttaccgagcaacgcaaagaccagaagaaattggaacagaccgtggaacagatgaaacagaatgaaacaactgctatgaaaaagcagcaggaattaatggatgagaacttcgatctttcaaagcgtctgagcgagaacgaaatcatatgcaacgctttacagcggcagaaggaacgtttggagggggaaaacgatcttctgaagcgggagaattctagattactttcctacatgggtctggactttaacagtctgccgtatcaggttcctactagtgatgaaggcggcgccaggcagaaccctggtttggcttatggcaacccctactccggtatacaggagtcctctagtccatcccccctgtccattaagaaatgtcccatttgcaaggctgatgacatttgcgatcatactctggaacagcagcagatgcaaccgctgtgttttaattgcccgatctgcgacaagatttttcctgccacggagaagcagattttcgaggaccatgtgttttgtcactcactgtag

SEQ ID NO: 22931 - DNA, 1329 bp, synthetic construct
  source 1..1329: mol_type = other DNA; note = Synthetic coding sequence
atggccctgcccggcgcccgggcccggggctgggccgccgccgccagagctgcgcagcgacggcgaagggtagaaaatgctgggggatctcccagccctgagccagcgggacgacgagcagccttgtatgttcactggccgtattgcgaaaagcgatgctcctattgcaacttcaacaaatacattcccagaaggctcgaggaagccgctatgcagaaatgtctagtgacagaggctcagacactgctgagactgtcaggcgtgcagcgcgtggagtcggtgtttttcggcggggggaccccctcactcgcctccccacacaccgtggccgcagtcctcgaagcagtcgcacaagctgcccatcttccagcggatctcgaggtgaccctcgaagccaacccgacatctgcccccggctcccgactagctgagttcggtgctgccggtgtgaaccgactctctattggcttacagtccttggatgacaccgagcttaggctgctaggccggacccattctgcttgtgacgccctacggactctggccgaggctcgacgtctttttccaggccgggtttccgttgacctgatgctcggactacctgctcagcaggtaggcccatggcttggccagctgcaggagcttctgcatcactgcgacgaccacctgtctctgtaccagctgtcacttgagcggggaacggcactctttgcccaagtgcagaggggcgccctccctgcccccgacccagaactggccgcagaaatgtaccagcgcggacgagctgtacttcgagaggcaggatttcaccagtacgaggtgtcaaacttcgccagaaatggcgccctctccacccacaattggacgtactggcagtgtggccagtacctgggcgtgggccctggcgcccatgggcgctttatgccacaaggcgcgggggggcatacccgagaagcgcgcatccagactctagagcctgacaactggatgaaggaggttatgctctttggccacggtaccaggaagagggtcccgcttggccgcttggaactgctcgaagaagtcctcgccctgggtttgaggacagacgtgggaataactcaccagcattggcagcagttcgagccccagttaacactctgggacgtttttggggctaataaggaggtacaggagctgctggaacgagggctgttacagctggatcaccggggactcaggtgttcctgggagggattagccgtgctggacagtctgctgttgactctcctacctcagcttcaggaggcatggcaacagcggacaccttcaccagttccgggcggatag

SEQ ID NO: 22932 - DNA, 1278 bp, synthetic construct
  source 1..1278: mol_type = other DNA; note = Synthetic coding sequence
atggacaagaacatcggcgagcagctgaacaaggcctacgaggccttccggcaggcctgtatggatagggactctgctgtcaaagaattacagcagaagacagaaaattatgagcagcggatcagggaacagcaggaacagctgtccctgcagcaaaccatcattgataaacttaaatctcagctcttgctggtcaacagcacgcaagacaacaattatgggtgcgtccccctgttagaggacagcgaaactcgcaagaacaatcttaccctggatcagccacaggacaaggtgattagcggaattgctagagaaaagctgcctaaggtgcgaaggcaagaggtgagttcacctagaaaagaaacaagtgctaggtcactggggtccccgttgctccacgaacgaggcaatatcgagaagactttttgggacctgaaggaggagtttcataagatttgcatgctggccaaagctcaaaaggatcacttatctaaacttaacataccggataccgctactgaaactcaatgctccgtccccatacagtgtacggataagacagataaacaagaagccctttttaagccccaggctaaagatgatatcaacagaggtgccccaagtatcactagtgtgacacccaggggactgtgtagggatgaggaagacacctccttcgagtccctcagcaaatttaacgtcaagtttccacccatggacaatgatagtacttttctccactctactccggaaagaccaggaattctaagtcccgccacttcagaggccgtctgtcaggagaaattcaatatggagttcagggacaatcctgggaactttgtgaaaacggaggagacgcttttcgaaatacaaggaatagacccaatagcctccgcaattcagaacctgaagacaaccgacaagactaaaccaagcaacctcgttaatacatgtatccgcactactctcgaccgtgcagcttgcctgccaccaggagaccataacgcactgtacgtaaatagttttccactattggatccttccgacgcgcccttcccgagcctagacagcccaggcaaggctattagaggaccgcagcagccgatttggaagcctttccccaaccaggactccgatagcgtagtcctgagtggcacggactccgagctgcacatccctagagtgtgtgaattctgccaggctgtcttccctccttcgataacgagcaggggagactttttgagacacctcaacagtcattttaacggggaaacttag

SEQ ID NO: 22933 - DNA, 2055 bp, synthetic construct
  source 1..2055: mol_type = other DNA; note = Synthetic coding sequence
atggagaacctgcagaccaacttcagcctggtgcagggcagcaccaagaagctcaacggaatgggggatgatggtagccctcccgcgaagaagatgattacagatattcatgctaatggcaaaactattaataaggtgccgacagttaaaaaggagcacctagacgattatggcgaagctccagtggagactgatggggaacacgtgaagcgcacctgtacctccgtgccagagacactgcatctaaacccttctctgaagcatacgttggcccaattccacctgtcgagtcagtcatctctgggcggaccagcggccttttctgcccgacattcgcaggaatctatgtcacccaccgtgtttctgcccttaccatcaccacaggtgctgccaggacccctgctgatcccctccgatagctctactgagctgacacaaactgtcttggagggggagagcatcagctgtttccaagttggaggggagaagcgcttatgcctgcctcaggtgttgaattcagtgcttcgagagtttacacttcaacaaattaacactgtgtgcgacgagctgtacatatattgttccagatgtacctcggatcagttgcacatcttgaaggtccttgggatactgccgttcaacgcaccgtcatgtggactgatcaccctgaccgatgctcaaaggctttgtaacgcccttctcaggcctcggacatttccgcagaacggtagcgtccttccagccaagagttcgcttgcccaattgaaagagaccggctccgcttttgaggtggaacacgaatgcctgggaaagtgccaaggcctttttgctccccaattctatgtccagcctgacgctccctgtatccagtgcctggagtgctgtggcatgttcgcccctcagacctttgtgatgcactcacatagaagtccagataagagaacttgtcattggggatttgaatccgccaagtggcactgctatctgcatgtcaatcagaaatacctaggcacccccgaagaaaagaaactgaaaattattctggaggaaatgaaggaaaagttctctatgcgttccgggaagaggaaccagtctaagactgacgcccctagtggtatggaactacagtcctggtaccctgtgattaaacaggagggtgatcacgtgtcccagacccattctttccttcacccgtcttactacctgtatatgtgtgacaaggtcgtagcccctaacgtttccctcacgtccgctgtgtcccagtcgaaagaactcacaaagactgaggcttctaagtctatatcccgacaatctgagaaagcacatagcagcggaaagctgcaaaaaactgtgtcataccccgacgtgagtttggaggagcaggaaaaaatggatctcaagaccagccgggagctgtgctctcgtctggatgcctcgatttctaacaattcaacgtctaagcgaaaatcggagagtgcgacatgtaacctcgtgagagatatcaacaaagtggggataggcctcgtggccgcagcctcctcccccctgcttgttaaggacgtgatatgcgaggatgacaagggaaaaatcatggaagaagtcatgagaacctacctgaaacaacaggaaaagctcaatcttatccttcagaagaagcaacaattgcagatggaggtcaaaatgctgtcctcttccaagtccatgaaggaattgacagaagaacagcagaacctccagaaagaacttgaaagcttgcagaacgagcatgcccagcggatggaggagttttatgtggaacaaaaagaccttgagaaaaaactcgagcagataatgaagcagaaatgtacgtgtgactcaaatttggaaaaggataaagaggctgagtacgcagggcaactcgccgaactacggcagcggctggatcatgcggaggcagatcgtcaggagctacaggatgagctcaggcaagagagggaggccaggcagaagctcgagatgatgataaaggaactcaagctgcaaatcctgaagtcctccaaaaccgctaaggagtag

SEQ ID NO: 22934 - DNA, 1080 bp, synthetic construct
  source 1..1080: mol_type = other DNA; note = Synthetic coding sequence
atgagctaccggcgggagctggagaagtaccgggacctggacgaggatgagatcctgggtgccttgactgaggaagagctgcggactctcgagaacgagttggacgagcttgaccccgacaacgcattgctgccggctggccttcgtcaaaaagaccaaacgactaaagcccctaccggtcctttcaagcgcgaagaactcctagatcacttagagaagcaggcgaaggagtttaaggacagggaagacttagtcccttacactggcgagaaaagggggaaagtctgggtcccgaaacagaagcccctggaccctgtgctagaaagcgtcacactagagccagagctcgaagaggctcttgccaacgcatctgatgccgagctgtgcgacatcgctgccatattaggaatgcacacactcatgtccaaccaacagtattatcaggccctatcttcctcctccataatgaacaaggaaggcctgaactctgtaattaaacccacacagtataagccggtgcctgacgaggaaccaaatagcactgacgtagaggagaccctcgagcgaatcaagaataatgaccccaaacttgaagaggtgaacttgaacaatattagaaacattcccattcccacactgaaggcctacgcggaagctctgaaagaaaattcctatgtgaagaaattcagcattgttggcacaagaagcaacgacccagtcgcatacgccctggcagagatgttgaaagaaaacaaggtgttgaagactttgaatgtcgagtcaaacttcatttctggagccggaatactccgtctcgtggaagccttgccctacaatacaagcctcgtcgagatgaaaatagataatcaaagtcagcccttaggcaacaaggttgagatggaaatagtatccatgctggaaaaaaacgcaaccctgctgaagttcgggtaccactttacccagcagggccctaggctacgagcctccaatgcaatgatgaataataacgatttggtccgcaagcgtcgcctggcagacttaaccggccctataattcccaagtgtagaagcggggtttag

SEQ ID NO: 22935 - DNA, 1941 bp, synthetic construct
  source 1..1941: mol_type = other DNA; note = Synthetic coding sequence
atggaggagcggggcagccccgacggcgacctggcccggagcctggagcagggtcccgaagggcctgaaaccccgattcaggtagtgctccgcgtgaggcctatgagcgctgcagaacttaggagaggccagcagtctgtcttgcactgttcgggtacgcgcactctgcagggcggtcccgaggtagcattcagatttggtgctgtgctggatgccgcaagaacacaggaggatgtgttcagggcatgtggggtgcggcggttaggggaactggctctgaggggcttctcatgtacagtcttcacctttggtcagacagggtccggcaagacttacacactgaccggacccccaccacagggtgagggggtcccggtaccgcccagcctagccggcatcatgcaacgcaccttcgcatggcttctggatcgggtccaacacctgggagctccggttactctacgggcatcctatctcgaaatttataacgagcaagtgcgggatctcctgtctttaggatcgccaagacccctgcccgtgcgctggaataaaacaaggggcttctacgtggaacaactaagagtcgtggagtttggctctctggaagcattaatggagctgttacagactggactgtcaagacgtcgaaattctgctcatactcttaatcaggcctccagcagaagccacgctctattaaccctttacatctctcggcaaactgctcagcagatgccctccgtggaccctggcgagcccccggtaggtggaaaactttgctttgtagacctcgccggctccgagaaggtggccgctacagggtccagaggagagctcatgctggaggcaaacagcatcaatcgctccctcctcgctcttggacactgcatctccctccttctggatccccaacgcaagcagtctcatatcccttttcgggactcaaaacttaccaagctgctggcagactctctgggcggccgaggcgtcaccctgatggtggcctgcgtgagtccttccgctcagtgtttacctgagactttatcaactcttcggtatgcttccagggcacaacgcgttaccacgcgaccccaggccccaaaatcacctgtagcaaaacagcctcaacgccttgagaccgagatgctgcagttacaggaggagaatcgaaggttgcagtttcaactggaccagatggactgtaaggcttctggcctgtctggggccagagttgcctgggcacagcgcaacctgtacggtatgctgcaggagttcatgttggaaaacgagcggctgaggaaggaaaagtcgcaactgcaaaattccagggatctggcccagaatgaacaaagaattctcgcccagcaggtgcacgcacttgagcgccgccttctgtccgcatgttaccatcatcagcaaggccccgggctaacacccccttgtccctgtctgatggctccagccccaccttgccacgcactgcccccgctctactcctgcccctgttgccacatctgcccgctatgtcgcgtgcccctggctcactgggcatgcctgcccggtgagcaccacttgccgcaggttctcgatccggaagcttctggtggccggcctccatcagcaaggccgcccccatgggccccgccatgcagcccaggttccgctaaatgtcccagagaacggtcccatagcgattggacacagacaagggtgcttgcagagatgctaacagaggaagaagtcgttccttctgcgcctcctctgccagtcagacctccgaagacatcccctgggctccgcggaggcgcaggagttccaaacttggcacaacgcctggaagccttgagggatcagatcggaagttccttgcgccgcgggagatctcagcctccctgttcagaaggagcgaggagccccggacaggtgctgcctcctcactag

SEQ ID NO: 22936 - DNA, 462 bp, synthetic construct
  source 1..462: mol_type = other DNA; note = Synthetic coding sequence
atggcccggaacaccctgagcagccggttccggcgggtggacatcgatgagttcgacgaaaacaaattcgttgacgagcaggaggaggccgctgctgctgcagctgaacccggcccagaccccagtgaggtagacggactcctacggcaaggcgatatgctgcgggctttccacgctgctctccgtaattctcctgtgaacaccaagaaccaggctgtaaaagaacgagctcagggggtcgtactcaaagttttgaccaactttaaaagctccgagattgaacaggcagtgcaatccctggacaggaatggcgtggacctgttgatgaaatatatctataagggctttgaaaagcctaccgagaactccagcgcggtgctgctccagtggcacgagaaggcgctcgccgtaggcggactgggatcaattattcgcgttttaactgcccggaagaccgtttag

SEQ ID NO: 22937 - DNA, 3318 bp, synthetic construct
  source 1..3318: mol_type = other DNA; note = Synthetic coding sequence
atggccgccaccgccagcgccggcgtgcccgccaccgtgagcgagaagcaggagttctatcagctgctgaagaatctgattaatccttcctgcatggttcgccgccaggccgaggaaatctatgagaacatccccggcctgtgtaaaacaacttttcttctggatgccgtgcgcaaccggcgagctggatacgaggttcgacagatggccgccgccctgttacgacggcttctgtcatcagggtttgaggaggtctatccaaacctacccgcagatgtgcaacgggatgtgaagatcgagctcatacttgccgtgaagttggagacacacgcgtccatgcgcaaaaagctgtgtgacatatttgccgtgctggcaagaaatttaatagacgaggatggcacgaaccactggcccgaggggctaaaatttctcatagactcaatttactcaaagaatgtggtcctctgggaggtggctctgcatgtcttttggcattttccaggcatttttggtacacaagaaaggcacgatttagatattattaagcggcttctcgatcagtgcatccaggatcaggaacacccagccatcagaacgctgtcagccagagctgccgcagcctttgtgctggctaacgagaacaatattgcactgtttaaggatttcgccgaccttttgcctggcatcctccaagctgtgaacgattcttgttatcaagacgatgacagcgtcctggagagcctcgttgagatcgcggatacagtcccaaaatacttagggccctacctcgaagacacattgcaactcagcctcaaactgtgcggcgatagccgcctctctaacctccaaagacaactggcactggaggttattgtgacactttccgaaacagccacccctatgctcaagaaacataccaatatcattgcgcaggccgtgccacacatacttgcaatgatggtcgacctgcaggatgacgaggactgggtcaatgcggatgaaatggaggaagacgatttcgattccaatgcggtcgcagctgagtcagctttagataggcttgcttgtggtctgggtggcaaggttgtgctccctatgactaaagagcacattatgcagatgctgcagtctccagattggaagtatcgccatgccgggctgatggcactgtccgctatcggcgagggttgtcatcagcagatggagtcgatcttggatgagaccgtgaactcagtgttgttgttcctgcaggatccccatccaagagtccgagccgctgcatgcaccacactcggtcagatggccacagatttcgcaccaaattttcagaaaaagttccatgaaactgtgattgcagccctgctgaggactatggaaaaccagggcaaccagcgggtgcagtcacatgccgcctccgccctgattattttcatcgaagattgtcctaaaagcctgctagtgctttacgtggacagcatggtgaagaatctgcactcagttctagtaatcaagttacaagaactcataaggaatggcactaagctggctctggagcagctcgtcactacaattgcgagcgtggctgacactatagaggagaaatttgtaccatattacgatatttttatgccgtcactcaaacatattgtcgaactcgcagtgcagaaagagttgaagctcctgcggggcaaaactattgagtgcatatcccacattggcctcgcagtgggaaaggagaagtttatgcaagacgcttccaacgtcatgcaactgctccttaaaacgcaaagcgacctcaacaacatggaggatgacgacccccagaccagctatatggtcagtgcgtgggcaagaatgtgcaagattcttggcaaggatttccagcaatacttgcccttagtgatagagcccctgatcaagaccgcttctgcaaaacctgatgtcgctcttctggatacacaggacgttgaaaatatgtctgatgatgacggttggcagttcgtaaatcttggcgatcagcagtccttcggcataaagaccagtgggctggaagctaaggcaacagcttgccagatgttggtatattacgccaaagagttgcgcgagggatttgtggaatatacagagcaagtcgtgaaactgatggtcccacttctcaagttctactttcacgataacgttagagtggccgccgccgaaagcatgccattcctgctggaatgtgccagaatacggggccccgagtatctcgctcaaatgtggcagtttatttgcgaccccctcatcaaagctattgggaccgagcccgacacagatgtcctcagtgaaattatgaatagttttgcaaagagcatcgaggtcatgggagacgggtgcctgaatgacgaacacctggaagaactgggaggaatcttgaaggcaaagctcgagggtcactttaaaaaccaggaactcagacaagtaaagcgacaggaggaaaattacgaccagcaagtggaaatgagcctccaggatgaagacgagtgcgacgtgtacatactgacgaaagtcagcgatattttgcactctctgttttctacttataaggaaaagatacttccatggtttgagcagctgttacccttgatcgtcaatctgatctgctccagcagaccttggcccgatcgccagtggggcttgtgtatttttgatgatataatagaacattgttcacccacctcatttaaatacgtagagtatttccggtggccaatgctcctgaatatgagggacaataaccctgaagtgcgccaggccgccgcgtacggtctcggcgtaatggctcagttcggaggtgacgactatcgttccctttgttcggaggccgtgcctctgttggtgaaagtgattaaatgcgccaactctaaaactaaaaaaaatgtcatcgctaccgagaactgcatatctgcaatcggtaaaatcctcaaatttaagccaaactgtgtgaacgtggacgaagtcctgccccactggttgagctggcttcctctacacgaggataaggaagaagctattcaaacactgtcgttcctgtgtgacttgatcgagtctaaccaccctgtcgtcatcggccccaataactcaaacctgccaaagattatttcgattattgcggaaggcaaaattaatgaaacaatcaactatgaggatccctgcgccaagaggctggctaatgtggtgaggcaagtacaaacctctgaagatttatggctggagtgtgtgtcccagttagatgacgaacagcaggaggccttacaagagctgttaaactttgcttag

SEQ ID NO: 22938 - DNA, 1914 bp, synthetic construct
  source 1..1914: mol_type = other DNA; note = Synthetic coding sequence
atggaggtgaccggcttcggcgtgacccggcccggcaaggtgccccaggccaggatgagcgggttggttttgggtcagcgggacgagcctgccggccatagactgtcccaggaagagatcctaggatctacccgactcgtgagccaggggctggaagccctgagatccgagcatcaggccgttctccagagccttagtcaaacgattgagtgcctgcagcagggaggccatgaagagggactcgtgcacgaaaaagcgagacagttgagacggtctatggaaaacatagaactgggtctttctgaggcacaagtcatgctcgcacttgccagccacctgagtactgtagagtccgagaagcagaagttgcgggcgcaggtgcggagattgtgtcaggaaaatcaatggctgagagacgaactggccggaacccagcaaaggctccagcggtccgagcaagccgtcgctcagctcgaagaggagaaaaaacacttagaattcttaggccaactccggcaatatgacgaagacggccatacgagcgaggagaaagaaggggatgcaacaaaagactccctcgatgacttattccccaacgaagaggaagaagatccctctaatggactatcacgcgggcagggcgccactgccgcgcagcagggcggatatgagatcccagcgcgactgcgcacgttgcataatctggttatccaatatgccgcgcaggggagatacgaagtggcagttcctctctgtaaacaggcactcgaggacctagaaagaacttccggtcgggggcacccagatgtcgccacaatgctgaacattttagcactcgtctaccgggaccagaacaagtacaaagaagccgcccatctcctgaatgatgccctttctatacgggaaagcacactgggaccggatcaccctgccgtggcagccactctcaataacctggctgtgttgtacggaaaaagggggaagtataaagaagccgaaccgttgtgtcagcgagccctggagatccgggaaaaagttcttggcacgaaccaccccgacgtcgcaaagcaactgaacaatctggccctcctctgccagaaccagggaaagtacgaggctgtcgagaggtattaccagcgcgccctggcgatctacgaagggcagctaggcccggataatcccaacgtagcccgaacaaagaacaacctcgcttcttgctatctgaaacagggtaaatatgcagaggcagagactctttacaaagagatcctcactagagctcatgtacaggagtttgggagtgtggacgacgatcataagcccatttggatgcacgcggaagaaagggaagagatgtccaagagtcgccatcacgagggcggcacaccctatgccgagtatggtggatggtacaaagcttgtaaggtgtcttcgcctactgtgaacacaaccctgagaaatttaggtgccttataccgtagacagggtaaattggaggccgctgagactctggaggaatgcgcactcagaagccgccggcaaggaaccgatcccataagccagaccaaggtcgctgagttattgggcgagtctgatggtagacgaacatcacaggagggccctggtgacagcgtcaaattcgaaggtggtgaggacgcgtccgtggcagtggagtggtccggcgatgggagcgggacactccaaagaagcgggtcactgggaaagatccgcgacgtcctgcggcggtccagcgaactgctggtccgcaagctccagggcacagaaccacggcctagctctagcaatatgaagagagccgctagtctcaactacctgaaccagccgtccgcagctcccttgcaggtgtctcgcggactgagcgcctccactatggacctctctagtagctcatag

SEQ ID NO: 22939 - DNA, 3966 bp, synthetic construct
  source 1..3966: mol_type = other DNA; note = Synthetic coding sequence
atgcagtgcctggccgccgccctgaaggacgagaccaacatgagcggaggaggagagcaggccgatatactgccagccaattacgtggtgaaggatcggtggaaagtgctgaagaagattgggggcggcggtttcggcgagatctacgaggctatggacctgcttactcgtgagaatgttgccctcaaggttgaaagtgcacagcagcccaagcaagttcttaaaatggaggtggccgtgcttaagaaattgcagggtaaagaccatgtatgtcgcttcatcggctgtggccgcaatgaaaagtttaactatgtggtgatgcagctccagggacggaacctagccgacctcaggcgaagccagcctagaggaacctttacactcagtacaaccttaagactggggaagcagattctcgaaagcatagaagcaattcattccgtggggtttctgcaccgagacatcaaaccatctaatttcgcgatgggaagattgccctccacatatcggaagtgctacatgctagactttggtcttgcccgccagtacactaacaccacgggcgacgttcggccacccaggaacgtcgcaggattcagggggaccgtgaggtatgcttctgtgaacgctcacaagaatcgagaaatgggcagacatgacgatttgtggtcactcttctatatgctggtggaattcgcagtgggccagttgccctggcgcaaaatcaaggataaagaacaggtcgggatgattaaggagaagtacgaacatcgaatgctactgaagcacatgccatccgaatttcaccttttcctggaccacatcgccagcctcgattactttaccaagcctgactaccagttgatcatgtctgtttttgagaacagtatgaaggaacgaggtatcgccgaaaacgaggcttttgattgggaaaaagcggggacagatgctctgctgagcacctccacttccacacctccccagcagaatacccgacagaccgccgcaatgtttggtgtggtaaacgtgacaccggtccctggtgatctgctgagggagaataccgaagacgtccttcagggtgaacacctgagcgaccaggaaaatgcccccccaatcctgcctgggcgtccaagcgaagggctcggtccgtctccacatctggtgcctcacccagggggccccgaggccgaagtatgggaggaaaccgatgtcaaccgcaataagctgcgtattaatatcgggaagagcccatgcgtggaagaggagcagtccagggggatgggtgtcccgtcctcccctgttcgagcaccgccagacagcccaacgactccagtgaggagcctcagatatcgccgagttaactcaccagagtccgaaagactttccaccgcagatggacgcgtcgagttgccagaaaggaggtcaagaatggacctgcctggctccccctctagacaggcctgcagtagccagcctgcacaaatgctgtctgtcgacactggacacgcggacagacaggcgagcggcaggatggatgtaagcgcttctgttgaacaggaagctttatcaaatgcttttcggtcagtccctctggctgaagaagaggacttcgactctaaggagtgggtcatcatcgataaagaaactgaattaaaggattttccacctggcgctgagccaagtacatccggcaccacagatgaagaacccgaagagttgcgcccattgcctgaggaaggcgaggagaggcgccggcttggcgcggaaccaacagttcggcctaggggacgttcaatgcaggcgcttgccgaggaggacttgcagcacttaccaccccagcctcttccaccacaactgtcacagggtgacggtaggagcgagacgtcccagccaccgacaccggggtctccaagccacagtcccctccactccggccctaggccgaggaggcgggagagcgacccgactggcccccagcggcaggtttttagcgtggcgccgccgtttgaagttaacggcctgccccgggccgttccactcagcctcccttatcaagacttcaaacgcgatctttctgattatagggagcgagcgcggctcctgaatagagtccgacgggttggtttctcccacatgttgctgactacgccacaggttcctctggctccagtgcagcctcaagccaacggcaaggaagaggaagaggaagaagaagaggacgaagaggaggaggaggaagatgaagaggaggaggaggaggaggaagaagaagaagaggaggaagaggaggaagaggaagaagaggaggaggctgcagcagcggtggctctgggcgaggtgcttggccccaggagcggaagtagctctgagggttcagaacggtcaacagacagatctcaggaaggcgctccctctacactcctcgcagacgaccaaaaagagtcgaggggccgggcgtcgatggccgacggagatcttgagccagaggaaggaagtaagacactagtgctcgtttcgcctggggatatgaaaaagtctcctgtcacggccgagctcgcgcctgatccagacctgggaactctcgcagctctcacaccacagcatgagagaccccagccgacgggttcacagttggacgtgtccgagccgggaaccctgtcttccgtcctgaagagtgagcccaaaccccccgggcccggagctggcctcggagccggaaccgtgaccacgggagtgggaggggtcgctgtcaccagtagtccgttcaccaaagtcgagaggacatttgttcacattgctgagaagacccatctaaacgtcatgagttcaggcggtcaagctctgcggtccgaagagttttcggctggcggagagttggggctggagttggcctccgacgggggagccgtggaggagggcgctcgagctcccctcgagaatggcctcgccctgagcggactcaatggtgctgagattgaaggatcagccttatcaggggccccccgggaaacccctagtgagatggccacaaacagtcttccaaatggcccagccctggcggacggccctgcccccgtcagccccctggagcctagccccgaaaaggtggccactatcagccccaggcggcatgcgatgccgggctcacggcctagatccagaattcccgtactcctatcagaagaggacacaggctctgaaccttctgggagcctgagcgccaaggagaggtggtcaaaaagggccagaccccagcaggatttggcaagactggtgatggagaaacgtcagggccgtctgctgctaagattagccagtggagcttcaagctcctcctctgaagagcagaggcgggcctctgagactctgagcgggacgggctccgaggaagatacccctgcctccgaacctgcagccgcactgccgagaaagtctggcagggccgccgccacacggagcagaattccccggccgataggcctgcgcatgccaatgccagttgccgcccagcagcctgcttcccggagtcacggagctgcgcctgccttggacaccgccatcacttctaggttgcaacttcagaccccaccggggagtgccactgctgccgacctgagacctaagcaacctcccggaaggggactaggacctggccgggcccaagctggagcgcgtccccccgcaccgaggtcgccccgtttgcccgccagtactagcgccgcacgaaatgcaagtgcttctcctcgcagccagtcattaagcagaagggaaagtccttcacctagtcaccaggcgcggccgggagtacctccaccacgtggggtccctccagccagggcccagcccgacggaacgccttcccctggcgggtcaaaaaagggccccagggggaagctgcaggcgcagagggccaccactaaggggagggcaggtggcgcggaggggagggcaggagctcggtag

SEQ ID NO: 22940 - DNA, 1818 bp, synthetic construct
  source 1..1818: mol_type = other DNA; note = Synthetic coding sequence
atgagccagctgagcagcaccctgaagcggtacaccgagagcgccaggtatacagatgctcactacgctaagtccggttacggagcttatacgcccagtagctacggggctaacctggccgcgagcctccttgagaaagaaaaactgggtttcaagccagtacctacttcctcttttttaacccgtccccggacatatggcccatcaagcctgctggactatgatagggggcgcccgttattgcgacctgatatcacaggtggaggtaagcgcgcagagagccagacacgcgggacagagcgtccgctgggttcgggacttagcggcgggagtggcttcccatatggggtaactaacaattgtctaagctaccttcctattaatgcgtatgatcagggcgtgacactgacacagaagctggattctcagagtgatttggcacgcgatttttcgtctctgcgcacgtccgactcttaccgcattgatcctaggaatctgggacgctcgcccatgctcgcgagaacgcggaaggagctctgtaccctgcagggactgtatcaaaccgcctcatgtcctgaataccttgtcgattatctcgaaaactatggccgcaagggtagtgcatctcaggtaccatcacaggccccaccaagcagggtgccagagatcatttcacctacatacaggcccattgggcgatatacactgtgggaaaccggcaagggccaggctcccggtccttcccgctcctccagtcctggcagggatgggatgaattctaagtccgcccaggggctcgccggacttagaaacctgggaaatacttgtttcatgaacagcatcctccagtgtctatcaaatacaagggagcttagggattattgcctccagcggctgtacatgcgggatttgcatcatggttccaacgcacacacagccctagtggaagaatttgcgaaactcattcagactatttggacctcttcgcctaatgatgtggtttctccttcggagttcaaaacccagattcagagatacgcacctcgatttgtggggtacaaccagcaggacgctcaggaattcctgcgctttcttctggacggcctgcacaatgaagtgaatagggttactttgcgcccaaagagtaacccggagaatttggatcatttgcccgacgatgaaaaggggagacaaatgtggcggaagtatttggaacgggaggatagcaggattggggatctgtttgttgggcagctcaagtctagcttgacttgcacagattgcgggtattgttccaccgtgttcgaccctttctgggacctgagcttacccattgctaagagaggttaccccgaggtgactttaatggactgcatgaggctgttcactaaagaggacgtgcttgatggggatgagaaacccacatgctgccggtgcagaggtcggaagcgctgcatcaaaaaattcagcattcagcgcttcccaaagattctggtcctgcatctcaagagattcagtgaatctcgaatccgaacatcgaagcttactacgttcgtgaatttcccgctcagagacttggacctccgagagttcgcctcagagaacacaaatcacgctgtgtataatctgtacgcagtgtccaaccactcagggacaaccatgggagggcactatactgcatactgccgaagcccagggaccggtgagtggcacaccttcaacgatagcagcgtgacccctatgagttccagtcaggtccggacctccgacgcatatcttcttttctacgagttagcgtctccgcctagtagaatgtag

SEQ ID NO: 22941 - DNA, 1353 bp, synthetic construct
  source 1..1353: mol_type = other DNA; note = Synthetic coding sequence
atggtgcccctggtggccgtggtgagcggcccccgggcccagctgttcgcctgtctcctccgactgggcacgcagcaggtgggcccattgcaattacatacaggagccagccatgcagccaggaaccattatgaggtgctcgtgctaggaggtggaagcggagggatcaccatggcagccaggatgaagaggaaggtgggcgcggaaaacgtcgctatagtggagccatcagagaggcacttctaccaacctatatggaccctggtaggggccggggccaaacagttaagcagctctggacgacctactgccagcgttatcccatctggagtggaatggattaaagctagagtgaccgagctgaatcctgacaagaactgtattcacacagacgacgatgaaaagatttcctacagatatctcataatcgccctgggaattcagttagactacgagaagattaaagggttacccgaaggctttgcacatcccaaaatcggcagtaattattccgtcaaaaccgtagagaagacctggaaggccttacaagactttaaagaaggaaatgcaatatttaccttccccaatacgccagtgaagtgtgccggtgccccacagaagattatgtacttatccgaggcctactttcgcaagacagggaaacggtcgaaagcaaatattattttcaacactagcctcggcgccatctttggcgtaaaaaaatacgcagacgccctgcaggagatcatacaggaaaggaatctcactgtcaattacaagaaaaatctgatagaagtgcgggcagataaacaggaggccgtgttcgaaaacttggataagcctggagaaacccaagtgataagctatgagatgttgcacgtcacccccccaatgtccccccccgatgtcctgaaaacctctccggtggctgacgccgcgggttgggtggacgtggataaagagacactgcagcaccggagatacccgaatgttttcgggatcggagattgcactaatcttccaaccagcaaaactgccgccgccgtggccgcacaaagtgggatcctagatcgcaccatctctgtgattatgaaaaaccagacccccaccaagaagtacgacggctatacaagctgccctctggtgactggatacaacagagttatcctggcagaattcgattacaaagcagagccattggagacctttccctttgaccagtctaaagaacgactctcaatgtacttgatgaaagcagatctcatgccctttttgtattggaacatgatgctgagaggatactggggcgggcctgccttcttgaggaagctgtttcatctcggcatgtcttag

SEQ ID NO: 22942 - DNA, 5244 bp, synthetic construct
  source 1..5244: mol_type = other DNA; note = Synthetic coding sequence
atggacggcgtgagcagcgaggccaacgaggagaacgacaacatcgagagacctgtcaggcgacgccatagttccatccttaaaccaccacggagtcccttacaggatttgcgtggcggcaacgaaagggtgcaggaaagcaatgcactgaggaacaagaagaactccaggcgggtgtctttcgccgacactataaaagtgttccagactgaatcccacatgaagatcgttagaaagagcgagatggaagagactgaaacaggcgaaaatttactcctcattcagaacaagaaactggaagataattactgtgaaataactggtatgaatacattgctcagcgcaccaatccatacccagatgcagcagaaggaattctccatcattgagcatacaagagagcgaaaacatgctaacgatcagactgtgatattttccgacgaaaatcaaatggaccttacctcgtcacacaccgtcatgataacaaagggcttgctggacaaccccatcagtgaaaagtcaaccaaaatagatactacctctttcctcgcaaatctgaaactgcatacggaagacagccgcatgaaaaaagaagtaaacttttcagtcgaccagaatacttccagtgaaaacaagatcgattttaacgacttcatcaagcggttaaagaccggtaaatgtagtgcgtttccagacgtaccagataaagagaattttgagatcccaatttactccaaagagcccaatagcgcatctagtacccatcaaatgcatgtgtcacttaaggaggacgaaaataactccaacatcacccgccttttcagagagaaggatgatgggatgaatttcacccagtgccatactgctaacatacagactcttatcccgacatcctctgaaaccaactctcgcgaatctaaagggaacgatataacaatctatggtaatgacttcatggatctcacgttcaaccatacacttcagattctgcctgccaccggtaacttttccgagattgagaaccagacacagaatgccatggacgtcaccaccggctacggcaccaaagccagtggcaataagacagtttttaaatctaagcaaaacactgccttccaggacctgagtattaattccgcagacaaaatacacataacccgatcacacatcatgggcgcagaaacccatattgtgtctcagacgtgcaaccaggacgcccgcatacttgccatgacaccagagtcaatttactctaatccgtcgatccagggttgcaagaccgttttctactcaagctgtaatgacgcgatggagatgaccaaatgcctctctaatatgcgcgaggaaaaaaatctgcttaagcatgattccaactacgctaagatgtactgtaatccagacgccatgtcatctctcaccgaaaaaactatctatagcggagaagaaaatatggatattaccaaaagccacaccgtggctatagataaccaaatttttaaacaggatcaatccaatgtgcaaatcgccgcggcacctactcccgagaaagagatgatgcttcaaaatctgatgaccacaagcgaggacggaaagatgaatgtgaactgcaacagtgtgccgcacgtgagtaaagaacggatccagcagtccttaagcaaccccttgagcatctccttgactgatcgcaaaactgagttactttccggagaaaacatggatttaaccgaatcccatacatcaaatctggggtcacaggtaccactcgccgcttacaatctggccccggagtctacaagtgagtcccactctcagagcaagtcatcgagcgatgagtgcgaagagataacaaagtcgaggaatgagcctttccagaggagcgatattatagctaaaaatagcctcacagacacatggaacaaagataaggattgggttctcaaaattctcccgtatctggacaaggactctccccagagcgccgattgcaatcaagaaatcgcgacgtcacacaacatcgtgtactgtggaggcgtgctggacaagcagatcacgaaccgcaataccgtgtcctgggagcaaagcctgtttagtacaacgaagcctcttttttcttccggccaattttcaatgaagaatcatgacacagccatcagttcacataccgtgaaatccgttctcggacagaacagcaaacttgcagagcccctcagaaaaagtttgagtaaccctacccctgattactgccacgacaaaatgattatttgttccgaggaggaacagaatatggatcttactaagtcgcacacagtggtgattggcttcggccccagtgagctgcaggagttagggaagaccaaccttgagcatacaaccggccagctcaccacaatgaatcgccagattgcagtcaaggtcgagaaatgcgggaaaagtcctatcgaaaaatccggcgtgctaaagtccaactgtatcatggatgtgctggaggatgagtctgttcagaagcctaaattcccaaaggagaaacagaatgttaaaatctggggaagaaaatcagtcggtggccccaaaattgataaaacaatagttttcagcgaggacgacaaaaacgatatggacatcacaaagtcgtacacgatcgagattaaccatcgccctctcttagagaagagagactgccacttggtgcctctcgctgggacatccgaaactattctgtatacatgccgccaggacgacatggaaatcacccgctctcatacaactgctctggaatgcaagactgtgtctccggatgaaattactacaaggcccatggacaaaacggtggtctttgtcgataatcacgtggagctagaaatgacagagagtcataccgtgttcatagactatcaggagaaagagagaaccgatagacccaattttgagcttagccagcggaaatctttagggacacctaccgtgatttgcacgcccacagaggagagcgtcttctttccagggaatggggaatctgaccgacttgtggccaatgattcccagctaaccccactggaggaatggagcaataaccggggccccgtggaagtagctgataatatggagttgtctaagagtgcgacttgtaaaaacataaaggacgtgcaatccccagggttcttaaatgagccactctcaagcaagagccagcggcgtaaatctctgaagctgaagaatgacaagacaattgttttctctgagaaccacaaaaatgacatggatattactcaatcttgtatggtggagatagacaacgagtctgctctggaggacaaagaggattttcaccttgccggtgcctccaagacaatcctctacagctgcggccaggatgatatggagatcacacggtctcatacaacggcccttgagtgtaaaacacttctgcccaacgaaattgccatccggcccatggacaaaaccgtactcttcacagacaactatagcgatctggaggtgaccgacagccacacagttttcatcgactgtcaggccaccgaaaaaatcttggaggaaaatcctaagttcggaattgggaaaggtaagaatctgggtgtgagttttcccaaggacaactcctgcgtgcaagagattgcagagaaacaggctcttgccgttggcaacaagattgtgttacatacagaacaaaaacagcagctgttcgccgcaaccaaccggaccaccaatgaaatcatcaagtttcactccgctgccatggacgagaaagttatcggaaaggtcgtcgatcaggcctgcaccctggagaaggcccaggtggagtcgtgtcagctcaacaatcgcgacagacgaaatgtcgattttacttccagtcacgcgaccgcggtgtgtggatcttcagacaactatagttgtctacccaacgtcattagttgcaccgataatctggaaggctctgccatgttgctgtgcgataaggacgaggagaaggccaactactgtccagtgcagaacgacctcgcatacgctaatgactttgctagtgaatattatctggagtcagaaggtcagccgctgagcgcaccctgtccgctcctggaaaaagaagaggttatccagacaagtaccaaggggcaattggattgcgttattacgctgcacaaagatcaggatctcattaaagatccaagaaacctgttggccaatcagaccctggtgtatagccaggacctgggagaaatgaccaaattgaactccaagagagtttccttcaagttacctaaggatcagatgaaggtctatgtcgatgacatttatgtgattcctcagccccatttcagtactgatcagccccctctgccaaaaaaggggcagtcaagtatcaacaaagaagaagttatcctgtccaaagctggaaacaaatccctaaatattatcgaaaacagttccgcgcctatctgtgagaacaaacctaagattttaaacagtgaagaatggtttgccgccgcatgtaaaaaggagctgaaggagaatatacagaccaccaactacaacactgcactcgacttccatagcaacagcgatgtcactaaacaggttatccagacccacgtgaacgctggcgaagcccctgatcctgttattacctctaacgtgccctgtttccattcaattaaaccgaacctgaataacctgaacggaaagactggggagttcctcgcttttcaaactgtgcatttgcctcctctccctgaacagctcctagagctggggaacaaggcacacaacgacatgcatatagtgcaggctacggagatacacaacataaatatcatcagttccaatgctaaagactctcgcgacgaggagaataagaaaagccataacggggctgaaactacctccctcccccccaagaccgtctttaaagacaaggtcaggcggtgctctttaggtatattcctacctagacttcccaacaaaagaaactgctcagttaccgggatagatgatctagaacagatccctgccgacactacagatatcaaccacttggagacccagccggtctcctccaaggactccgggatcggttctgtggctggcaaactcaacctttctcccagtcagtatattaacgaagagaacctccctgtctatcccgatgaaattaactcatcagacagtataaacatcgagactgagccgaagaaaaacgttggtacccggagaaggcggtactcctag

SEQ ID NO: 22943 - DNA, 2061 bp, synthetic construct
  source 1..2061: mol_type = other DNA; note = Synthetic coding sequence
atgatccccggcaagtaccggagcgtgagcggccgggccgccaacaatgtcaattgtggcctgcatctggtgatccagactagctcacttccagaaaagaataaggtcgaattcaaacttaacaaggacacctcctcatttcctggccgactcctgcagcacgacctcgagaggaactattcaagccggcaaggtgatcatattaatctcgtgtcgagctctctgagcagcttccccatacttcaaagaagctcagaggaaaaaatcctctactcagacagattaagcttagagcgccagaaattgactgtgtgtccaatcatcaatggtgaagatcacttgcggctcctgaactttcagcacaacttcatcacccgcatccaaaacatatcaaatctgcagaagctgatctccctggatctgtacgacaatcagatagaggaaataagcggcctgagcacactgagatgtttgagagtgctcttgttgggtaagaacagaatcaagaagatcagcaacctcgagaacctaaagagtctggatgtgctggatctccatggcaaccagataacaaagatcgagaacatcaatcatctgtgtgaactgcgcgtgctcaatctggcaagaaactttttgtcacatgtagacaacctgaatggactcgacagcctaacagagctgaacctgcgccacaatcaaatcacctttgtgcgagacgtcgataatctgccatgccttcaacacctctttctgagcttcaacaacatcagctcctttgacagtgttagctgcctggccgactcaagttccctgagcgatattacgtttgacggtaatcctatagcccaagaaagttggtacaaacataccgtgctgcagaatatgatgcagttacggcaactggatatgaagaggatcacagaggaagaaaggcgtatggcttctgtgttggcaaaaaaggaggaagagaagaaacgggaaagccacaaacagtctctgctgaaagagaaaaaaaggctcactataaacaatgtagcccgccagtgggatttacagcagcagcgggttgcgaatattgctactaatgaggaccgcaaggactctgacagtcctcaggacccatgccagattgatgggagcacactgagtgcctttcccgaggaaactggccctctggactcggggctgaataatgccttgcagggcctgagtgttatcgatacataccttgtggaagtggacggagacaccctttccctctacggatctggcgcactggagagtctagacaggaattggtccgtccagaccgccggcatgattaccacggtgtcctttacgtttattgagttcgacgagatcgtccaggttctacccaaactcaaaatcaagttccccaacagtctccacctgaaatttaaagaaaccaacttggtaatgctccagcaatttaatgcactcgcccagctgagaagaatcgaccagttgaccatcgatccccagggcaaccctgtcgtgaatttcactctgtggaagtattacgtgctcttccgactttcacatttcagtatgcaaaaaataaatggcacggaagtgacccaaaacgacatgattatggcggagaggctgttcggcatcctggcacatgtggccagctccgaactgccccagtataggctgatcagcatcctgggagacgccagaaagaaacaatttcgatacttacttgagagtaaaggcaagaagcccgggattatcaatgaagaaaacaatgatagtaaaagactagtgggcgaaaatactaacagggccaccctcaactacacaacccgagacttctataatgaaaaacttgaagaaataaaagagaaaaaaaagttctgcaagacttacatcgaagacttggtcaaagaggcaaccgaaattaacatgaaaaatgaggcgctccagaaactctggccccagatgttcatagaactagtaagggatgctgttattgagattagaaataagaactcctacatgaagttgtgcctccaacagatcacagatcagaaatag

SEQ ID NO: 22944 - DNA, 255 bp, synthetic construct
  source 1..255: mol_type = other DNA; note = Synthetic coding sequence
atgccctacctgctgatcagcacccagatccggatggaggtgggccccaccatggttggagacgagcagtctgatcctgaactgatgcaacatcttggagctagcaagcgacgcgcactgggtaacaatttctacgagtattatgtcgacgacccgccacggatagtactggacaagctggagagaagaggcttccgcgtgctgtcaatgaccggggtcggccagacactggtctggtgcctccataaggagtag

SEQ ID NO: 22945 - DNA, 2664 bp, synthetic construct
  source 1..2664: mol_type = other DNA; note = Synthetic coding sequence
atgcccagcctgccccaggagggcgtgatccagggccccagccccctcgacctcaataccgagctaccataccaatccaccatgaaaagaaaagttaggaaaaagaagaaaaaaggtaccatcaccgccaatgtagctggtaccaaatttgaaattgtgagactagtgatcgatgagatgggtttcatgaagacacccgacgaagacgagacatccaatctcatttggtgtgactccgccgtccagcaggagaagataagtgagcttcagaactatcagcgaatcaaccacttccccggcatgggagagatctgtaggaaggattttctggcccgcaacatgacaaagatgattaaatctcggcccctcgattatacgtttgtgcctcggacctggatctttcctgctgaatatacacagttccagaactacgttaaggagctgaagaaaaagcgcaaacaaaagaccttcatcgttaagcctgccaatggcgcaatgggacacggtatctctcttatccgcaacggagataaacttcccagtcaggatcatctgattgtacaagagtatatcgagaaaccattcctaatggagggctataagtttgacctgaggatctacatcctggtgacttcatgcgaccccctgaaaattttcctctaccacgatggactcgttaggatgggcactgagaaatatattcccccgaatgaaagcaatctcacacaactgtatatgcaccttactaactacagcgtgaataaacataacgagcatttcgagcgggacgagaccgaaaataagggaagcaagcgctccattaaatggtttactgagttcctgcaggctaatcagcacgacgtcgcaaagttctggtccgatattagtgagctggtggtcaagacgttaatcgtagccgagcctcacgtgctgcatgcctatagaatgtgtcgccccggccagcctcctggaagcgagagcgtatgctttgaagtactggggttcgacattttactggacagaaagttaaagccatggctgctcgagataaatcgggcgccatccttcgggaccgatcagaaaatcgattatgatgtgaaacgcggagtgctgcttaacgctctaaaattgctgaatatcaggacaagtgacaaaagacggaacctagctaagcagaaagctgaagcccagaggaggctctacgggcagaatagcattaagaggctgctgccgggttcctccgactgggagcagcagcgacaccagctcgaacggcgcaaagaagaacttaaggagagactggcacaggttaggaagcagatctcacgggaggaacacgagaatcgccacatgggcaactatcggagaatctacccacccgaggacaaagccctgcttgagaagtacgaaaacttgttggccgtcgcctttcagacattcctgtccggtagagctgcttcttttcaaagggagttaaacaacccccttaagaggatgaaggaggaggacattctggatttgctggaacagtgtgagattgacgacgaaaaactcatgggcaagacaacaaagaccagagggccgaagccattatgttccatgcccgagtcaacagaaatcatgaaacgtccaaagtactgtagtagcgattcatcctacgatagctcatcttcatcttctgaaagcgacgaaaacgaaaaggaagaatatcaaaacaaaaaaagagagaaacaggtgacctacaatctcaaacctagcaaccactacaaactgatacaacagccatctagtatccgccgctctgtgagttgtcccagaagtatttcagctcagtctccatcatcaggcgatactaggccattcagcgctcaacagatgataagtgtctcccgccccacttcagcctctagatcacattcactgaatagagcttcttcatatatgaggcatttaccccatagcaacgatgcttgctcaacgaatagtcaggtctccgaaagcctgcgtcagctgaaaacaaaggagcaagaggatgacctgacgagccagactctcttcgttttaaaagacatgaagattagatttcctggcaaaagtgacgccgagagtgaacttctcattgaggacattattgataactggaagtaccataagaccaaagtggccagctattggctgattaagttagatagtgtcaagcagaggaaagtgctggacatagttaaaacctccatccggactgtgctgcccagaatatggaaagttcccgatgttgaggaggtgaatttataccgcattttcaaccgtgtttttaaccgcttgctttggtcccgcggtcagggtctgtggaactgcttttgcgatagcggctctagttgggagtctatcttcaataaatctccagaggtggtgacgcctttgcagctgcagtgttgtcaacgactggtggaactgtgcaagcagtgtctgctcgtagtgtacaaatatgctactgataaaaggggcagcctgtccggtatcggccccgattggggcaactcccgttacctgctgcctggaagcacgcagtttttcctccgaactccgacctataaccttaagtataacagccccggcatgacaaggagcaacgtcttattcacgagcaggtatggacacctctag

SEQ ID NO: 22946 - DNA, 1140 bp, synthetic construct
  source 1..1140: mol_type = other DNA; note = Synthetic coding sequence
atggccggcccccgggtggaggtggacggcagcatcatggagggcggagggcaaattttgcgggtctccaccgccctcagctgtttactgggtcttcctttacgggtgcagaaaattagagctggaagatcaacccccgggttatcgagcggcggatggaagagcaagattaaagtgctcacccgccctcaacatctctccgggctggaaatgatccgcgacctgtgcgatggtcaactggagggggccgaaattggaagcaccgagattacgtttacaccggaaaagatcaagggaggcatacacaccgccgataccaaaactgcaggctcggtctgtctcctcatgcaggtctccatgccttgtgtccttttcgctgcatcaccaagtgaattacacttaaaagggggcacaaatgctgaaatggccccccaaatcgattacactgtcatggtttttaaacctatagtggaaaagttcggctttatattcaattgcgacattaaaacccggggatactacccgaaaggcgggggagaagttatcgtgagaatgtcgccggtgaagcaactcaacccaatcaatctcacagaaaggggttgtgtcactaaaatctatggtcgggcctttgtggccggtgtcctcccgtttaaggttgccaaagatatggcagcagcagccgtccgatgtatccggaaggaaatccgggacttgtacgttaacattcaaccagtccaggagcccaaagatcaggccttcggcaacggaaatggtatcattatcatagccgagacctccactggctgtcttttcgccgggagttcgcttggtaagcgcggcgtaaacgccgacaaagtagggattgaggcggctgagatgttgttggctaacctccgacatggtgggaccgtggatgagtatctccaggatcagttgattgtcttcatggctttagctaatggagtttctcgtattaaaaccgggcctgtgactctgcacacccaaacagccatccattttgctgagcaaatcgctaaggcgaagttcatcgtgaaaaagtcagaggatgaagaagacgctgccaaagatacttatattattgaatgccagggcattggcatgaccaacccaaacctttag

SEQ ID NO: 22947 - DNA, 1056 bp, synthetic construct
  source 1..1056: mol_type = other DNA; note = Synthetic coding sequence
atgcccagcgagaccctgtgggagatcgccaaggccgaggtggagaagagaggcattaatggctcagagggggatggagcagagattgcagagaagttcgtgttctttataggatccaagaacgggggtaagactaccatcattctgagatgtctggaccgcgacgaaccccccaaaccaacattagcgctggaatacacatacgggcggcgggccaagggccacaatacccccaaggacatcgcacatttctgggaacttggcggtggcacttccctgctggatttgatttctattccaattactggtgatacgctgcgtacattcagcttggtgttagtcctcgacctgtcgaaaccgaacgatctatggcccacgatggagaacctgctccaggctaccaagagccacgtggataaagttatcatgaaattgggcaagaccaatgcaaaggcagtgagcgagatgcggcagaaaatatggaacaacatgcccaaagatcacccagatcatgaactgattgaccctttcccagtgccgctcgtgattatcgggagcaaatatgacgtgttccaggacttcgagagcgagaagcgtaaagtgatttgtaagactcttcgcttcgtagcccactactacggcgcctctcttatgttcaccagcaagtctgaggccctgttgctgaaaatcagaggtgtcatcaatcagctggcattcggcattgacaaaagtaagtcgatttgtgtagaccagaataaacccctgttcattacagctggtcttgactccttcggccaaataggcagcccgcccgtgccggagaatgatatcggcaagctgcacgctcattcccccatggagctgtggaagaaggtgtacgaaaagctgttccctccaaaaagcattaataccctgaaggatattaaagatccggcccgggaccctcagtacgccgaaaacgaggtggacgagatgcggatccagaaggacctggaactggagcagtacaaacgctcatcatctaaatcttggaaacagattgaactagactcctag

SEQ ID NO: 22948 - DNA, 798 bp, synthetic construct
  source 1..798: mol_type = other DNA; note = Synthetic coding sequence
atgtgcaccagcgagaccttccaggccctggacaccttcgaggccagacacgacgatatagtgttggcttcctaccctaagtgcgggagcaattggattcttcacatcgtgagcgaattaatctacgctgttagtaagaaaaaatacaagtacccagagttccctgtactggagtgcggggacagcgaaaaatatcagagaatgaaaggatttccctctccgagaattctggctacacacttacactatgacaaactcccagggtcaatctttgaaaataaagccaaaatcctcgtaatttttcgcaacccgaaggatacagctgtgtcttttttgcattttcacaatgacgtccctgacatcccttcgtacggcagctgggacgagttctttagacaatttatgaaaggccaagtctcttggggccgatacttcgatttcgccattaattggaataaacacctggacggtgataacgtcaagttcatcctttacgaagacctcaaggaaaacctggcggccggcattaaacagatcgccgaatttcttggattcttcttaactggtgagcagatccagacgatttcggtgcagagtaccttccaagcgatgcgagctaaatcacaggacacacatggcgctgtggggccattcctttttcggaaaggagaagtgggcgattggaagaacctgtttagtgaaattcaaaaccaggagatggacgaaaaattcaaggagtgtttggccggcacaagtttgggcgctaagctcaagtatgaaagctactgtcagggctag

SEQ ID NO: 22949 - DNA, 5343 bp, synthetic construct
  source 1..5343: mol_type = other DNA; note = Synthetic coding sequence
atggagagcaacttcaaccaggagggcgtgccccggcccagctacgttttttctgccgaccctattgcccgacccagcgagatcaattttgatggcatcaagctagacctgagccatgagttctccctggtggcaccaaacacagaggccaatagtttcgagtctaaggattacctacaggtctgcctgcgcattcgcccattcactcaatccgagaaagagttggaaagcgagggatgcgtacatattctggactcccaaaccgttgtgttgaaagaacctcagtgcatactgggaaggttatccgaaaaatcctctggccagatggctcaaaaattcagcttctccaaggtcttcggacctgccaccacgcagaaagagttctttcaaggctgtatcatgcagcctgtcaaagatctgctgaaagggcagagccgcctgattttcacatatggcctcactaactcaggcaagacttatacgttccagggaaccgaggagaacatcggtatactccctagaaccctaaatgtgctattcgacagcctgcaagagcggctgtacacaaaaatgaacttgaagccgcatcgatcaagagagtatctgaggctgtccagtgagcaggaaaaagaggaaattgcttccaaaagcgcgctgcttcgccaaatcaaggaagtaacagtccacaatgactccgatgacacgctttacggatctctgaccaacagtctcaacatcagcgagtttgaggagtccatcaaggattatgaacaggccaaccttaatatggccaattcgatcaagttctccgtttgggtatccttcttcgaaatatacaacgaatatatttatgacctttttgtgcctgttagcagcaagtttcagaagagaaagatgctacgcttgagccaggacgtaaagggctactcattcatcaaggacctgcaatggatccaggtgtctgactccaaagaagcttacagactgcttaaacttggcattaagcaccagtcagtcgcttttaccaaacttaataacgcatcttcaaggagccatagcatcttcactgttaagatccttcagatcgaggactcggaaatgagccgcgtgatcagagtctccgagctgtctctctgtgatctcgccggcagcgagcgcacaatgaagacccagaacgagggcgaaaggctgcgcgagaccggaaacatcaacacttctttgttgactctagggaagtgcatcaacgtcctgaaaaattctgagaaatccaagttccagcagcacgtccccttcagggaatctaagctgacacactattttcagtccttcttcaatggcaagggcaaaatatgcatgatagtcaacatttcacaatgctacttagcatatgatgagaccctgaacgtgctcaaattcagcgcaatcgcacagaaagtgtgcgtccctgacacactgaactcgtcacaagaaaaactgtttggccccgtgaaaagtagtcaggacgtgtccttagactccaactctaacagtaagattctgaatgtgaaaagggctaccattagctgggaaaactcgctcgaggaccttatggaagacgaggatttggttgaagaactggagaacgccgaagagacacagaatgtggagacaaagctgctggatgaagatctggacaagaccctggaagagaataaggccttcatcagccatgaggaaaaacgaaagctgttagatctgatagaggacctgaaaaagaaactcattaacgagaagaaggaaaagcttacgctcgagtttaagattcgcgaagaggtcacgcaggagtttacacaatattgggcccagcgagaagctgatttcaaagagaccctgctgcaagagagggagatcctcgaggagaacgcagagaggagactggccatcttcaaagacctggttgggaagtgcgataccagggaggaagctgcgaaggatatttgtgctactaaggttgaaaccgaggaggcgacggcatgcctggaactgaagtttaaccagatcaaagctgagcttgccaagactaaaggcgaactgatcaagaccaaagaggaactcaaaaagagggaaaacgaaagcgactccctgattcaggaacttgaaacttctaataaaaagatcataacacagaaccaacgtatcaaagaactgataaatatcatcgatcagaaggaggatacaattaacgaatttcagaatcttaaatcccacatggagaacaccttcaagtgcaacgacaaggccgatacatcaagcctgatcatcaacaacaagctcatctgcaatgagaccgtggaagtgcctaaggactctaagtccaaaatctgttccgagcgtaaaagggtcaatgaaaatgagctccagcaggacgagcctcccgctaagaagggatctatacacgtgtcgtctgccataactgaagaccagaagaagtccgaggaagtgagaccaaatatcgctgagatagaagatattagggttttgcaggagaacaacgagggacttagagccttcctgcttacgatcgagaatgaactcaaaaacgagaaagaagaaaaagccgaacttaataagcaaatcgtgcatttccagcaggagctctcgctctctgagaaaaagaacctgacattgagcaaagaggttcaacagatccaatctaactatgatattgcaatcgcagagctccacgtgcagaaatccaaaaaccaggaacaagaggagaaaatcatgaaattgagtaacgaaatcgaaaccgccactagatccattactaacaacgtttcccaaataaagcttatgcacaccaagatcgacgagctaagaactctggatagcgtgagtcagatctcaaatatcgacctcctaaatttaagagatctgagcaacggctccgaggaagataaccttccaaacacacagctcgatctactgggtaacgactacctggtatctaaacaggtgaaggagtacaggatccaggagccaaatagggaaaatagtttccactcctccattgaagccatatgggaggagtgcaaagaaatagtcaaagcctcctctaagaagagccatcaaatagaggagctggagcagcagattgaaaagctacaggccgaagtcaagggttataaggatgagaataatcggctgaaggaaaaagaacacaagaaccaggatgacctgctaaaggagaaggagaccctgatccagcagttgaaagaagaactgcaggagaaaaatgtgacactggatgtccaaattcagcatgtggtggaaggcaaacgcgccctttccgaactcacccagggtgtgacttgctataaggcgaaaatcaaggagctcgaaactattctcgagacccagaaggttgaatgttcacactctgcaaaactggagcaagacatcctggagaaggagtcaattatcttgaaactggagcgtaacctgaaagagtttcaggaacacttgcaggactctgtcaagaacaccaaggatctgaacgtcaaagagctgaagttgaaagaagagattacccagttgacgaacaacttgcaggacatgaagcatttgttgcaattgaaggaggaggaggaggagactaacagacaagaaacagagaagctgaaggaggaactgtcagcgtccagcgccagaacacagaatctgaaagccgacctgcaacgcaaggaggaggactacgctgaccttaaagagaagctgaccgatgctaagaaacagatcaaacaggtgcaaaaagaggtctctgtaatgcgtgatgaagacaagctacttcgtattaagatcaatgaactggagaaaaagaagaatcaatgctctcaggagctcgatatgaagcagcgaacaatccagcaactcaaagaacaactgaacaaccaaaaagtggaagaagcaatacaacagtatgagcgggcatgcaaagacctcaacgtgaaagaaaagataattgaagacatgcggatgacccttgaagaacaggagcagactcaggtcgaacaggaccaggttctcgaggcgaagttagaagaggtggagcggctggctacggaactcgaaaagtggaaggaaaagtgcaatgacctggaaacaaaaaacaaccagaggtccaacaaggaacatgagaacaatacagacgtgttgggcaagttaacaaatctccaggatgaactgcaggagtctgagcaaaagtacaatgctgatagaaaaaagtggctggaggaaaaaatgatgctgatcacacaggccaaggaagctgagaacatacgaaacaaggagatgaaaaaatacgctgaagaccgcgagcggttttttaagcaacagaacgaaatggagatccttacagcccagctgacggagaaagattcggatctgcagaagtggcgggaggaacgcgatcagctggtcgctgctctggaaattcagctcaaagcactcatatcttcaaatgttcaaaaagacaacgagatcgagcagctgaaacgcataatcagcgaaacctcaaaaattgaaacccagataatggacatcaaaccaaagagaataagcagtgcggaccctgataaactgcagactgaaccattgtccacgtcgtttgagattagtcgaaacaagatagaggatggatcggttgtgttggattcttgtgaagtcagcaccgagaatgatcagagcaccaggtttccaaaacctgaactggagattcagttcaccccactgcagccaaataaaatggccgttaaacaccctggctgtacgacccctgttactgtgaagatacccaaagctaggaaaaggaagagtaacgagatggaggaggacctcgtcaagtgtgagaacaagaaaaacgcaacaccaaggacgaatcttaagttccccatcagtgatgataggaatagctcggtgaaaaaagagcagaaagtagccattcgcccttcttctaaaaagacctacagtctgaggtcccaagcctctatcataggcgtgaacctcgcaaccaagaagaaggagggcacactgcaaaaatttggggatttcctgcagcactccccgtcaattttgcaatccaaggccaagaagataatcgagaccatgtcatcttctaagctgtccaatgtggaggcctctaaggagaacgtttcccagccaaagcgagccaagcgaaaactgtatacatctgagatctcatctcctatagacatctcaggccaggtgattttaatggaccagaaaatgaaagaatctgaccatcagatcattaagcgaagactgcggacgaagaccgccaaatag

SEQ ID NO: 22950 - DNA, 1371 bp, synthetic construct
  source 1..1371: mol_type = other DNA; note = Synthetic coding sequence
atgaacagcagcgacgaggagaagcagctgcagctgatcaccagcctgaaggagcaggccatcggggagtacgaggatctgcgagcagaaaatcaaaagaccaaggagaagtgcgataaaatccggcaggagagagacgaggcagtgaagaagctagaagagttccagaagataagccatatggtcattgaagaggtcaatttcatgcagaaccacctggaaatagagaagacctgcagggagtcagccgaggcccttgccactaaattaaacaaggaaaataagaccctgaaaagaatttcaatgctttatatggccaaactagggccggatgtgatcacagaggagatcaacattgacgacgaggattcaacgaccgacacagatggcgccgctgagacttgcgtctcagtccagtgccaaaaacagatcaaagaactcagggaccaaattgtgtctgtgcaggaagaaaaaaagatattggccatcgagctggagaatcttaaatctaagctggtagaggtgatagaagaggtcaataaagtgaagcaggagaaaacagtcctgaattcagaggtattggagcaacgcaaagtgctggagaaatgcaaccgcgtttccatgcttgctgtcgaagagtacgaggagatgcaggtgaatctggagctggagaaagacctcaggaagaaggccgaatctttcgctcaggaaatgttcatagagcagaacaagcttaaaagacagtcacacctgcttctgcagagcagcatccctgatcaacagctgctgaaggcgctggatgagaacgctaaactgacacagcagctagaggaagaacggatccaacaccagcagaaggtcaaggagttagaagagcagctggaaaacgagactctgcataaggaaatccacaatctgaagcaacagctggagcttttggaggaagacaaaaaggagctggagctgaagtaccagaactcagaggaaaaagctcgaaatctgaaacactcagtggatgaactgcaaaagagagtaaaccagtcagaaaactctgtcccccctcctccgccccctcctccccccttgccgccacctccccctaatcccataaggagcctgatgtccatgatccggaagaggtcacatccgagtgggtcaggtgccaagaaagagaaggcaacccagccagagaccaccgaagaggttacagatttgaagagacaagctgtggaagagatgatggaccgcatcaaaaagggggttcacctccgccccgtcaaccagactgctcggccgaagacaaaaccagagagctctaagggctgcgagagcgctgtggatgaacttaaggggatccttgcctctcagtag

SEQ ID NO: 22951 - DNA, 630 bp, synthetic construct
  source 1..630: mol_type = other DNA; note = Synthetic coding sequence
atgaagaaggtgcggctgaaggagctggagagccggctgcagcaggtcgacgggttcgaaaaacccaagctgctcctggagcaataccccaccaggccacacattgccgcgtgcatgctgtataccatccacaacacttacgatgatatcgagaacaaggttgtcgctgacctgggctgcgggtgtggcgtgttgtccatcggcacagccatgctgggcgctggtctgtgtgtgggtttcgatatcgatgaggatgccctggagatctttaacagaaatgccgaagagttcgaacttacaaacatagatatggtgcaatgtgatgtctgtctcctgtcaaatagaatgagcaagtcctttgacaccgttattatgaatcctcccttcggcaccaaaaacaacaagggaaccgacatggcttttctgaagacagccctggagatggcccgtaccgccgtgtacagcctacacaagagcagcaccagggaacatgtgcagaagaaggccgccgagtggaaaataaagatagacatcatagcggagcttcggtatgatctccccgcctcttataagtttcacaagaagaaaagtgtagacatcgaggtggatctgatacgattttcattttag

SEQ ID NO: 22952 - DNA, 4719 bp, synthetic construct
  source 1..4719: mol_type = other DNA; note = Synthetic coding sequence
atggccagcagcgcccgggagcacctgctgttcgtgcggcggcggaaccctcaaatgcgctatacactttccccggaaaatctacagtcacttgcagcccaaagctcgatgccagaaaatatgactctgcagcgcgcgaattccgatacagacctggtgaccagcgagagccgaagcagcttaactgcttccatgtacgagtatacccttggccaggcacagaacctgattatattttgggacatcaaagaagaggtcgaccccagcgattggatcgggctttaccatattgacgaaaattcgccagccaacttctgggactctaaaaacagaggagtcaccggaacacagaagggacaaatagtgtggcggatcgaaccagggccatattttatggagcccgaaataaagatctgcttcaaatactatcatggtatatccggggccctccgagctacaactccatgcattaccgtaaagaaccctgctgtcatgatgggcgcagagggcatggagggaggagcctccggcaatctgcacagccgcaagctggtgtcattcactcttagtgatctgcgggccgtgggcctgaagaaaggcatgttttttaaccctgatccttatctaaaaatgagcattcagcccggtaaaaaatccagcttccccacgtgtgcgcaccacggccaagagcgacggtcaaccataatatccaatacaaccaaccccatatggcaccgagagaaatactccttcttcgcgctgcttactgatgtcttagagatagagattaaggacaagttcgcgaaatccaggcctatcatcaagcgcttcttgggtaagctcactatacccgtccagaggctactggaacgacaggcgatcggtgaccagatgctgtcctacaacctgggccggaggctgccggcggatcacgtgagtggctacctgcagttcaaagtcgaagtaaccagctctgttcatgaggacgcgtccccagaggctgtaggcacaatcctgggtgtgaacagcgtgaacggagacctcggctctccttctgatgatgaggacatgcctggatcccaccacgatagtcaggtttgcagcaacgggcccgtcagcgaggactccgctgccgatgggacaccaaaacattcctttcggacgtcgtccacactggaaatcgatacagaggaactgaccagtacctcttctcgcacctccccacctcggggcagacaggattccctcaacgactatttagatgctattgaacacaatggacactcccggcccggaactgctacctgctcagagcgttcaatgggggcctctccaaagcttaggagcagtttccccacagacaccaggctcaatgcaatgctccacatcgactctgacgaggaggatcacgaatttcagcaggatctcggatacccatcctccctggaagaggaaggtgggctcattatgttctctagagcatcacgcgcagatgacggctctcttacatctcagaccaaactcgaggataaccctgttgaaaacgaagaagcatctacccacgaggcagcgtctttcgaggacaaacccgagaacttaccagagttggccgaatcaagcctccctgccggacctgcacctgaagagggagagggcgggccagagcctcagccgtctgccgatcagggaagtgcagaactctgcggtagtcaggaagtggaccaaccaacaagcggcgcggacaccgggactagcgatgcctccggagggtctcggcgagcggtatctgagacagagtcccttgaccagggctccgagccctcccaggtgagctctgagactgagccatccgacccagcgagaaccgagagtgtcagcgaggcctctacccgccctgagggggagagcgatctggaatgcgccgactccagttgcaacgaatccgtaacaactcagctgagctctgttgatacaaggtgtagctcactcgagagtgctcggtttccagaaacgccggccttctcatcccaagaggaggaggatggcgcttgcgccgccgaaccaactagctccggacctgcagaggggtcccaggaaagcgtgtgtacagccggaagtcttcctgtcgtgcaagttccatccggagaggatgaaggacccggagccgagagtgctactgttcctgatcaggaggaactgggggaggtgtggcaacgacgaggaagcctcgaaggagccgctgcagccgccgaatcccccccacaggaggaaggttctgcaggagaggcacagggcacctgcgagggcgccacggcccaggaggagggtgcgacaggcggatcccaggccaacggacaccagccccttcggtctttgccttctgtcagacaagacgtgagccgctatcagagggtggatgaggctctgccacctaactgggaggcacgaatagactcccacggcagaatcttctacgtggaccatgtaaacaggacaacaacttggcagaggccaactgctccgccagctcctcaggtcctgcagcgctccaactccatacaacagatggagcagctgaacaggcggtatcagtccattcgccgtacaatgacaaatgaacgccctgaggaaaatacaaatgctatagatggggccggcgaggaggccgatttccatcaggcgagtgcagatttcaggagggaaaatattctgccgcacagtacttcacgcagcagaatcacactgcttttgcagagcccccccgtgaaatttctgatatcccctgagttctttaccgttttacatagcaatccatcagcttataggatgtttacgaacaatacctgtctcaagcacatgattacgaaagttcggcgggatacccaccacttcgagaggtaccaacataaccgggacctcgtaggattcctgaacatgtttgctaacaagcagctggaattaccccgcggatgggagatgaaacatgaccaccaggggaaagcctttttcgttgaccataatagccgcaccaccacattcatcgatccacgcctcccgcttcagagcagccgccccacctcagcacttgttcaccgacaacaccttactagacagagatcgcacagtgcaggggaggtcggagaagatagtagacacgccggcccaccagtgctccccaggccttctagtaccttcaatacggtgtctaggcctcagtaccaggacatggtccctgtggcatataacgacaaaatagtggccttcttgaggcagccaaacattttcgagatacttcaggagaggcagccagacctaaccaggaatcactcgctccgggagaaaatacagtttattagaactgagggtacccccgggctggttaggttgagctcagatgccgatctggtgatgttgctttcactttttgaggaagagatcatgtcctacgtcccaccacacgccttgttgcacccctcctattgccaaagcccaaggggctctccggtatcttccccccaaaactcacctggaacccagagggctaacgctagggcacctgctccatacaagcgtgattttgaggcaaagctcagaaacttttacaggaaactggaaaccaaaggctacggccagggccccggcaagctgaaactgattatacgacgcgaccatttgctcgaggacgcttttaatcagatcatgggatactctaggaaagatttgcagagaaataagttatatgtgaccttcgttggtgaagagggactggattacagcggccctagtcgagaatttttctttcttgtgagtagagaattgttcaacccatattacggcctatttgaatattcagcgaatgacacctataccgtgcaaattagtccgatgtctgcatttgtggataatcaccacgagtggttcaggttctcaggccgaattctcggactggctttaatccatcaatatctgctggacgcattctttactcgccctttctataaagctctgctccgcatcctctgcgacttgtcagatctcgaataccttgatgaggagtttcaccaaagcctgcagtggatgaaagacaacgatatacacgacattttggatttaacatttactgttaatgaagaagttttcggtcagataactgaacgggaattaaagccggggggcgccaatataccggtaaccgagaaaaacaagaaggagtatatcgagcggatggtgaagtggcgtattgaacggggcgttgtacaacagacagagtcgctggtaaggggcttttacgaggtggttgacgccagactggtgtcggtcttcgacgcccgagaactggagctggtgatcgctggcactgctgaaattgacctgagcgactggcgcaataatacagaatatcgcggcggttaccacgataaccatatcgtgatccgctggttctgggccgccgtggaaagattcaataatgagcagcggctgaggctgcttcagttcgtgaccgggacaagctctattccctatgagggctttgccagcctcaggggctctaacggaccaaggagattctgtgtggagaaatgggggaagatcacggctcttccaagggctcacacctgctttaataggctcgacctccctccctacccctctttctcaatgttgtatgagaaactgctaaccgctgtggaggagacctccaccttcggactggaatag

SEQ ID NO: 22953 - DNA, 1206 bp, synthetic construct
  source 1..1206: mol_type = other DNA; note = Synthetic coding sequence
atgagctgccggtgctggatcagccggcaccccagctacgagggctggaatctgcagtcaattatctttcataaacaaatcaggggcgtggacctggagtccacctttgtcacaaaattcgggaataactgcagtctccgcctgaatgaaacagtggatatccataaggagaaggttgcaagacgcgagatcggcattctgaccacgaataaaaacacctctagaacacacaaaatcatcgccccagctaacttagagcgccctgtccgctatatccggaagcccattgattacacaatcttggacgatatcggtcacggcgttaaggtgagcactcagaacatgaaaatgggcggattaccaagaactactccccccacgcagaagcccccttcgccaccgatgtctggtaaagggactctcggccgacactcgccctatcggacactcgaacctgttcggcctcctgtggtacctaatgactacgtcccaagtcccacccgcaacatggcacccagccagcagtctccggtgcgcacagcatcagtgaatcagcgaaacagaacgtactcttcttctggctcctctggtggttcacatcccagtagccgctccagctctagggaaaatagtgggagtggttccgtgggcgtgcccatcgcggtcccaacacccagcccacctagtgttttccctgggcaccccgtgcaattctactcaatgaacaggcccgccagccgccacaccccccctacaatcggcggtagcctcccttataggagacccccctcaatcacatcccagacgtcgcttcaaaatcagatgaatggaggtccattctactcccaaaacccggtgtctgacacaccccctcctccacccccggtggaagaacctgtctttgacgagagcccaccacctcccccccctcctgaggattatgaagaggaagaagccgctgtggtcgaatatagtgacccttacgcggaggaggatccgccctgggcgcctcgcagttatcttgagaaggtggtcgctatttatgactataccaaggataaagaagacgagttaagcttccaggaaggcgcgatcatttacgtgatcaagaagaacgatgacgggtggtacgaaggagtcatgaatggcgttacgggactgttccccgggaactacgtcgagagtatcatgcattatagcgagtag

SEQ ID NO: 22954 - DNA, 1428 bp, synthetic construct
  source 1..1428: mol_type = other DNA; note = Synthetic coding sequence
atggccgagctgcagatgctgctggaggaggagatccccggcggccggcgcgctctgtttgatagctatacgaatctggagagggtggcagattactgtgagaataactacattcagagcgcagataagcaacgtgccctggaggagaccaaggcctacactacacagtcacttgccagtgtggcatatctcattaatactctagccaataacgttctccagatgctggatattcaggcatctcaactccggcggatggagtcatcaataaatcatatttcccaaaccgtggatatccacaaagaaaaagtggcaagaagggagattggcatcttgacaacgaacaaaaacaccagcaggacacacaagataattgccccagcaaatctggaacgccccgtgagatacatccgcaagccaatagattataccatcttggacgatataggacacggagtcaaggtatcaacacaaaatatgaagatgggaggactgccccgaactacgccccctactcagaaacccccgtcaccgccaatgtccggaaagggcactctgggacggcacagtccctatcggacactggagcccgtcaggccccccgtggtcccgaatgactacgtccccagccctaccaggaacatggccccgtctcaacagtctcccgtccggaccgcctcagtcaaccagagaaacaggacgtacagttctagcggttcttccggaggcagccacccctcctcccgaagttctagcagagaaaacagcgggtccggctctgtaggggttcccattgctgtgccaacaccaagccccccaagcgtatttccgggtcatcccgtccagttctactctatgaatagaccggctagtaggcatacaccccctactatcggtggtagtctgccttaccggcggcctccatcgatcaccagtcaaacatcattgcagaatcagatgaatggaggccctttctactcacaaaatcccgtctccctggctccaccacccccgagcatccttcaggtgacaccccagctcccactgatgggattcgtcgctagagtacaggagaacatttctgacacgccgcccccaccacctccggtcgaggaacccgtttttgatgaatcaccccctcctccaccgccccctgaggattacgaggaagaggaagcagcagtggttgaatattctgacccatatgctgaagaagaccctccctgggctcccagaagctacctggagaaagttgtggcgatctatgactacaccaaggacaaggaggacgagctgagcttccaggaaggagccattatttacgtgatcaaaaagaacgatgacggatggtacgaaggagtgatgaatggtgttaccggcttatttccagggaactatgtcgaaagcattatgcactacagtgagtag

SEQ ID NO: 22955 - DNA, 900 bp, synthetic construct
  source 1..900: mol_type = other DNA; note = Synthetic coding sequence
atgaagatgggcggcctgccccggaccaccccccccacccagaagccccccagtccacccatgagtggcaaaggtacactaggcagcagcggaagctcaggcggatcgcatccctcctcaaggagctcatctagggaaaattctggctctggatccgtgggcgtgcccatcgcagttccaaccccatcacctccctcggttttccccgcacccgcaggatccgccggtacgccaccactgccagcaaccagtgcgtcggctcctgccccgctcgtgccagccacggttccttcctccacagcacctgacgcggctgctggcggagcccaaacgctggccgatggcttcactagccccacacccccggtagtgagctcaaccccccctaccggccaccctgtgcagttctactctatgaaccgcccagcctccaggcatacacctcccactattggcgggtcccttccctacagaagaccaccctcgataacgtcccagacatcgcttcaaaatcagatgaatggcggccccttctacagccaaaatcccgtttcagacactccaccccctccaccacccgttgaagaacctgtctttgatgaatctccgccccctccccctccccccgaggattacgaagaagaagaagccgctgtggtggagtactcagatccctacgctgaggaggatcctccttgggccccccgatcatacctggagaaagttgtggccatctatgactatactaaggacaaggaagacgagctctccttccaggaaggggccattatctacgtcataaagaagaacgatgatggatggtacgagggagtgatgaacggtgttactggactctttccagggaactatgttgaatctatcatgcattatagtgaatag

SEQ ID NO: 22956 - DNA, 1926 bp, synthetic construct
  source 1..1926: mol_type = other DNA; note = Synthetic coding sequence
atgggccggcggagcaccagcagcaccaagagcggcaagttcatgaacccaactgaccaggctcgtaaggaagccagaaagagagaattaaaaaaaaacaagaaacagcggatgatggtgcgggcggctgttctgaagatgaaggaccccaagcagatcatacgagatatggagaaattggacgaaatggagttcaatcctgtgcagcagcctcagttaaacgagaaagttctgaaggacaaacggaaaaagcttcgagagactttcgaaagaatccttcgcctgtatgagaaggaaaatcccgatatttataaagagcttcggaagcttgaagttgagtatgagcagaaaagagcccagctttcccagtattttgacgccgtgaaaaatgcacaacacgtggaggtagaaagcatcccactgcctgatatgccacatgctcccagtaacatcctgatccaggatattcccttgcccggtgcccaaccgccgtctatactgaaaaaaacctctgcttacgggcctcccactagggcagttagtatcctgccactcctgggccacggtgtgcctcggctgcctcctggcagaaagcccccagggccgcctccagggccccctcctccacaggtcgttcagatgtatggccgcaaagtaggattcgcactggatctcccgccccgaagacgggatgaggatatgctctatagccctgaactcgctcagaggggtcacgatgacgatgtgtcatctaccagtgaagatgacggctatcctgaggatatggaccaggacaagcatgatgactcaactgatgattccgacaccgacaaatcagatggtgaaagtgatggagatgaattcgtccatcgggacaatggcgagagggacaataacgaggagaaaaaaagtgggctgtcagtgagatttgcagacatgccgggaaagtccaggaaaaaaaagaagaacatgaaagagctcaccccattgcaggcaatgatgttgcgcatggctggccaggagatccctgaggaaggccgcgaggtggaggaattttctgaagatgatgatgaagacgatagtgatgacagtgaagccgagaagcagagccagaagcagcacaaggaagagtcgcatagcgacggcacctcaaccgcatcatcgcagcagcaggcaccaccacaatccgtgccaccatcgcagattcaggctccccctatgccaggtccgcctcccctgggtcccccccctgcaccccccctgcggccccctgggcctcccactgggctccccccagggcccccccctggtgctccgccctttctccgccctcctggtatgcctgggctcaggggaccacttcctaggctgttacctccaggcccaccccccggtagacccccagggccgccccccggcccccctcccgggctgcctcctggaccaccaccccgcgggcctcctcctaggctgccaccaccagcgcccccaggaatcccgccacccagaccgggaatgatgcggccccctttagtgccccctttgggccctgcccctccgggcttgttccctccagctcccttgcccaatcccggggtgctcagtgccccccccaaccttatccagcggccaaaagcagatgacaccagtgccgctaccatcgagaagaaggccacggcgactatctccgcgaaacctcagattaccaaccctaaagctgaaatcacaaggttcgtacccactgccctgcgagtccggagggagaataagggggcaacagctgccccccagaggaagtctgaggatgattctgccgtgcccttggccaaagccgctcccaaaagcggcccaagtgtgcccgtctccgttcagaccaaagatgatgtatatgaggctttcatgaaagaaatggagggattgctctag

SEQ ID NO: 22957 - DNA, 4419 bp, synthetic construct
  source 1..4419: mol_type = other DNA; note = Synthetic coding sequence
atgaagggcagcgaggtgagcctggagaagaagaagaagatcaagatgcccgtgaagcgccttcgggaggttgtctcccagaatcatggagaccatcttgttctcctgaaagacgagctcccttgcgtgccccccgccttgtctgctaacaaacgtttgcctgttggcacaggtaccagtctcaatggtacttcccggggctccagcgacctcacaagcgcgagaaactgctaccagccccttctagagaaccccatggtgtccgagagcgacttttccaaggatgtcgctgttcaggttctccctctggacaagatcgaggaaaacaacaagcaaaaggctaatgacatatttatttcccagtataccatggggcagaaggatgcactgcgcactgtcttgaagcaaaaagctcagagcatgcctgtctttaaggaagtgaaagtacacttattggaagacgctgggatcgaaaaagacgctgtcacacaggaaacgaggatatcaccctccggcatcgactccgctacgactgtggccgcagcaacagcagccgctatcgccaccgctgcccccttgatcaaagtacagagcgacttggaggcgaaggtgaatagtgtcaccgagctgttgagtaagcttcaggagactgacaagcatctgcagagagtgactgagcagcagacatccatacagagaaaacaggaaaagctccactgccacgaccacgaaaagcagatgaatgtgttcatggagcaacacattagacatttagaaaaactccaacaacagcagattgatatccagactcactttattagtgcggccttaaagacttctagtttccagcctgtgtcaatgccgtctagccgtgccgttgaaaagtacagcgtgaagcccgagcatcctaatctcggttcttgcaaccccagcctgtacaacacatttgcatccaaacaggccccattgaaggaggttgaggatacatccttcgacaagcaaaaaagcccgcttgaaacaccggcacctcgtcggtttgccccggtacctgtatcccgtgacgacgagttgtctaagcgcgagaatcttctcgaagagaaagagaacatggaagtgagctgtcaccggggcaacgtgcgccttcttgaacaaattttaaacaataacgactctctgaccagaaaaagcgagagtagtaataccacatccctgacacggagtaaaataggctggacccccgagaaaacgaatagatttccttcctgtgaggaactcgagactacgaaagtcactatgcaaaagtcggacgacgttttacatgatctcggacagaaggaaaaagaaaccaattccatggtgcagcctaaagaatccttgtccatgttgaaactgccagatttgcctcagaactcagttaagctgcagaccacaaataccacaaggagcgtgctaaaagatgcagaaaaaattttgaggggggtgcagaataacaaaaaggtgctagaggagaacctggaggctatcataagagccaaggacggtgccgccatgtattccctcataaacgccctttccaccaatcgcgagatgtccgagaagattcgaatccgcaaaacggtagacgagtggatcaagacgatctccgccgaaattcaaggtttgctgaaagcaaccacagtgatacaggacgaggactacatgctgcaagtgtatggcaagcccgtgtatcagggccatagatctacgttaaagaaaggcccctatttacgctttaacagtccctctcccaaatcccgacctcagaggcctaaggtaattgaacgcgtcaagggcaccaaggtgaagtctatcagaacccagaccgatttctacgctaccaaaccaaagaagatggatagtaaaatgaaacatagtgtgcccgtgctgccacacggggatcagcaatacctcttcagcccatccagggagatgccaaccttctccggaactctagaaggacatctgatcccaatggccattctgctgggtcaaacacaaagtaactctgataccatgccaccagcaggggtcattgtgagtaagcctcaccctgtgacagtaacaaccagcattcctcccagcagtaggaaagttgaaactggggtgaagaagccgaatatagctatcgtggagatgaagtccgaaaaaaaggatcccccacagctgactgtgcaggtgctcccctctgtcgatatcgactctatctccaattcttcagcagacgtgctgagccctttgtccagtcctaaggaagcctctttgccccctgtccaaacctggattaagacccctgagattatgaaggtggacgaagaggaagtgaagttccccggtacaaattttgatgagattatcgatgtaattcaggaggaggaaaagtgtgacgaaatacctgacagcgaaccaatcctggagttcaacagaagtgtgaaggcagacagtaccaaatataacggccccccctttccacctgtggccagcacttttcagccaactgccgatattctggacaaagttatcgagaggaaagagaccctcgagaatagtctcatacagtgggtagagcaggaaattatgtccaggattataagcgggttgtttcccgtgcagcaacagattgctccgagcatttcagttagtgtctcagaaactagcgaacccctcaccagcgatatagtggaagggacctcatcaggcgctctacagctgtttgttgatgcaggtgtgcccgtcaacagtaatgttatcaagcactttgtgaacgaagccctcgccgagacaatagcagttatgctcggtgatagagaagcaaagaagcaggggccggtcgccaccggcgtcagtggcgacgcctctactaacgaaacctacctgcctgctcgagtttgtacccccttacccacaccccagcccactccgccgtgctcaccaagcagtcctgcaaaggagtgcgtgcttgtgaagacacctgacagcagtccatgcgacagcgaccacgacatggcttttccggtgaaggaaatctgcgccgagaaaggcgatgatatgccagccatcatgctggtgaacactcccacggtgaccccgactaccacccccccgccggcggctgcagtgttcactcctaccctcagtgatattagcatcgacaagctcaaggtgtccagccctgagctgcctaagccctggggagatggagaccttccgctcgaagaggaaaatccaaattcgccacaggaggaactgcacccacgggccattgtcatgagtgtggccaaggacgaggaacctgaatcgatggattttcctgctcagccacctcctcctgagcctgtcccttttatgcctttccccgccgggaccaaggccccttctccgtctcagatgccagggtctgattccagtaccttggaatcaacactgtccgtgacggtgaccgagaccgagacccttgataagccaatttcagagggcgagatactgttcagttgtggacagaagttggcacccaaaatccttgaggatattgggctgtatctgactaatcttaatgacagcctgtccagcacactgcacgacgcggttgagatggaggacgaccccccgagcgaaggacaagtgattcgtatgagtcacaagaaattccatgcagatgccatcttgagcttcgcaaaacagaaccaggagagcgctgtttcacagcaagccgtatatcattcagaggatctggagaactctgtcggtgaattatccgaaggccagcgccctcaactcaccgccgccgcagagaacattctcatgggtcatagtctctacatgcagcctcctgttacgaatacacagtctctggaccaacaatgcgaccccaagcccttgtcccgacaatttgacaccgtgtctggctcgatatatgaggacagttgtgcatcccacgggccaatgagcctcggggaactggaattggagcccaattccaagctagtgctcccaaccactctcctgacagctcaagagaacgatgttaatctgcccgtggcggcagaggatttttctcaataccagctgaaacagaatcaggacgtgaagcaagtcgaacataagccctcacagagctacctccgcgttaggaataaaagtgatatcgccccttcacagcaacaggtttcacctggggacatggaccgcacacaaatagaattgaacccttaccttacttgtgtgttctctggcggcaaggccgtaccactgagtgcatctcagatgccacccgcaaaaatgagcgtcatgttgccttctgtaaacctggaagactgttctcagagtctgtcgctttccaccatgcaggaggacatggagtcctcaggggcggataccttctag

SEQ ID NO: 22958 - DNA, 1986 bp, synthetic construct
  source 1..1986: mol_type = other DNA; note = Synthetic coding sequence
atggagggcgccgccgcccccgtggccggcgaccggcccgacctgggacttggggcgccaggcagcccgagagaagcggttgcaggagcaactgctgccctggagcctcgcaaaccgcatggagtcaagcgccaccatcacaaacacaacttgaaacatcgttacgaattacaggagacgctgggcaaaggcacctatggtaaggtgaaaagggcaaccgaaaggtttagtgggcgggtggtggctatcaagtccatacgcaaggataagattaaagatgagcaggatatggtacatatcagacgcgagattgagataatgagcagtctgaaccaccctcacatcatctccatttatgaggttttcgagaacaaggacaagatcgtgataatcatggaatacgccagtaagggagagctgtacgactacatcagcgagaggcgccggctaagtgaaagggagacccgccacttctttaggcaaattgttagtgccgtgcactactgtcacaagaatggtgttgtgcacagggaccttaaactggagaatatactcctggacgacaattgtaacattaagattgctgattttggccttagcaatctgtaccagaaagacaagttcttgcagaccttctgcgggagcccactctacgcctctccagagattgtgaacggaaggccatatcgaggacctgaagtggacagttgggcgctgggcgttttactttacaccctggtttacggcaccatgccgttcgacgggttcgaccacaaaaatctaattcggcagatcagctctggcgagtacagggagcctacacagccttcagatgcccggggtctgatcaggtggatgctgatggtcaatccggacaggcgcgcaactattgaagatatcgctaaccactggtgggtgaactggggatacaaaagcagcgtgtgtgactgcgacgccctacatgatagcgaatctcctctgttggcaagaatcatcgactggcatcacagatccaccgggctgcaggcagatacagaggctaagatgaagggcctagccaagccgacaacatcagaagttatgctggagagacagcgcagcctcaagaagtccaagaaagaaaacgactttgcgcagagcggccaggacgccgtgccagaaagccctagtaagctgtcttccaagaggccaaagggtattctgaagaaacggtctaactccgaacaccgaagccattcaacgggcttcattgagggcgttgtgggcccggcactgccttctacctttaagatggagcaggatctatgtcggaccggggtgttgcttcctagcagccccgaggccgaggttcccggcaaactcagcccaaagcagagtgctacgatgccaaaaaaaggtattctgaagaagactcagcagcgcgagagtggatattacagctcacccgagcggtctgaatctagcgaactgttggattccaatgatgttatgggctctagcattccctcccctagcccaccggatcccgcgcgtgtgacttcacatagcctttcttgtcggagaaaggggattctcaagcactcttccaagtacagcgcaggaaccatggacccagccttagtgtcacccgaaatgccaaccctcgaatctttgagcgagccaggagttccagccgagggacttagcaggtcctatagtagaccctccagtgtaatcagtgacgattctgtactttcaagcgatagttttgaccttctggatctccaggagaaccgccctgccagacagcggatccgatcatgcgtgtccgctgagaattttctgcagatccaggactttgagggtttacagaatagaccccgtcctcaatatctgaagcggtatcggaaccgactagcagactcttcattcagtcttctaactgacatggatgatgtcacccaggtgtacaaacaggccctggagatttgctccaaactgaattag

SEQ ID NO: 22959 - DNA, 603 bp, synthetic construct
  source 1..603: mol_type = other DNA; note = Synthetic coding sequence
atggccaacatcgccgtgcagcggatcaagcgggagttcaaggaggtgctaaaaagcgaggaaaccagcaagaatcagataaaagtggacttagttgacgaaaactttaccgagctgaggggggagattgcaggcccacccgataccccctacgagggcggccggtatcagcttgaaatcaagattcccgagacataccccttcaatccacccaaggtccgctttattacaaagatttggcacccaaacattagcagcgtcaccggtgccatttgtcttgacattctcaaggatcaatgggccgcagctatgaccctgcggactgtccttctaagcttgcaagctttgctggccgcggcggagcccgacgaccctcaggatgctgttgtcgccaatcagtataaacaaaatcctgaaatgtttaagcagacagcgcggttatgggcccatgtgtacgcgggagcacccgtttcctcccccgaatatacaaaaaaaatagagaacctgtgtgccatgggattcgaccggaacgccgtgatagtggccctgtctagtaagagttgggacgtggagacggcgactgaactgctgttaagcaactag

SEQ ID NO: 22960 - DNA, 5313 bp, synthetic construct
  source 1..5313: mol_type = other DNA; note = Synthetic coding sequence
atgccccggcggcggaagaacctgggcggcaaccccttccggaagaccgctaaccccaaagaagtggtcgtgtctagcgtggccagtagggaggaacccacaacgacactaccatccatgggagagacgaaggtcgaccaggaagagctgttcacctctatatctgaaatattctccgacctagacccggatgtcgtgtacctcatgttgagcgagtgcgatttcaaggtggaaaatgcaatggactgtctgctggagttgagcgcaactgacacaaaaatagaagaaagcagctctcagtcgttcgtcgcatccgaaaatcaagtgggcgccgccgagagcaagatcatggagaaaaggcctgaggaagaaagtgaggactcaaagatggattctttcctggatatgcagctcacagaagacctcgactctctgatacagaacgcattcgagaaattaaatagcagtccagacgaccaggtgtattccttcctcccctctcaggacgtcaattcttttaacgattcatcggaattcatcaatccagattcttccaatatgactccaatcttctccacacagaatatgaacctaaatggcgaaaaccttgagaattcaggaagcaccctttccctgaaccctctgccatcacacagcgttctcaatgaatcgaagtgcttcataaaggacaacacactcgcactcgagtccaactatcccgaggatagcttactttcttcgtcgcttaacgtggccagtgactctatcgctggttgctcgtcactaaaccagaaacagaaagaactcttggagagtgagtgcgtagaggctcagttttccgaagctccagttgatctcgacgcatccgaaccccaggcatgtcttaacttgccggggctggacctgcccgggaccgggggagatcagaagtccacccgagtctctgacgtcttcctgcctagtgagggcttcaactttaagccacacaaacacccagagctgcccacaaagggcaaggacgtgtcttactgtccagttttggccccgctcccactgctcctcccgccaccacctccgcccccgatgtggaatcctatgattcctgcttttgacctgtttcagggaaaccatggtttcgtggcacctgtggtgactacagcggctcattggcggtccgtcaattatacattccctcccagtgtgatctcacacacatctccgacaaaggtgtggcgtaataaggatggaacctcagcatatcaggtccaagagacccccgttagtcaggtcgtgaggaaaaagacaagctacgttgggctggtgttggtgctgctcaggggtctcccgggttccggaaagtcgtttctggccaggacactccaggaggataaccccagcggggtgattctgagcactgatgactacttctacatcaatgggcagtatcagttcgacgtgaaatatcttggcgaggcacatgaatggaatcagaatcgggcaaaagaggcctttgaaaaaaaaatcagtccgattatcatcgataataccaatctacaagcttgggagatgaaaccttacgtcgccctctcccaaaaacacaaatacaaggtactgttccgggagcccgacacatggtggaaatttaagcccaaggagctggctaggcgaaatattcacggcgtgtccaaggagaaaattacgcggatgctcgaacactatcaacggtttgtttccgtacccatcatcatgagcagctccgtgcccgaaaagatcgagcgtattgagctgtgcgcttactcatgtgaggacaggtccacctctccccgcgatgacgaagatatcatctctgagaaggaggagaatatactcagtctgagcctaaaacacttagaattcactgaagagaaaaatctggatgtgacaaaagagaccatgctgccagaaaatgttgcgtatttgtctaacgccgacctgaataagaggcgtaaggaaatcagtgacatgaatccttctattcagtcagctttaattctggaaacccctcacatgtacttcagcgattcagaatctaagctgcaagctacggacaaaagtgaaaatgagcaaattgaaatggttgcagtgaagggctattccaaaacggatacagactcctctatggaacgagtgtcaccttctacgtgctgctccgaaaacaaccaagaggattgcgacttggccaattcgggacctcttcagaacgagaaatcctcaccgggcgagatcgtggaggagcgggccacggtcaccaaaaaggcgtttggaaagcagaaaagtaagagcaccctggaaaagttccctagacacgaattatccaacttcgtgggggactggcctgttgataaaaccattggccagagaacgaagagaaatcgaaagaccgaaaagacctcctccgtccaatccgataagaaatacaattacccccagtcccataagctggtgaacagcgtttccgtcaacacagactgcgttcagcagagaggtagccctcacgagagtgtggaagacggccggaagtctcagtgcgacgacgcctccgagcccctgaactcttacaagtatgatgcatacaaaaatatcgacaagaatagcttcaatatcatgggcgattggcccagtagcgactctctagctcaaagggagcatcgaagccggatgcccaagacgggcttgagtgagcccaatctcgaaattgggaccaatgataaaatgaacgaaataagcttgagtactgcacatgaagcttgttggggcaccagctcacaaaaattgaagacacttggctcctccaacttaggtagctctgagatgctcttaagcgaaatgacctgcgaatcgcaaacgtgcttatccaaaaagagtcatgggcaacacacctctttgcccctgacctttacgaactctgccccgacagtatcgggagtagtggagccgcagacactggccgagtgccaagagcaaatgccaaagagggaccccgggaaagaagtgggtatgtgcacacagactgagccacaggacttcgccctgctctggaagattgagaagaacaaaatcagcatctccgatagcataaaggtgctcacagggcgcctggacggatttaaacccaaggtcttcaacattaatacaaaatccgacgttcaggaggcgatcccgtaccgggtgatgtatgacaaatcaacctttgttgaggagtctgagctgacatctgcagatgagtcagagaacctcaacatactgtgcaaattatttgggagcttctctctcgaggccttgaaggacttgtacgagagatgcaacaaggatatcatctgggctacgtctctgctgctggattccgaaacaaaactctgcgaagacactgaattcgagaactttcagaagagctgcgacgggtcccagattggccccttcagcttggggctgaatctgaaagagatcatttcacagcgaggcacccttgagaatagtaactctccagtgccagagttttctcatggaatcggaatatctaatgctgactctcagagcacgtgcgacgctgaacgggggaactccgaacaagccgaaatgcgggccgtcactcccgagaaccacgaaagcatgaccagcatttttccaagcgccgccgttggcttaaaaaataacaacgatatcctgccgaatagtcaggaagagctattgtattcatccaaacagtcattcccagggattctcaaggccactacacctaaggacatgagtgagacggagaagaatctggtggttacggagaccggggataatatccatagcccgagccacttttcagatattttcaacttcgttagctcaacatccaatctggaactaaacgaagagatttacttcacagattctcttgagattaaacgcaacgagaacttccctaaagactacgtcaagttctcagacgaagaggagttcatgaacgaggatgagaaggaaatgaaagagattctcatggctggtagttctctatcggcgggtgtctcaggggaggataaaacagaaatcctgaatccaaccccagctatggccaagtcgctgactatagactgtcttgaattagccttaccccctgagttggctttccaactgaacgagctgttcggaccagttggtatcgatagcggttcactcacagtagaggactgtgtggttcacatagatctgaacctcgctaaagttattcacgaaaaatggaaggagagcgtgatggagcggcaaaggcaggaagaagtgtcttgcggaaagtttatgcaagatccctccttagttgggcacaccgggctggacaaccccgagcagaagagcagtcaacggacagggaagaagctgctcaagacccttacggccagcgagatgctgcccctccttgaccactggaacacacaaacaaagaaagtgtctctgcgagaaatcatgtccgaagaaatcgcactccaggagaaacataacctaaagagagaaaccctgatgtttgagaaagactgcgccaccaaactcaaagagaaacagctgttcaagattttccctgctataaaccaaaattttctagtggacatcttcaaagaccataactattctctggagcatacagtccagttccttaattgcgtacttgaaggcgatcccgtgaagactgttgttgcgcaggagttcgttcaccagaatgagaacgtgaccagtcacacagggcaaaaatcaaaagaaaaaaaaccaaaaaaactgaaagaaacagaggaaactccatccgaactaagcttccaggacttcgaataccccgactacgatgactatagagccgaggctttcctgcatcaacagaagaggatggaatgctacagcaaagcaaaggaggcataccggataggcaagaagaacgtagccactttctatgcacagcagggcaccttgcacgaacagaagatgaaagaagctaaccatctggcagccattgaaattttcgagaaggtcaacgcaagtttgctccctcagaacgtgctcgaccttcacggcctccacgtagatgaagcactggagcatctgatgcgcgtcctagagaaaaagaccgaagaattcaagcagaatggggggaagccttacttgagtgtgataacaggcagaggtaaccactcacagggtggtgtagctcggattaaacctgccgttattaagtacttgatttctcactccttccgtttctccgaaatcaagcccggctgcctcaaggtaatgctcaaatag

SEQ ID NO: 22961 - DNA, 1362 bp, synthetic construct
  source 1..1362: mol_type = other DNA; note = Synthetic coding sequence
atggactggaaggaggtgctgcggcggcggctggccacccccaacacttgccctaataaaaagaagtcagaacaggagctgaaggatgaggagatggacctttttactaaatactattctgaatggaaggggggcaggaagaacaccaacgagttctataagacaatacctagattctattacagactgccagctgaggacgaagtgctacttcagaaactgcgggaggagtcaagggccgtgttcctacagcgtaagagccgggagctcctggataatgaagagttgcagaacctctggtttctgctggacaagcatcagacgccacccatgatcggagaggaggctatgatcaattacgaaaactttctgaaggtgggggagaaagctggggccaaatgtaaacaattctttactgcgaaagtgttcgccaagctgttgcatactgattcatatggcaggatcagcataatgcagtttttcaattacgtgatgcggaaggtgtggctccaccagaccaggattggattaagcctttacgacgtggccgggcagggatatctgagagagagtgatctagagaactatatcctcgaactgatccccactcttcctcagctggacggactagagaaatctttctactcattttacgtgtgcacagctgtcaggaagttcttcttcttcttggaccctctccggactggcaagatcaagatccaggatattctcgcctgtagctttctggacgatcttctggaacttagggatgaagaactgtcaaaggagtcacaggagactaattggttctccgctccaagtgcactgagagtctatgggcagtatcttaacctggataaggatcataacggcatgctgtccaaggaggaactgagccgttacggaacggcaacaatgacgaatgtgttcctcgaccgcgtgtttcaggagtgcctgacctatgacggcgaaatggactataagacctacctggatttcgtgctggcactcgagaaccgaaaggagccagcggcactgcagtacattttcaagcttttggatatagagaataagggttatctgaatgtgttctcgctgaactattttttccgggccatacaggaactgatgaagatccatgggcaggacccggttagctttcaggacgtgaaggatgaaatcttcgacatggtcaagcccaaagacccattgaaaatctcactgcaagacctgattaactccaaccagggggatacagtcacaacgatactgatcgacctaaacggcttctggacttatgaaaaccgggaggccctggtagcaaacgactccgagaattctgctgatctcgatgatacatag

SEQ ID NO: 22962 - DNA, 3348 bp, synthetic construct
  source 1..3348: mol_type = other DNA; note = Synthetic coding sequence
atgcccgaggaccaggtgggcaagctggaggccaccgagaacaccattagcgccatggccgccgctgctgccgaacaacagcagttctacttgctgttgggtaacctgctgagccctgataatgtggtgcgcaagcaggcagaggaaacttacgaaaacatcccaggacagtcgaaaatcacgttcctcttgcaggccattcgtaacactactgccgcggaagaggcacggcagatggctgctgtgttactgcggcgcctcttaagcagcgctttcgatgaagtttatcctgccttgccctccgatgtgcagaccgctattaaatccgaactcctaatgatcatccaaatggagacgcagtcttcaatgcgcaagaaggtgtgtgatatcgccgcagagctggctagaaaccttattgacgaggatggcaacaatcagtggccagagggtcttaagttcctgttcgatagtgtgtcatctcagaacgtcggcctgcgcgaagccgccctgcatatattttggaattttcccggcatctttggaaatcagcagcaacactatctggacgtgataaagcgaatgctggtacagtgcatgcaggaccaggagcatccgagcatcaggaccctgtctgctagagccacggcagcgttcattctggccaatgagcataacgtcgccttgttcaaacacttcgccgatttattacccggatttctgcaagcagtcaatgattcttgctaccagaacgatgactcggtgctgaaatctctggtggagattgccgacactgttccaaaatacctgcgccctcacctcgaagcgacattgcagctatccctgaagctgtgtggagacacttccctcaataatatgcagcgacaactggccttggaagttattgtcaccttgtcagagaccgctgcagcaatgctaagaaaacacaccaatatcgtggcccagaccattccccagatgttggccatgatggttgatctcgaagaggacgaagattgggctaacgccgatgagttggaagacgacgatttcgactcgaacgctgtcgcaggagaaagcgctctggacagaatggcctgcggtttagggggcaagctcgtgctgcccatgatcaaagagcacatcatgcagatgcttcagaatcccgattggaaatatcgccacgctgggctgatggcactcagcgcaatcggtgaaggctgccatcagcaaatggaaggaatcttaaacgaaattgttaacttcgtcctcctgtttttacaagacccccatccccgtgttcgatacgcggcttgtaacgccgttggacaaatggctactgacttcgcgccaggattccaaaagaaatttcacgagaaagtaatcgccgcgttgctccagacaatggaggatcagggaaatcagagagtacaggctcacgctgccgccgctctgattaacttcacagaagattgccctaaatccttactgattccctacctggacaacctagtgaagcatctccattccataatggtgttgaaactccaagagttgatccagaaaggaacaaagcttgtgctcgagcaagtcgtgaccagtattgcctcagtcgccgacaccgccgaggagaaattcgtgccctactatgatctcttcatgccatccctgaagcatattgtcgagaacgcggtacagaaggagttacgactactcaggggaaaaaccatcgaatgtattagtcttatcgggctggccgtgggtaaggagaagtttatgcaggatgcaagtgatgttatgcagctcttgctgaaaacacagaccgacttcaacgatatggaagacgatgacccccaaatctcttatatgatcagcgcttgggccaggatgtgcaaaattttgggtaaagaatttcagcagtacttacccgtcgttatgggcccactgatgaaaacggccagtatcaagcctgaggtcgccctgttggatacacaggacatggagaacatgagtgatgacgacggctgggagttcgtgaacctgggcgaccaacagagtttcggaatcaagaccgcggggcttgaagaaaaatctaccgcttgtcaaatgctcgtgtgttacgctaaagaactgaaggaggggttcgtcgagtacactgagcaggttgtcaaactgatggtgcctctgttgaagttttactttcacgacggggttagagtagccgcggctgagtctatgcctcttctcttggaatgtgctcgtgttcgaggccccgagtaccttacgcagatgtggcactttatgtgtgatgctctgatcaaggccattgggacggagccagacagcgatgttctttccgagataatgcattccttcgccaagtgtattgaagtcatgggtgatggctgcctgaacaatgagcatttcgaagaactgggcggcattttgaaggccaagcttgaggagcatttcaagaaccaggagcttaggcaggtgaagagacaggatgaagattacgacgagcaagtggaggagtccctccaggacgaggatgataacgatgtatacatcttgacaaaagttagtgacatcttgcacagtatctttagctcctacaaggaaaaagtactgccatggtttgagcagctcctaccactaattgtgaaccttatctgcccgcaccggccctggcccgatagacagtgggggctatgtatctttgacgacgtcatcgaacattgttcccctgcctcattcaagtatgccgagtactttctcaggcccatgctccagtacgtgtgtgataattctcctgaggtgcggcaggcggccgcatacggtttgggcgtgatggctcaatacgggggggataattaccggcccttttgtacggaggccttgccactccttgtgagggtcatccagtctgccgactcaaaaactaaggaaaatgtgaatgccactgagaattgtattagtgcagtgggcaaaatcatgaagttcaagcccgactgtgtgaatgtcgaggaggtgctaccacactggttgtcgtggctccctctccacgaggataaggaggaggcagtgcaaacttttaattacttatgtgacctgatcgagagcaaccaccctatcgttctgggtccgaacaacactaatctgcccaaaatttttagcatcattgcagagggagaaatgcatgaagccattaaacacgaagacccgtgcgcaaagagactcgctaacgtagttaggcaggtacagaccagtggcgggctgtggaccgaatgtatagcccagctttcgccagagcaacaggcggccatccaggaactgctgaactctgcatag

SEQ ID NO: 22963 - DNA, 1929 bp, synthetic construct
  source 1..1929: mol_type = other DNA; note = Synthetic coding sequence
atgaagcggagcagcgtgagcagcggcggcgccggccggctgagcatgcaggaactacgaagtcaggatgttaataagcagggactgtacactccacaaaccaaagaaaagcccacctttgggaagctcagtatcaacaagcccacaagtgagaggaaggttagcctgttcgggaagcgcacatccggacacggtagtaggaatagccaacttgggattttcagctcaagtgaaaagattaaagaccccaggcctctgaatgacaaggccttcatccaacagtgcatccggcagctatgcgaattcttgactgaaaacggttacgcccacaatgtgagcatgaagagtttgcaggccccaagtgttaaagattttctgaaaatcttcactttcctgtatggttttctgtgtcccagttatgaactcccagatacaaagttcgaggaggaagttccgcgcatctttaaggatctcggataccctttcgcattgtcaaaaagcagcatgtatacggtaggcgcccctcacacatggccacacattgtggccgcactggtatggttgatcgattgtattaagatccacactgcaatgaaggagagttcacctttattcgacgatggccaaccctggggggaagaaacagaggatggtattatgcataataaattgtttctggattacaccatcaaatgctacgaaagcttcatgtcaggagccgattcattcgacgagatgaatgccgaacttcagagcaaactgaaggatctctttaatgtagatgccttcaaattagaatcactggaagcaaagaatcgcgcacttaatgagcagattgccagactggagcaagagcgtgaaaaagaaccaaatcggctggagtccctgcgcaaactcaaggcaagcctccagggggacgtgcagaaatatcaggcatatatgagtaatctggaatcccattcagctatactcgaccaaaagcttaatggcctaaacgaagagatcgcccgcgtcgaactggaatgtgaaacgatcaagcaagagaatactcgcctgcaaaacataattgataatcagaaatattccgtggccgatattgaacgcatcaatcatgaaaggaacgaactgcagcagactataaataaactcacaaaggaccttgaggccgaacagcagaaactgtggaatgaggagcttaaatacgctcgggggaaagaagccattgagactcagctagctgaatatcataagctcgccaggaagctgaaactgatccccaagggcgccgaaaattcaaagggttatgatttcgaaatcaagtttaatcctgaagcaggcgccaactgtctggtgaaatatagggcgcaagtgtatgttccactcaaggagttgctcaacgagactgaggaggaaatcaacaaggcactgaacaaaaagatggggctggaggatacattggagcagctgaatgcgatgattaccgaatcaaaacgatcagtgagaacgctgaaagaggaagtccaaaagctggacgatttatatcaacagaaaatcaaagaggctgaagaagaggacgagaaatgcgcttctgaattggagtctcttgaaaaacacaaacatttgctagagtccaccgtgaaccaaggattgtcagaggccatgaatgagctagatgctgtgcaaagagagtaccaactggtcgtccagaccaccacagaagagagaagaaaggttggaaacaatctccaacgactcttggaaatggtggcgactcacgtgggctctgtggagaaacatcttgaagaacagatcgcaaaggtggatcgggaatacgaggaatgtatgtccgaggacttatcagaaaacatcaaggagatcagagataaatatgaaaagaaggcaactctgatcaagtctagtgaagagtag

SEQ ID NO: 22964 - DNA, 4770 bp, synthetic construct
  source 1..4770: mol_type = other DNA; note = Synthetic coding sequence
atgagcctgcccttctaccagcggtgccaccagcactacgacctgagctaccggaataaagatgtgaggagcacggtcagtcactaccaaagggagaaaaaacgatctgctgtttacacccaaggctccactgcctacagcagcagaagtagtgcagcccatagacgtgagtccgaggcgtttagacgtgctagtgcctcctctagccagcaacaggctagccagcacgcactcagcagtgaagtgagcagaaaagctgccagtgcctacgactacggctcctcccatggtttgaccgacagctcactgctgctagatgactatagcagtaagttgtcccctaagcccaaaagggcaaagcactctctcctgtctggggaggagaaggaaaacctcccgtccgactacatggtcccaatcttctcaggccgccaaaaacacgtctccggcatcaccgacaccgaggaagagcgtatcaaagaggccgctgcttacatcgcgcagcgcaatctgttagcaagtgaggaaggaattacgactagcaagcagagcactgcatcaaaacagacaacagcttcgaagcagtctaccgccagtaagcagtccacagcctccaaacaatccaccgcctccagacagtcgactgctagccgtcagagtgtagtgtctaaacaagctacttctgcactgcaacaagaggagacaagcgagaagaagagtagaaaagttgtcatccgcgaaaaagccgagaggttgtccctccgcaaaactttggaagaaaccgagacctaccacgcgaagctgaacgaagaccacctgctacatgcaccggagttcataataaagcccagaagccatacagtgtgggaaaaggagaacgtcaagctgcactgctccattgcaggttggcctgagcctcgggtgacctggtataaaaatcaggtgccaattaatgtacacgccaacccgggaaagtacatcattgaaagcagatatgggatgcacacgcttgagattaacggctgtgacttcgaggatactgctcagtatcgggccagtgcaatgaacgtcaaaggcgaactgtcagcctacgctagtgtcgttgtcaagcgctacaaaggcgagtttgatgaaaccaggtttcatgccggcgcaagtactatgcccctttcgttcggagtgacaccctatggatacgcttcacgatttgagatccactttgacgacaagttcgatgtctctttcggtagggaaggcgagacgatgagcttaggctgccgagtggtcatcacccctgagatcaagcacttccaaccggaaatccaatggtacaggaacggcgtccccctcagcccttctaaatgggttcagacactctggagtggcgagcgagctaccctgacgttttcccatctgaataaggaggacgaaggactgtataccattagagttaggatgggagagtactatgagcagtactcggcctatgtcttcgtgagagatgccgacgccgagattgagggtgccccagctgcccctctggacgtcaagtgccttgaggccaacaaggactacatcatcatcagctggaagcagccagccgtggatggcggctcaccaattctgggatacttcatagataaatgcgaggtgggtacagactcctggtcccagtgcaacgatacccctgtgaagttcgctcgctttccagtcacgggcttgatcgaaggcaggagttatatctttcgagtgcgggctgtcaacaagatggggattggttttccctccagggtgtcagaaccggtcgccgccctggaccctgccgaaaaagcgagactgaaatcacggccatctgctccctggacaggacaaataatagtaacagaagaagaaccatccgaagggatagtgcctggaccccctacagatttgtccgtcacggaggcaactagaagctacgttgtgctaagttggaaacctcccggacagcgcggtcatgagggaatcatgtacttcgtggaaaagtgcgaagcaggtactgaaaattggcagagagtcaacacggaacttccggtcaagtcacctagatttgcgctctttgatctcgcggaaggaaaatcttattgcttcagagtgaggtgctctaatagcgccggcgtgggtgagccttccgaggccacagaagttacagtggtgggagataaactggatatccctaaggcaccagggaaaatcataccttctaggaatactgatacctctgtggttgtgtcatgggaggagagtaaagacgcaaaggagttggtggggtattacatagaagcaagtgtcgccgggtctggcaaatgggaaccttgtaataataacccagtgaagggctctcggttcacatgccatggcctagtgactggccaaagctatatcttcagagtaagggccgttaacgctgccgggctttccgagtattcgcaggattctgaagcaatcgaggttaaggccgctattgcaccccctagcccaccatgcgatataacatgtcttgagagtttcagggactcaatggtcttgggatggaagcaaccagataaaatcggaggcgctgaaatcaccggatactacgttaactaccgggaggtgatcgacggagtacctggaaagtggcgggaagccaatgtgaaggccgtgtctgaggaagcttacaaaatttcaaatctcaaggaaaacatggtgtatcagtttcaggtggccgccatgaacatggcgggtctcggtgccccatctgctgtctctgaatgtttcaaatgtgaagagtggacaatcgctgtgcctggtcctccccactcacttaaatgttccgaagttcgcaaagatagcctggtcctccaatggaagcccccggtccactccggacggacacccgtcacaggatacttcgtcgatttgaaggaggcaaaagcaaaggaagaccaatggcgcgggctgaatgaggctgctatcaagaacgtctacttaaaggttaggggccttaaggagggtgtgtcttatgtgtttagggtaagggcaatcaaccaggccggcgtggggaaaccctccgacctggctggtccagtcgtggcagagaccagacctggcacaaaagaagtggttgtgaatgtggacgatgacggggtgatttccctaaattttgagtgtgacaaaatgacgcccaagtccgaattcagctggagcaaggactatgtatcgactgaagactcgcctcgcctagaggtcgagtcaaaaggtaataagactaaaatgactttcaaagaccttggtatggatgacctggggatctatagttgtgatgttacagacaccgacggcattgccagttcatacctgattgacgaggaagagttgaagaggttgctggccttaagtcacgaacataaattcccgaccgtcccagttaagagcgaacttgcggtggagattcttgagaagggccaggtgaggttctggatgcaagctgagaagctgagtgggaatgccaaggtcaactacatttttaatgagaaagaaattttcgaagggccgaaatacaaaatgcacatcgaccggaacaccggcattatcgagatgtttatggaaaagttgcaagatgaagacgagggaacttatacattccagcttcaggacggaaaagcgaccaaccactctacagtggtgctggttggggacgttttcaagaaacttcagaaagaagccgaattccagcgacaagagtggatacggaagcagggaccacacttcgtggaatacctcagttgggaagtgactggggagtgtaacgttcttttaaaatgcaaggttgccaacatcaagaaggagacgcacattgtttggtacaaggatgagcgggagatctccgtcgatgaaaagcacgacttcaaagacggaatctgcaccctcctgataactgagttttcaaagaaagacgctggcatctacgaggtgattctgaaggatgacagagggaaagataagtcacgtctgaaactagttgacgaggccttcaaagagctaatgatggaggtttgcaagaaaatcgcactgagcgccactgatctgaaaatccagagtactgcagaaggcattcagctgtactcattcgtgacatattacgtggaagacctgaaggtcaattggagccataacggatccgctattaggtactctgaccgcgtgaaaaccggggtgacaggcgagcaaatttggttgcaaatcaatgagccaactccaaatgacaaaggcaaatacgtgatggagttgtttgatggtaagacaggccaccagaaaactgtggacctttccggccaggcctacgatgaagcatatgccgagttccaaagactgaaacaggctgccattgctgagaagaaccgggcgagagtgttgggtggacttccagatgtggttacgatacaggagggaaaggccctcaatctgacctgcaacgtgtggggtgacccaccacctgaagtctcttggcttaagaatgagaaggctctggccagcgacgatcactgtaatctgaagttcgaggctggacggacagcgtacttcaccattaacggtgtctccacggctgattccgggaagtatggcctcgtcgtgaaaaataagtacggtagcgaaacatccgacttcaccgtttctgtcttcatccctgaggaagaggcccgaatggccgccttggagtctctgaaaggtggaaaaaaagcaaagtag

SEQ ID NO: 22965 - DNA, 546 bp, synthetic construct
  source 1..546: mol_type = other DNA; note = Synthetic coding sequence
atgggcggcttcttcagcagcatcttcagcagcctgttcggcacccgggagatgagaatccttattctgggcctggatggagcgggaaaaacaactatcctgtaccggttgcaggtgggcgaggtggtgacaactattcctacaatcgggttcaacgtagaaacagtgacgtacaagaacctgaaattccaagtgtgggacctaggaggacagaccagtattcgcccttattggcgatgttactactccaacaccgacgcagtgatttacgtcgtggattcctgtgacagggaccgtattggaattagcaagtctgaactcgttgcaatgctcgaagaggaagagctccgcaaagccatccttgtggtttttgccaacaagcaggacatggaacaagccatgacatctagtgaaatggcgaattcccttgggctgcccgctcttaaggatcggaaatggcagatctttaagacatccgccaccaagggaaccggactcgacgaggccatggagtggctggtcgagactcttaagagtcgacagtag

SEQ ID NO: 22966 - DNA, 1269 bp, synthetic construct
  source 1..1269: mol_type = other DNA; note = Synthetic coding sequence
atggccgccgccgccgtggtggagttccagcgggcccagagcctgctttccactgacagggaggccagtattgatattctccacagcatcgtcaaacgggacatccaggagaacgacgaggaagcagtgcaggtcaaggagcagtcaatcctagagctgggaagcttactggctaagaccggccaggccgctgagctgggaggtttactcaaatacgtgaggcctttccttaattccatttctaaggctaaggccgcccggctggtgcgctccctcctggatctgtttttagacatggaagccgcgacgggtcaagaggtagagctctgtctcgaatgcatcgaatgggctaagtcagaaaagcgtacattccttcggcaggcccttgaggcccgccttgtgtctctttacttcgatacaaagagataccaggaagcattgcacttgggctcacagttattgagagagctgaaaaaaatggacgataaagctctgctggtggaagtgcagcttctggaatccaaaacctatcacgccctgagcaacctccctaaggctcgtgctgctctcacctcagcgcgcacgactgctaatgcgatatactgtccaccgaagcttcaggcgaccctggacatgcaaagtggaataatacatgctgccgaagaaaaggattggaagaccgcctactcatacttttatgaagccttcgagggatacgactcaatcgatagcccaaaagccatcacttctctcaaatacatgctgctctgcaagataatgctcaacaccccagaagatgttcaggcccttgtgtctggaaagctggcccttcgttacgcaggcaggcagacagaagctttgaaatgtgtggcccaggcctcaaaaaaccgcagcctcgcagactttgaaaaggccctgacggattaccgggccgagttgcgagatgatcccattataagtacacacttggcaaagctttacgacaacctcttggagcagaaccttatccgagtgattgagccattctccagggtgcagatcgaacatataagtagtctcatcaaacttagtaaggctgacgtggaaagaaagctgagtcaaatgatattggacaagaaatttcacgggatcttggaccaaggggagggggtgctgatcatatttgatgagccaccagtggacaaaacttatgaggcagccctcgaaacgatacagaacatgtccaaggtggttgactccttgtataacaaagccaaaaagttgacttag

SEQ ID NO: 22967 - DNA, 1449 bp, synthetic construct
  source 1..1449: mol_type = other DNA; note = Synthetic coding sequence
atggccagcctgggccccgccgccgccggcgagcaggccagcggcgccgaagcggaacctggccccgcgggtccaccacctcctccttccccgtcaagcctgggtcctctgctccctctacagcgcgagcccctgtataactggcaggccacaaaagcctcattaaaggaacgctttgcatttctctttaacagtgagttgctgtccgatgtgcgctttgtgttggggaagggtaggggcgccgctgctgcaggcgggccccagcgcatccccgctcaccgctttgtgttagcggctgggagtgccgtgttcgacgccatgtttaatggcgggatggccactacatccgctgaaatcgagctgcccgacgtcgagccggcagcattccttgcgcttctgcgatttctgtattctgatgaagtacagataggacccgagactgtaatgactacactgtacactgcgaagaaatatgcagtgcccgcactggaggctcactgtgtggaatttttgaccaaacacttgcgcgctgacaacgcttttatgttgctcacacaggcccggttattcgacgagccacagctggccagcctctgcctcgatacaatagacaaaagtactatggacgctatatccgctgaaggttttacagacattgacatcgataccctgtgcgctgtgctagagcgagataccctctccattagagaaagcaggctgttcggtgccgtcgttcggtgggccgaggcagagtgtcagcggcaacagctgccggtcacattcggtaataaacagaaggtgttggggaaagccctgtcgctgatccgctttcctctgatgactatcgaagaatttgccgcaggtcctgcacagtcaggtatactgagcgatcgggaggttgtgaatctttttctgcacttcacagttaacccaaagccgcgcgttgaatatattgataggcctcgttgctgtttgcggggaaaggagtgttgtatcaatcggttccagcaggtcgagtcacggtggggctattccggaactagcgatagaatccggtttaccgtgaacagacgcatctctatcgtgggctttgggctttacggttccatccacggccctacagattatcaagtaaacatacagattatcgagtacgagaagaagcagactctgggtcagaatgatactggcttttcatgcgacggaacagcgaataccttcagggtgatgtttaaggagcccatcgaaatcttgcctaatgtgtgttacacggcatgtgcaacactcaaagggccggactctcattacggcactaagggactcaaaaaggtcgtgcacgagaccccagccgcaagtaagaccgtcttctttttctttagttctcccggaaataacaacgggacatccatagaggacgggcaaatacctgaaatcatcttttacacatag

SEQ ID NO: 22968 - DNA, 2883 bp, synthetic construct
  source 1..2883: mol_type = other DNA; note = Synthetic coding sequence
atgagccggctgatcgtgaagaacctgcccaacggcatgaaggaggaacggttcagacagctttttgccgcttttgggactctgacagattgtagtctgaagttcactaaggacggaaaattcagaaagttcgggttcattggattcaagtctgaggaggaagctcagaaagcccaaaagcacttcaataagtctttcatcgacacgagtaggattacagtggaattctgcaaatcatttggagaccctgctaaaccacgtgcatggtccaagcatgcacaaaaaccatcccaaccaaaacagccccctaaagactccacaactccagagattaagaaggacgagaagaaaaagaaggtcgcgggtcagttagaaaaactcaaggaggacaccgaattccaggagttcctctcagtacaccagcggagggcccaggcagccacatgggccaatgatggtcttgatgcagaacccagcaagggaaagtctaagcctgcctctgactacctaaacttcgactccgatagcggccaggagagtgaggaagagggcgccggcgaagacctggaggaagaggcctcccttgaacccaaagctgccgtacagaaggagttgtccgacatggactatctgaaatccaagatggtgaaagcgggatcttcctcttcatccgaggaggaggaatccgaagacgaagcagtgcactgcgatgagggcagcgaagccgaagaggaggacagctcagccacacccgttctacaggaacgcgactctaaaggtgcgggacaggaacaaggtatgcctgccggcaagaagcggccgcccgaggcaagagccgagaccgagaagcctgctaaccagaaagagcccactacgtgccacaccgtgaagctccggggcgctccctttaacgttacagagaaaaacgtgatggagttcctagctcccctgaagcccgtagcaatccgcatcgtgaggaacgcccatggaaacaaaacaggctatatcttcgtggattttagcaacgaggaagaggtcaaacaggctctcaaatgtaaccgcgaatatatgggagggaggtatattgaggtatttagagagaagaatgtccccacaacaaagggcgctcccaagaacaccacaaaaagttggcagggacgaatcctgggagagaatgaggaagaagaggatctagcagaatccggacgactcttcgtccgcaacttgccctatacgtctacagaggaagatttggagaagcttttctcgaaatatgggccactaagcgaattgcactaccctatagactcacttacgaagaagccaaaaggtttcgcatttattacttttatgttccccgagcacgccgtgaaagcttattccgaggtggatggacaggtgtttcagggcagaatgctgcatgtattgccgagcactatcaaaaaggaagcctcggaagatgcaagcgcactgggcagctcatcctataaaaaaaagaaggaggcacaagataaagctaattctgcaagctcccataactggaatacacttttcatgggaccaaatgccgtagctgacgccattgctcagaaatataacgccacaaagtcccaggtcttcgatcatgaaactaagggctcggtggccgtgcgtgtcgcattaggcgaaacgcagctggtacaggaggtgcggcgcttcctgatagataacggagtctcattggatagcttttcccaggcagccgccgagcgatcaaagacagtgatcctcgttaagaatctgcccgcaggaaccctcgcagcccaactgcaagaaacattcggacactttgggagccttgggcgcgtgcttctgcccgaagggggtataacggctattgtggagttccttgagcctcttgaagcccgcaaagccttccggcacctggcctactccaagtttcatcacgttcctctgtacctggagtgggcaccggttggagtgttttctagcaccgcaccccagaagaagaaattacaggacacgccaagtgagcctatggagaaggacccagctgaacccgaaaccgtgcccgatggagagaccccggaggacgagaaccctacagaagaaggcgctgacaactctagcgcaaagatggaagaagaagaagaagaagaagaagaagaagaggagtccctgccaggatgtactctgttcattaagaacctgaatttcgacacgaccgaagagaaactgaaagaggtattctcaaaagtaggcacagtgaagtcatgctctatcagtaagaagaaaaataaagctggggtgctgctctctatgggattcggctttgtagaatacagaaaaccagaacaagcccaaaaagctcttaagcagctgcaagggcatgtcgtcgatggtcataagttggaagtgcggatttctgagcgcgcaaccaagcccgctgtgacactagccagaaaaaaacaggtgcctaggaagcagacaacctcaaagatcttagttcgcaatattcctttccaggcgcattctcgcgagatacgcgaattattctccactttcggagaattgaagaccgtgcgcttacccaaaaaaatgacgggcacaggcactcaccggggcttcggcttcgtggacttccttacaaagcaggacgctaaacgcgctttcaacgctctctgccactccacccacctgtacggacgccgcctcgtgctggagtgggccgatagtgaggttacactgcaggccctccggaggaaaactgccgctcacttccatgaaccccctaaaaagaaacggtcagtggtgcttgatgagattttggagcagctcgagggatccgactctgactccgaagagcagaccctccagttgtag

SEQ ID NO: 22969 - DNA, 2919 bp, synthetic construct
  source 1..2919: mol_type = other DNA; note = Synthetic coding sequence
atggccacccggggccacgtgcaggaccccaacgaccggcggctgcggccaatatatgattatctagataatgggaataataagatggccattcagcaggccgacaaattgctgaagaaacataaggacctgcactgcgcaaaagttctaaaggccatcgggctacagcggaccggcaagcaggaggaagctttcacccttgcacaagaggtggctgccctcgagccaaccgacgataacagcttgcaagcactgacaattctctatcgcgaaatgcacagaccggagcttgtgactaaactgtacgaggcggcggtgaagaaagtgccaaacagcgaagagtatcactcccatctgtttatggcttacgcacgggtaggtgaatataagaaaatgcagcaggctgggatggccctgtacaaaattgtgcccaaaaatccctactatttttggagtgtgatgtccctaatcatgcagtccattagcgcgcaggatgaaaatttgagcaagaccatgtttctgcccttggccgagagaatggttgaaaagatggttaaagaagataagattgaagccgaagctgaggtggaactgtattacatgattctagagcggctgggcaagtatcaggaggctctggatgtgattcgggggaaactgggcgagaaactgacaagcgagatccagagtcgcgagaacaaatgcatggcgatgtataagaagctcagtagatggcccgaatgtaatgctctgtcccgccggctgcttcttaagaactcggatgactggcagttttatctcacctactttgattccgtgttcaggttgatcgaagaggcatggtcccctccagcagaaggcgaacactcattggagggcgaggttcattattctgctgaaaaggccgtgaaatttattgaggaccgaattacagaagagtcaaaatcaagtcgtcatctgcgcggtccccacctggctaaactagaacttatacgccgtctgcgctcccagggctgtaacgacgagtataagcttggcgaccccgaagagttgatgtttcaatactttaagaagttcggcgataagccttgctgctttactgacctcaaggtgttcgtggacctactaccagcaacacagtgtaccaagtttatcaaccagctcctcggagtggtgcccctttccaccccaaccgaggacaagttggcactgcctgctgacatccgagcactccaacagcatctgtgcgtggtgcagctgaccaggctgttaggtctgtaccataccatggacaaaaaccagaaactttcggtcgttagggaactgatgctgcgctatcagcacggactcgagtttggaaagacatgcctgaaaactgaattgcagtttagtgattattactgcttactggctgtacacgctttgatagacgtttggcgggagactggcgacgaaaccactgtttggcaggccctgactctgctggaagaaggcctgacccactcaccaagcaacgcccagtttaaacttttgctggtccggatttactgtatgctgggtgcatttgagccggtggtggacctatacagctccctggacgccaaacatatacaacacgatactatcggctatttgcttactcggtatgccgagtcactggggcagtacgctgctgcatctcagtcctgcaattttgcattgcggtttttccatagcaatcagaaggacacatcagaatatattatccaggcgtacaagtacggagccttcgagaagattcccgaattcatcgccttccgaaatcggctcaacaattctctccactttgcgcaggtccgaacagaaaggatgttgttagacctgcttcttgaggccaacatctccactagtctggccgagagtatcaaatctatgaacttgaggcctgaggaagacgacatcccctgggaagatctacgtgataacagagacctgaacgtcttcttcagctgggatcctaaagaccgtgatgtctcagaagaacataagaagttgtccctcgaggaggaaaccctgtggctgaggatacggtcacttacactgaggttaatttcaggccttccatcactgaatcatccagtagagcctaagaacagtgaaaaaactgccgagaatggtgtttcatcacggattgatatactccgtcttttactacagcagttagaagccacactcgaaacaggtaagcgcttcatagaaaaggacatccaatacccattccttggtccggttcccaccagaatgggtggcttctttaactcagggtgttcccagtgtcagatctcttctttttatctggttaatgacatctatgaactcgatacctcaggtctcgaggacactatggagatccaggaaaggattgagaatagtttcaagtctctgctggatcagctgaaggacgtcttcagcaaatgcaaaggtgatctcttagaggtgaaggatggtaatctgaagacccaccctactcttctagagaacttggtgttcttcgtggaaactatctcagtgattttgtgggtgagttcatactgtgaatccgtcctgcggccatacaaactgaaccttcagaaaaaaaagaagaaaaaaaaggagacctccataattatgccccctgtctttacctccttccaggattatgtgaccggtttgcaaaccttgatcagcaatgtggtggatcacatcaaaggcctggaaacacacctgattgccctcaaattggaggaactgatcttagaagacacatcactcagtcccgaggaaagaaagttctctaagacagtacagggcaaagtccaatctagttacctgcattcccttctggagatgggagaactcctcaagaaaagactcgaaaccacgaagaagctaaaaatttag

SEQ ID NO: 22970 - DNA, 2166 bp, synthetic construct
  source 1..2166: mol_type = other DNA; note = Synthetic coding sequence
atggccgagaagttcgagagcctgatgaacatccacggcttcgacctggggtctcgatacatggacctgaaacccctgggctgcggcgggaatgggcttgtgttctcggccgtagataatgattgcgataaacgagtcgccattaaaaagattgtcttgacagatccgcagtcagtgaaacatgctctgagggagattaaaattatcaggcgcctcgaccacgataacatcgtcaaggtcttcgaaattctggggccctccggtagccagctcaccgacgacgtgggatccctgacagagctcaatagtgtctatatcgtgcaggagtacatggagactgaccttgctaacgtgctggagcagggccccctcctggaggaacacgcccgactgttcatgtatcagctgcttcgcggtctgaaatatattcactccgccaatgtgctgcatcgcgacttgaaaccagcaaacctattcataaatacggaagacctggtgctcaagattggagacttcggcctggctcgtataatggaccctcactacagtcataaaggccatcttagcgagggactggttacaaagtggtataggagtccaaggcttctgctgagtcccaacaattataccaaggcgatcgatatgtgggccgcaggctgtatcttcgctgagatgttgacgggtaaaaccctgttcgccggagcacatgagctggagcaaatgcagctgatccttgagtcgattcctgtggttcatgaggaagaccgacaggagctgttgagtgtgatccctgtgtatattcgcaacgacatgacggaaccacataagcccctgacgcagctcctgcctggcattagcagagaggccctggatttcctggagcaaattctaaccttctcacctatggaccgcctcactgctgaagaagccttaagccatccttacatgagcatatacagcttcccaatggacgagcccataagttctcatccgtttcacattgaagatgaggtcgacgatattctgttaatggatgagacacactctcacatttataactgggagaggtaccacgactgtcagttttcagagcacgactggcctgtccacaataacttcgatattgacgaggttcagcttgatcctcgtgccctctccgacgtcaccgatgaagaagaggtccaggtggatcctcgcaaatacctagacggggaccgggaaaagtatcttgaagacccagcttttgacacaaactattctacagagccttgctggcagtatagtgaccaccacgagaacaaatactgtgacctagaatgctcccacacatgcaactacaaaacccgctcaagctcttatctagacaacctggtctggcgggaatccgaagtaaatcactattacgaacctaagcttatcattgacttgtcaaattggaaggagcagagcaaagaaaaatccgacaagaaaggcaagtcaaagtgcgaacggaatggtctggtgaaagctcaaatcgcgttagaagaagcatctcagcagctcgccggcaaggagcgcgagaaaaaccagggatttgatttcgactcgttcatcgctgggactatccaactgagcagccagcatgaaccaactgacgtcgtcgataagctcaatgatctcaattcttccgtgtcccagcttgagctgaagagcctcatctcgaaaagcgtttctcaagaaaagcaggagaaggggatggccaaccttgcccagttggaggctctttaccagtcctcctgggattctcaatttgtgtccggaggtgaggactgtttttttattaaccagttttgtgaggtgcggaaggatgagcaggtggagaaagaaaatacatacaccagttaccttgacaaattcttctcacgtaaagaagacaccgaaatgctggagacagaaccagtagaggatggaaagttgggcgaacggggccacgaggagggcttcttgaataactctggcgaatttttgttcaacaaacagcttgagtcgatcgggatcccacagtttcactcccccgtggggagcccattgaagagcattcaggctaccctaactccatccgctatgaagtcatccccacagataccacatcagacatacagctctatcttaaaacatctgaactag

SEQ ID NO: 22971 - DNA, 948 bp, synthetic construct
  source 1..948: mol_type = other DNA; note = Synthetic coding sequence
atggccgccggcgtgccctgcgccctggtgaccagctgcagcagcgtgttttctggagaccaattggtccagcatattcttggtactgaggacttgatagtcgaagttacctccaatgatgcagtcaggttttatccgtggacaatcgacaacaagtattacagcgctgatataaacctgtgcgtggtgccaaacaaatttctggtaactgcggagatcgcggagagtgtgcaggcatttgtggtgtattttgactccacacagaagtctggtcttgatagcgtgtcctcatggctgcctctggccaaagcctggctgcccgaggtgatgatcctggtctgcgaccgcgtaagcgaggacggaattaatagacagaaagcccaggagtggtgcattaagcacgggttcgagcttgtcgaactgtcccccgaggagctgcccgaggaagacgatgactttcccgagtcaaccggggttaagcgtattgtccaggcgttgaacgcaaacgtgtggagcaacgtcgtgatgaagaacgacagaaatcagggcttcagcctgctgaactccctgaccggaacaaaccatagtatcggcagcgccgatccctgccaccctgaacagccccacctacctgctgccgactccactgagtcactgagtgatcaccgggggggggcctccaacacaactgatgcccaggtggacagcattgtggatccgatgctcgacttagacattcaagagctggcttccctcaccactggtgggggggacgtggagaactttgagaggctgttttcaaagctgaaagaaatgaaagacaaagctgccacattgccccacgaacagcgcaaagtgcacgccgagaaagtcgctaaagccttttggatggctattgggggggatcgggacgagatcgagggactgtccagcgacgaggaacattag

SEQ ID NO: 22972 - DNA, 1338 bp, synthetic construct
  source 1..1338: mol_type = other DNA; note = Synthetic coding sequence
atggccgcccccgaggagcgggacctgacccaggagcagaccgagaagcttctgcaattccaggatctcaccggtattgaatcaatggatcagtgccggcacacattggaacagcataattggaatatcgaagctgccgtacaagatcgactgaacgaacaggagggtgtgccaagcgtgttcaacccgccccccagcagaccccttcaggtgaatactgccgatcaccgtatttactcctatgtggtgagtcgtccacaacctaggggcctcttggggtggggttattacctgatcatgctgccctttaggttcacctattataccattctggacatatttagattcgccctgaggttcatacggccagatccaagaagccgcgtaacggacccagtgggcgatatcgtgagcttcatgcacagtttcgaagagaagtatgggagggcccacccggtattttaccaaggaacttattctcaggcattaaacgacgctaagcgcgaattgaggttcctacttgtgtacttacacggcgacgaccaccaggactcagacgaattctgccgtaacaccctttgtgcccccgaggtgatctctctaattaatactagaatgctattttgggcttgttcaaccaataagcctgaaggctaccgtgtgtcacaggctcttcgggagaacacctatccattcttggccatgatcatgttgaaagatcgtcgcatgactgtggtggggcggttggaaggactgattcagcccgacgatttaattaatcagttaacctttattatggatgccaatcagacatatttggtgagcgaacggctggaacgagaggagcggaaccagactcaggtgcttcgccaacagcaggacgaggcctacttagctagcttgagagctgatcaggagaaggaaaggaaaaagagggaggaacgtgaaagaaagcggcgaaaggaagaagaggtgcagcagcaaaaactggccgaggaacggagacgccagaatctacaggaggaaaaggaacgcaagctcgaatgtctaccgcctgagccctcaccagatgatcctgaaagtgtgaaaataatctttaaactacccaacgacagccgagtggaacggcggtttcactttagtcaatccttaacagtaatccacgattttctttttagccttaaagaatccccagaaaagtttcaaatagaggccaactttccaagaagagtgcttccgtgcattcccagcgaggagtggccaaatccccctacacttcaggaagcgggactgagtcatactgaagtgttgttcgtacaggacctaaccgatgagtag

SEQ ID NO: 22973 - DNA, 2724 bp, synthetic construct
  source 1..2724: mol_type = other DNA; note = Synthetic coding sequence
atggccacccccgaccagaagagccccaacgtgctgctgcagaacttatgttgccggatactggggagatccgaggcagatgtggcacagcaattccagtacgccgtgagggttatcgggtctaattttgcccccacagtggaaagagacgaatttctggtggctgaaaagataaagaaggagctcattaggcagaggcgcgaggcagacgctgccttgtttagcgaactgcaccgaaagcttcactcccaaggcgtgcttaaaaacaagtggtccatactctacctgttgctgtctttaagcgaggacccgaggcgccaaccatccaaggtctccagttacgccacactattcgcccaggctctcccaagagatgcacacagtacaccatattactatgctaggcctcagaccttgcccctttcttaccaggatcgttctgcccagtcagcccagtcctccggttctgtgggtagttctggcatttcgtctattggcctgtgtgccctgtccgggcctgctcccgccccccagagccttctccctggccagagcaaccaagctcctggcgttggggattgcttgcggcagcagctgggatctagactggcatggacacttacagccaatcagccatcaagccaagccactacgagtaagggcgttccctctgccgtgtcccggaacatgacgcggtcaagaagggaaggggacacaggcggaacaatggagattactgaggccgctctggtccgagacatcttgtacgtgtttcagggcattgatggaaagaatattaaaatgaataacaccgagaattgctacaaggtagagggaaaggcaaatctgtcgcgttctctgagagatactgccgtccgtttgagtgagctcggttggctccacaataagatacgccgatataccgaccaaagaagcctggacaggtcattcggcctggtggggcagtccttctgcgctgcacttcatcaggaactccgggaatactaccgactgctatctgttctccatagccagcttcagctggaggatgatcagggggtgaatctgggattggagagctcccttaccctccggcgcttactcgtttggacctatgaccctaaaatcaggctgaaaactctggcagctcttgtcgatcactgtcaggggagaaagggaggggagttagcgagtgccgtgcacgcctataccaaaacaggggatccctatatgcgatcactggttcaacacatactgagtctcgtatcccatcctgtgctgagctttctgtacaggtggatttacgacggagaattggaagacacttaccacgagttcttcgtcgcttccgacccaacagtcaaaaccgacagattatggcatgacaaatatacactcagaaagtccatgatacccagttttatgaccatggatcagtccagaaaagtcctactgattggtaaaagcattaacttcctacatcaggtgtgccacgaccagacaccaactacaaaaatgattgccgtgacgaaatctgccgaaagccctcaagatgccgccgatctctttaccgatctggaaaatgcatttcaaggtaaaattgacgcagcatacttcgagacttccaagtacctgttggatgtgcttaacaagaaatactcactgctcgaccacatgcaagccatgagaagatacctgttgctcggtcagggtgattttatccggcatctgatggaccttctgaaaccagagttggtgaggcctgctacaacactctaccagcacaatctaacaggaatactcgagaccgctgtgcgagctactaacgcgcagttcgactcacctgaaatactccggcggctggacgtcaggttgcttgaggtgagccccggagatacaggctgggatgtgtttagtcttgactatcacgtggatggaccgatagccacagtgtttaccagggaatgcatgagtcactatctccgagtttttaacttcctttggcgtgccaaacgtatggagtacatcttgaccgatatcagaaaaggtcacatgtgcaatgccaagctgttgagaaatatgcccgaattctccggtgtgttacatcaatgtcacattctcgccagcgaaatggtgcatttcatacaccagatgcaatattacatcacctttgaggtgcttgaatgcagttgggacgagctctggaataaggttcaacaggctcaggatctggatcacattattgctgcacatgaggtattcttggatacaatcataagccgctgtctcctggactcggatagccgggccttgttgaatcagctgagagccgtattcgaccaaattatcgagctacagaatgcgcaggatgccatctaccgggccgcattggaagagttgcagcggagactacagtttgaggagaaaaagaagcagagggagatagaggggcagtggggggttaccgctgccgaagaagaagaagaaaataaaaggatcggcgaatttaaagagagtattcccaaaatgtgtagccagctgaggatactcactcacttctatcagggcattgtccagcagtttctggttctgctgacaacatctagcgacgaaagcctccgatttctgtcttttaggttggatttcaatgaacactacaaagcccgtgagcctaggttgcgggtttcgctgggcactcgcggtcgaagaagctctcacacatag

SEQ ID NO: 22974 - DNA, 1086 bp, synthetic construct
  source 1..1086: mol_type = other DNA; note = Synthetic coding sequence
atgaccggcaaggccggcgaggccctgagcaagcccaagagcgagaccgttgccaagtccacatccggaggagcgcccgccagatgcaccggctttggtatacaggaaatcctcggactgaataaagagccaccaagttctcacccgagggctgctctcgatggactggccccaggacacctgctcgccgccagatcggttctaagcccggcgggtgtaggaggaatgggacttctcggcccgggtggattacctggattttacacccaaccaacctttcttgaggtattgtccgacccccaatccgtgcatctacagccactgggaagagctagtggccctctggacaccagtcagactgcgtcatctgacagcgaagacgtgtcaagcagcgatcggaagatgagtaaaagcgcactgaaccagaccaaaaaaaggaaaaaacgccggcaccggacgatctttacttcctaccagcttgaagagctcgagaaggcttttaacgaggcccactatcccgatgtatatgctagagagatgttggctatgaagacagagctgcctgaagatcgaattcaggtttggttccagaatcggagggccaagtggagaaaaagggaaaagtgctggggcaggtctagtgtgatggccgagtacggattgtacggagctatggtgagacacagcattcctctgccagagtccatcctgaagtctgccaaggacggcattatggacagctgtgcgccatggttgctagggatgcacaaaaaatccctagaagcagccgcagaatcaggaaggaagccagaaggggaacggcaggcactgccgaaactggataagatggaacaggacgagagggggccagacgcacaggccgctataagccaggaggagctcagagagaacagtatagctgtgttacgtgctaaggcccaagaacactcaactaaggttctcggcactgtgtcaggaccggatagccttgcccgctccaccgagaagcccgaggaggaagaggccatggacgaagaccggccagccgagcggctgtccccacctcaattggaggacatggcatag

SEQ ID NO: 22975 - DNA, 2073 bp, synthetic construct
  source 1..2073: mol_type = other DNA; note = Synthetic coding sequence
atggaggagagccccctgagccgggcccccagccggggcggcgtgaactttctgaacgtcgccaggacttatataccaaacactaaggtcgaatgtcattatacactcccacccggcaccatgccaagcgcatccgattggatcggtatcttcaaggtggaagcggcctgcgtgagagactaccacaccttcgtgtggtcttccgttcctgagtctaccacagatggctcgcccatccacactagcgtccagtttcaggccagctatctgccgaagcctggcgcccagctgtatcaatttagatacgttaatcgtcagggccaggtgtgtggtcagtcccctccattccagttccgcgaacctcgcccgatggacgagctcgtgacacttgaggaagcagacggtgggtccgatatcttattggtagtaccaaaagctactgtacttcaaaaccaacttgatgagtcgcagcaggagcggaatgatttgatgcagctcaaactgcaactagagggacaagtcaccgaattacgttctagagtgcaggagctcgaacgtgcactagccactgctagacaagaacataccgagttgatggaacagtacaaaggaatctctcgtagccacggcgagatcacagaggagagagacattctgtccagacaacagggtgaccatgtggcgcgcattttagaactggaggatgacattcagaccatctcagaaaaagtcttgacaaaggaggtcgagctggaccgacttcgcgatacagtcaaagctctcacaagagaacaggaaaagctgctaggtcagttgaaggaggtgcaagcggacaaggagcagagcgaggccgagttgcaggttgcccagcaggaaaaccatcaccttaatctcgacctcaaggaggccaagtcctggcaagaagaacaatcagctcaagcccagcggttgaaagacaaagtggctcagatgaaggataccctcggacaggctcagcaacgcgtcgccgaactcgagccccttaaggagcaactcagaggtgcacaggagttggccgcatcatcacagcagaaggctaccctgctcggggaggagttggcctccgctgcagcagcacgggataggaccattgcagagttgcaccgcagcaggttggaagttgccgaggtgaatgggcgcctcgccgaattggggctccatctgaaggaggagaaatgtcaatggagcaaagagcgggctggtctcctgcaatcagtagaggcggaaaaggataagatactgaagctgagtgccgagattcttaggctggagaaggctgtccaagaagaacgcacacagaaccaggtgtttaaaaccgagcttgcccgagaaaaagacagcagcctcgtgcagttgtccgagtccaaaagagagctgacggaattgcggtctgccctcagagtacttcaaaaggaaaaagagcagctacaggaagagaaacaggaattgctggagtacatgagaaagctagaagcaagattagagaaggtggcagacgaaaagtggaatgaggatgctactactgaggacgaagaagccgctgtggggctgagctgcccagccgccctgacagacagcgaggacgagagtcccgaagatatgcgcctgcctccatacgggctctgtgagaggggggacccaggtagttctcctgctggcccacgggaggcctctcctcttgtggtcatcagccagccagcccctatcagtccgcacctgagtggccctgctgaagattcaagttcggattctgccgaggacgagaaatcagtcctgatggcagccgtgcagagcgggggcgaagaagcaaatctgcttctcccagagctggggtcagcgttttacgacatggcctcaggtttcactgtaggtaccctttctgaaacctcaaccggtgggcccgccacccccacctggaaagaatgtccaatttgcaaagaaagatttcccgctgagtctgataaagatgccctcgaggatcacatggacgggcattttttcttttcaacccaggaccccttcacgtttgaatag

SEQ ID NO: 22976 - DNA, 1980 bp, synthetic construct
  source 1..1980: mol_type = other DNA; note = Synthetic coding sequence
atgagcctgccccccgagaaggccagcgagctgaagcagctgatccatcaacagctgtccaaaatggacgtgcacggaagaattcgggagattttggccgagacaatacgggaggaactagcgccggatcagcagcatctgtcgaccgaggacttgattaaagccctgagaagaagaggcatcatcgacgacgtcatgaaggaactgaatttcgttacggatagtgtggagcaggaacttcccagtagccctaagcagcccatctgcttcgaccgtcagagcactctgaaaaagaccaacatcgacccgactagacgatacttgtatctgcaggtactgggagggaaggcttttctcgagcatctccaggaaccagagccattgcccgggcaggtctgctcaacgtttacgctttgccttcactataggaatcagagatttagatctaagccagtcccctgcgcctgcgaacctgacttccacgacggcttcctgctagaagtccacagagaatccctgggcgatggtacaagaatggcagactctactactatgctttcgattagtgacccaattcacatggtgttgatcaagaccgatatcttcggtgagacaaccctcgtggcctcctattttctggaatggcggtccgtccttggctcagagaacggagttacctcattgacggtcgaactgatgggtgtgggcacggagagcaaggtgtccgtgggcatcctgaatataaaattagagatgtaccctcctctcaaccaaaccctgtcccaggaagtggtaaatacccagctcgccctagaaaggcaaaagaccgcagagaaggagcgcctttttttggtatacgcaaaacagtggtggagagaatatctccagattagaccatcacataatagccggttggtgaaaatttttgctcaggacgagaacggaatcaaccggcctgtatgtagctacgtaaaacctttgcgggccggtcgcctgctcgatacacccagacaggcagcaaggttcgtaaacgtgttgggatacgaacgggcccccgtcatcggagggggggggaagcaggagcagtggtgcacgctcctggcctttctttgtcgaaacaaaggcgattgcgaagatcatgctaacctgctctgctcactattactcgggtacggcctagaggcgttcgtttgcgtgggcaccaaggctaaaggggtaccccacgcctgggtgatgacctgtggcaccgacggcgctattacattttgggaatctctcacggggcacagatacatacacaagcccacaaatcccgacgaacctcccgtcgccgaacagcccaaacctctttatccataccgtactatcggttgcgtgttcaatcatcaaatgtttctcggaaattgccagccctctgatgcagtcgagacctgcgtctttgatcttaatgatgagagcaaatggaagccaatgtcagaggaagcgataaagtccgtttgcgcccctggcgccaccacctccttacctccattccctcccctctgcgctagtacaatcgacgctagtgttacatcgaacgagattgagatgcagctgaggctgcttgtttccgaacatcgcaaggatctagggctgactacagtgtgggaggaccagcttagctatctcctttctcctgctctcgctagttacgagtttgagcggacaacctccatcagcgcaggaaacgaggagttccaggatgctatacggcgagcagtgcccgatgggcacaccttcaaaggatttccaattcacttcgtgtaccggaatgccaggcgagccttcgcaacgtgtctgaggtcacctttctgcgaggagatcatttgttgcaggggtgatcaagtgaggttagcagtgcgggtgcgagtgtttacgtatccagagtctgcttgcgccgtttggatcatgtttgcatgcaagtacagatctgttctgtag

SEQ ID NO: 22977 - DNA, 1500 bp, synthetic construct
  source 1..1500: mol_type = other DNA; note = Synthetic coding sequence
atgctggagcggccccccgccctggccatgcccatgcccaccgagggtaccccacctcctctgtctggaacacccatcccagtcccagcatactttaggcatgccgagcccggattttcgctgaaacggccccggggcctcagtcgctccctgccaccgccaccccctgccaaggggagtataccgattagtagactgttccctcccagaactccaggttggcaccaattacagccccgaagagtgtcgttccgcggagaagcttccgagactctccagtccccgggatacgatcccagccgcccagagagcttttttcagcagtccttccagaggctcagcaggcttgggcatggctcatacggcgaagtctttaaggtacggagtaaggaggacgggcgcctctacgctgtgaagcgctccatgagcccctttcgagggcccaaagacagagcacggaagcttgcagaggtagggagtcatgagaaggttggccagcacccctgttgcgtaaggttagaacaggcctgggaggagggcggcatactttacctgcagaccgaactgtgcggcccttctttacagcagcactgtgaggcatggggagcaagcctcccagaggcccaggtgtgggggtatctcagagatactcttctggctctggctcatttgcactctcagggcctggtccatctcgatgtcaagcctgcaaatatctttttgggacctaggggaagatgtaagttgggtgatttcggcctcctcgtcgagctgggaacagccggggccggggaggtccaagagggtgatcctcggtatatggcgccagagctcctgcagggaagctacggaactgccgccgacgtgttcagcttagggcttacgattttggaagttgcttgtaatatggagctgccacacggaggcgagggctggcagcagctcaggcaggggtacttgccccctgagtttactgctggcctctcctctgagctccgctccgttctggttatgatgcttgaaccagacccaaagctgagggcaacggcagaggctcttctggccttacccgtgctgcgtcagcctcgcgcatggggcgttctctggtgtatggcggcagaagccctgtcccgggggtgggccctgtggcaggctctcttggccctcctgtgttggctgtggcacggtctggcccacccagcaagctggctgcagcctttggggccgcctgcgacacccccaggaagcccgccctgcagcctgttgttggacagcagcctatccagcaattgggacgacgacagcctcggccccagtcttagcccagaggctgtcttagcacgtacggtggggtccacatccactccccgctccagatgcaccccccgggatgcgctggacctgtctgacatcaactcagagcctcccagaggatctttcccgtcctttgagcctcgaaacctcctgtccctcttcgaagatacccttgatccgacttag

SEQ ID NO: 22978 - DNA, 486 bp, synthetic construct
  source 1..486: mol_type = other DNA; note = Synthetic coding sequence
atggacgtgttcctgatgatccggcggcacaagaccaccatcttcacggatgctaaagagtcgtctacggtcttcgaactgaagagaatcgttgaaggtatactcaagcggccacccgacgaacaacgactctacaaagacgatcagctcctggatgatggcaaaacactgggagaatgcgggtttacctcccagaccgcgagaccacaagccccggccacagtcggtttggcatttcgcgccgatgacaccttcgaggccctgtgcattgaaccattttcatctccacccgagctcccagatgtgatgaagcctcaagatagtggctcctcagctaacgagcaggccgtgcatctccacgtccacagtcagacgatggctaaatcaaggaatacaagctggagtcaatgtccaggattaactgcctgctccactagggaaccacaggacggcccaacccaggtccaccccagatggggcttgtag

SEQ ID NO: 22979 - DNA, 1521 bp, synthetic construct
  source 1..1521: mol_type = other DNA; note = Synthetic coding sequence
atgaccggcgagaagatccggagcctgcggcgggaccacaagccctccaaggaggagggggatctactagaacccggggatgaagaggcggcagccgctctggggggcacctttacccggagtcggatcggcaaaggaggcaaagcgtgccataaaatctttagcaaccaccatcatcgcctgcagctgaaggcggcccccgctagctcaaatccacccggcgctccagcgttgccactgcacaactcctctgtcactgctaactcccagtcccccgccctgctggcaggtaccaacccggtggctgtagtcgctgacggtggttcgtgcccagcgcattatccggtgcacgaatgcgtctttaaaggggatgttaggagactttcaagtttgattcggactcacaatatcggccagaaggacaatcacggcaacacaccactgcacctcgctgtgatgctcggaaacaaggtcactgcgttgctgaggaaacttaagcagcagtcaagggaatcagtggaagagaagcgtcctcggctcttaaaggctctgaaggaattgggggacttttacttggaacttcactgggacttccaaagttgggtgcctttactgtctagaattttgccctctgatgcgtgcaagatctacaaacagggtatcaatatcagactggataccactctgatagatttcaccgatatgaaatgtcagaggggggatttaagcttcatttttaacggagacgctgctcccagtgagtcgttcgtggtgctcgataatgaacaaaaagtttatcaacggattcaccatgaagagtctgagatggagaccgaggaagaggtggacattctcatgagctcagatatctacagcgcaacattgagcacgaagtcaatatcatttactagggcccagactggctggcttttccgggaagacaaaaccgagagggttggcaactttctcgccgatttctacctggtaaacggcctcgtacttgaatcccggaagcgccgagagcatctgtctgaagaagatatattgcgtaacaaggccatcatggagagtctgagcaagggaggcaacatcatggaacagaacttcgaaccaatccggcggcagagcctaacaccaccacctcagaatactatcacatgggaggaatatatttccgccgaaaacggcaaagctccccacctgggtagggaactggtttgcaaagagtccaagaaaacgtttaaggcaacaatagcaatgagccaagagttccccctggggatcgagttattgctgaatgtacttgaggtggtggccccttttaagcactttaataagctgagagaattcgtgcaaatgaaactgccccccggctttccagtcaaactggatattcctgtgtttccaacgatcactgctaccgtaaccttccaagaattcagatacgacgagtttgacggatccatctttacaatccccgatgactataaggaggacccatcccgcttccctgatttgtag

SEQ ID NO: 22980 - DNA, 699 bp, synthetic construct
  source 1..699: mol_type = other DNA; note = Synthetic coding sequence
atgcagccccccgccccccccgccgagctggccgcccccctgcccagccccctacccgagcagcctctggacagtcccgctgctcccgccttaagcccaagtggtctcggacttcagcctggccctgagagaactagcaccacaaaatcaaaagaactcagtccagggtccgcacagaaaggctcccctggaagcagccaagggaccgcctgcgctggaacacagccaggggcccagcctggtgcccagcctggcgctagcccatccccctcccaaccaccagcagaccagtcacctcacaccctgcggaaggtgagcaaaaaactcgcgcctatcccgccaaaagttccattcggccaacctggcgctatggcagaccagtccgcgggccaaccatcccctgtaagcctgtccccaacgcccccatctacccctagtccttacggtctgagctacccacagggctatagtctagcctctggccagttaagccctgcagctgctcctcctctggcttctcccagcgttttcaccagcaccctgtctaaaagtcggcccacccctaaaccgcgtcagcgccccaccctgccacctccacagccacccacggtgaatctctctgcttcctctccccagtcgaccgaggcgcccatgctggacggcatgtccccaggagaaagcatgtctaccgcagtctag

SEQ ID NO: 22981 - DNA, 1221 bp, synthetic construct
  source 1..1221: mol_type = other DNA; note = Synthetic coding sequence
atgcaccccgccgtgttcctgagcctgcccgacctgcggtgcagcttactgctgctcgtgacatgggtgtttacaccagtaactacagagattacgtctctagataccgaaaacatcgatgaaattctgaacaatgcagacgttgccctggtgaacttttatgccgattggtgtcgattctcacaaatgctgcatcccatcttcgaggaagcctctgatgtaattaaagaggagtttcccaacgaaaatcaggttgtgtttgctcgggtggactgcgatcaacacagcgatatcgcacagagatatcgcattagcaagtaccctaccctcaagctcttcaggaacggcatgatgatgaagagagaatatcggggccagagaagcgtcaaagccctggccgactacataaggcaacagaaaagcgatccgattcaggaaatcagggatttagccgaaataacgacactggatcgttcaaagcgaaatatcataggatatttcgaacaaaaggacagtgacaattatagagtgtttgaacgagtcgccaacatcttgcacgacgactgcgcgtttctgtcagcattcggagatgtatctaaacctgagcggtacagcggggacaatatcatttacaaaccccctggtcacagcgctcccgacatggtatacctgggggccatgacgaacttcgatgtaacttacaattggattcaggacaaatgcgtgccgctggttcgggaaataacatttgaaaatggagaggagctcactgaggagggtctaccctttctgatacttttccatatgaaggaagatacagaatctctggaaatatttcaaaatgaggttgcccgtcaactcatttccgagaaagggaccatcaactttttacacgccgactgtgacaagttccgtcaccctttgttacatattcagaagacccccgcagactgcccagtgatcgcaatagacagcttcaggcacatgtatgtcttcggcgactttaaagacgttctgattcccggcaagctcaaacaattcgtgttcgatctccattcaggaaagctgcacagagagtttcatcacggccctgatcccaccgacaccgctcccggggaacaggcccaggacgtagcctccagtccccctgaatcgtcattccagaaactggctccctctgaatacaggtacaccctgttgagagaccgcgacgaactgtag

SEQ ID NO: 22982 - DNA, 5601 bp, synthetic construct
  source 1..5601: mol_type = other DNA; note = Synthetic coding sequence
atggaccccgtgggcctgcagctgggcaacaagaacctgtggagctgcctcgtgcgactgctcaccaaggatcctgagtggctgaatgcgaagatgaaattctttctgccaaacaccgatctggattcaaggaacgagacacttgacccagagcaaagagtgatcctgcagcttaataagttgcacgtgcaaggaagtgatacatggcagagcttcatccactgtgtctgtatgcaactggaggtgccactcgaccttgaagttctgctgctgagcaccttcggctacgacgacggtttcacctctcagttaggcgccgagggaaagagccagcccgaatctcagcttcaccatggcttaaagcggccacaccagtcatgtggtagctcccctcgccggaagcaatgcaagaagcaacagttggaactcgctaagaagtatttacagctcctgcggacatccgctcagcagcggtaccgtagccaaatcccaggcagcgggcaaccccatgctttccaccaggtctacgtgccaccaatccttaggcgggctactgcatctctggatacaccggaaggtgctattatgggcgacgtcaaggtggaggacggggccgacgtgtccatttctgacctgtttaatacaagggtcaacaagggcccccgcgtcaccgtcttgctgggaaaggcaggcatggggaaaaccaccttggctcaccgcttgtgccagaaatgggccgaagggcacctgaattgtttccaagccctcttcctctttgaattcaggcagctgaacctgatcacacgtttcttgaccccctcggaattgttgttcgatctgtatttgtctccagagtcagatcacgacactgtattccagtacctcgagaagaatgccgaccaagtactgctgatcttcgacggcctggatgaggcactgcagccgatggggccagatggtcctggacccgtgttgacattgttttctcacttgtgcaatggaacacttctgcctggctgcagagtgatggctacctctagacccggaaaattgcctgcttgcctccctgctgaggccgctatggtccacatgctcggcttcgatggcccgcgcgtcgaggaatatgtcaatcacttcttttccgcccagccctcccgcgaaggagctctggttgaactccagaccaatggaagactccggagcctttgcgctgtgcccgcgctttgtcaggttgcttgcctctgccttcaccacctcttgcccgaccacgcacctggccagtctgtggccttgttgccaaatatgacccagctctacatgcagatggtgttggccttgagcccacctggtcacctgcccacaagctcactgctcgacctcggagaggtggctctgcgtggtctggagacaggtaaagtaatcttctatgcaaaagacatcgccccccccctgatcgccttcggagcgacacactccctgctgaccagtttctgtgtatgtaccgggccaggtcaccaacagactggttatgcctttacgcatttgtcactgcaggagttcctagccgccctacacctcatggcatccccaaaggttaataaggacacactaacccagtatgtcaccctacactccaggtgggttcagaggacaaaagccagactagggttgagcgatcacctgcctacttttctggcaggtttggcctcctgcacctgtcggccgtttttgtctcatctagcacagggcaacgaagattgcgtgggggctaaacaggccgctgtggttcaggtgttaaaaaagttggcgactcgcaagctcaccgggcctaaagtcgtagagttgtgccactgtgtcgacgagacccaggagccagagctggcttcgctcactgcacagagcttgccttaccaactaccgttccataattttcctctgacctgtacggacctcgcaacacttacgaacatccttgagcatagagaagcgcctatacacctggattttgacgggtgcccgctggagccgcattgtcccgaggctctggtggggtgtgggcagatcgagaatctctcgtttaaatctagaaaatgcggggatgctttcgctgaggctctttcccgaagcttacctacaatgggtaggctacagatgttgggtctggcagggtcgaagataaccgctagaggcatctcccacctcgtgaaggcactgccactgtgtccacagctcaaggaggtcagctttcgcgacaaccagctatcagatcaggtggtactcaatattgtggaagttctgccccaccttccacggttacgtaaactggatttgagtagtaatagtatatgtgtctctaccctcctctgtttggctcgtgttgcagtgacttgccccacggtacgtatgctccaggcacgcgaggcagacctgatatttctcctctcacctccgaccgaaactaccgccgagctgcaaagggcacctgatctacaggaaagtgatggacaacgcaaaggcgcccaaagtcgaagcctgactctgagactccaaaaatgccaattgcaggtacatgatgccgaagcactcatcgctctcctgcaggagggcccacatctggaagaagtggacctttccggtaatcagttggaagatgaggggtgtcggctgatggccgaagcagcctcgcaattacacatagcccggaaactggacctatcaaataacgggttatcagttgccggggtgcactgtgtactccgggctgtgtctgcctgttggaccctggccgagctgcacatcagtcttcagcacaagactgtcatattcatgtttgcgcaagagccagaggagcaaaaaggacctcaggagcgggccgctttcctcgactcacttatgctacagatgccttccgaactaccattgtcctcccgccgtatgcggctgacccactgtggactgcaagagaagcacttggaacagctttgtaaagctctcggcggcagctgccacctgggacatctgcacctggacttctccggtaacgcactgggggatgagggagccgcccgtctggcccagctgcttcctgggctgggagccctccagagcctcaatctttcggagaatgggctctcgctggacgccgtgttgggcctggtgagatgtttttcaactctccagtggttgttcaggctcgatatcagctttgagtctcagcatattctgctacgaggtgacaagacatcccgggacatgtgggctactggcagtctgccagattttcctgctgctgccaagttcctgggattccgtcagcgttgtatccctcgatctttatgcctgagtgaatgtcccctagagccccccagccttactagactgtgtgcaactttaaaagattgccctggccctctggagcttcaattaagctgcgaattcctgtccgatcagtccctcgagacactgctcgactgcctgccccagttaccacaactcagcctgctgcagctctcacagaccgggttgtcgcctaaatccccgttcctgctggccaataccttgtccctatgcccgcgagttaaaaaggtggacctaagaagcttacatcatgctacactccattttcggtcaaacgaagaagaagagggcgtgtgctgtggccgctttaccggttgctcactgtcgcaggaacacgtcgaatccctatgttggttgctgagcaagtgcaaagacttgtcccaggttgacctgagcgctaatctgctcggagatagtggactgcgatgcctgctcgaatgtttacctcaggttcctatatcaggtcttctggatctttcccacaactcaatatcccaggaatcagcactgtacctgctggagaccctgccttcctgtcccagggttagagaagcttcagtgaatctcggcagtgagcagtccttccggattcatttctcaagagaggatcaagcgggtaagaccttgagactgagcgagtgctcgttcaggccagaacatgtgagccgtcttgccacaggtctgtccaagtctctccaactgaccgagttgaccctgactcagtgttgcctgggacagaagcaactcgcaattctgctgagcctggttggacggcctgcagggttgttctccctgagggttcaagagccatgggccgacagggctagagtgctatccctgctagaggtgtgcgcgcaggcaagcggatcagtgaccgaaatcagtatttctgaaacacagcaacagctttgtgtacagcttgagttcccacggcaggaagagaatcctgaagctgtggccttgcgactcgcgcattgcgatttaggagcacatcactccctcctggtgggccaactcatggaaacctgtgcccggctgcaacagttgagcctctcacaagtcaacctgtgcgaagacgacgatgctagtagcctcctgttacagtcgcttcttttaagcttgtcggaactgaaaacattccgtctaaccagcagctgcgtctctacggaaggactcgcgcacctggcctccggcctgggccactgtcatcacttggaggagctggatctgtcaaataaccagttcgacgaggagggtacaaaagccttgatgagagccctcgaagggaagtggatgctaaagcggctggacttgtcgcacctgctcctgaattcttccaccctagcccttttgacccaccgcctaagccaaatgacatgtctgcagtccctcaggctgaacaggaactctataggggatgtcggttgctgccacctgtccgaggcgctcagggccgccacatcccttgaggaactggacctttctcataaccagattggagacgccggagtccagcatctcgcaacaattctgcctggacttcctgagctgagaaagattgatctcagtggtaactccatttcaagcgccggcggggtgcagctggcggaaagccttgtgttatgcagacggcttgaggagttgatgttaggctgtaacgctttgggagatcctacagcgcttggactggcccaggagctgccgcagcacctgcgagtattgcaccttccattcagccacctagggcccggtggagccctgtccttagctcaggcgctcgacggctcaccacatctggaagaaatctccttagccgagaacaacctcgccggcggagtactgcgcttctgtatggaacttcccctgctccgccaaatcgacctggtttcgtgtaagatcgacaaccagactgccaaactccttacctcatcttttacatcctgtccggcgctcgaggtgatcctcctgtcctggaatctgctgggcgacgaggctgcagccgagctggcccaggttctgccccagatgggtaggttgaagagagttgacctggagaagaatcaaatcacggctctaggtgcttggctgttagcagaaggactggctcaggggtcaagcatacaggtcatccgcctctggaataaccccattccctgcgatatggcacagcatcttaagagtcaggagccacgtttggacttcgccttctttgataaccagccacaggcaccttggggcacttag

SEQ ID NO: 22983 - DNA, 897 bp, synthetic construct
  source 1..897: mol_type = other DNA; note = Synthetic coding sequence
atgatgaacgtgaacacccggggcacctacctggccagcaaggcctgcatcccgtacttgaagaagagcaaggtggcacacatactgaacatctccccccccctaaatttgaatccagtgtggttcaagcagcactgtgcttacacaatcgcaaaatacggaatgtcaatgtatgtactggggatggcagaagaattcaaaggcgagatcgccgtgaatgccttgtggcccaagaccgccattcacaccgccgccatggacatgctcggaggacctggcattgaatctcagtgcagaaaagtcgacattatcgccgacgccgcctactctattttccagaaaccaaagagcttcaccgggaactttgtaattgatgagaatatccttaaggaagaaggcattgagaacttcgacgtttatgccatcaaacctggtcacccgctgcagcctgacttcttcctggacgagtatcccgaggccgtgagtaaaaaagttgagtctacaggcgcagttcccgagtttaaggaggagaagctccaactacagccaaagcctcggtcaggagccgtggaggaaacgttccgtatagtcaaagactcgctttctgacgatgtagtcaaagccacccaggccatttacctgttcgaattgtcaggcgaagacgggggaacttggttcctagacctcaagtcaaaaggtggcaatgtaggctacggggagcccagcgatcaagcagatgtagttatgtcgatgaccaccgatgattttgtgaagatgttctctggtaagttgaaaccgacgatggcgttcatgagtggaaagcttaaaattaaggggaatatggctctggccattaagctggagaagttaatgaaccagatgaacgccaggttatag

SEQ ID NO: 22984 - DNA, 4026 bp, synthetic construct
  source 1..4026: mol_type = other DNA; note = Synthetic coding sequence
atgtggcggcggaagcacccccggaccagcggcggcacccggggcgtcctcagcggcaatagaggtgtggaatatggttccggccgtgggcatctcggaaccttcgaaggtcgatggaggaaactgcctaaaatgcccgaagccgtaggaaccgatccaagtacctctaggaaaatggccgaattagaggaagtcactctggatggtaagccgttacaggcactacgcgtcacggatctcaaggccgccctggagcagcgtgggctcgcaaaatccggacagaagagcgccttagtgaagcggctgaaaggagcattgatgctggagaacttgcaaaagcattccacgccacacgcggcctttcaaccgaatagtcagatcggggaagaaatgagtcagaactcttttattaagcagtaccttgagaagcaacaggaacttttgcgtcagaggctggagcgagaagcccgcgaagctgcagaactagaggaagccagcgctgagtctgaggacgaaatgatccatccagagggcgtggcctccctcctgcctcctgactttcagagtagcctggaaaggccagaactcgagcttagtcgccatagcccccggaaatcatcctccatcagcgaggaaaagggcgatagcgatgatgaaaaaccccggaaaggagaaagaaggagctctcgggttagacaagctcgcgcagccaaactgtcagaggggtcacagcccgcggaggaggaagaggatcaggagacccctagtaggaacctgagggtgcgtgctgaccggaatcttaagactgaggaagaggaagaagaggaagaggaagaggaagaggatgacgaggaggaggagggtgacgacgaagggcagaaaagtcgtgaagcccccattcttaaagagtttaaagaggagggcgaggaaatcccacgggtgaagcctgaagagatgatggacgaaaggccaaagacgcgcagccaggagcaggaagtgttggagcgtggcggccgctttacacggagtcaggaagaagctagaaaatcacacctggcacggcaacagcaggagaaagagatgaagaccacttccccacttgaagaggaagaacgcgaaataaaatcctcccagggcttgaaggagaagagcaagagccccagcccccctagacttacagaagatcgcaaaaaggcctcactggtagccctgccagagcaaaccgcctcggaggaagagacacctcccccactgttgactaaggaagcctcctcgccgcccccccatcctcagcttcacagcgaagaggagatcgaacctatggagggtcctgctcccgccgtgctgattcaactctcccccccaaatacagatgccgacacacgggaattgctggtgagtcagcacactgtgcaactggtgggtggacttagtccactttcatcaccctccgataccaaggccgagtcccctgcagagaaagtgcctgaggagtcagttcttccgcttgtacagaagtccacattggccgactactccgcccagaaagaccttgaaccagaatctgatcgatcagcgcaacccctgcccctcaagatcgaggagcttgctttagcgaagggcattaccgaggaatgcctgaagcaacctagcctggaacaaaaagagggccggagagccagtcacactctcctgccaagccatcgcctgaaacaatccgctgatagttcatcttcaaggtcaagcagctcatcatcttcatcttccagatcccgcagccggtcccccgacagcagcgggtcccggtcccattctcccctgagaagcaaacagagagatgtcgctcaggcacggacgcatgccaacccaagaggcaggccaaaaatgggcagcaggtcgacctctgaaagcagaagtagaagccggtcgaggtctcgttcggccagcagtaactctagaaagtcactgtcaccgggggtttctcgggactccagtactagctatactgagaccaaagacccttcttcgggccaagaggtagcaacaccgcctgttccgcagctccaggtgtgcgagcccaaagaacggacatccacgagtagcagcagtgtccaggcaaggcgtctgtcccagcctgaaagcgctgagaaacatgtcacccagaggctccagcccgaacggggtagccctaagaagtgtgaggccgaagaggcagagccacctgcagccactcagcctcagacctcagaaacacagacctcgcatctgcctgagtctgaacggattcaccacacagtcgaggaaaaggaggaggtgactatggataccagcgagaacagacccgaaaatgacgtaccagaaccacctatgcctatcgccgatcaagtcagcaacgacgaccggccggaggggtccgtcgaagacgaagagaagaaagagagctcgctccctaagtctttcaagcgcaaaatcagtgtcgtgagcgcgacaaagggtgtccccgccggcaattcggacacagaaggaggtcaacctggccgtaagcgacgctggggcgcttccacagccaccacacagaaaaaaccgtcaatcagtattacaaccgagagcttaaagagcctgatcccagacatcaagcccctggctgggcaggaagctgttgttgatcttcacgctgacgattcaagaatctctgaagacgaaacagaacgcaatggcgatgacgggactcatgacaagggcctgaaaatatgccggacagtcacccaagttgtccctgcggagggccaagaaaacggacagcgcgaagaggaagaggaggagaaagaaccggaagctgagccccctgtcccgccacaggtgagcgtcgaagtcgcgctgccgccgccagccgaacatgaggtgaagaaagtcacactcggcgatacattgactcggaggtccatcagtcagcagaaatcgggggtcagtatcacaatcgatgacccagtgaggaccgcccaggttccgagtcccccacggggtaagataagcaatattgtacatatctcgaatctggtgcgaccgttcaccctggggcagcttaaggaactgctggggaggactggaacactcgttgaggaagctttctggattgacaagattaaaagccactgcttcgttacgtactcaacggtggaagaagcagtcgctactcgtacagcgcttcacggcgtgaagtggccgcaaagcaaccctaaattcctctgtgccgactacgcagagcaggacgaactggactatcatcgcggtctgctcgtcgacagaccttcagagacgaagactgaggaacaggggatcccacgcccgctccatccacccccaccccctcccgtgcagcctccccagcaccccagggccgagcagcgagaacaagaacgtgctgtccgggagcagtgggcggaacgtgagcgcgaaatggagcgacgggaaaggacacgctcggagcgcgaatgggaccgagataaagtacgggaggggccaagatctaggtctcgatctagggacaggcggagaaaggagcgtgctaaatccaaagaaaaaaagagtgagaagaaggagaaggcccaagaggaacccccagctaagctcttggacgatcttttccggaagacaaaggccgccccttgtatctactggcttcctctgacagattcccagatcgtccaaaaagaggccgagcgggcagagcgcgcaaaggagagagaaaagcgaagaaaagagcaggaggaagaggagcaaaaggaacgggaaaaagaggcagagcgcgagagaaacaggcagctagaacgggaaaaaaggcgggaacatagcagggagcgagacagagagagagagcgggaaagagaaagagaccgaggcgatcgagaccgggacagagaacgcgatagggagcgagggagggagcgcgacagacgggatacaaagaggcacagtagaagccgtagccgcagcacgccagttcgggaccgggggggaagacggtag

SEQ ID NO: 22985 - DNA, 600 bp, synthetic construct
  source 1..600: mol_type = other DNA; note = Synthetic coding sequence
atgagcagcggcaacgccaagatcggccaccccgcccccaacttcaaagctaccgctgttatgccagatggccaatttaaagacatttcactcagcgattataaaggtaaatatgtcgtatttttcttctaccccttggacttcactttcgtgtgtcctacagaaatcatcgcatttagtgaccgcgccgaagagtttaaaaaactgaattgccaggtgattggagcctctgtcgactcacacttctgtcacttggcctgggttaatacccctaagaaacagggcggtctcggtcccatgaatattcctttagtgtctgatcctaagcgaaccatcgcccaagactatggggtgttgaaagctgatgaaggcatttctttcagaggactctttataattgacgacaaggggattctgcggcagatcacagttaatgatctgcccgtgggccgttcagtcgacgagaccctgcggctggtgcaggcatttcagttcaccgacaagcacggcgaagtgtgtcctgccgggtggaagcctggaagcgataccataaagccagacgtgcagaagagcaaggaatactttagcaaacagaagtag

SEQ ID NO: 22986 - DNA, 1077 bp, synthetic construct
  source 1..1077: mol_type = other DNA; note = Synthetic coding sequence
atggagaagaagaagatggtgacccagggcaaccaggagcccaccacaacccccgatgcaatggtgcagccgtttaccaccatcccattccctccccccccacagaacgggattcccacggagtacggggtcccccacactcaagactacgcaggacagactggggagcacaatctaaccctttatgggtctacacaggcccatggtgaacagagcagcaacagcccgtcaacacagaatgggtccttgaccaccgaaggcggggcgcagactgacggacagcagtcccaaacccaaagctcagaaaactccgagagtaagtctactccgaagaggctgcatgtaagcaatatcccctttaggtttcgagatcctgatctgcgccagatgttcggaggatttggatttgtgaccttcgagaattctgccgacgctgaccgcgcccgggagaagttgcatgggaccgtggttgagggcaggaagattgaagtgaataatgccactgccagagtgatgactaataaaaagatggtcactccatacgctaatgggtggaaacttagtccggtcgtgggcgcggtgtatggacccgaactgtatgcagcgagctcctttcaggccgatgtctccctggggaatgacgctgcagtacccctttcagggaggggagggatcaacacatacattcctctaatcattccaggcttcccttacccaaccgccgccaccacagctgccgctttcaggggcgcccacctacgggggaggggccgaactgtctatggcgcagttagggcagtaccccctacagccatacccgcctaccccggcgtggtataccaggatggattctatggtgccgacctgtatggaggctacgccgcctaccgatacgcacagcctgccacggctactgctgctacggccgcagcggccgccgccgctgcatatagtgatgggtacggaagggtgtatactgctgacccatatcacgcattagcccctgcagcctcttatggcgtgggagctgttgcgtccctttaccggggggggtactcccgattcgccccttactag

SEQ ID NO: 22987 - DNA, 1596 bp, synthetic construct
  source 1..1596: mol_type = other DNA; note = Synthetic coding sequence
atgagctaccccgccgacgactacgagagcgaggccgcctacgacccttacgcgtacccttcagattacgacatgcatacaggcgacccaaagcaggatctagcctatgagcgacaatacgagcagcagacttatcaggtgatccctgaagtcatcaagaacttcattcagtacttccacaagaccgtgtctgatttgattgaccagaaagtgtacgaactccaagcatctagagtcagttccgacgtgatcgaccagaaggtgtatgaaattcaagatatttatgaaaacagctggacaaagctgaccgagagattcttcaagaatactccctggcccgaggctgaggctatcgcccctcaagtgggaaatgacgctgtcttcctcatattgtataagatccttcaggcccacggccccgctcccctggagttaccaaatcagtggctttgggatatcatcgatgagttcatttaccagtttcagtccttttcacagtacaggtgtaagacggctaagaaaagtgaggaggagatcgatttccttaggagcaatcccaagatttggaacgttcactctgtattgaatgttttgcattctctggttgataagagcaacattaaccgacagctggaagtctacacctcgggaggtgatcccgaatcagtagctggggagtatggacgccactccctgtacaagatgctgggctacttctctctggtgggactgctccggctccactcactgctgggagactactatcaggctattaaagtattggagaatatcgagttaaacaaaaagagtatgtactcgcgggtgccggagtgccaggtgactacatactattatgttggattcgcttacctgatgatgagacgctaccaggatgcaatccgggtgttcgccaatatactgctgtatatacaaaggacaaaaagtatgtttcagcgcacaacatacaagtatgagatgatcaacaaacaaaatgagcagatgcatgcattactagcgatcgccctgaccatgtatcccatgcgaattgacgaatctatccatctacagctgagggaaaagtacggggacaaaatgctcaggatgcagaagggcgatccacaggtctacgaggagctgttctcttacagttgccccaagttcttatcccccgtggttccaaactacgataacgtgcacccaaattatcataaggagccatttctgcaacagcttaaggttttctctgatgaggttcaacaacaggcccaactgagtactatcaggtcctttctgaagttgtacactacaatgcccgtggccaagctcgccggctttctagacctgacagagcaggagtttaggatacaactcttagtgttcaaacataagatgaaaaacttggtttggaccagcgggatatccgccctcgacggtgaatttcagtctgcttcagaagtggacttctacattgacaaagacatgattcacattgcagatacaaaggtggccagacggtatggagacttcttcattagacagatacacaagtttgaggaattaaacagaactctgaagaagatggggcagcggccatag

SEQ ID NO: 22988 - DNA, 5952 bp, synthetic construct
  source 1..5952: mol_type = other DNA; note = Synthetic coding sequence
atgagcggcaacaagcggggcagccgggccagctgcccccaccggggcgcggagtgtttactaccttgggcagccctgaatctgcagggcttccaactgttgctcctccacccatcagccacagccatgatggacgtgtcagaattgggcgagtccgctagatacttaaggcagggatatcaagagatgaccaaagtgcacactattccttgggacggcaagaagagggtttgggtgcctgacgaacaggatgcctatgtagaggcagaagtgaagagcgaagccaccgggggccgggtaacagttgagaccaaagatcagaaggtgcttatggttcgggaggctgagctccaacccatgaatccacctaggttcgaccttcttgaagatatggccatgatgacgcatctgaacgaggcttctgtgctgcacaacttgcgccaacgatatgcccgatggatgatctatacgtacagtgggctgttctgtgtcaccattaacccttacaagtggcttcccgtctataccgcgagcgtggtcgccgcttataaaggtaaaaggagaagcgactctcccccccacatttacgccgttgctgacaacgcctataacgatatgcttagaaatagagataatcagtctatgctgattaccggggaatcaggtgcaggcaaaacggtaaataccaagagggtgatccagtacttcgcaatagtcgccgcattgggcgacggtccgggaaaaaaagcacagtttctggctaccaagacaggcggtactctggaagaccagattatcgaggctaaccccgccatggaagctttcgggaatgctaagactctccggaacgacaatagcagtcgcttcggtaagtttatccgcatccatttcgggcccagcggcaagctcgcgtcggccgatatcgacagctacctcctagagaagtcacgtgttatcttccagctgcccggcgaaaggagctatcacgtgtattaccaaattctgtccggacgtaaacccgagcttcaggatatgctactgctctccatgaatccttacgattatcatttttgctcccagggagttattaccgtcgataacatgaacgacggagaagagctcatcgcaacggatcatgccatggatattctcgggttttcagtagacgagaaatgtgcctgctataaaattgtgggagctctgctccattttgggaacatgaagttcaaacagaaacagcgggaagaacaggctgaagccgacggaactgagtctgctgataaagccgcatacctcatgggcgtatcatccggggacctcctgaaaggcttgttgcatcccagagtgagggtaggtaatgaatatgtgactaagggtcaaagcgttgagcaggttgtgttcgcggtgggggccttggcaaaagcaacatatgacagacttttccggtggttggtgagccgcattaaccagactttagataccaagctccctagacagtttttcatcggcgtcctcgatatagctggatttgaaatattcgagtttaatagttttgagcaactctgcatcaatttcaccaatgagaagctgcagcagttctttaatcagcacatgtttgtgctggaacaggaggaatacaaacgggagggcattgattgggtattcatagacttcggcttagatctgcagccttgcattgatctgatcgaaaagccgttaggaattttaagtatcctggaggaagaatgtatgttccctaaggcctcggacgctagcttcagggcaaaactttacgataatcacgccgggaagtccccaaacttccaacaacctcgacctgacaagaagagaaagtatcaggcacattttgaagttgtgcattatgccggagttgtcccctatagcatcgtgggttggctggaaaagaataaagaccctctgaacgaaacggtggtgccaatcttccagaagagtcagaatcggttgttggccacgctttacgaaaactacgctggcagctgtagcaccgaaccaccaaaatctggagtgaaggagaagagaaaaaaagccgcgtcctttcagacagtgagtcagttgcacaaggagaatcttaataaactcatgacgaatctgcgagccacccagcctcatttcgtgaggtgcattgtgccaaacgagaacaagacccccggagtgatggacgcgttcctggtgctgcaccaactgcggtgtaacggggtcctggaaggtattaggatatgcagacaggggtttccgaatcgcctactgtacacagacttccgacagcgatacagaatactcaatccctcagctatcccagacgacacctttatggatagcagaaaggccactgaaaagttgcttgggagtctggacttggaccacactcaataccagttcggtcatacgaaggtttttttcaaagcaggcttgttgggggttctggaagagctccgagaccaaaggctggcaaaggtgctcaccctcttacaagcccgttctcgcggccgccttatgcgccttgagtatcagagattgctgggcggtagggacgccttatttacaatccagtggaatatccgcgcgtttaacgctgtcaaaaactggtcctggatgaagttgtttttcaaaatgaagccactacttcgtagtgcacaggccgaagaggagctggccgccttgagagctgagttaaggggattgcgcggtgctctcgcagcggccgaggctaagaggcaggaactcgaggaaacccacgtgtcaatcacacaggagaagaacgacctggccctgcagcttcaggctgaacaggataatctcgctgacgcggaggagcgctgccacctgctgataaaaagcaaagtacagctggagggaaaagtgaaggagctgtccgagcgcctcgaggatgaagaggaagtgaacgccgaccttgctgcacgccggcgaaaactggaggacgagtgtaccgaattgaaaaaagatatcgatgatctcaaattgaccctggccaaagctgagaaggagaaacaggccacagagaacaaagtcaagaacctgactgaagagatggcggctctggatgagtctgtcgcccgcctcacaaaggagaagaaggccctacaggaggcccaccagcaggctctgggagatcttcaggctgaggaggatcgtgtgtcagctctgacaaaggctaagctgagactggagcagcaggtggaggacttggagtgcagcctggagcaggagaagaagcttaggatggacaccgaacgggccaaaaggaagctggagggcgacctgaagctgacccaggagtcagttgccgacgccgcccaggacaagcaacagttggaagaaaagctgaagaagaaggacagcgagcttagtcagctgagcttgagagtggaggacgagcagctgcttggcgcccagatgcagaagaaaattaaagaactgcaggcccgcgctgaggaattggaggaggagctcgaggctgaaagagctgcccgggctcgagtggaaaaacagcgagcagaggcagcccgtgagctggaggagcttagcgagcgactggaggaggctgggggcgcttctgccgggcagagggagggatgccgcaaaagggaggccgaactcggaaggctgcggcgggagctggaggaggccgctctacggcacgaggccactgttgccgccttacggcgcaaacaggccgagggcgcagctgaattgggcgagcaggtcgactccctgcagagggtgcggcagaagcttgagaaggaaaagtctgaactgcgaatggaggtcgacgatttggcagccaatgtggagactctcacccgcgccaaggctagcgcagaaaaattgtgtcgaacatatgaggatcagctttcagaggccaagataaaagtggaagaactacagcggcagttagcagacgcttctactcagcggggaaggctccaaaccgaatcgggcgagctctcaaggctgctggaggagaaagagtgcctaatttcacaactgtccaggggaaaagctctggcagctcagtcactggaggagttgaggcggcagctggaggaggagtctaaggctaagtctgctttggcccatgctgtgcaggctcttcgccacgactgcgacctgctgcgcgagcagcacgaggaggaggcagaggctcaggccgagttgcagcgcttgctgagtaaagctaacgctgaggtagcacagtggaggtctaagtacgaagccgatgcaattcaaagaaccgaggaactggaagaagccaagaagaagttagccctgcgactccaggaggccgaggaaggtgtcgaagcagccaacgcaaagtgttcaagtctggaaaaagccaaattaaggttgcagaccgagtccgaagatgtgacactggagcttgagagggccacttcggctgcagcggccctggacaaaaaacagcgacatcttgagcgcgcactggaggagaggcgcagacaggaggaagagatgcaacgggagctggaggccgcccagagagaatcccggggcctcggtacagagctgttcaggcttagacacgggcatgaggaagcactggaggcactcgagaccctcaaacgcgagaacaagaacttgcaggaggagattagtgatctgaccgaccaagtgagcctgagcggcaagagtatccaggagctggaaaagaccaaaaaagccctcgaaggcgaaaaaagtgagatccaggcggctcttgaagaggccgaaggtgccctggagctagaggagaccaagaccctgaggatacagctcgagttatcacaggtcaaagctgaagtagacagaaaactggcagagaaagacgaagaatgcgcgaacctcaggagaaatcatcagcgtgccgtggagagtctacaggcaagtctcgacgctgaaaccagggcccgaaatgaagccctccgactgaagaagaagatggagggtgacctgaatgatcttgagctccagctcggccacgccactcggcaagctaccgaggcacaggccgctactcgcttaatgcaggcacaactcaaggaagaacaggccgggagggatgaagagcagcggttggcagccgagcttcacgagcaggcacaggccctcgagcggcgggcttcgctactggccgccgaactcgaagaactgcgcgctgccttggagcaaggagagcgaagcagacgattagccgagcaagaactgcttgaggctacagaacggctgaatctgctccactcccagaacacgggcctgctgaatcaaaagaagaagctcgaggccgatttggcgcagttgagcggggaggtcgaggaagccgcccaggagaggagagaagcagaggaaaaagcaaaaaaggctatcacagatgcagctatgatggctgaagagctaaagaaggaacaggacacctctgctcacctggagagaatgaagaaaacccttgaacagaccgttagagaactgcaggcccgcctggaagaggccgaacaggctgcacttagagggggaaagaagcaagtgcaaaagctggaggccaaagttcgggagctggaagccgagttagatgcagaacagaaaaaacacgcagaagccctcaaaggcgtgagaaaacatgagcgccgcgttaaagagctggcttatcaggccgaggaggatcgaaagaacctcgctcgtatgcaagatctggttgacaagttgcagtctaaggtgaagagctataagaggcagttcgaggaagcagagcaacaggccaacacaaatctggccaagtataggaaggctcagcatgagttagacgatgctgaggagcgagctgatatggctgagacacaggccaacaaactacgtgcccgcactagggacgccctgggtccaaaacataaggagtag

SEQ ID NO: 22989 - DNA, 2730 bp, synthetic construct
  source 1..2730: mol_type = other DNA; note = Synthetic coding sequence
atggagcgggccatggagcagctgaaccggctgacccggagcctgcgcagggctcggacagttgagctgcccgaggacaacgagaccgcagtctataccctgatgcccatggtgatggccgaccaacacaggagtgtaagcgagctgttaagcaactctaagttcgacgtgaattacgcgttcggccgcgtgaagcggtctctcctgcacattgcagcaaactgtggctctgtagagtgccttgtcctcctgctgaaaaagggtgcgaacccgaactaccaagacataagcggttgtaccccactgcatctggccgcgagaaatggacagaagaagtgtatgtcaaagttattagagtattcagctgatgttaacatttgcaacaacgaggggttgacagcaatccactggttagcggttaatgggcggaccgagctccttcacgatctagtacaacacgttagcgatgtggacgtggaggacgccatgggtcaaacggccctgcacgttgcatgccaaaatgggcataaaactaccgtgcaatgtctgctcgacagtggcgcagatataaacaggcccaatgtcagtggagcaactcctctctatttcgcgtgttctcacggccagcgggacactgctcagatactcctcctccgtggagccaaatatctccctgataaaaacggggtcactccgttagatctctgtgttcagggtgggtatggagagacttgcgaggtcttgatccagtatcatcctcggttgtttcagaccataattcaaatgacgcagaacgaagacctaagagaaaatatgctccgccaagtcctcgagcacctgtctcagcaatccgaatcccaatatctaaaaatattgaccagtctggcagaggtggctacaaccaatggccacaagttacttagcctttcgagtaattacgacgctcaaatgaagtccctactaagaatcgtgaggatgttctgccacgtttttcgtattggtccatccagcccctcaaatggcattgacatggggtacaatggaaacaagacacctaggtcccaagtgttcaagcctctggaactactgtggcactccttggacgaatggctggtactgatcgcgacggaacttatgaagaataagagagatagtacagagataacttcaattctgctgaagcagaagggccaggaccaagacgcagcttccatccctcccttcgagccacctggacccgggagctacgagaatctttcaactggcacccgcgagtccaaacctgatgcccttgccggccgacaggaggccagcgcagactgtcaggatgttatcagcatgaccgctaaccggctcagcgcggttatacaggctttttacatgtgttgttcatgtcaaatgcccccaggaatgacaagtccaagatttatagaatttgtgtgcaaacacgacgaggttctgaagtgctttgtgaatagaaatcctaaaattatctttgatcacttccattttctgctggaatgtccagagcttatgtctagattcatgcacattattaaggcccaaccctttaaggaccggtgtgaatggttttacgaacatcttcactccgggcagccagactcagatatggtccaccgccctgtgaatgagaacgatattttactcgtgcatagggactccatctttcgatcctcatgtgaggtagtgtccaaagcaaattgcgctaaactgaaacagggcatcgccgttcggtttcacggggaagaaggcatgggacaaggggtggtgagagaatggttcgacatactgtctaatgaaattgtgaatcctgactacgccttatttacacagtccgccgacggcaccacattccagccaaacagcaattcatatgttaacccagaccaccttaactatttccgcttcgcaggccagatcctaggactggctttgaaccaccggcagctggtgaatatatactttacacggagcttctacaagcacattctcggaatcccagtgaattaccaggatgtggcctccattgaccctgaatatgctaagaacttgcagtggatcctggacaacgatataagtgacctgggattggagctgacattctctgtggagacagacgtgttcggtgcaatggaggaggtgcctcttaaaccaggaggcgggtctattcttgtgacacaaaacaataaagccgaatacgtccaactagttaccgagctgcgcatgactcgtgccatccagcctcagataaacgcttttttgcaggggttccacatgttcattcccccttccctgatccaacttttcgatgagtatgagctggagctcctgctctcaggtatgcctgagatcgacgtgagcgattggataaaaaataccgagtacacaagtggttacgagcgtgaagaccctgttattcagtggttctgggaggtggttgaagacatcacgcaggaagagcgtgtgcttctgctgcagttcgtcaccgggagtagccgggtgccgcatggcggatttgcaaatattatgggaggtagcggcctgcagaactttacgattgctgctgtgccatacacccccaaccttttacctaccagctccacatgcatcaatatgttgaagttacctgaatacccatctaaagagatcctgaaggataggttgctggttgctctccattgcggcagttacggatacactatggcatag

SEQ ID NO: 22990 - DNA, 2679 bp, synthetic construct
  source 1..2679: mol_type = other DNA; note = Synthetic coding sequence
atgcggaaggtgaagaagctgcggctggacaaggagaacaccggctcgtggcgcagttttagtctgaactcagaaggggctgagcgcatggccaccacaggaacaccgacagccgataggggggacgccgccgccaccgacgaccctgctgcgcgattccaggtgcagaagcacagctgggatgggttacgcagtataatccacggaagtagaaaatactcaggcctgattgttaacaaggctccccacgatttccaattcgtgcagaagacagacgaatctggcccacactcccaccgcctgtattatctagggatgccttatggatcccgggagaatagtttgctgtacagcgagattcctaaaaaggtgagaaaggaagcactgctcctcctctcttggaagcagatgctcgaccactttcaggctaccccccatcatggtgtgtactcacgagaagaggaactgctgcgggaacgcaagagactcggcgtatttggcattacgagctacgacttccatagtgaaagcggactgtttctctttcaggctagcaattccctctttcactgtcgggatggggggaagaatgggttcatggtgtctcccatgaagccactcgaaattaaaacccagtgcagtgggcctagaatggaccccaagatttgccctgccgaccctgcatttttcagctttattaacaactctgatttatgggtggccaatatagagactggcgaagagcggcgcctcactttttgccatcaaggactgtctaatgtgctggacgaccccaaaagcgctggagttgcgacatttgtgatccaggaggagttcgaccgcttcacgggttactggtggtgcccaaccgcttcctgggaaggtagcgagggcctcaaaaccttgcggattctgtacgaggaagtggatgagtccgaggttgaagtcatccacgtgcctagccccgctctcgaggagagaaagaccgattcctatcgttatccaaggacaggttcaaaaaaccccaaaatcgctttaaaactcgccgaattccagacggattctcagggtaagatagtgagtacgcaggaaaaagagctggtgcagccattttcaagtctgttccccaaagtggagtatatcgctcgagccggctggacgcgagacggaaagtacgcgtgggctatgttcctggacagaccacagcagtggctccagttggtgctactaccccctgctctttttattccatccaccgagaacgaggaacaaaggttggcatccgcccgagccgtgccccggaatgtgcagccttatgtggtatatgaagaggttactaatgtgtggatcaatgtccatgacatcttctacccctttccacaaagcgagggggaggatgagctatgctttctgagggctaacgagtgtaagacggggttctgtcatttatataaggtgaccgccgtcctgaagtcacagggttatgattggtctgagccattttcacccggcgaggatgagttcaagtgcccgataaaggaagagattgccctgacctcaggcgagtgggaagtgcttgcccgtcacggctcgaagatatgggtaaacgaggaaacaaaactggtctattttcagggcaccaaggatacaccactggagcaccatctgtacgtagttagctacgaggctgccggtgaaatagtcaggttgacaaccccaggcttttcccactcctgctccatgtcccagaattttgacatgttcgttagtcattactcaagcgtttcaacacctccttgtgtccatgtgtataagttgagcggaccagatgatgatccactccacaagcaacccaggttttgggcaagcatgatggaggcagcctcttgtccccctgactacgtcccgccagagatttttcattttcatacaagatctgacgtgcgcttgtacggaatgatttacaaaccacacgccctacagcctggcaagaaacaccccacggtcctgtttgtctacgggggaccacaggtgcagttggtaaataattccttcaagggcatcaagtacctccgccttaacaccttggcctcgttgggttacgcggttgtggtcatcgacggacgggggtcatgccagaggggcctgagatttgaaggcgctctcaagaatcagatggggcaagtagagatcgaggatcaggtggaggggctgcaattcgtggccgagaaatacggtttcattgatctctccagggtggccatccacggctggtcctacggagggtttcttagtctgatgggattaatccataagcctcaggtatttaaggttgccattgcgggcgcacctgtgaccgtgtggatggcgtacgacactggttacactgagaggtatatggatgtgcccgaaaataatcagcacggctacgaagccggctctgtcgccttacatgtggaaaaactgccaaatgagcccaacaggctgctcatccttcatggatttttagacgagaacgtgcatttcttccataccaacttcctggtctctcagctcatccgtgccggaaagccatatcagttgcaaatctatccaaacgagcgacactccatccgctgcccggaaagtggagaacactacgaagtgacactgctgcactttctgcaggagtatctttag

SEQ ID NO: 22991 - DNA, 1533 bp, synthetic construct
  source 1..1533: mol_type = other DNA; note = Synthetic coding sequence
atggccgccgagctggtggaggccaagaacatggtgatgagcttccgagtgtcagacctgcaaatgctccttggctttgtcgggaggagcaagtcaggtcttaaacacgaactggtgacccgtgccctgcagctggtgcagtttgattgctctcctgaactctttaaaaagataaaagaattgtacgaaaccaggtacgctaaaaaaaacagcgagcccgccccacagcctcatcgtccactggaccctctgaccatgcacagcacatatgatagggccggagccgtgcccagaaccccactggcaggtccaaacattgactatcctgttttatatggcaagtacctaaacggccttggcagactccccgcgaaaaccttgaagcccgaggtaagactggtgaagttgccgtttttcaatatgctcgacgagctactaaagcctaccgaactggtgccacaaaacaacgagaagctgcaggagtcaccatgtatttttgcgttgacaccacggcaggtcgagctcatacgtaactctcgggagctccaaccaggagtgaaggcggtccaggtggtgctgcggatctgttattcagatacttcctgcccccaggaagatcagtatcccccaaacattgccgtcaaagtgaaccattcgtactgttccgtgcccggatattatccatccaataaacccggggtagagccgaagcggccctgcagacccattaacttaactcatctgatgtatctgagttccgcaaccaacagaatcaccgtgacgtggggaaattatggtaaatcctacagcgttgccctgtatctcgtccgccagctgacgtcttccgagctgcttcaacgactgaagactattggggtcaaacatccagagctgtgcaaggctcttgtgaaagaaaagcttcgccttgaccccgactccgaaatcgccacaacgggggtgcgagtgagtctgatttgccccttggtgaagatgcggttatccgtcccatgtagagccgaaacctgtgcccaccttcagtgctttgatgcagtcttctatctacaaatgaatgagaagaaacccacttggatgtgcccagtttgcgacaagcccgcaccctacgaccaacttattatagatggactcctgtcgaaaatcctgagcgagtgcgaggatgctgacgagatcgaatatctggtcgatggttcctggtgcccaatccgtgcagaaaaggagcggagttgctcccctcagggggcaatcctcgtgctgggcccgtccgatgctaatggcctcctcccggcacctagtgttaacggctctggtgccctcggttctacaggcggcgggggcccagtcggttcaatggaaaacggcaaacccggcgcggacgttgttgatctcaccctcgatagctccagctcaagtgaggatgaagaagaggaggaagaggaggaggaggatgaggacgaggagggacctcgccctaaacgcaggtgtccattccagaagggcttggtccccgcttgctag

SEQ ID NO: 22992 - DNA, 684 bp, synthetic construct
  source 1..684: mol_type = other DNA; note = Synthetic coding sequence
atggccgcccagcggcccctgcgggtgctgtgcctggccggcttcaggcagtccgagaggggattcagggagaagaccggcgccctgcgaaaggccctgcgcggcagggcggaactagtttgtttgtccggcccccatcctgtgccagaccccccaggacccgaaggggccaggtccgatttcggttcctgcccaccggaggaacaacccaggggctggtggttttccgagcaggaggcagatgtcttctcagcgctcgaggagcctgccgtgtgccggggactggaagagtcactgggaatggtggcccaggcacttaaccggctgggccccttcgacggactacttggattcagtcagggtgccgcactcgccgccctggtgtgtgccctggggcaggcgggggaccctcggtttcccttgccccggttcatcctcctggtcagcggtttttgtccacgaggcatcgggtttaaagagtctattctgcagcgcccactgtcgctacctagtctgcacgtgttcggagatacagataaggtcatcccatcccaggaaagcgtccagttggcctctcaattcccaggggcaataacattgacacattctggcggccactttatccctgccgctgcccctcagagacaggcttacctgaagttcctggatcagtttgcggagtag

SEQ ID NO: 22993 - DNA, 1656 bp, synthetic construct
  source 1..1656: mol_type = other DNA; note = Synthetic coding sequence
atggaggaggccgagctggtgaagggccggctgcaggccatcaccgacaaaaggaaaatacaggaagagatttcccagaaaagacttaagattgaggaggacaagctgaaacaccagcacctgaagaagaaggcccttcgggaaaagtggctgttggacgggatatcgtccgggaaggaacaggaggaaatgaagaagcaaaaccagcaagatcagcaccagattcaggtgctggagcagtctatcctccgtttagaaaaggagattcaagacttggaaaaggcagaacttcagatttccacaaaggaggaggccatcctcaagaaactgaagtccattgaaagaacgaccgaagacattattcggtcggttaaagtggagcgagaggagcgcgccgaagagagcatcgaggatatctatgcaaacatccctgacttgccaaaatcttatatcccaagtcgcttgagaaaagagattaatgaagagaaagaagatgacgagcagaatcgcaaggccctttacgcaatggagatcaaggtggaaaaggacctaaagacgggggagagcaccgttctctccagtatccctctgccttctgatgactttaagggtacaggaattaaagtgtatgacgacgggcagaagagtgtgtacgccgtgtcatccaatcactctgctgcatacaatgggacagacggactggcccctgtcgaagtagaagaactgcttaggcaggcctccgagcggaattccaagtcaccgacagaatatcacgagcccgtctacgcaaacccattttacaggcctacaactccacaaagagagaccgtgaccccggggcctaacttccaagagaggatcaagatcaagacaaatggcctaggtatcggagtaaacgaatctatccacaacatgggcaatggcctgtctgaagaacgaggaaacaatttcaatcacatatcccctatcccaccagtgccccatccgcggtctgtgatacaacaagcagaagagaaactgcatacaccccaaaagcgactgatgaccccttgggaggagtccaatgtgatgcaggataaagacgcgccttccccgaagccacggctctccccccgcgaaactatctttggaaaaagcgaacaccaaaactcctctccaacctgtcaagaagatgaggaggatgtgcgctacaacatcgtgcatagcttgccccctgatattaacgatacagagccggtgaccatgatctttatggggtaccaacaggccgaagatagcgaagaggacaaaaagttccttacagggtatgatggcatcattcacgccgagcttgtggtgattgacgatgaggaggaggaggatgaaggcgaggcagaaaaaccctcctaccaccccatcgcaccacattcacaggtataccaacccgcaaagcctacccctctccctcggaaacggtctgaagctagtcctcacgagaatactaaccacaaaagcccgcataagaatagtatttccttaaaggagcaggaggagtcacttggttcccccgtgcaccactcaccctttgatgctcagacaaccggcgatggtaccgaagacccgtctcttaccgcactcagaatgcgcatggcaaaactggggaagaaagtgatttag

SEQ ID NO: 22994 - DNA, 1701 bp, synthetic construct
  source 1..1701: mol_type = other DNA; note = Synthetic coding sequence
atgttcgtgagcgacttccggaaggagttctacgaggtggtgcagagccagcgagtgttactgtttgtcgcctccgacgttgacgccctctgcgcctgtaagatactgcaagctcttttccagtgcgaccatgtgcagtatacgctcgtccccgtgtccggatggcaggagctggagactgccttccttgagcacaaggagcagttccattactttatcctcattaattgtggtgccaatgtggatctcctggacatcctacaacccgatgaggacacgatcttcttcgtctgcgacacacacaggcctgtcaacgtcgtgaatgtgtacaacgacacccagattaaattgctgatcaaacaagacgatgacctggaggtccccgcctacgaggatatctttagagacgaagaagaggacgaggagcactcgggaaacgactccgacggttccgaaccctctgagaagcggacgcggctggaagaggaaatcgtggaacagaccatgagacgccgccagaggcgggagtgggaagccagaagacgcgatatcttgtttgactacgaacagtatgaataccacggcactagttccgcaatggtgatgttcgagcttgcctggatgctgtctaaagacctaaatgatatgttgtggtgggccattgtggggcttaccgatcagtgggttcaggataaaatcacacagatgaagtacgtgaccgacgtgggcgttctccaacgccacgttagtcggcacaaccaccgtaatgaagacgaagagaacactctgtcggttgattgcactagaatttccttcgagtacgatctgcgacttgtgctctatcagcattggagcttgcatgattctctatgtaatacaagctacactgccgctagatttaagttgtggtcagtgcacggccaaaagaggctccaagaattcttggctgacatgggcctgcctctgaagcaggtgaagcaaaagtttcaagccatggatatcagtctgaaagaaaacttaagggagatgatagaggaaagtgccaacaaattcggcatgaaagacatgagagtgcagacattcagcattcacttcgggtttaaacataaattcctggcgagcgacgtcgtctttgccaccatgtcattgatggagtcacccgaaaaagacgggagtggaactgatcacttcattcaggccttggacagcctatcaagatcaaatctggataaactctatcatggtcttgagctcgccaagaaacagcttagggcgactcagcagactattgcatcttgcctgtgcacaaatctagtcatcagtcagggacctttcctttactgtagcttgatggaaggtacacccgatgtaatgctgttttctaggccagcttcactatcgttactatccaagcatctgttgaagagtttcgtgtgttccaccaagaatcggcggtgcaagctgctgcccctggtcatggcagctcctcttagtatggagcacgggaccgtgactgttgtgggaattccgcctgagaccgacagttccgatagaaagaatttcttcggacgcgcattcgaaaaagccgctgagtcgacatctagcaggatgctccataatcacttcgacttgagcgtcatagaactcaaggctgaggacaggagcaaattcctcgatgccttgatcagccttctgtcctag

SEQ ID NO: 22995 - DNA, 1461 bp, synthetic construct
  source 1..1461: mol_type = other DNA; note = Synthetic coding sequence
atgagcgtgacctacgacgacagcgtgggcgtggaggtgagcagcgactcattctgggaggtggggaactacaagagaaccgtcaaaaggatcgatgacggccacaggctgtgtagtgatctgatgaactgccttcatgagcgggcgcgcattgagaaggcatatgcccaacaactgaccgaatgggcaagaaggtggaggcagctggtcgaaaaaggaccacagtacggaactgtggagaaggcttggatggcttttatgtcagaggctgagcgagtctctgaacttcatcttgaagtcaaagccagcctaatgaacgatgactttgagaaaatcaaaaactggcagaaggaagcctttcacaagcagatgatggggggttttaaggaaaccaaggaagctgaagacggctttaggaaagcgcagaagccgtgggctaagaagctgaaggaggtagaggctgcaaagaaagcccaccatgcagcctgcaaggaggagaagctcgccatctctagagaagcgaacagcaaagcggaccccagtctgaaccctgagcagcttaaaaaactgcaagacaagattgaaaagtgcaagcaggacgtattaaaaaccaaagagaaatacgaaaagtcgttaaaggagttggatcagggcaccccccagtatatggagaacatggagcaggtgtttgaacagtgccagcagttcgaggaaaagcgtctgagatttttcagagaggttctcctcgaggtacagaagcacttggatctttccaacgtggctggttacaaggctatctatcatgacctcgagcagtcgataagggcagctgacgctgtggaggacttgagatggttccgggccaaccacggacccggtatggccatgaattggccccagtttgaagagtggtcagcagacctgaatcgaaccctgtcccgccgggagaaaaaaaaggccactgatggcgtcacgctcacagggataaatcagacaggggaccaaagtctgccttctaagccttctagcactctaaatgtcccatccaatcctgcgcaatctgcccaatcccagtcatcatataatcccttcgaagatgaggatgacaccggtagcacagtttcggaaaaggacgatactaaggctaaaaacgtaagttcgtacgagaaaactcagtcttacccaaccgactggagcgatgacgaaagcaataatcctttcagcagcacagatgctaatggagacagcaatccatttgacgatgatgccacaagcggcactgaggtaagggtgagggccctatatgattatgagggtcaggaacacgatgaattatcttttaaagctggtgacgagctcaccaagatggaagacgaagacgagcaagggtggtgtaagggccgtctggataacggccaagtaggcctgtacccagcgaactatgtggaggccattcagtag

SEQ ID NO: 22996 - DNA, 2262 bp, synthetic construct
  source 1..2262: mol_type = other DNA; note = Synthetic coding sequence
atgatggaggagcgggccgccgccgccgtggccgccgccgccagctcatgtaggccactgggctcaggggctggacccggtcccaccggggcggcccccgtcagtgctcccgccccggggccggggccggcgggaaaggggggtggtggaggtggctcacctggacctaccgcagggccagagcctctttccctaccaggcattttgcacttcatccaacacgagtgggcgcgttttgaggcagagaaggcccggtgggaagctgagcgtgctgaactccaggctcaggtggcgttcttgcagggcgaaaggaaaggacaggaaaacctgaaaactgacctggtgcgaagaattaagatgctggagtacgctctcaaacaggaaagggccaagtaccacaagctgaagttcgggacagacttgaaccaaggtgagaagaaggctgatgtgtccgagcaggtgtctaatggccccgtcgaatccgtgacactcgaaaattcacccctcgtctggaaggaaggaaggcagctgctgcgccagtaccttgaggaagtcggttataccgataccatactcgatatgcgctctaaaagggtcagaagtctcctgggaagatccctagaactcaacggtgcagtggagccctccgagggcgccccaagggctccccctgggccagccggcctgagtggcggcgagagtctgctcgtcaagcagatagaagagcagataaagagaaatgccgctgggaaggacggcaaagagcggctcggaggctccgtactgggccagatccctttcctccagaattgcgaggatgaggatagtgatgaggatgacgagctggattccgtccagcacaagaagcagagagtgaagttgccttcgaaggccctcgtgcccgaaatggaagacgaagatgaagaagacgactcagaagacgctatcaatgaatttgactttcttggctctggagaggatggggagggggctcccgacccaaggcgctgtactgtagacgggtcacctcatgagttggagtcacgacgtgtaaaactgcagggtatcctcgccgacttgcgggacgtggacggtctgcctcctaaggtaacaggtccgccaccgggtacaccccagccacgtccacatgaagacgtgttcataatggatactatcgggggaggagaagttagtctgggggatcttgcagatctcactgtgaccaatgataacgaccttagctgtgatctgagtgacagcaaagacgctttcaagaagacctggaaccccaagttcaccctgaggtcccactacgacggaatccgatcactggcctttcaccacagccagagcgcgctgctgacagccagcgaggatggcacgctgaagttgtggaacctgcagaaggcagtcacagccaaaaagaacgctgctctggatgtggaacccattcacgccttcagagcgcacagggggcccgtgttggccgttgcaatgggatcaaactccgagtactgttacagcggtggtgccgacgcttgtatccactcttggaagatccccgatctgtcgatggatccttacgacggatatgatcctagtgtgttgtctcacgtccttgaaggccatggtgatgccgtgtggggcctagcctttagcccaacctcacaacgtctcgcttcctgcagcgctgacggcacagtgcggatttgggacccatcttccagttcaccagcctgtttgtgtactttcccgacagcctcggaacacggcgttcctacgtcggttgccttcacgtctactgagcctgctcacatagtggcttcctttaggtccggcgacacggtcctttacgatatggaggtgggaagcgcactgcttactctcgaatctcgaggcagcagtggacccacccaaatcaaccaggtggtctcccaccctaaccagccacttacgataacagctcatgatgacagaggcattaggttcctggataaccgcactggtaagccggtgcattctatggttgcccatctggacgctgtgacctgtcttgctgtggacccaaatggggcattcctgatgagtggaagccacgattgttcgctgcgcctgtggtcactcgacaacaaaacttgcgtccaggagataaccgcccatcggaaaaagcatgaagaagcaatccatgccgtcgcatgtcatcccagcaaagcgctcatagcgtcagcgggtgccgatgccctcgccaaagtttttgtgtag

SEQ ID NO: 22997 - DNA, 1596 bp, synthetic construct
  source 1..1596: mol_type = other DNA; note = Synthetic coding sequence
atgcggatgcacacccggctgagcctgcccggccccccccaccacgtgggtgcggcttatccacctgctggcggaaatcgaagcgaaaacgcaggctcttggggaggagcgggagcctcgagcgtcgagcctttggccaggagggtcgccagcggcgaagccaccttagccatggaccagcctgctggactgcaggtcgattatgtgttccggggggtcgaacatgcagtaagggttatggtgtcaggccaggtgctggagcttgaagtcgaggaccggatgaccgctgatcaatggcggggggagttcgatgccggctttatcgaggacttgacacacaaaacaggtaactttaaacagttcaacattttttgccacatgctggaaagcgctttaacccagagctccgaatctgtgacattggacctcctcacatacacagacttggagagtttaagaaatcgcaaaatgggaggtcggcccgggagcttagcaccccggtccgcccagctaaacagtaaacgttacctaatcctcatctatagcgtggagtttgatagaattcactaccccttgcccctcccttaccagggaaaacccgaccccgtggtcttgcagggtataataagatcactgaaggaagagctcgggcgtttgcaggggctggacggacaaaacactagggacacacgggagaatgagatctggcacctccgtgaacaggtctcacgactggcttcggagaaaagggagctcgaagcgcagttggggcggtcccgggaagaggccctcgccggccgagctgcccgtcaagaagctgaagccctcaggggacttgtacgcggtctcgagctggagctgaggcaagagcgtggcctgggacatcgagtggcaggaagacgagggcaagactgccgccggctcgctaaagagctggaagaggccaaggcgagcgaacggtctctccgtgccaggcttaagactcttactagcgagctagcgttgtacaagcgtgggggtcgaggttcccgcgggagagggaggcccgctcgcccaagcccaagtccaaccgggggacgggctctgcggttcgaccccactgccttcgttaaggcaaaagaacgaaaacagcgggaaatccagatgaaacagcagcagcgcaataggttaggtagcggtggatccggcgatggtccgtccgtctcatggtctagacaaacacagccgccggccgccctcacaggccgaggtgacgcccccaaccgctctaggaacaggagctcttctgtagactcgtttaggtctagatgctcatccgccagcagctgctctgacttggaagactttagtgagtctttaagccgaggcgggcacagacggaggggaaaaccaccctctcctactccatggtcggggagtaacatgaaatcgcctccagtggagaggtctcatcaccagaagtccttggcgaatagcgggggttgggtaccaatcaaagagtactcatctgaacatcaggccgcagacatggctgaaattgatgctcgcctgaaagctctgcaggagtatatgaatcggttagatatgcggagctag

SEQ ID NO: 22998 - DNA, 1452 bp, synthetic construct
  source 1..1452: mol_type = other DNA; note = Synthetic coding sequence
atggccagcctgctgtggggcggcgacgccggcgccgccgagagcgagcgcctaaacagccactttagcaacctttcacagcctcggaagaacctatggggcatcaaatctactgccgtccgtaacattgacgggagcatcaataacataaacgaggatgacgaggaagacgtggtggaccttgcagccaacagtttgttgaataagctcattcaccagtccctcgtggagagctctcacagagtagaggttctgcagaaagacccctcgtcacccttgtacagcgtaaaaacctttgaagagctgagactgaaggaggagttactaaagggaatttatgcaatgggcttcaataggccgtctaaaatccaggagatggcacttcctatgatgcttgcccacccacctcagaatctcatcgcacagtcacagtctggaacaggaaagaccgctgcgttcgtgttggctatgctctccagagtgaacgctcttgaacttttccctcagtgtttatgcctcgcacccacctatgagcttgcactgcaaaccggtcgcgtggtcgagcagatgggtaagttttgcgtggacgtgcaggttatgtatgccataagaggaaaccgtatacccagagggacagatataaccaagcagattataatcggtacaccaggcacggtcttggattggtgttttaagctaaagctgatcgacttgactaagatccgtgtcttcgtcctcgatgaggcagacgtgatgattgatacccaaggattctccgatcattctatcaggatccagagggccctgcctagcgagtgccagatgctgcttttttctgccacatttgaagacagtgtttggcatttcgccgaaaggatcattcccgatccaaatgtgataaagcttcggaaggaggaactgactctcaataacattcggcaatactacgtgctttgcgagcatcgcaaggacaagtaccaggccctatgcaatatctatgggagtatcactattggacaggcgatcatattctgtcaaactagacgcaatgccaagtggttaacagtggagatgattcaggacggacaccaggtgagcttgctcagcggtgagctcactgtagagcaacgggcaagcatcatacagcggtttagagatggaaaagaaaaagtgctgattacgaccaatgtctgcgcacgtgggatagacgtgaagcaagtgacaattgtcgtgaatttcgacttgcctgtcaagcaaggcgaggaacctgattacgagacctacttgcatagaattggtaggactggaagattcggaaagaaaggcttggcattcaacatgatagaagtggatgaactgccctctctcatgaaaatccaggaccactttaatagctccatcaagcagctgaatgcagaggatatggatgaaatagagaagattgactattag

SEQ ID NO: 22999 - DNA, 1014 bp, synthetic construct
  source 1..1014: mol_type = other DNA; note = Synthetic coding sequence
atggccgacgccgccccccagctgggcaagcggaagcgggagctggacgtggaagaggcacatgccgcgagtactgaagaaaaggaggctggggtgggcaacgggacatgcgcccctgtgagactcccgttctctggttttcggctccaaaaggtgctgagggagagcgcccgggataagattatattcttgcacggtaaagttaacgaggcaagcggagacggagatggcgaagacgccgtcgtaatcctggaaaagactccattccaagtggagcaggtggctcaacttctgaccggatcccctgagctccagctgcagttttcgaacgatatttactcaacttaccatttgtttccaccccgccagttgaatgacgtaaagacaactgtcgtgtatcctgctacagaaaagcacttacagaaatacctccggcaggatctcagactgatccgcgaaaccggggacgattaccggaacatcacactcccacacctggagagtcaaagcctctctatacagtgggtgtataatattctggataagaaagccgaagctgacagaatcgtttttgaaaatcccgacccgagcgatggattcgtccttattccggacctcaagtggaaccaacaacagcttgatgacctgtatcttattgccatctgccatcgtaggggcatcagatccctgcgagacctgacacccgaacacttgccattattgagaaatattttacatcagggtcaggaagcaatcctgcagcggtacaggatgaaaggagatcaccttcgggtctatctgcattatctgccatcttactaccatctccacgtccactttactgccctggggtttgaagcccctgggtcgggggttgaacgagcacatctgcttgctgaagtgatagagaaccttgaatgcgatccccggcactatcaacagaggactctcacctttgcccttagggcagacgatccactcctgaaactgctacaggaagcacagcagtcttag

SEQ ID NO: 23000 - DNA, 1782 bp, synthetic construct
  source 1..1782: mol_type = other DNA; note = Synthetic coding sequence
atgaagctgcaggccgtgatggagaccctgctgcagcggcagcagagagcgagacaggagctcgaagcccgccagcagctgcctcccgaccctcccgctgctccacccggccgtgcccgagcagctcctgatgaagacagggagcccgagtccgcaaggatgcaaagagcccagatggcagcccttgcagccatgagagcggccgctgcaggcctggggcaccccgcgagtccaggaggatctgaagacggtccccctggtagtgaggaagaagatgcagctagggagggtaccccaggatcccctggtagggggcgagaaggccccggcgaggaacacttcgaggatatggccagcgatgaggatatgaagcccaaatgggaggaagaggagatggaagaggacttgggcgaggatgaggaggaagaggaagaagactacgaggacgaggaggaagaggaagacgaagagggcctaggaccacccggccccgcaagtctgggcactacagcgctgttcccccggaaagcccagcccccccaagctttccgaggggatggggtgccgcgggtgttgggaggccaggaacgccctggtccgggacctgctcaccctggcggtgccgctcatgtcgctcctcagctccagcccccagatcacggcgactggacatatgaggaacaattcaaacagctgtacgaactggacggagaccctaaaaggaaagagtttttggatgatctgttctcgttcatgcagaaaagagggaccccagtaaaccggatacccattatggccaaacaggttcttgaccttttcatgctgtacgtgctcgtcactgaaaagggaggtctggtagaggtgattaacaaaaagttgtggagggagataacaaaagggctcaatctccccacttccataacaagcgccgcctttactctgcgaacccagtatatgaagtacttgtacccttacgagtgcgaaaaaaggggactttctaatccaaacgagctccaggcggccatcgactcaaatagacgggagggtcggaggcaaagcttcggtgggtctcttttcgcctactcccctggaggggctcacggaatgctgtcctccccaaagctgcccgtttcgtccctgggactcgccgctagtactaacgggtcctctatcacacccgccccgaagatcaagaaagaggaggatagcgcgattccaataacggttcccggccgcctgcctgtgtctctcgccgggcaccccgtagttgcagctcaagcagcagctgtccaggctgccgcagctcaggctgccgtggccgcacaggccgctgctctcgagcagctccgcgaaaagctcgaatctgcagagccccctgagaaaaagatggccctggtggcagatgagcagcagcgcctaatgcagcgggccctccaacagaattttttggctatggccgcccagttgcctatgtcaatcaggatcaacagccaagcatcagaaagccgccaggatagcgctgtgaatctgactggaaccaacggctctaactctataagtatgagtgtggaaatcaacggaataatgtacacaggcgtcctattcgctcagccgcctgcaccaactcccacctctgccccgaataaaggtggaggcgggggaggtgggtcgtcatcaaacgctggcgggcgcggcgggaacacaggaacatccggaggtcaagccggacccgccggcctttcaaccccttccactagcacctctaataatagccttccctag

SEQ ID NO: 23001 - DNA, 6192 bp, synthetic construct
  source 1..6192: mol_type = other DNA; note = Synthetic coding sequence
atggccgacggcgccccccggccccagctgtaccggagcgtgagcttcaaattgctggaacgctggtccggcgggcccggattacgggaggaagacacagacacacccggtctgcgccgtagagcttcatgccgacccacaactgccgctcgcggacagcctagtcgccgggtgagtaagctggcatctggaccgctggccgccccagctcaaccacgaccactcaggagcctgagcccttcagtgaggcaactcagtagaagatttgacgctccccggttagacgatgggtcggccggaactagggatggaggtgttctgccagcggccgcagaagaagccgcggaagggcccgccaggggtgcctggccatctgttactgagatgcgaaagttgttcggaggacctggcagtcgaaggccctctgccgacagcgagtcccctggcaccccatcccccgatggcgccgcgtgggaaccaccagcccgggaatcacgccaacctccgactccccccccacggacttgctttcccctagcaggcttgaggtccgcgaggccactgaccggcccagagaccgagggcaggttacggaggccgcagcagcaacaagagagagctcaaaggcctgcagatggcctgcattcttggcacatcttttctcagccacaagccggtgccagggcttcttgcagttcctcttctattgcagcatcgtacccagtctctaggagtcgcgccgcttcatcctctgaagaggaagaggaaggtcccccacagctgcctggagcccagtcccccgcctatcacggcggccacagcagtggaagcgacgacgacagagacggagagggtggccacaggtgggggggccgtcccggcctccgcccaggctcatccctcttggatcaagattgtaggcctgattccgatgggttgaacctctcatcaatgaatagcgccggggtatctggttcacccgaaccaccgacatctcctcgcgccccgagagaggaagggctgcgcgagtggggcagtggaagcccgccttgcgtgcccgggccacaggaggggctgcgtcctatgtcggactcagttgggggggccttcagggtcgctaaagtttctttcccttcttacttggcttctccggctggctctaggggctccagcagatactcaagcacagagaccttgaaggacgacgacctttggagcagccgggggtcaggtggttggggggtatatcggtccccctcttttggtgccggggagggtctcctacgtagccaggccagaacgagagctaaaggaccaggtggcactagtcgcgccctccgcgatggaggtttcgagccagagaagtccagacagcggaaatccctatcaaatccagacatcgcctcggagactttaaccctactcagctttcttcgttccgatttatctgagctacgggtaaggaagcctggcggatctagtggtgataggggcagcaatccgctagatggacgagacagccccagtgcagggggtccggtggggcaacttgagcctattcccattcctgcaccagcttcaccgggcactcgcccaactctcaaggatctaactgcaaccctgagaagggccaaaagtttcacatgtagtgaaaagcccatggccagaaggctgcccaggacctcagctctgaagagcagcagcagtgagcttcttctaaccgggcccggggcggaggaggatcctctgccccttattgttcaggaccagtacgtccaggaggccagacaggtgttcgagaagatccagagaatgggcgctcagcaggatgatggaagcgacgcaccaccgggctcaccagactgggctggcgatgtgaccagaggccagcggtcccaggaagaactcagtggtccagagagctcactcacagacgaaggaattggtgcagaccctgagccgcctgttgccgctttctgcggactgggcactactggaatgtggaggcccctctcttcatcgtcagcacagaccaaccaccacggacccggcactgaagatagcctcggcggttgggctctggtcagcccagagactccacctacccccggagcactgaggcgacggcggaaggtgcccccatctgggagtggagggtctgagcttagcaacggcgaggccggggaggcttacaggagtttgagcgatccaattcctcaacggcacagggcggccacaagtgaggaacccacaggtttctcagttgacagcaatctgctgggcagtttgtcaccgaaaacgggactgccagctacgagtgctatggatgaagggttaaccagtggccacagtgactggagcgttggctcagaggagtctaaaggataccaagaggtgattcaaagtatcgtacagggccctggcaccttagggagggtggtggacgataggatcgctggcaaggcccccaaaaaaaaatcactttctgatccctcacgaaggggggagctggccggcccaggctttgagggccccggtggcgaacctatccgagaagtggagcccatgttgccacccagttcttccgaacccattttggttgaacagagagctgagcctgaggagcccggagcaacacgctctagggctcaatcagaaagagcacttcccgaagctctcccgcctcccgccaccgcacatcggaattttcatctggacccaaaattagccgatattctgtctcctaggctgattcgacgcggctcaaagaaaagacccgccagatcaagccatcaggagctgaggcgggatgaaggttctcaggaccaaaccggctccctgagccgtgccagaccctcaagccgccacgttaggcacgcctccgtccctgctacattcatgcccatagtggtgcccgagccacctacttctgtgggccctccggtcgccgttccagagccaatagggttccccactcgggcccatccaacccttcaggcgccctcactcgaagatgtgacaaagcagtatatgctcaacttgcactccggcgaggtgccagcacccgtacctgtcgacatgccgtgtctcccgttggcggcccccccatcagctgaagccaaacctcccgaagccgctcgacccgctgatgagccaaccccagcatcaaaatgctgcagtaagccccaagtagatatgaggaagcacgtcgcaatgacattactcgatacagagcagagctacgtggaaagcctgcgaacattaatgcagggttacatgcagcctttgaagcagcctgagaactcagtgctctgtgatccttcactagtcgacgaaattttcgatcagatcccagagctgcttgagcatcacgagcaattcctggaacaggtccgccactgcatgcagacctggcacgctcaacagaaggtgggggccttgcttgtccaaagctttagcaaagatgtgctggtaaacatctatagtgcttatatagataacttccttaatgcaaaggacgccgtcagagtggctaaggaagcccgcccggctttcctgaagtttttggaacaatcaatgcgtgagaacaaggagaagcaggctctttccgatcttatgatcaagccagtgcaaagaatcccacggtatgagcttctggtgaaggacctgctgaaacacacgcctgaggaccatcctgaccaccccctcttactggaagcacaacggaacattaaacaggtcgcagagaggatcaataagggggtgcgatccgctgaggaggcggagagacacgcccgggtgcttcaggagatagaagctcatattgagggtatggaagatctccaggctccgctccgccggtttctgcgccaggaaatggtcatcgaagtcaaggcaataggtggaaaaaaggaccggagtctgttcctgtttacagacctgattgtgtgtacaacactgaaacggaaaagcggcagcctgcggagatcttcgatgtccctttacaccgctgcctctgtgattgacactgccagtaagtacaaaatgctctggaagctgccattggaggatgccgatatcataaaaggcgcctcccaggccaccaatagagaaaacattcagaaagcgatcagccggctggatgaggatttgactaccctggggcaaatgagtaagttgagcgagtcgctagggttcccgcaccagtccctcgacgacgctctgcgtgacctgtcagcagccatgcaccgggatctctcagaaaagcaagccctctgctacgccctttcattcccgcccaccaaactggaactctgtgctacccgaccagagggaacagactcgtacatattcgagtttccacatcccgatgcccgtcttggcttcgagcaagcctttgatgaggcgaaaagaaagttggcatcatcaaaatcatgcctggaccccgaatttctcaaggctatcccaatcatgaagacacgctcagggatgcagttcagctgtgcagctcccaccttaaattcttgtccagagccttctcctgaagtttgggtgtgcaattcagacggctacgtgggtcaggtgtgtctgctgtcacttcgagctgaacctgacgtcgaggcatgcatcgctgtttgttccgcacggattctctgcattggagcagttcccggactgcagccacggtgccatcgcgaacctccgccctccttaaggtccccacctgagactgcccctgagcccgccgggcctgagcttgacgtggaagcagctgcagacgaggaagcagcaaccctcgccgaaccaggtccgcaaccatgccttcatatcagcattgccgggagtgggttggagatgaccccaggtttgggggaaggtgatccccggcccgaactggttccttttgattcagactcagatgatgagagctctccatcgccttccggcactcttcaatctcaagcttcacgcagcacaatttcttcatcttttggtaatgaagaaaccccttcgtcgaaggaggccaccgccgagaccacatcgtccgaggaggagcaagagccagggttcctgcccctgtccggttccttcgggccaggcggcccctgtggaacatcaccaatggacggcagagctttacggagatctagccacggctcctttactcggggtagcttggaggacctgctgtctgtggatcctgaggcatatcagtcgagtgtatggctgggcaccgaagacggatgcgtgcatgtataccagtcttcagacagcattcgtgataggcgtaacagcatgaaattacagcacgccgcaagtgtaacatgcatcttgtacctcaacaatcaggtgttcgtctcgctggctaacggagagctggtagtttaccagagagaggccggacatttttgggaccctcagaactttaagtctgtgacattaggtactcaaggaagcccaattaccaaaatggtttctgttggtggtaggctctggtgcggatgccaaaaccgggtgctagtgctaagccctgacacactgcagctggagcatatgttctacgtggggcaagattcctctcgctgtgtggcttgcatggtagattccagcctgggggtttgggtcacactgaaggggtcggcgcacgtgtgtctgtatcaccccgatacctttgagcagttagcagaagtggatgtcacccctcccgtacacaggatgcttgcaggcagtgacgctattatccggcaacataaagctgcttgccttcgtataaccgccttgcttgtctgtgaggaactgctatgggtgggcacgagtgcaggagtagtcttgacgatgcccacgtccccggggacagtgtcatgcccccgcgctcccctgtctcctaccggcttgggccagggccatactgggcatgtgagatttttggccgccgtgcaactgcctgatgggtttaacctcttgtgccctaccccaccgcccccaccagatacaggtcctgaaaaactgccttcactggagcatagggattcgccttggcacagagggccggcgcccgctcgaccaaagatgctggtgatctctgggggcgatgggtatgaagatttccgactgtctagcggaggagggtcatcatctgagactgtgggcagggacgacagtacaaaccaccttctattgtggagggtgtag

SEQ ID NO: 23002 - DNA, 2499 bp, synthetic construct
  source 1..2499: mol_type = other DNA; note = Synthetic coding sequence
atgagcgaggccggcggcgccggccccggcggctgcggcgccggcgccggggcaggagccggtcccggggccctccccccccagcccgcagcactgccgcctgcacccccacaaggctccccctgtgcggctgccgcaggaggctccggcgcctgcgggcccgccacagccgtggcagccgctggcaccgctgagggtcccggcggcggcggtagcgcacgaattgccgtgaagaaagcccagctccgttctgcacccagagccaagaaactggaaaagctgggagtgtatagcgcatgcaaagcggaagaatcgtgcaagtgcaatgggtggaagaatccaaatccatcccccaccccgcctagagctgatctccagcagattatagtgtcactgacagaatcttgcaggagctgctcacatgctctagccgctcacgtgagccacctggagaatgtctccgaagaggagatgaacaggctgctgggaatagtcttggatgtcgagtatctgtttacatgcgtccacaaagaagaagatgccgacaccaaacaagtgtatttttatctcttcaaactcctgcggaaaagcattctccagcgcggcaagcctgttgtcgaaggtagcttagagaaaaagccgccatttgaaaaaccttccatcgagcaaggagtaaacaatttcgtccagtacaagttctctcatctccctgccaaggagcgacaaacaattgtggagctcgccaaaatgtttctcaatcggatcaactactggcaccttgaggctccgtcgcaaaggagactgcgctcacctaatgacgacataagcggatataaagagaattacactaggtggttatgttactgcaacgtcccccagttttgcgacagtttgcccaggtatgaaaccacccaggtgtttggtcgaactctgctgaggtcagtttttactgttatgcggcggcagctgttggaacaggcacgccaggagaaggataagctgccactggaaaagcgtacccttatactcacccacttccctaagtttttgtccatgctggaggaagaggtgtatagccagaatagccctatatgggaccaagattttttatccgcctcaagcaggactagtcagttagggattcaaaccgtgatcaaccccccccctgtcgccggaactatctcttataactctacatctagctccctggagcagccaaacgcaggcagtagctctcctgcttgcaaagcttccagcgggctagaggcaaacccgggcgagaagagaaaaatgacagattcccacgttttggaggaggccaagaagccccgcgtaatgggcgatatccctatggagctgataaacgaagttatgagtacaattaccgaccctgcagctatgctaggccccgaaacaaatttcctgtcagcacactctgcaagagatgaggctgctagactcgaggaacggcggggcgtcattgaattccacgtggtcggtaactccctgaatcaaaaaccgaacaagaaaatcctgatgtggctggtaggactgcaaaatgtattcagtcatcagcttccgcgaatgcctaaggagtacatcacgagattggtttttgatccaaagcacaagactctggctcttataaaggacggccgggtaatcggcggaatatgttttcggatgttcccttcacagggattcaccgagatagtcttctgcgccgtgaccagcaatgaacaagttaaggggtatggtactcacctgatgaaccaccttaaggagtaccacatcaagcacgatatcttaaatttcctgacatatgctgatgagtatgcaattggatattttaaaaagcagggtttttccaaggagattaagatacccaaaaccaaatacgtcgggtatatcaaagattacgagggcgctactttgatgggctgtgagctgaatccaaggatcccgtatactgagtttagcgtgatcattaaaaagcagaaagaaattattaagaaactgatcgaacgcaaacaggctcagatcagaaaagtgtaccctggcctgagttgtttcaaggacggggtgcgccagataccgatcgaatccattcccggtattcgcgagaccggctggaaaccttcaggcaaggaaaagtcaaaagaacctcgcgatccggatcagctctacagtaccctgaagtccatcttacagcaggtcaagagtcaccagtccgcttggcctttcatggagcccgtgaaacggacggaagctccaggttattatgaagtgatccgcttcccaatggatttaaaaacaatgtctgagcgtttgaagaaccgctactatgtaagtaaaaagctgttcatggcagacctgcagagggtctttacaaattgcaaggaatacaacccaccagaatccgaatattacaagtgcgctaatattctggaaaaattcttcttcagcaaaatcaaagaggcaggtctgattgataagtag

SEQ ID NO: 23003 - DNA, 4950 bp, synthetic construct
  source 1..4950: mol_type = other DNA; note = Synthetic coding sequence
atggccggcggccggggcgcccccggccggggccgggacgagcccccagagtcttacccccaacgacaagaccatgaactccaggctttggaagctatatatggagctgacttccaagatctgcgccctgatgcctgtggcccagtgaaagagccgcctgagatcaatctggtgttgtatccccaggggctcacaggggaggaggtttatgtgaaggtggatttgcgcgtcaaatgtcctcctacctaccccgacgttgtacccgaaatcgagctgaagaacgccaaaggcctctctaacgagagcgtgaatctcctgaagtcgcgcctggaagaacttgctaagaagcattgtggcgaggtcatgatcttcgagcttgcgtaccacgtgcagagttttcttagtgagcacaacaagcctccacctaagtccttccatgaagaaatgctggagaggagagcgcaggaggaacagcaaagactgctggaggctaaacgtaaggaggagcaggaacaaagggagattttgcacgaaattcagagaaggaaggaagagattaaggaggaaaagaagcggaaggaaatggctaagcaggagcgcctggaaattgcctccctgtccaaccaggatcacacatccaagaaagatccaggcgggcataggacagccgccatactgcatgggggatcacctgacttcgtgggaaacggcaaacaccgcgcaaatagcagtgggagatcacgtagagagcgtcagtacagtgtgtgcaatagcgaggatagtcccgggtcatgcgaaatcttatatttcaatatgggtagcccagaccaactgatggtgcacaagggcaagtgtatcggcagcgacgaacaacttggaaaactggtctataacgccctggagactgctacaggcggattcgtcctgttatacgagtgggtgctacagtggcagaaaaaaatgggaccgtttcttaccagccaggagaaagaaaaaatagataagtgcaagaaacagattcagggtactgagaccgaattcaacagtttagtgaaactgtcgcatcctaatgtagtacgttacctggctatgaatctgaaggagcaggatgattctatcgtggtcgatatattagtcgagcacattagcggagtgagtctggctgcccatctgtcccactccgggcctattcccgtacatcaattgaggagatacactgcacaactcttaagtggcctggattacctccattccaactccgtcgttcacaaagtcctgtctgccagcaacgtgctggtcgacgctgaaggaaccgtgaagattaccgactacagcatttccaagaggctggcagacatttgcaaggaggatgtttttgaacagaccagggtccgcttcagtgacaacgccctgccatacaagactggtaagaagggggacgtttggagactcgggctcctgctcctgtcactgagtcagggccaggagtgtggtgagtatccggtcacaattcccagcgacctcccagctgacttccaagactttcttaaaaagtgcgtttgtcttgacgataaggagagatggagcccacagcaactgcttaagcactcatttattaatccgcagccaaagatgccccttgtggaacagagccctgaggacagcgaggggcaagactatgtcgagactgtgattccaagcaatagactgccctctgccgcctttttctcggagacccaaagacagttcagcagatattttatcgagttcgaagagttacagttgctgggaaaaggcgcctttggcgccgtgattaaggtgcaaaacaaactggatggatgttgctatgctgtgaagcggatccctattaaccctgccagtagacagttccgtcggattaaaggcgaagtcactctgctgagccggttgcaccatgaaaatattgtccggtattacaatgcttggatagaacggcacgagcgtcctgcgggaccggggacccccccacccgactctgggccccttgccaaggacgatagggctgcacgcggccaacccgcttcagataccgatggcctggatagcgttgaggcggctgcccccccccccatcctttcctctagcgtggagtggagcacttccggcgaacgctcagcctctgcgcgcttccccgctactgggccaggctcaagtgatgatgaggacgacgacgaagacgagcatgggggtgtgttcagccagagcttcctgcccgcctctgactccgaaagtgacatcatattcgacaatgaggacgaaaactccaaatcacagaatcaggatgaggattgtaatgaaaaaaatgggtgccatgaatcagaaccaagcgttacaactgaagccgtgcactatttatacatacagatggaatattgtgagaaatccaccttgcgggacaccatagatcaggggctctaccgtgacacagtcaggctgtggagactgtttcgcgaaattctcgacggactagcctacatccacgagaaaggcatgatccaccgggatctcaagccagtgaacatttttctggactcagacgatcacgtgaaaatcggggacttcggcttggcaaccgaccatctggctttttcagctgacagtaaacaggatgaccagactggagacctgattaagagcgatccgtctgggcatctcacaggcatggtcgggacggccctctacgtttcaccagaagttcagggatccaccaagagcgcatacaaccagaaagtggacctcttttctctgggaatcattttctttgaaatgtcctatcacccgatggtgaccgcctctgaaaggatcttcgttctgaatcagctgcgggatcccacttctccaaaattccccgaggacttcgacgacggagaacatgccaaacagaagtccgtgatttcctggttattgaatcatgaccctgcaaaacgtcccacagccacggaacttctgaagagcgaactcttgccccctccccagatggaggaaagcgagctgcacgaagttctccatcacactctgaccaacgtggacgggaaggcctacaggactatgatggctcagattttttctcagaggatctctccagccattgactatacctacgactctgacattctaaagggtaattttagtatccgtacggccaagatgcagcagcatgtctgcgaaaccattatacgtatcttcaagcggcacggtgctgtccagctgtgtaccccactgttgcttcctcggaaccgacagatttacgagcataacgaagccgcactgtttatggatcactcaggaatgctcgttatgctcccttttgatctgcggatcccgttcgcacgctacgttgcacgaaataacatcctcaacttgaaaagatactgtatagaacgggtgttccgtccaagaaagctggacaggttccaccccaaggaattgctggaatgcgcattcgatatagtgacgagcacaaccaacagcttcctgccgaccgcagaaattatttacacaatctatgagatcatccaggaatttccagcgctgcaggaacgtaactattcaatatacctaaaccataccatgctgctgaaggccattctgcttcactgcgggattcccgaggacaagctttcccaggtgtatataatcctgtacgatgccgtgacagaaaagcttacaagacgggaggttgaagcgaaattttgtaacttgtcactctcatcaaatagcctgtgcagattgtacaagttcatcgagcagaaaggagatcttcaggacctgatgcccaccattaatagcctgattaaacaaaagactggcatcgcccaactggtgaaatacggactcaaggatctggaggaggtcgtcggcctgcttaagaaattggggattaagctgcaagttctgattaatctcggcctcgtttacaaggtacaacagcacaacggaatcatcttccagttcgtagcatttataaagcgtaggcagcgggccgtgcctgagattttagctgcgggcggccgatacgatttgctgataccgcagttccggggtccgcaggcactcggcccggtgcctaccgcaatcggcgtctcgattgcgatagataagatatcagcggccgtgctcaacatggaagagagcgtcaccatcagctcatgtgacttactggtggtctcagtgggccagatgagcatgtcacgggctatcaacctcacccagaagctctggactgcaggaattacggccgaaattatgtacgactggtcacaaagccaggaagagctgcaggagtactgtagacaccatgaaattacgtacgtggccctggtgagcgataaggagggctcgcatgtaaaagtgaagtcatttgaaaaggaacggcaaaccgagaagagagtgctcgagaccgaattggtggatcatgtccttcagaaactgcggactaaagtgacggacgaaaggaacggacgcgaagctagtgacaatttagccgtacagaacttgaaaggcagcttctccaatgcatccgggctgttcgagatacacggtgctaccgtggttcccatcgtttcggtgttggccccggagaaattatccgcatccactcgccggcggtacgagactcaagtacagacccgtcttcagaccagcctggctaaccttcatcagaagtctagtgagattgaaatcctcgcagttgatctgccaaaggaaacgatcctgcagtttttatccctggaatgggacgccgacgagcaggcttttaatacaactgtcaagcaactgcttagccggcttcccaagcagagatacctcaagctggtatgcgacgagatctacaacatcaaggttgagaaaaaggtgagtgtgttatttctttattcctatcgggacgattactatcgaatcctcttctag

SEQ ID NO: 23004 - DNA, 5652 bp, synthetic construct
  source 1..5652: mol_type = other DNA; note = Synthetic coding sequence
atgcccgtgggccggatcgagtgccccagcagccccagcttcccccgagatatttcccatgaatgcagggtttgtggggttaccgaggtgggcctgagcgcctatgccaaacacatcagcggccagttacataaagataacgttgatgcacaagagcgggaagatgacggcaagggggaagaggaggaagaagactacttcgataaggaactcattcagcttataaaacagaggaaggagcaatcgaggcaggacgagccatcaaatagtaatcaagagatcaactcggacgatcggaggcctcagtggaggagggaggacaggatcccttatcaggatcgagaaagctattcgcaacccgcctggcaccatcgagggcctcctcagagggactggaagtgggagaaggatggatttaataacacacgtaagaattcttttccccactctctcagaaatggcggaggccctcgcggtcgatctgggtggcacaaaggtgtggccggagggtcttcaacctggttccataaccattcgaacagcggaggcgggtggctcagcaacagtggtgccgtcgactggaaccataacggtacggggcggaactcaagctggctgtccgagggcacaggaggcttcagctcatggcacatgaacaatagcaatgggaactggaagagttcggtacggtctacgaataactggaattacagtgggcccggagataaattccagccaggtcgaaatagaaattctaactgtcagatggaggatatgactatgttgtggaacaaaaaaagcaataagtccaacaaatacagccatgaccgttacaactggcagcgtcaggagaacgataagctcggaaccgtcgccacctatcggggtccgagcgagggctttacatcagataaattcccttctgagggactgctcgacttcaatttcgagcagttggagagccagactactaaacaagctgacaccgcaaccagcaaggtatcaggaaagaatggttcagctgcccgggagaagccccgcagatggaccccatacccctcacagaagaccctggatttgcagtcaggactgaaggacatcactggaaacaaatccgaaatgatcgagaagccactgttcgatttctcccttatcacaacgggaatccaagagcctcagaccgatgagacgcggaactctcccacacagaaaacccagaaggagattcacaccggcagcctgaaccacaaagcctcctccgacagcgccgcatctttcgaggtagtccggcaatgcccaaccgccgaaaagccagagcaagaacatacccctaataagatgcctagtctaaagtccccgttgcttccctgtcccgctacaaagtcgctctctcagaagcaggaccccaaaaatataagtaagaacactaagacgaatttcttcagtcccggagagcactccaatcctagtaacaaaccaactgtcgaggacaaccacggcccctacattagtaagctgaggtcttcatgcccgcatgtcttgaaagggaataaaagcacctttggttcccagaagcagagtggcgataacctgaatgacacactgcggaaggccaaggaggtcctacagtgccacgagtctctgcagaaccctttgttatccacctccaagtctactcggaattacgctaaggcctcccgcaatgtagaagaaagtgaaaaaggatcactgaagattgagtttcaggtacatgccttggaagatgagtcagacggcgagaccagtgacacagagaaacatgggaccaagattgggaccctaggatccgctactacagagttgctgtccggatcaacccgcacagctgatgagaaagaagaggacgacaggattctgaagacatcacgggaactgtctacatcaccctgcaaccccattgtccgccagaaggaatcggaacttcaaatgacctctgccgccagcccacaccctgggttgctgctggacctgaagaccagcctggaggatgcccaggttgatgatagtatcaaaagccacgtcagctacgagacggaaggcttcgagtctgcttcactcgacgcagagcttcagaagtccgacatctcccagccatctggacctcttctgcctgaactgagcaaactgggctttcctgcttcacttcagcgtgacctgactaggcatatttctctgaaaagcaaaaccggcgtgcacctgccagagccaaatttaaactctgcccggcgtattcggaacatttctggccacagaaaaagcgagaccgaaaaagagagcggactcaagcccaccttgcggcagatcctgaatgctagccgccgcaacgtcaactgggaacaggtcatccagcaggtcacaaaaaaaaaacaggagctaggcaaggggctgccgcgctttggcatagagatggtgcctctagtacagaatgagcaggaagcccttgacttggatggtgagccagatctctcttctctggaaggtttccaatgggaaggggtctccattagctcttcccccggtctggcccggaagagaagtctgtcagaaagtagtgttataatggaccgtgccccttctgtctactcttttttcagcgaggaagggacaggtaaggagaatgagccacagcagatggtctcccctagtaacagcctgagagccgggcagtcccagaaggcgacaatgcatctgaaacaagaggtcacacccagggcagcctcattgcggaccggtgaaagggccgagaacgtggcaacccaacgtagacactccgctcaactgagttctgaccacatcatccccctgatgcaccttgcaaaggatctgaactcgcaggaaagatcaatacccccctccgagaaccagaattctcaagagtctaacggcgagggaaattgcctgtcttctagcgctagctccgctctagctatttcctccctcgcagacgctgccaccgacagcagttgcacgagcggcgccgagcagaacgatggccagtccattcgtaaaaaaagaagagcgacgggtgacggcagtagcccggagctgccttcactggaacggaagaacaaaaggcgaaagatcaaaggtaaaaaggagcgctcccaggtggaccagctcctgaatattagccttcgagaggaggagctgtctaaatccctccagtgtatggataataacctgctgcaggccagggccgcattacaaactgcatacgtggaggtgcagagactgctgatgctcaaacagcagataactatggagatgagcgctttgcgcacgcaccgaatccagattctccagggcctccaagagacctatgagccaagtgagcacccagaccaggtgccttgcagtctcactcgggaaaggcgtaactctagatctcagacgtcgatcgacgctgctctgctcccgactccctttttccctcttttcctggagccacccagctcccatgtgtcaccttctcctaccggagccagtctgcaaattactacaagccctactttccaaacacacggaagtgtgcccgccccggattcatctgttcagataaagcaagaacctatgtccccagagcaggatgagaatgttaatgccgtccccccctctagtgcctgcaacgtctccaaagaattgctcgaagctaaccgggagataagtgatagctgccccgtgtatccagtcatcacggcaagattgagcctgcccgagtcaacggagagctttcatgaaccgagccaggaattgaaattcagcgtggagcaacggaacacaaggaatagagagaacagtccaagctcccagagtgcagggctgtcatccatcaataaggagggagaagaacccaccaagggaaacagcgggtccgaagcttgtacaagctcgtttctgcgcctttcatttgccagtgaaacacccctggaaaaggaaccacatagtcccgctgatcagccagaacagcaggccgagtcgaccctgactagcgcagaaacacggggcagcaagaaaaaaaaaaaacttcgtaagaaaaagtcgctcagagcggctcatgtaccagaaaacagcgatactgagcaggacgtgctgactgtgaagccagtgcggaaggttaaagccggcaagctgatcaaagggggtaaagtcactacctctacatgggaggatagcagaaccggaagggaacaggaatctgtgagggatgagcccgattcagatagcagtctggaggtgctagaaataccgaatcctcagttggaggttgtggcaatagattcctctgagtcaggcgaggagaagcctgactcccccagcaaaaaggacatatggaactccactgagcagaaccccctggagaccagtcgttcaggctgtgacgaggtctctagcactagtgaaatcggcacaaggtacaaagatgggatccccgtctcggtggcggaaactcagactgttatcagctcaatcaaagggagcaaaaactcttcggagatctcatcagagcctggagatgatgatgaacctactgaaggctcctttgagggccaccaagccgcggtgaatgccattcagatcttcggcaatttgctgtacacctgctccgcagataaaaccgtcagggtgtacaacctggtcagtcgaaaatgcattggcgtcttcgaaggccatacctcaaaagtcaattgcctcctggtaacacagacttcaggcaaaaatgctgcactttacacaggatctagtgatcacactatccgttgttacaatgtgaagtccagagagtgcgtggagcagctgcagctggaggaccgcgtcctgtgtcttcactctcggtggcggatactgtacgccggactcgccaatggaactgtcgtgacgttcaatatcaaaaataacaagagactcgaaatcttcgagtgccatggcccacgggccgtgagctgcctcgctaccgcgcaggagggcgccaggaaactgctagttgtcggcagttacgactgcaccattagcgtacgcgacgctagaaatggcctccttttacgaacattggagggacacagcaagacaattctgtgcatgaaagtcgtgaatgaccttgtgttttcaggcagctcagatcagtctgtgcatgctcacaacatccatacgggcgaactggtgagaatctacaagggccataaccacgccgtcaccgtcgttaatattctgggcaaggtcatggtgacagcctgtctcgataaatttgttcgggtgtatgagttgcagtctcacgatagacttcaggtctacggagggcataaagacatgataatgtgcatgacgatacacaaatcaatgatttacacaggatgctatgacggctccatacaggccgtgagacttaatctcatgcagaactacagatgttggtggcacggctgcagtctgatttttggcgtcgtcgaccatctgaagcagcacctgttgaccgaccacacaaatccgaactttcagaccctaaaatgtcgctggaaaaattgtgacgccttcttcacagcgcggaagggatcaaagcaggacgcagccggtcacatcgaacggcatgccgaggacgatagtaaaatagactcatag

SEQ ID NO: 23005 - DNA, 588 bp, synthetic construct
  source 1..588: mol_type = other DNA; note = Synthetic coding sequence
atggccgagcccgtgcaggaggagctgagcgtgctggccgccatcttttgtcggcctcacgagtgggaggtactgagtcgttccgaaaccgacggtacagtcttccgtatacacacaaaggctgagggctttatggatgtggacattcccttagagcttgtttttcacctacccgtgaactacccttcgtgcctgcccggaattagtatcaatagcgaacagctcaccagggctcaatgcgtcaccgtgaaagaaaacttattggagcaagccgagagcttgctttcggagccaatggtccacgagctggtactctggattcaacaaaacctacggcatatactaagtcagccggaaaccgggtctggaagtgagaaatgtacattctctacaagtacaacaatggatgacgggctgtggataactctgctccacttggatcacatgagggcaaaaactaagtatgtaaaaatagtagaaaaatgggctagtgatctccgcctgaccggaaggctgatgttcatgggaaaaatcatcttaattcttcttcagggggacagaaacaatttgaaagtcccaaaaagttag

SEQ ID NO: 23006 - DNA, 1119 bp, synthetic construct
  source 1..1119: mol_type = other DNA; note = Synthetic coding sequence
atgagccggcggcggttcgactgccggagcatcagcggcctgctgactacgacaccacaaatacctattaagatggagaacttcaataacttctatatcctcactagcaaggagctgggcagaggaaagtttgccgtcgtccggcagtgtatcagcaaaagcacaggacaagagtacgccgccaaattcctgaaaaaaaggcggcgcgggcaggattgtagagctgaaattctgcacgaaatagcggttctggaacttgccaagtcttgtcccagggtcatcaacctccatgaagtgtacgagaacacaagcgaaataattctcatcctagaatacgctgccggaggcgaaatctttagcctttgcttaccagagctggcagaaatggtgtcagagaacgacgtgatccggttgatcaaacagatcctggagggagtgtactatctgcaccagaacaatattgtgcacctagacttgaaaccccagaacattcttctctcatctatttatccactgggagatatcaagatcgtcgacttcggcatgagtagaaagatcggccacgcatgcgagttgagagaaatcatgggtacaccagagtatttggcccccgagattttgaactatgaccctatcactacagccaccgacatgtggaacataggaataattgcgtacatgctacttacacatacaagccctttcgtgggagaagataatcaagagacatatttgaatatctcgcaggtgaatgtggattactcagaggagacgttttcttctgtttcacagctggccacggactttattcagtctctcctggtcaagaatccggaaaagaggccgactgctgaaatatgccttagccattcatggctacagcagtgggactttgaaaacctctttcaccccgaggaaacctcatcctcctctcagactcaggatcacagcgtaagaagtagcgaggacaagacatccaagagctcatgtaacggaacctgtggggatcgagaagataaggagaatattcctgaagattccagcatggtgtctaaacggtttcgatttgacgattccctgcctaaccctcacgagcttgtatcagacctcctgtgctag

SEQ ID NO: 23007 - DNA, 930 bp, synthetic construct
  source 1..930: mol_type = other DNA; note = Synthetic coding sequence
atggaggccgcccggaccgccgtgctgcgggtgaagcggaagcggtctgctgaacccgccgaggcgctggtgcttgcctgtaagaggctccggtccgatgccgttgagagtgcagcccagaagactagcgaaggccttgagcgcgctgcggaaaacaatgtatttcaccttgtcgcgacagtctgctctcaggaggaacccgtgcaacctctactccgcgaagtactgaggccctcgagggactcacaacagcgggtgcgaaggaacttgcgcgcatctgctcgggaggttcgtcaagagggtcgctaccgggtgctgtcttcccggcgtagcctggggaccacatctagtggacaagagagcgagtatacaccagggaatcccgaggccgctgggaactctggcttccagctgctggacctggtccacgaggagggcgagcccgaggccgctagtgccggaagctgtaagaccagcgatcccgatgttattctgtgcaactctgtcgagctcatcagggagagattgacagtctcagaagacggaccaggggtgaggcggcaggaggaacaaaaacatgatgattacgtctacgacatctattacctggaaaccgcaacccctggttggatcgagaacatcctgagcgtgcagccctacagccaagaatgggagctggtcaatgatgaccaggaacccgaggatatttatgacgatgaggatgacgaaaactcagagaacaattggcgtaacgagtacccagaggaagagagtagcgatggggacgaagattctaggggcagtgccgactacaactctctgagcgaagaggaaaggggcagctcgcgccagcgcatgtggtctaagtacccactggacgtccagaaggagtttggatacgactcgccccacgatctggattcagattag

SEQ ID NO: 23008 - DNA, 1068 bp, synthetic construct
  source 1..1068: mol_type = other DNA; note = Synthetic coding sequence
atggccgacaacagcagcgacgagtgcgaggaggagaacaacaaggtcctcagagaaggaatgcctcaagcaccgggacaccgggggaaagatatggacccggtgcctccagcccctgcaagcctcaagtgtcaccaaactcccagtcacgtgctggagagagtgggatggtaccgtgaatcacagaagcaccgcaaagaaaagaagaagacgtctcaattgaccccccagcggggcttcagtgaaaatgaagatgatgacgatgacgatgatgacagctccgagaccgactcagactctgatgacgacgatgaggagcacggcgctccattggaaggtgcctacgacccggcagactacgagcatttacctgtctccgctgagatcaaagagctcttccagtatatctcccgttacacaccccagctgattgatctagatcataagcttaaaccctttatccccgactttattcccgctgtgggcgatatagatgccttcctaaaggtgccacgccccgatggaaagccggacaacttaggtcttctcgtactcgacgaaccatctacaaagcagagcgatcctaccgtgctcagcttgtggctgacagagaatagcaagcaacacaatatcactcagcacatgaaggtcaagagtctggaggacgccgagaagaaccctaaggcaatcgacacctggatcgagagcatctcagagctgcacaggagcaaaccgccagcaactgttcattacacgcgccctatgcccgatattgataccctcatgcaagagtggtctcccgagtttgaggagctgctgggcaaggtgtcactccctacggccgagatcgattgcagcctggcggagtacatagatatgatctgcgccatcctggacattccagtgtataagtcacgtatccagtcattgcatctgttattttcgctgtactcagagtttaagaattcccagcactttaaggcactggctgagggtaagaaagcatttaccccaagctctaattctacctcgcaagctggcgatatggagacactgaccttttcgtag

SEQ ID NO: 23009 - DNA, 915 bp, synthetic construct
  source 1..915: mol_type = other DNA; note = Synthetic coding sequence
atggccgacaacagcagcgacgagtgcgaggaggagaacaacaaggagaagaagaaaaccagccagctgaccccacagcgcggattctctgaaaacgaggacgatgacgacgatgacgacgactctagtgagacagatagcgactcagatgacgacgacgaggagcacggagccccactggagggggcctacgaccctgctgattacgaacacctacccgtgagcgccgaaataaaggagctgtttcagtatatatcccgatatacaccccaactcatcgacctagatcacaagttaaagcccttcattccggatttcatcccagccgtgggagacatagacgccttcctaaaggtacctcgaccagacggaaaacctgacaacctcgggttgctggttctggatgaaccctctaccaaacagtctgatccaaccgtcctgagtctgtggttaacagaaaattccaagcagcataacattactcagcacatgaaagtgaaaagcctcgaggacgctgagaaaaatccgaaggcgatcgatacctggatagagagcatctccgaactccataggtcaaagccccctgccactgtccattatacacgcccaatgcccgatatagatactctcatgcaggagtggtccccagaatttgaggagcttctggggaaagtctccctgcccacagcggagatagattgttcactggctgaatacatagatatgatttgtgcaatcctggacatacccgtctataagtctagaattcagtcacttcatcttctcttcagcctatacagcgagtttaagaattcacagcatttcaaagccctagcagaagggaaaaaagcattcactccctccagcaactctacgtcacaggcaggtgatatggaaacattgaccttttcatag

SEQ ID NO: 23010 - DNA, 1335 bp, synthetic construct
  source 1..1335: mol_type = other DNA; note = Synthetic coding sequence
atgcgggagatcgtgcacctgcaggccggccagtgcggcaaccagattggggcgaagttctgggaggtgatatctgacgagcatggtatcgacccaaccgggacttatcacggagacagcgacctgcagctcgagcgcatcaatgtctactataacgaggccaccggtgggaattatgttccccgggccgtcctggtggacctggagccaggcactatggactcagtgaggtctggccctttcggacagatatttcgcccagacaatttcgttttcgggcagtccggcgccgggaacaattgggccaaaggccactacacagagggtgctgaactggtcgatgctgtgctggacgtcgtgcggaaggaggccgaatcttgtgactgtctacagggattccagctaacccactccctgggtggggggacaggtagcggcatgggtaccctactgattagcaagataagagaggaatttcccgaccgaatcatgaatacatttagtgtggtgccctctccaaaggtgtccgacaccgtggtggagccctacaacgcaactttatccgttcaccaactagtcgaaaatacagacgaaacctactgcatagataatgaagctttgtatgacatctgtttcaggacgctgaagcttaccactcccacatacggcgatttaaaccaccttgtgagtgccaccatgtccggggtcacaacctgtctgagattccccgggcagcttaacgccgaccttaggaaactcgccgtgaacatggttccctttcctcgtctgcacttctttatgccagggtttgcacccctcacctccagggggtcccaacagtacagagcccttactgtccccgagctgactcaacaaatgttcgacgcgaagaatatgatggctgcctgcgaccccaggcacgggaggtatcttaccgtagctgctgtgttccgcggccgcatgtcaatgaaggaggtcgatgagcaaatgttgagcgtgcaatctaagaactcaagctatttcgtagagtggattccaaacaacgtcaagaccgctgtgtgcgacattccgccaagaggtttaaagatggctgctaccttcatcggcaattctactgcaattcaggaactgttcaaacgaatctccgagcagttcactgccatgttccgcagaaaggccttcctccactggtacacgggagagggcatggatgagatggagttcactgaggctgaatctaacatgaacgatttggtgagcgagtatcagcagtatcaggacgctactgctgaagagggagagtttgaagaggaagccgaggaggaagtagcatag

SEQ ID NO: 23011 - DNA, 1398 bp, synthetic construct
  source 1..1398: mol_type = other DNA; note = Synthetic coding sequence
atggagcccagcagcctggagctgcccgccgacaccgtgcagcggattgctgccgaactgaagtgccatccgaccgatgagcgcgtggcgcttcaccttgatgaagaggacaaattgagacatttccgagagtgtttttatattccaaagatccaggacttgcccccagtggacctctccctcgttaataaggacgagaatgccatctacttcctgggcaatagcttgggcttgcagccaaagatggtgaaaacctatctggaggaggaattggataaatgggcgaaaattgcggcatatggccacgaagttggcaaaagaccgtggatcacgggtgatgagtctattgtgggcttaatgaaagacatagtcggagcgaacgaaaaagaaatcgcactgatgaatgccctgaccgtgaatctccatttgcttatgctgagcttcttcaagcccacaccaaagaggtataagatcctgctggaggctaaggcctttccttcagaccactatgctattgagtcccagctgcagcttcacggactgaatattgaggagtctatgagaatgatcaagccccgggagggcgaggagactctgcggatcgaggacatcctggaggtgatcgagaaagagggagacagtattgcagtaatactgttctccggtgtgcatttttacactggccagcacttcaacatccccgcaattaccaaagctggccaagcaaaggggtgttacgttggattcgatctggcgcatgccgtgggtaacgtggaactgtacctccatgactggggtgtggatttcgcgtgctggtgctcctataagtacttaaacgctggggctggaggtatcgccggcgccttcattcacgaaaagcacgcacacactattaagcccgctctagtcggatggtttggtcatgaactgtcaacaaggtttaagatggacaataaactccagcttatacccggtgtctgtggctttcgaatatctaatcctccgatcctgctcgtctgtagtctgcacgcgtctctagaaattttcaaacaggccactatgaaagctctccggaagaagtccgttttgcttacaggctatctggagtaccttatcaaacacaactatggaaaagataaggcagcaacaaaaaaacccgtagtcaatatcattacgccaagccacgtggaagagagagggtgtcagctgaccataacgttttcggtgccaaataaagacgtgttccaagagctggaaaaacggggggtggtgtgcgacaaaagaaacccaaatggcattagggtggctccagtaccgctgtacaactccttccacgacgtctataaattcaccaacctgcttacctcaatactggatagcgccgagaccaaaaattag

SEQ ID NO: 23012 - DNA, 4758 bp, synthetic construct
  source 1..4758: mol_type = other DNA; note = Synthetic coding sequence
atgaacagccagccccagacccggagccccttcttccagcggccccagattcagccacctcgtgcgacaatccctaactcctcgccctctattcgccctggtgcccagactcccaccgccgtttatcaggctaaccagcatatcatgatggtcaaccatttgcctatgccgtacccagtgccccaagggccccagtattgcattcctcaataccggcatagcggccccccgtacgtcggcccacctcagcagtaccccgtgcagccccccggccccggccctttctatcctggacctggtcctggcgattttcctaatgcctatggaacgcccttttatcctagccagcccgtgtaccaatccgctcccatcattgtacctactcagcagcaaccgccacccgctaagcgcgaaaaaaagactattaggataagagacccgaaccagggcgggaaggatatcacagaagagattatgtctggaggcgggagtcggaaccccactcccccaatcgggaggccaacgtctaccccgacccccccccagcagctgccctcacaagttccggaacactctcctgtcgtgtacggcacagttgagtccgcccacctggcggcatctacgcccgtgaccgctgccagcgaccaaaaacaggaggaaaagcctaaaccagatcccgtcctgaagtctcctagcccagttctccgccttgtcttgtctggcgaaaaaaaggagcaagagggccagacctccgaaaccaccgccattgttagcatcgcagagttacctctgccaccaagtcctaccaccgtgagctcggtggcccggtccaccatcgcagccccaaccagcagcgccctctcatctcaaccaattttcactacagccatcgacgaccgatgcgagctgtcaagtccccgagaggacacaattccaatcccaagtctgaccagctgcactgagacaagtgaccccttacccaccaatgaaaatgacgacgatatttgcaagaaaccttgcagcgttgctcctaatgatattcctctggtttcctcgaccaacctaatcaatgaaatcaacggcgtgtccgaaaagttatccgctaccgagtctatcgtggaaattgtgaagcaagaagtgcttcctctcaccttggaactcgaaatcctagaaaacccccctgaggagatgaaactcgagtgtattcccgctcctatcaccccttcaaccgtgccctcctttccccccaccccacctacccctcctgcatcaccacctcatacccctgtgatcgtgccagccgcagccacgactgtgagttccccaagcgccgcaatcacagtgcaacgcgtcctcgaagaggacgagagcattagaacctgtttgtcggaagacgcgaaagaaatccagaataagatcgaggtagaggccgacggacagacggaggaaattctagattcccaaaatcttaactctcgccgctcaccagtccccgcccagattgctatcacagtacctaagacttggaagaagcccaaggaccgcacaagaaccactgaagagatgttagaggcagagctggagctgaaagctgaggaggaactatctattgacaaggtcctcgaatctgagcaggataaaatgtcgcagggcttccaccctgagagggatccatcagacctgaagaaagtcaaggcagtagaagagaacggcgaagaggcggagcccgtacgaaatggcgctgagtcagtctctgaaggggagggaattgacgctaatagcggatccaccgattcctccggcgacggcgttacttttccattcaagccggaaagttggaaaccgacagacaccgaaggcaagaagcagtatgatagggaattcctgttggacttccagtttatgccagcctgcattcagaaacctgaagggctacccccaatctccgacgtggtgttggacaagattaaccaaccaaagctcccaatgcgtacactcgatccccgcattctgcctcgcgggccagattttacacctgcattcgcggatttcggacgacagacccccggtgggaggggtgtcccactgctcaatgtgggctcaagaagatcccagcctggccagcgaagggagcccagaaagataatcaccgtgtccgtgaaggaggatgtgcacttaaaaaaggccgagaacgcctggaagccctcacaaaaacgcgattcccaggccgatgaccctgaaaacataaagactcaggagctgttccgcaaggtgagatcaatactgaacaaactgacacctcagatgttcaatcagctcatgaagcaagtttccggccttacagtggacacagaggagcgcctcaagggcgtgatcgacttggtgtttgaaaaggctattgatgaaccctcatttagcgtcgcctacgcaaatatgtgtcgctgcctggtgacgctcaaagtcccaatggccgataaacctgggaacacagtgaattttcggaagcttttacttaaccgttgtcaaaaagaattcgagaaagacaaagctgatgacgacgtcttcgagaaaaagcagaaggaactggaggcggcgagcgctccggaagaacgcactcgactacatgacgagctcgaggaggccaaagacaaagcacgcaggaggtcaattggcaacattaagttcatcggcgagctgtttaagctcaagatgctgacggaggccattatgcatgactgcgtggttaaactgttaaaaaatcatgacgaggagagccttgagtgtctatgcaggctgcttactacgatcggtaaggatctggatttcgaaaaagcaaaaccaagaatggaccagtatttcaatcagatggaaaaaatagtgaaagagaggaaaaccagttcacgcatccggttcatgctgcaggatgttattgatttacgactctgtaactgggttagtaggagagcagaccagggccccaaaactatcgagcaaatccacaaagaagccaaaatcgaagagcaagaagagcaaagaaaggtgcaacagctgatgaccaaggagaagaggcggcccggagtccagagggttgacgaggggggttggaataccgtccagggagccaagaatagtcgcgtccttgacccctctaagtttctaaaaatcactaaacccacaatcgacgagaagatccagctggttccaaaagcccagttggggtcttggggcaagggatctagcggcggagccaaagcgtccgagactgatgctctgcggtctagtgcttctagtttaaacagattttcagcactccaaccccccgctccttcaggctccactcccagcacgccagtcgagtttgatagtagaaggaccttgacgagccggggctccatggggagagagaaaaacgataagcctctgcctagcgcaaccgcccgtcctaatacgttcatgcggggcggcagttcaaaagatctcctggacaaccagtcccaggaggaacagaggagagaaatgctggagacagttaaacagctcacgggtggggtagacgtagaacgtaattccactgaagctgagcggaacaaaactcgggaatcagccaaacccgagataagtgcaatgtctgcccatgataaagctgccctgagcgaagaggaactcgaaagaaaaagcaagtcaataatagacgaatttttacacataaacgactttaaggaagctatgcagtgcgttgaagagctgaacgcacagggccttctccacgttttcgttagggtcggtgtcgagtcaaccctggaacggagccagattaccagggaccatatgggccaactgctgtatcagctcgtgcagagtgagaagctgtcaaagcaggacttttttaagggttttagcgagaccctggagctagcagatgatatggctatcgacattccccatatttggctttatctggccgagctggtcacgccgatgctgaaagagggcggcatctctatgagagagctgacaattgagtttagcaagccccttctcccagtgggacgagcaggcgtgctgctctcagaaatactccatctgctctgtaagcagatgagccacaaaaaggtgggagcactctggcgagaagccgacctatcttggaaggacttcctccccgaaggggaggatgttcataattttctgctagagcagaagctcgacttcatcgaatctgattctccgtgcagcagcgaggctctgtcaaaaaaggaactgtcagctgaagaactctacaaacgcctggaaaaactaattatagaagacaaagcaaacgacgaacaaatcttcgactgggtagaggccaacctagatgaaattcagatgtcatcaccaaccttcctgagggctctcatgactgcagtgtgcaaagcagcgattatcgcggactcctctactttcagggtggacacagcagtgatcaagcagcgcgtccctatccttctgaaatatctggacagtgacacagagaaagaactccaggccctatacgctttacaggcctccatcgtcaaattggatcagcctgccaacctcctgcgcatgttttttgactgtttgtacgatgaggaagtgatcagcgaggatgctttctataaatgggagagctcaaaggaccctgctgagcagaacggcaaaggagtcgcattaaaatccgtgaccgccttcttcacctggctccgtgaggcagaggaggagtctgaagacaattag

SEQ ID NO: 23013 - DNA, 378 bp, synthetic construct
  source 1..378: mol_type = other DNA; note = Synthetic coding sequence
atggcccccgccaagaagggcggcgagaagaagaagggccggagcgctataaacgaggtggtaactagagagtatactattaacatccataaacgcatccatggcgttgggttcaaaaagagggccccgagagccttgaaagaaatacgtaagtttgcaatgaaggagatgggaacacccgatgtgagaatcgatacaaggctgaacaaagccgtctgggcaaaaggcatcaggaacgtcccatatcgcattcgagtgaggctttcaagaaaacggaatgaggatgaagacagcccaaataaactgtatacccttgtaacatacgtacccgttactacttttaagaacctacagaccgtaaacgtggacgagaattag

SEQ ID NO: 23014 - DNA, 1590 bp, synthetic construct
  source 1..1590: mol_type = other DNA; note = Synthetic coding sequence
atgctggtgctgttcgagaccagcgtgggctacgccatcttcaaggtgttgaacgagaagaagttgcaggaggtcgattccctttggaaagagtttgaaacacccgagaaagccaacaaaatcgtgaaactcaaacatttcgagaagttccaagatacagcggaagccctggccgcttttaccgcactcatggagggaaagatcaacaagcagctgaaaaaggtcctgaagaaaattgttaaagaagcacatgagcctctcgccgtggccgatgcgaaacttggtggcgtaattaaggagaaattgaacctctcttgtatacactcccccgttgtaaatgagttgatgagaggaatcagatcccaaatggatggcctgattcccggggtagagccccgggagatggcggccatgtgcctcggtcttgcacactcgttgtcccgctaccggctgaaatttagtgctgacaaggtggataccatgatagtccaggctatcagcctcctggacgacttagataaggagctgaacaattacatcatgcgatgcagggaatggtatgggtggcacttccctgagctggggaaaatcatttctgacaacctgacatactgtaaatgcctacagaaagtgggggacagaaagaattacgcttcagcaaagctgtcggagcttttacctgaagaagtagaagctgaagtgaaggccgctgccgagattagcatgggaaccgaggtgtctgaggaagacatttgcaatatcctccatctgtgtactcaggtgattgagattagcgaatatagaacgcagctttacgagtatcttcaaaacagaatgatggcaatagcaccaaacgtcactgtcatggttggagagctcgttggtgcgcgtctgatcgctcacgccggctcattgctcaatctggctaagcacgcagcatccaccgtgcaaattctgggcgctgagaaggccttatttcgggcactgaaatcccgacgggatacccctaagtatggccttatttaccacgcaagcctggtgggccaaacgtctcctaaacacaaaggtaaaattagtcgcatgctggctgcgaaaacggtgctagccattaggtatgacgccttcggggaggactcgtcttctgcgatgggggttgagaaccgggcgaagttagaagccagattgcgaacgctggaggaccgtggaatcagaaagatctccggtacagggaaagcacttgctaagaccgaaaagtacgaacacaaatccgaggtgaagacatacgatccctctggcgatagcacgctgccaacgtgctccaagaaacggaaaattgaacaggtggataaggaggacgagatcaccgaaaaaaaagctaagaaggctaagatcaaagtgaaggtggaggaagaagaagaggagaaggtcgccgaggaggaggagacctcggttaaaaagaagaaaaagcggggcaaaaagaagcatatcaaagaggagcctttgtccgaggaggaaccgtgtacgtccaccgctatcgcatcacctgaaaagaagaaaaaaaagaaaaaaaagcgggaaaatgaggactag

SEQ ID NO: 23015 - DNA, 738 bp, synthetic construct
  source 1..738: mol_type = other DNA; note = Synthetic coding sequence
atgaacggccgggccgacttccgggagcccaacgccgaggtgccccggcccatcccacatattgggccagattacatcccaaccgaggaggagcgcagagtgttcgcagaatgtaatgacgaatctttctggtttaggtcagttcctctcgccgctacctccatgctcatcacgcagggattgatctcgaaagggatcctgtcatcacatcctaaatacggatctatcccaaagttgattctggcttgcattatgggttacttcgctgggaagttgtcatatgttaagacgtgtcaggagaaatttaagaaactggagaattcaccattaggtgaggctcttcgttctggccaggccagacggagttccccccctggccattactaccagaagagtaagtatgattcttctgtcagtggccaatctagcttcgtcaccagtcccgctgctgacaacatcgagatgcttccccattatgaacctattcccttctcctcatccatgaatgaatcagccccaacaggcataaccgaccacatcgttcagggtcctgacccaaacctggaggagagtcctaaaaggaaaaatatcacttatgaggagttaaggaataaaaatagagaatcctatgaggtcagcctaacccagaaaactgatccttcggtgaggcctatgcacgagcgggtccctaagaaggaagtcaaggtcaacaagtacggagacacatgggacgagtag

SEQ ID NO: 23016 - DNA, 1746 bp, synthetic construct
  source 1..1746: mol_type = other DNA; note = Synthetic coding sequence
atggaggacgtgaacagcaacgtgaacgccgaccaggaggtgcggaagctgcaggagctcgtgaagaagttggaaaagcaaaacgagcagctgcgatcccggtcaggggctgtgcagggtgccggaagtcttggaccaggaagccccgtgagagccggcgccagcatcccaagctccggcgcggcatctcccagaggcttcccccttgggctaagcgccaagagcggcggaggacccggaagtgggccacggcgcactagctctgaagagttacgggacgcaacgagtctgctggccgctggagaaggcggactgctagacgaagtagagcctctccgccccgacgagctggaaagactttctggttgggaggaggaggaagaatcctggctgtacagctcgcctaaaaaaaaactcacccctatgcaaaagtctgtaagtccactggtttggtgccgacaggtgctggattaccctagccctgatgtggaatgtgcaaaaaagagtcttatccacaagctcgaccaaacaatgagtgcccttaaacgccagaatctctacaacaatccttttaacagcatgtcctacaccagcccctatagtcccaacgcctctagtccctacagcagcggctttaactctccctcgagcacccccgttagacctcccatcgtgaagcagctgattttacccgggaatagcggcaacttgaagagttcggatcggaatcctccactgtctccccaatcctctatagactcggaactgtctgccagcgagctggacgaggatagcatcgggtctaactacaagctcaacgacgtgaccgacgtgcagatcctcgcacgtatgcaagaagagtccctgcggcaggaatacgcggcaacgacctcacggaggtcttccggaagcagctgcaattcaacgagacgcggtacttttagcgaccaggagctggacgctcaatccctggatgatgaggatgataacatgcaccacgcagtgtatcctgccgtgaaccgtttttcgccaagcccacgcaattctccaaggccctcaccaaagcagtctccacgaaatagccccagatctcgctcgcccgcccgagggatcgaatactctcgagtcagcccccagcccatgatctctcggctgcaacaacctcggctatcgcttcagggacaccctaccgatctgcagacctccaatgtgaaaaatgaggagaagctcaggaggagcctgcctaacctgtcaagaacctcaaacacccaggtagattccgtcaagagtagtaggagcgatagcaactttcaggtccccaatggtggaattccccgtatgcagccccaagccagtgcaatccccagccctgggaagttccgcagtcctgctgcaccatcacccctggctctacgccaacccgtcaaggccttctctaatcacggaagtggaagccctggtagccaggagattacacaacttactcagacgaccagctcacctggccctccgatggtgcagtccacagtctctgccaacccaccttcaaacattaatagtgctacattaacaaggccagccgggaccactgcaatgcggtccgggctgccgaggcccagcgccccttctgctggcggtattccagtgcctagatcaaagctggcccagcccgtgcggcggtctctgcctgctcccaaaacctacggaagcatgaaagacgattcctggaaggatggctgctattag

SEQ ID NO: 23017 - DNA, 3153 bp, synthetic construct
  source 1..3153: mol_type = other DNA; note = Synthetic coding sequence
atgctgtgctggggctactggagcctgggccagcccggcatcagcacaaacctgcagggcatagtagctgagccgcaggtttgtggtttcatcagtgatcgatctgtcaaagaggtggcctgtgggggcaaccattctgtgtttctgttggaggacggggaagtctatacatgcggcctgaatacgaaggggcaacttggacatgagcgggaggggaacaagcccgagcagatcggagccctagccgatcagcatatcatacacgtcgcatgtggggagtcccatagcctggccctgagtgacagggggcagttgttttcttggggagccggaagcgacggacagctgggtctgatgaccaccgaagatagtgtggccgttcctcggctgattcagaagctgaatcagcaaaccattctgcaggtgtcatgtggcaactggcattgccttgcgttggccgctgatggccagttctttacttggggtaagaattcccacggccagctgggactgggcaaagagttccctagtcaggcatctccccagcgggtgcgcagcctggagggcatccccctggcacaggttgccgccggaggagctcattctttcgctctgtctttgtcaggggctgtcttcgggtggggcatgaacaatgccggacaactgggcctcagcgacgagaaggaccgggagagcccttgtcacgtgaaactgcttagaacccagaaggtggtctatatttcctgcggggaggagcatacggctgtcctgaccaagtccggcggggtatttactttcggggccggctcgtgtggccagctaggccacgacagcatgaatgacgaagttaatcccaggagggtactcgaattgatgggaagcgaggtaacacagatcgcctgtggccggcagcacacactggcctttgtgccaagttctggactcatctatgcctttggttgtggtgcaaggggacagctaggtactggtcacacctgtaacgtgaagtgtccgagccctgtcaaaggttattgggccgcccacagcggacagctgagcgcaagagccgataggttcaaatatcatatcgtgaagcagatcttctcaggaggcgaccagacctttgtgctgtgtagcaaatacgagaactactcacctgctgtcgacttcaggactatgaatcaggcacactacacctctttaatcaatgatgagactattgcagtttggcggcagaaactcagcgagcacaataatgctaacaccatcaatggcgttgtgcaaattctctcatctgcagcttgttggaacggatcattccttgaaaagaaaatcgacgaacattttaagacttctccaaaaatccctggaatcgacctgaactctacccgagtgctctttgagaagctcatgaattctcagcactctatgattctggagcagatcctcaatagctttgaaagttgcctgatccctcagttatctagcagccctcctgatgtagaagcaatgaggatctatctgatattgcccgagttccctctcctgcaggactccaagtattacataacgctgaccattcctctcgcgatggctatcctgaggttggatacaaatccttctaaggtgttggataactggtggagccaggtctgtcctaagtacttcatgaaacttgtgaatctgtataagggggcagtcctgtacctgctccgaggcagaaagaccttcctcatccctgtactgtttaataactatattaccgctgcccttaaactcctggagaagctctacaaggtcaatctgaaggtcaaacacgtcgaatacgacacattctacatccccgagatatcgaacttggtagacatccaagaagactaccttatgtggtttctgcaccaggcggggatgaaggctaggccgtcaatcatccaggatacagtcacactttgctcttacccctttattttcgacgctcaggccaagaccaagatgttgcaaaccgacgctgaactccagatgcaggtcgcagtaaatggagcgaatctgcaaaatgttttcatgctgttaacactggaaccattactggccagatctcctttcctggttttgcacgtccgcaggaataatttggttggagacgccttacgcgaactctcaatccactcggatattgacttgaagaagccattgaaggtgattttcgacggggaagaagccgtcgatgccggaggtgtaaccaaagagttcttcttactgctgctgaaggagctcctgaatccgatttatggaatgttcacctactaccaggatagcaatctgctgtggttctcagacacttgttttgtagaacataattggtttcatctgatcgggatcacctgtggcctggccatctacaattccacagttgtggacctgcacttcccactagcactctacaagaaacttctcaacgtgaagcctggattggaggatctgaaggagctctcacccacggagggacgatccctacaggaactgctggactaccccggtgaggacgtagaggagaccttctgcctaaatttcaccatctgccgcgagtcctatggtgtcatagaacaaaagaagttaatacctggcggcgacaacgtaactgtatgcaaagataatcgccaggagttcgttgatgcctacgtcaactacgtgtttcagatatcagtccacgagtggtacaccgcattctcaagcggcttccttaaagtctgcggcggaaaggttctagaactttttcagccttccgaactgcgggccatgatggtcggcaactccaactacaactgggaggaattggaggagactgcgatatacaagggcgactacagcgccacacaccctacggtaaaattattttgggagacgttccacgaattccctctggaaaagaagaagaagtttttgttatttctgacaggcagcgatcgaatacccatatacgggatggcgagcctacagatcgtgatccagagcaccgcttctggtgaagagtatctgcccgtggcccacacatgttacaatttactggacctacctaaatattcatctaaagaaattctgtctgccagactgacgcaagcccttgataattatgaggggttttccctggcctag

SEQ ID NO: 23018 - DNA, 3069 bp, synthetic construct
  source 1..3069: mol_type = other DNA; note = Synthetic coding sequence
atgtacttctgctggggcgccgacagccgggagctgcagcggcggcggactgcaggatcgcccggagcagaactgctgcaggcagcatctggagagcgtcattccctgctgcttttaactaaccacagagtgttgtcatgcggcgacaatagcagagggcagttgggcaggcggggagcccaacgcggcgagttacccgagcccattcaggccctcgagaccctcatcgttgatctggtcagctgcgggaaagagcattcgctcgctgtgtgtcacaagggaagggtgttcgcgtggggggctggaagcgaggggcagctgggtattggcgagtttaaagagatcagcttcactcccaaaaaaattatgacacttaacgatattaaaatcatccaggtatcctgcggacactatcactcactcgctctgtccaaggattctcaggtcttctcttggggaaagaacagccacggacaactcgggctgggcaaggagtttcctagccaagcgtcaccacagcgggtgagaagcctggaggggattccccttgctcaggtcgcagctggcggcgctcactcttttgcacttagtctttgtggcaccagtttcggctggggctcaaattccgccggccaactggccctctctgggagaaatgtgcctgttcagtcaaataaacctctgagcgtgggggctttaaaaaatctgggtgtggtgtatattagttgtggagacgcccacacagcagtgctaacacaagatggaaaagtctttactttcggtgacaaccgatctggacagctggggtacagtccaacgcccgagaaaaggggtccacagttggtggagcgcatagacggactggtgagtcagattgactgtggctcttaccataccttggcctatgttcacacaaccggacaagtcgtcagcttcggccacggtccttccgatacatccaaaccaacacacccggaggcactgacagagaattttgacatctcgtgcctgatcagcgccgaggattttgtcgacgttcaggtaaagcacatctttgccggcacgtacgcaaactttgtaaccacccatcaggacacttcttccactcgcgcacccgggaaaactttgcccgaaatctcccgcattagtcagtctatggctgagaaatggattgccgtaaagaggcggtccacagaacatgaaatggccaagagcgaaattaggatgattttcagctctccggcatgtttgacagcttcatttcttaaaaaacgggggactggggagaccacctcaatcgacgtcgacctcgagatggcgagagacactttcaagaaattgacaaaaaaagagtggatctccagtatgattaccacatgtttagaagacgatttgctccgggccttaccctgccattctccacaccaagaagctctgtctgtctttctccttcttcccgaatgcccggtgatgcatgatagtaaaaactggaaaaacctggtggtaccatttgcaaaggcagtgtgcgaaatgagcaagcagagtctgcaagtccttaagaaatgctgggcttttctccaggaatcctccttgaacccgctgatccagatgcttaaagccgcaatcatcagccagctgctccatcagactaaaaccgagcaggatcactgcaacgtgaaagccctgctcggaatgatgaaggagttacacaaagtcaacaaagctaattgtcgactgcctgaaaacactttcaatattaacgagttgtcaaacttgttgaatttttacattgatagggggaggcagctcttcagggataaccacttaattccagcagaaaccccttcaccagtaatattttcggatttccctttcatatttaattcactctctaaaatcaaactccttcaggcagactctcacattaaaatgcagatgtcagaaaagaaggcctatatgctgatgcacgaaaccatcctgcagaaaaaggacgaatttcccccaagtcctcgctttattctcagagtcaggcgcagcaggctggtcaaggacgcattaagacaactaagtcaggcagaggccacagacttttgtaaggtgctggtggtcgagtttatcaacgaaatctgccccgagtctggcggcgtgtcttccgaattcttccactgcatgttcgaggagatgaccaagcccgagtacggtatgtttatgtaccctgaaatgggatcatgcatgtggttcccagccaagccgaaaccagaaaagaaacgctattttctgtttggtatgctctgtggtttgagccttttcaacctcaatgtcgcgaacttgcccttccccctggccctgtacaagaagctgctggaccagaagccatccctggaagatctcaaagaattgagccctcgcctcgggaagagtctccaagaggtgctagacgatgccgctgacgacatcggggacgcattgtgtatccgattctccatccattgggaccagaacgatgtggatcttattcctaacgggatcagcattcctgtcgatcaaacgaacaagagagactatgtgagcaagtacattgattacatcttcaacgtttccgtgaaggccgtctatgaggaatttcagagagggttctaccgggtgtgtgaaaaagagatcctcagacacttttaccctgaagaactgatgacagccattattggcaacacagattatgattggaaacagttcgagcaaaattccaaatatgagcaggggtatcagaagtcccatcctaccatccaattgttctggaaggcttttcataaacttacacttgacgagaaaaagaagttcctgttctttctcaccggccgtgaccgattgcacgccagaggcatacagaagatggaaatcgttttcagatgcccagagaccttcagcgaacgggaccatccgacgagcattacctgtcacaacatcctgtccctccccaagtactctaccatggagaggatggaggaggcgctacaagtggccataaataataaccgggggtttgtgtcccctatgttaacacagagctag

SEQ ID NO: 23019 - DNA, 1221 bp, synthetic construct
  source 1..1221: mol_type = other DNA; note = Synthetic coding sequence
atggccgccgccgtgcggcaggacctggcccagctgatgaacagctctggttcccataaggatctggcgggtaagtaccgacaaatactcgaaaaggctattcagctcagcggtgctgaacagttggaggcccttaaggcattcgtggaggccatggtcaacgagaatgtatcattggtgatcagcagacagttgctcactgatttctgtacccacctccctaacctcccagacagcaccgccaaggagatatatcactttactctggagaagattcagcctagggttatctcttttgaggaacaggtagcctcgatcagacagcacctggcgtcaatctatgagaaagaggaagactggcgaaacgccgcccaggtgcttgttggaattccgctcgagaccggccagaagcagtataacgtggactataaactggagacgtacttaaagatcgccaggttatacttggaagacgatgaccctgtgcaggcggaggcctacatcaatcgggcctcactgctgcagaatgaatctactaacgaacagctgcagatccactacaaggtgtgttatgcacgggtcttagactatagaaggaagtttattgaggccgcccagcgatacaacgaactgtcgtacaagactatcgttcatgagtctgaaaggttggaggccctcaaacatgctttacactgtaccatactagccagtgccggccagcaacgctccaggatgttagccaccctcttcaaagacgagagatgccagcaattagcagcgtatgggatcttagagaagatgtacctcgaccggatcatccgcgggaatcaactgcaagagtttgccgctatgctgatgccacaccagaaagccactactgcagatggttcatccatcctggatcgggcagtgattgagcacaatctgctgtccgcttccaagctctacaacaatattacgtttgaagagctgggggcgttgctggaaattcctgcggccaaggcagagaaaattgctagccagatgataacagaggggagaatgaatggatttatcgatcagatagatggcatagtccacttcgagacccgggaagcactgccgacatgggataagcaaatacagtctctgtgctttcaggtaaataacctcctcgagaaaatcagtcagacggcccccgaatggacagcccaggcaatggaggcccagatggcccagtag

SEQ ID NO: 23020 - DNA, 1578 bp, synthetic construct
  source 1..1578: mol_type = other DNA; note = Synthetic coding sequence
atggccgccggcctgctgggcagcgaggaccccccctggagctggaatctgacatgccgcgctctgagaacatgccaggtgagaaatattagggtcttacagctcctgttgaagccctggtgtatctctcgtgctgtctatcaaatgacagagggccgtaggtgccaggtgcatctactggacgatagaaagctggagctactcgtccagcccaaactgctggccaaggaactgctggacctggtggcaagccacttcaacctgaaggagaaagagtatttcggcatagcatttaccgatgagacaggacaccttaactggctccagttagataggcgcgtcttggaacatgattttccaaaaaaatccggacctgtggtcctgtacttctgcgtccgtttctacattgaatccataagttatctcaaggacaacgctacgattgagctgtttttccttaacgccaagagctgcatttataaggagcttattgacgtagattcggaagtggtctttgaactggcatcatacatcctgcaggaagccaaaggagatttcagctcgaatgaagttgtgcggagtgacttgaaaaaacttccagctctgcccactcaggctctgaaggaacaccctagcctcgcctactgcgaagatagagttatcgagcactacaagaagcttaatggacagacacgaggacaggccatcgttaactatatgagcatagtcgagtcattgccaacttatggtgtccactattatgcggttaaggataaacaggggattccatggtggctggggctgtcctacaaggggattttccagtacgactatcacgataaggtaaagcctcggaaaatatttcagtggcggcagctcgagaacttatatttccgcgaaaagaaattttcggtggaggtacacgacccaagacgggcttctgtgacacgcaggaccttcggccacagcggtatcgcagtccacacatggtacgcctgccccgctctcatcaaatctatctgggcgatggccatcagtcagcaccagttctacctggaccgtaaacagtccaaaagcaagattcacgcagccaggagcttaagcgaaattgcaatcgatttaacggagactgggactctgaagacttctaagctggccaacatgggtagtaaggggaagatcatctctggatcatccggtagcctcttaagctcgggctcccaggaatcagactcttcccagagcgccaagaaagacatgctggctgccctgaagtcacgacaggaggcactagaagagactctccggcaacgcctggaggaacttaagaagctctgcctgcgagaagcagagctcacaggaaagctgccagtcgagtaccccttggacccaggagaggaaccccccatcgtgcggaggaggatcggtaccgccttcaagctggatgaacagaagatacttcctaagggcgaagaagccgagttagaacgccttgaacgtgaattcgcaatccagtcccaaatcaccgaggcagcgcgacgcttggcaagcgacccaaatgtcagcaagaaactctag

SEQ ID NO: 23021 - DNA, 1605 bp, synthetic construct
  source 1..1605: mol_type = other DNA; note = Synthetic coding sequence
atgaagcaggagggcagcgcccggcggcggggcgccgacaaggccaaacccccacctggcggcggagaacaggagcctcctcccccaccagccccccaggatgtcgagatgaaggaagaagcagccacaggtggggggagcactggagaggcagacggtaaaacagccgcggctgccgccgagcactctcagagagagttggatacggtgacactcgaagatatcaaagaacatgttaagcaactcgagaaagctgtaagcggcaaggaacctcgtttcgtcctgcgggccttacggatgttgccctctacctcacggagattaaaccactacgtcctgtacaaggctgtccaaggcttcttcacctcgaacaacgctacacgggacttcctgctgccgtttttggaggagcccatggacacggaggctgatttacagttccgtccccgaaccggaaaggccgcctctactcccctgttacctgaagtggaggcatacttgcaacttctcgtggtgattttcatgatgaattctaagagatataaagaagcccagaaaatctctgatgatcttatgcagaaaatctcaactcagaataggcgagcgctggatctggtggctgcaaaatgctactattaccacgcgcgcgtgtacgaattcctcgataaattggacgtggtacgaagctttctgcatgctagattgcgcacagcaacccttcggcacgacgctgatggacaggctacgctgcttaacctgctcctccgtaattatctgcattactcactgtacgaccaggccgagaaattggtcagcaaatctgtgttcccggaacaggccaacaataacgaatgggcaaggtatctgtactacacaggacggatcaaggctatccaacttgagtactcggaggcgcgcagaacaatgaccaacgcacttaggaaggcgccgcagcacactgcagtcgggtttaagcagacggtgcacaagctgctgattgtggtcgaactcctcttaggtgaaatacccgaccgactgcagttcagacaaccaagtttaaagcggtcacttatgccttacttcctgcttacccaggcagtcagaactgggaacctggcaaagtttaatcaggtgctggaccaattcggtgagaaattccaggccgacggaacatatactttgataattcgactgcgccacaatgtgattaaaacgggggtgcgcatgattagtctgagctacagccggatttctcttgctgacattgcacagaagctccagcttgactccccagaagacgccgaatttatcgtcgctaaggcaatccgcgacggtgtgattgaggcatccatcaaccacgagaaaggatatgtgcagtccaaagagatgatagatatatatagtaccagagaaccccagctcgcattccaccagcgaatttcattttgtctggatatccacaacatgagtgttaaagccatgcgcttcccacccaaatcgtacaacaaggatttggaatccgctgaagaaagaagggaaagggagcagcaggacctggaatttgccaaggagatggccgaggacgacgatgatagcttcccttag

SEQ ID NO: 23022 - DNA, 1311 bp, synthetic construct
  source 1..1311: mol_type = other DNA; note = Synthetic coding sequence
atgcggcgggacgtgaacggcgtgaccaagagccggttcgagatgtttagtaactctgatgaggctgtcataaacaaaaaactgcccaaggagcttctgctgagaattttcagttttttggacgtcgtgaccttatgcagatgcgcacaggtctcccgcgcttggaatgtcctcgctctagacggatcaaattggcagcgcattgacctttttgatttccagcgtgacatcgagggcagagtggtagaaaacatctcaaaacggtgtggggggttccttcggaagctctcgcttaggggatgtctaggcgtgggcgataacgctctcagaactttcgctcaaaattgcagaaacatagaggtactcaacctgaatgggtgcactaagacgacggacgcaacatgcacaagcctgtcaaaattttgcagtaagttgcggcatctggacctcgcatcttgcacatctattacaaacatgtcccttaaggctctgtctgagggctgccctctactggaacagttaaacatatcatggtgcgaccaggtgacaaaagatggaatacaggccttggtcaggggctgtggcggactgaaagcccttttcctgaagggctgtactcaattggaggacgaagctctgaaatacattggtgctcactgccccgagcttgtcacactcaacctccagacatgtctgcagattacagatgaagggctgattacgatctgccgcgggtgccacaagctgcagtcactgtgcgcttccgggtgttctaacatcacggacgctattcttaacgccttaggtcagaactgtccaaggctcaggattctggaggtcgccagatgttcccagctgacagacgtcggatttactacactggcacggaactgccacgaactggaaaaaatggatctcgaagagtgtgttcagattaccgatagcactctgattcagctgagtattcactgccctcggctgcaggttctgtccttgtcacactgcgagctaattacggatgacggaatcaggcatctcggaaacggggcctgtgcacacgaccagctggaggtcatcgagttggacaattgccccctgatcaccgatgccagcctagagcatctcaaatcctgccactccctggagaggatcgaattatatgactgtcagcaaatcactcgggctggcatcaagcggcttcgcactcacctgcccaatattaaggttcacgcttattttgctcccgtgactccacctccaagcgtcggtggtagccgccagagattttgtcggtgctgcataatactgtag

SEQ ID NO: 23023 - DNA, 1167 bp, synthetic construct
  source 1..1167: mol_type = other DNA; note = Synthetic coding sequence
atgcggtgcctgtacggccgggtgggcggcgcccggcggaagatggctgcctccgccgcggccgctgagctgcaggcctccggtgggcccaggcaccctgtttgccttttagtgctgggaatggctgggtcaggcaaaactacctttgttcaacggctgaccggccacctgcacgctcagggtacccccccctacgtcataaatctagatcccgctgtgcatgaggtaccattcccggcgaatattgatattcgcgacactgttaaatataaggaagtaatgaagcagtatggcctcgggcctaacgggggtattgtgacaagcctcaacttgttcgcgactcgattcgaccaggtcatgaaatttatcgaaaaagcgcaaaatatgtctaagtatgtgctcattgacacaccgggacagatagaggtattcacctggtccgcttctggcacaatcattacggaggcgctggcctcatccttccctaccgttgtaatatacgtcatggataccagtcggtctactaatccggtgacctttatgagcaacatgctttacgcatgctcaattctgtacaaaacaaagctgccctttattgtggtgatgaataaaactgacattattgaccattcctttgccgttgaatggatgcaggatttcgaggcctttcaagatgctctgaaccaggaaaccacctatgtgtctaacctcacaagatcgatgtccttggtgctggacgaattctactcttccttaagggtggtgggcgtgtctgctgtacttggcactggcctggatgaactattcgtccaggtaacatcagctgctgaggaatatgagagggagtatcggccagaatacgaacggctcaaaaagagcctggctaacgctgaaagccaacaacagcgggaacagctggaaaggctgagaaaagatatgggctctgtcgccctagacgcggggactgccaaggattcactgtcacctgtgctacaccccagtgacctcattttgacacgagggacgctcgatgaggaagacgaagaagccgatagcgatacagacgacatagatcaccgcgtcaccgaggaatctcacgaggaacctgcattccagaactttatgcaggaaagcatggctcagtactggaagcgtaacaacaaatag

SEQ ID NO: 23024 - DNA, 1668 bp, synthetic construct
  source 1..1668: mol_type = other DNA; note = Synthetic coding sequence
atgcggctgatcggcatgcccaaggagaagtacgacccccccgaccctcggcgtatatatactattatgtctgctgaggaagtggcaaacgggaagaaaagtcattgggctgaactcgaaattagtggccgcgttcggtcactctcaacctcgctatggtcgttaactcatctgacggccctccacctgaacgacaattatctctctagaatcccccccgacatcgccaaacttcataacctggtatatctcgatctgtcctcaaacaagttaaggtcactgcctgctgagctgggcaatatggtgtccttacgggagttgcttcttaacaacaatctgctgcgggtgctgccatatgaactgggccgtctttttcagctgcaaaccttgggccttaaaggtaatccactgagccaggacatccttaacctgtatcaagatcccgatggtactagaaagttgctgaacttcatgttggacaatctggccgtgcatccagaacaacttccacccaggccttggatcacattgaaagagcgcgaccagattctcccatcagccagttttaccgtcatgtgctataatgtgctgtgcgacaagtatgctactcgtcaactttacggttactgtcccagctgggcattgaactgggagtataggaaaaaagggatcatggaggaaattgtgaactgcgacgccgatataatctccctacaagaagtggaaaccgaacagtattttaccctgttcctgcccgctctcaaagagaggggatacgacggattcttctcccctaagtcaagggcaaaaatcatgtctgagcaagaacgaaagcacgtggatggctgcgcaatttttttcaagactgagaaatttacactggtccagaagcacaccgttgagttcaatcaagtggcgatggccaacagcgacgggtccgaggcaatgcttaatagggtcatgacaaaagacaacattggcgtggccgtggtgctggaggtgcacaaagagttatttggtgcaggcatgaagcccattcatgcagccgataagcagcttctgattgtggccaatgctcacatgcactgggaccctgagtatagcgatgtgaagcttatccagactatgatgttcgtcagcgaagtgaagaacatcctggagaaggcatcaagtcggcctggtagcccaaccgctgaccctaattcaatccccctagttctctgtgcagaccttaattcattgcccgactcaggcgtcgtcgaatacctgagcaacggtggtgtggcggataatcacaaagacttcaaggaactaagatacaacgaatgtctgatgaatttcagctgcaacggcaagaacggctcaagtgagggtcgcatcactcatgggttccagctcaaaagtgcctacgagaacaaccttatgccttatactaactataccttcgacttcaagggagtgatcgactacatcttctacagcaaaactcatatgaacgtcttgggtgtgttgggccccctggatccccagtggctggtggagaacaacattacggggtgtccgcaccctcacataccctcagatcacttcagcctgctgacacaattggagctccatccacctttactccctctcgttaacggcgttcacttaccaaatagacggtag

SEQ ID NO: 23025 - DNA, 2673 bp, synthetic construct
  source 1..2673: mol_type = other DNA; note = Synthetic coding sequence
agcagcgacagcgagatcatcggctacgccctggacaccctgtacaatataatcagtaatgaagaggaggaggaggtggaggagaactcaaccaggcaatcagaagacctcggatcgcagtttacggaaattttcatcaagcagcaagagaatgtaacacttctgctaagcctgctggaggagttcgacttccatgtgcgatggcctggcgttaagttgcttacctcgctgttgaagcaactgggtccgcaggtgcagcagataatcctggtttcacccatgggtgtctccagattgatggacctgcttgccgatagtagggaagtgataagaaacgacggcgtcctgctccttcaagccctcactcgttccaatggggccatccagaaaattgtggcgttcgaaaacgcgtttgaaaggctgctggatattatctcagaagagggcaatagtgacggagggatagtggttgaagactgcctcattctcttgcagaatctccttaagaacaataacagcaatcagaactttttcaaagaaggatcttacatccagcggatgaaaccctggtttgaggtgggcgacgaaaatagcggatggagcgcccagaaggtgacaaacttgcaccttatgctccagttggtaagagtgctggtctctcctacgaacccgcccggggccaccagcagctgccagaaggctatgtttcagtgcgggctgctgcagcagctgtgcacaatccttatggcaacaggcgtgcctgccgatatcctcactgaaaccatcaacacagtatcggaggttattagagggtgccaagtgaatcaggattacttcgcgagtgtcaacgcaccaagtaatccacctaggcctgcaatcgttgttctgctgatgtcaatggtgaacgaacgacagccattcgttctcaggtgcgctgttctttactgtttccagtgcttcctgtataaaaaccagaagggccaaggcgagatcgtctctacgctgctcccgagcaccattgatgccacagggaacagcgtgtccgcaggacagctcttgtgtggtggcttgtttagcacagatagcctgagcaactggtgcgccgctgtggccctggcgcatgcgctgcaagaaaatgcaactcaaaaagaacaactcctgcgcgtccagctggctaccagcattggcaaccctccggtgtccctgcttcaacaatgtacaaacatcctgtcccagggatccaagatccaaaccagagtgggcttgctgatgcttctttgtacttggctcagtaattgccctatagccgtgacccactttctgcacaatagtgctaatgtcccattcttgaccggtcagatcgctgagaaccttggagaggaagagcagcttgtccaaggcctgtgtgctctgttactgggaatctctatctactttaacgacaactctctggaaagctatatgaaagagaaacttaaacagctgatagaaaagcgaatcggcaaggagaatttcattgaaaagctcggttttatttccaaacacgagctctattcacgcgcctcccagaagccacagcccaacttccctagccctgagtatatgatatttgaccatgaatttactaagctcgtgaaggagctcgagggggtcattaccaaagctatttataaatcttctgaggaggataagaaggaggaagaagtgaagaagacgctggaacaacacgacaatatcgtaacccactacaaaaatatgatcagggagcaagatttgcagcttgaggagctgcggcaacaggtgagtacgctcaaatgtcaaaatgagcaattacaaactgccgtgacacagcaggtctcgcagattcaacaacacaaagatcagtataacttgctcaagattcagttgggaaaggataatcagcatcaggggagttatagcgagggcgcgcaaatgaatgggatccaaccagaagagattggccgactaagagaagagattgaagagctgaagcggaaccaggagctgttgcagagtcaactcaccgagaaggactccatgattgagaacatgaagtcctcccaaacctctggcacaaatgagcagagcagtgccattgtaagcgcaagagactcggagcaagtggccgaattgaaacaagaactcgccacactgaagtctcagctgaactctcagtccgttgagataactaagctgcagacagagaagcaggaactcctccagaaaactgaggcctttgcaaagagcgtggaagttcagggggagaccgagacaattatagcaacaaagacgaccgatgtggagggcaggctctctgcgctcttacaagaaacaaaagaactgaagaacgagatcaaagctcttagcgaggagagaactgcaatcaaggagcagctcgactcctccaacagtactatagccatcttacaaactgaaaaggacaaactagagctagagataaccgatagcaagaaagaacaggacgatctgttagtcttattagcggaccaagatcaaaaaatcctctcgttgaagaataaattaaaggatctcggacatcccgtagaagaggaagatgagctggagagcggggatcaggaagatgaggatgacgagtcagaggacccaggaaaggatctagaccacatctag

SEQ ID NO: 23026 - DNA, 1944 bp, synthetic construct
  source 1..1944: mol_type = other DNA; note = Synthetic coding sequence
atggcccgggccggcccccggctggtgctgagcgaggaggccgtgcgcgctaaatccggactcggcccccaccgggaccttgccgagcttcagagtctctccatacctggaacctaccaagaaaagatcacccacctaggtcacagcctgatgtctttgaccggattaaaatcgctggacctctcgaggaactcactcgtgagcctcgaggggatccaatacctcactgctctggaatccctgaatctgtattataactgcatctcctccctagcagaggtctttcgacttcacgctctgacagagctggtggatgtagactttcgcctcaatccagtcgtaaaggttgaaccagactacagactcttcgtggtacacctcttgccaaagctccagcagctggacgatcgccctgtgagagcatcagagaggaaggcctcccggctgcactttgccagcgaagacagtctcgactccaaggagtcagtccctgcctcgctgaaagaggggagaccacaccacccgcgcgccaagtgtaccgaagccctggctaaacaaagcctggtgatggatgccgacgatgaagccgttttgaatctgatcgcagagtgcgaatgggacttgggcaggcctcccggcagtacatccttttcccagaagggtagggaggccgactcccggggctcccaagagagccgccacctcttatctccgcagttggttcagtaccaatgcggagactcaggaaagcagggacgcgaaacacgcagatcctcttgccgaggttgttgtctggaaaagatgccctggagtcagctgtgtggtgaacttccacccctatacggcgcagagcccgaggcctcgagggctcctcgtccacatacatactttacaccacatcctgattccatggacaccgaggatagcgcatcatctcaaaagctggatctgtccggtgaaatggtccctggccctctaccagctcccggcaaatgtcgcaagcgcagaatgcctgtgggtcgcttccagactttttccgatcaggagggattgggttgtccggaacgaacacacggcagtagcgtcccgaaggagtcactctctagacaagatagctcagaaagtaggaacggtagaaccctttctcaacccgaagcatcggagacagaagaacagagatctcgcggcgtcactgatactcgtgagccatccccaggctcccactccgctctccctggaaagaagacagcgctgcaggccgcactactggaaaccctcttagatctggtggatagaagctggggtggctgccgatctctgcacagcaatgaagcttttctcgcccaggcaagacatatattgagcagtgttgaggagttcactgctgcccaggactcctctgccatggtcggcgaggatgtggggagtctggcccttgaaagcaaaagcctacagtctagacttgcagagcagcaacaacagcacgcccgcgagatgagcgaagtgacagctgaactgcaccacactcataaggaacttgacgatttgagacaacatcttgataagtctcttgaggaaaatagccgactcaaatcccttctactcagtatgaaaaaggaggttaaaagcgctgacactgctgcgacactcaacctgcagattgccggactacagacctcagtgaagaggctgtgcggggagatcgtcgagctgaaacagcatctggaacattatgacaaaattcaggaactcacacagatgctgcaggagtcccactcttcactggtcagcaccaacgaacacctgctgcaggagttgtcacaggttagagcccagcacagggccgaagtcgagcagatgcattggtcttaccaagagcttaaaaaaaccatggcactcttcccacatagtagcgccagccacggggggtgccaggcatgttag

SEQ ID NO: 23027 - DNA, 777 bp, synthetic construct
  source 1..777: mol_type = other DNA; note = Synthetic coding sequence
atggccgagaccgaggagcggagcctggacaacttcttcgccaagcgggataaaaagaaaaaaaaggaacgaagcaatagagctgctagcgccgccggagctgccgggagcgccgggggatcttctggcgcagccggagccgcaggggggggcgcgggggctggcactagacctggcgatggtgggaccgcatcagcgggtgctgcaggccctggtgccgctacaaaggcagtgacgaaggacgaagatgaatggaaggagctggaacaaaaggaggtggattactccggactcagagtgcaggcaatgcagataagctctgagaaagaggaggatgataatgagaagcggcaggaccctggggacaactgggaggagggtggcggaggcggcggcggcatggagaaatcttcagggccctggaataagacagcgcccgtacaagctcctcctgcccctgtgatcgtgacagaaactcctgaacccgccatgacatctggagtgtaccgcccaccgggtgcccggctgacgacaacccgcaagacacctcaggggccacctgaaatttattccgacacgcagtttccttcattacagtcaacggccaaacacgtagaatctaggaaagataaggagatggagaagtcgtttgaagttgtgcgacacaagaatagaggtagagacgaggtctctaagaaccaggccctgaaacttcagctggacaaccagtatgccgtactcgagaatcagaagtcgtctcatagccagtataactag

SEQ ID NO: 23028 - DNA, 1077 bp, synthetic construct
  source 1..1077: mol_type = other DNA; note = Synthetic coding sequence
atggccccccagaacctgagcaccttctgcctgctgctgctgtacttaatcggagctgttattgcaggtagagacttttacaaaatcttaggagttccacgatcagcttccataaaggacattaagaaagcctaccgcaaattggccctgcaactgcaccccgaccgcaaccccgacgatcctcaggcccaagagaagttccaggatcttggggccgcctacgaagtgctgagcgatagtgagaaaagaaagcagtacgacacctacggagaagaagggttaaaagacggacatcagtcttcccacggggacattttttcccattttttcggggactttgggttcatgtttggggggacaccacggcagcaggaccgaaatatacctcgcgggtccgacattatcgtggatctggaggtcacacttgaagaagtatatgcaggcaattttgtggaagttgtaaggaataaacccgtcgctcggcaggcccctggcaagagaaaatgcaattgtaggcaggagatgcgtactacacagcttggaccaggcagatttcagatgacacaagaagtcgtgtgtgatgaatgccctaacgttaaactcgtgaatgaagagagaacgctggaagtagaaattgagcccggagtccgggatggcatggagtaccctttcatcggagaaggggagccgcacgttgatggggagcctggagacctacgatttcgaattaaggtagttaagcatcctatcttcgagcgtagaggtgacgatctgtacaccaacgtgaccatttcgctggtggagtctcttgtagggtttgagatggatatcacacacctggatggacataaggtccatatcagccgtgacaaaatcacaaggcccggggcgaaactgtggaagaagggcgaaggcctcccgaacttcgacaataacaatatcaagggctcactgatcatcacattcgatgtggacttcccaaaggaacagcttacagaggaagcccgcgagggcattaaacagctgctgaagcagggaagcgtacagaaggtgtacaacggcctgcagggttactag

SEQ ID NO: 23029 - DNA, 624 bp, synthetic construct
  source 1..624: mol_type = other DNA; note = Synthetic coding sequence
atgaccagccggaagaaggtgctgctgaaggtgatcatcctgggcgattctggggtgggcaaaacctccctgatgaaccagtacgtcaacaaaaagttctcaaatcagtacaaggcaacaatcggggcagactttttaactaaggaagtcatggtagatgatcggttggtgacaatgcaaatttgggatacggccggtcaggaacgcttccagtctctgggcgtggcattctatcgcggagcggactgttgcgtgctggtgttcgacgtgaccgcccccaatacctttaaaacactggactcatggcgggatgagttcctgattcaggcatctccgagagaccccgagaacttccccttcgtagtgctcggcaataaaattgacttagaaaaccggcaggtcgctacaaagagagctcaggcatggtgttattccaaaaacaatataccctacttcgaaacgagcgccaaggaagctattaacgttgaacaggccttccaaacgatagcacgtaatgctcttaagcaggagaccgaagtggagctgtataatgagttcccggagccgatcaaattggacaagaatgaccgggctaaagcttccgccgaatcatgttcttgctag

SEQ ID NO: 23030 - DNA, 3225 bp, synthetic construct
  source 1..3225: mol_type = other DNA; note = Synthetic coding sequence
atgatccccatctgccccgtggtgagcttcacctacgtgcccagccgattgggggaagacgccaagatggctacaggcaactactttggatttacacactcaggcgctgcagccgcggccgccgccgcccaatacagccagcagcctgcatctggagttgcttattcccaccctaccacggtcgcaagctacactgtgcatcaggcgcctgtggccgcccacacggtcacagcggcctatgcaccagccgcggccactgtggcggtcgccagaccggctccagtggctgtggcagccgccgctaccgctgcggcttatgggggatatccaacggcccacactgctacggattacggctatacacaaagacagcaggaggcccctcctcctccgccccctgctacgacacagaattatcaggatagttattcctatgtcaggtccaccgcccctgctgtcgcttacgatagcaaacagtactatcagcaacctacagcaaccgccgccgccgtggcggctgcggcccaaccccaaccaagtgttgctgaaacttattaccagaccgctcctaaggccggatacagccagggggctacccagtacacccaggcccagcagacgcgccaggtgaccgctatcaagcctgcaacccccagtcccgcaaccacaactttttcaatataccccgtgtcttctaccgtacagccagtggccgctgctgcgactgtggtacccagctatacccagtctgctacctactctacaaccgcagtgacctactcgggtacctcctatagcggctacgaagcggctgtgtattccgccgcctcttcatactatcagcaacagcagcagcagcagaaacaggccgccgcggccgccgcagcggctgcagctacagcagcgtggaccggcaccaccttcacaaagaaggcaccattccaaaacaaacagctgaagcccaagcagccaccaaagcccccccaaattcactattgcgacgtctgcaagatctcttgtgcaggtccacaaacatataaagagcacctcgaaggtcaaaagcacaagaagaaagaggccgcactgaaagcatcccagaacacaagctcctccaacagctccacccgcggaacccagaatcagcttagatgtgaactgtgcgacgtgtcatgcacaggagcagatgcatacgctgcccacatcaggggcgccaagcatcagaaagtggttaaactacatactaagttgggcaaaccgatccctagcaccgagcctaacgtggtttcccaagcaacaagttctacagctgtttcagcgtcaaaacccactgccagcccctcatcaatcgctgctaacaattgcaccgtcaacacgtccagtgtggctacttcttcaatgaaggggctgactacgacgggcaactcaagtctcaactccacatccaatacaaaggtctctgcggtgcctacaaatatggctgccaagaaaacttctacccccaaaatcaacttcgtgggtggcaataaactgcagagtactggaaacaaggctgaggacatcaaaggcacagaatgcgtgaaatctacacccgtgacaagtgccgtccaaatccctgaagtgaagcaggacacagtctccgagcccgtcacaccagcgagcttagccgcactacaatccgacgtgcagccagtgggccatgactacgtggaggaggttcgcaacgatgaaggaaaggtgattcgtttccattgtaaactttgcgaatgcagtttcaatgacccaaatgccaaagaaatgcacttgaaaggcagacggcatcgtctgcagtataagaaaaaggttaaccccgatctccaagtggaagtcaaaccgagcatccgggcgagaaaaatacaggaggagaaaatgcgaaaacagatgcagaaggaagagtactggcgccgaagagaggaggaagagaggtggcgcatggagatgcgaagatacgaggaggatatgtattggagacggatggaagaggagcagcaccattgggacgatcgccgccgaatgcctgacggcggttatccacacggccctcctggacctctgggactcctgggagttcggcccgggatgcctccacaacctcagggaccggctcctctgcgtagaccagattcctctgatgaccgctatgtcatgactaagcacgccactatctaccctaccgaagaagagttgcaagctgtccagaaaattgtgtccattactgagagggccctcaaacttgtctccgatagcctcagtgaacacgagaaaaacaagaacaaggagggggacgacaagaaggagggaggcaaggatcgggcccttaagggtgtcttgcgcgtaggggtgcttgcaaagggactgctcctgaggggtgacagaaacgtcaacttggttctgctgtgctccgaaaaacccagtaagaccctactctcacgaattgccgagaatttgcctaaacagttagcagttatctcccctgaaaaatatgacattaagtgcgcggtgagtgaagcagctattatcctgaattcttgtgtcgagcctaagatgcaggtgaccataacccttactagccccattatccgggaagagaatatgcgggaaggcgatgtgacatccggcatggtaaaagacccacccgatgtgctggatcgccagaaatgtctggatgcactcgccgccctgcgtcacgcgaaatggtttcaagcgagagctaacggactgcagagctgtgtcatcatcattcgcattctgcgggatctttgccagagggtgcccacctggagtgatttcccctcatgggccatggaattgctggtcgagaaggccatatcgtctgcctctagccctcagtctcctggcgatgcactgagacgggtgtttgagtgtattagctctgggatcattctcaaaggttccccaggcctgttggacccctgtgagaaggatccctttgacacattggcaactatgaccgatcagcaacgtgaggatatcacctcttccgctcagttcgccctaaggcttttggcctttcgacagatccacaaggtacttggcatggacccactccctcagatgagtcagcggttcaatattcataacaatagaaagagaagacgcgatagcgacggcgtggatggcttcgaagcagaaggcaaaaaggataagaaggattacgataacttctag

SEQ ID NO: 23031 - DNA, 438 bp, synthetic construct
  source 1..438: mol_type = other DNA; note = Synthetic coding sequence
atgaagttcaaccccttcgtgaccagcgaccggagcaagaaccggaagagacacttcaacgcaccatcccacgttcgcaggaaaattatgtcatcccccctgagcaaggagcttaggcagaaatacaacgttcgcagcatgcctataaggaaagatgatgaagtccaggtcgtaagaggacactataagggtcagcagattgggaaggtcgtgcaggtatacaggaaaaagtacgttatttatatcgagcgagtgcaaagagaaaaagcgaacgggacaactgtgcacgtgggtattcatccatcaaaagtagtgattacccgactgaaattagacaaggataggaagaagatcctggagcgcaaggccaaaagcagacaggtgggtaaggaaaagggtaaatataaagaagagctgattgagaaaatgcaagaatag

SEQ ID NO: 23032 - DNA, 3177 bp, synthetic construct
  source 1..3177: mol_type = other DNA; note = Synthetic coding sequence
atggaggacggcacccccaagcacatcatccagatgaccggcttcaagatggaggaaaaggaggcactcgtgaaactcctgttgaagctggattgcaccttcattaagtccgagaagtacaagaactgcacccacctaattgccgaacggctttgtaagagtgagaaatttctggctgcttgtgcagcaggaaagtggattctgaccaaggattacattatacatagcgcaaagagtggccggtggctggatgaaaccacatacgagtgggggtacaaaatagagaaggatagccgctactccccccaaatgcaaagcgcgcctaagcgctggagagaggagctcaagcgcactggagcccccggcgctttccaccggtggaaggtggttctactcgtcagaaccgataagcgtagcgatagcttaatacgggttttagaggcagggaaggcaaacgtaattctgcccaaaagctcacctagcgggatcacacacgtcatcgcatcaaacgctagaattaaggcagagaaggagaaggataatttcaaagcccccttctatcctattcagtatctgggggacttcctcctggagaaagagattcagaacgatgaagacagccagactaatagcgtttggaccgagcacagcaacgaggaaacgaacaaagatttccgtaaagacgccggttttctggagatgaaaggcgctctgcgggaaaccatgtatcggacccagaaggaaatgcagaaccacgaggacgtgaacgtcgggtccattctcattcagcatcacaaaaaggagaaattcagcggcagctctaaagacctaaagtttgtgaagatgaggaacacattcggttcccatacctatgagaatcagaaggaaataaaaaaaaaagacgaagacattcaacgttcgtatacccttcgccgaaagcggaaaaagggaaaagagtccaattgcaagaagggggttgaacacgaaaagataaaatccacactgaggaggcatatttacaatagagaccagaaggagatgaaaaacagcatttttgctgaatacgccaaagagtctaaggcaatggcaataaaaacagatgtggatgtcgtagagattaagaacactctgcggaaacacatctatagggcgcaggctgtgcgttataactgtatccggatcgacaaacagcccgtgtataacgtcgaagtgaagaacgctgagtttccacgtggcgtgctgaatttgatcgagtccctgatcgagggacactttttcaaggaggcaatcgaagagctctctaccctgcaggcacattacattccacccgtgtgtgtgttacacgccctcctggagaacgtattgcaggacaatatcgacacattttctggccgatattttcacattctctcagctctcctacacctgcaccctccctggaaaagcccagctatgagtcggtattatctggagctcttccagtgcccaacctgtatgaaaggggcctggagccttgtagaagtgcttattaggtcatgcctgttcaatgagtctttttgccaccagatttccgaaaacatagggagcaaggtcctgcacctgaccctcctgaagttcttcttcaatctgattgaatccgaggtccagcatctgtcacagaagttgtatgattggtcggatagtcagaatctgaagatcacaggtaaggcaatgctgctcgagatcttctggagcggtagtgagaccagcgggctgctgacaaagcccgtgaatatgctgttagaatggactatttacagccacaaagagaagtttaagtcaaacgacgtgtttaagcacgagctcgcatacctgcttgccggaattctgggggctgcgatcgactattggattttcttaggcctgaagatgggaagaaacgtaatgagacatatgagcgacgatctcggttcctacgtgtccctgtcatgtgacgacttcagctcacaggagcttgagatctttatctgcagcttttcgtcatcatggctgcagatgtttgtggctgaagccgtctttaagaaactgtgcctacaatcaagtgggtcggtttcatcggaacctttatcgttgcagaagatggtctatagctatttgccagctttgggaaagaccggggtactgggatctggtaagatccaggtgagtaagaaaattggccagaggccttgctttgactctcagcgtacactgctcatgctcaacgggactaagcaaaaacaggtcgaaggactaccagaattattagacctcaacctagccaagtgctcttcctcattgaagaagctgaagaaaaagagcgagggggaactgtcttgtagcaaggaaaactgccccagtgtggtcaagaaaatgaattttcataaaacaaatctgaagggtgagaccgccctgcatcgagcctgcattaacaaccaggtcgagaagctgatcctactgctgtctcttcccggaattgacatcaatgttaaagataacgccgggtggaccccccttcatgaggcatgtaactacgggaacacggtgtgcgtgcaggagattctccagagatgtccagaggtggatctcttaacgcaggtggacggcgtgactcccctccatgatgccttgtccaacggccacgttgagattggcaaattgctgctgcagcacggggggcctgtcttactgcagcagcgcaacgccaagggggagttgccactggactacgtggtcagcccccaaattaaggaggaattgttcgccataacgaagatcgaagataccgtcgagaactttcacgcccaggcagagaaacatttccactaccagcagctggagtttggatcatttcttctgtcccgtatgcttttaaacttctgctcaatttttgatctgtctagcgagtttatcctggcgtccaagggtctcacccatttgaacgagctgctgatggcctgcaagtcacacaaagagacaacatctgtccacacggactggctgttggacctgtacgccggtaacattaaaacattacagaaactaccccacattttgaaagagctccccgagaatctgaaggtctgccctggcgtccacactgaagcccttatgatcacattggagatgatgtgtcggagcgttatggaattctcgtag

SEQ ID NO: 23033 - DNA, 660 bp, synthetic construct
  source 1..660: mol_type = other DNA; note = Synthetic coding sequence
atggagcccaaggaggccaccggcaaggagaacatggtgaccaagaaaaaaaatttggcattcctgagaagcaggctatatatgcttgaacgacgaaagacagataccgttgttgagagctcagtgagcggggatcactccggcacactccgccgaagccagtctgacaggacagagtataatcagaaactccaagagaaaatgactccacagggcgaatgtagcgtggctgagaccttgaccccagaagaggagcatcacatgaaaagaatgatggccaaacgagagaaaatcatcaaggagctgatccagacggagaaggactacctcaacgatctcgaattatgcgtacgcgaggtggtccagccactccggaacaagaagaccgataggttagacgtggatagcctcttctcaaatatcgagtccgttcaccagatcagcgccaagctgctatcactcctggaagaagccaccacagacgttgaacctgctatgcaggttattggagaggtgttcctgcagatcaaagggcccctggaagatatatacaaaatttattgttaccaccacgacgaggctcacagcatcctggagagttacgaaaaagaggaagagctgaaggagcacctcagccactgtatccaatctctgaagtag

SEQ ID NO: 23034 - DNA, 3183 bp, synthetic construct
  source 1..3183: mol_type = other DNA; note = Synthetic coding sequence
atgctgatcgaggacgtggacgccctgaagagctggctggccaagctgctagagccaatctgcgatgccgacccatcggcactcgccaactacgtggtggcccttgtgaagaaggacaagccagaaaaggaactgaaggcattctgtgccgaccagctggacgtatttcttcagaaggaaacatctggatttgtggacaaattgttcgaatcactgtatactaagaactacctgcctctgttggaacccgtgaagccagaacctaagcccctcgtacaagagaaagaagaaatcaaagaagaagtgttccaggagcccgcggaggaggagagggacgggaggaagaaaaaatacccatcacctcagaaaactcggtctgaaagctcagagcgccggaccagggagaagaagagggaggatggaaaatggcgagattacgaccgctactacgagcgcaatgaattgtatagggagaaatacgactggcggaggggacggagcaaaagccgctcaaagtcaaggggtcttagtcgctccagaagtcggtccaggggacggtccaaggatagagacccaaataggaatgtggaacaccgggagcgtagcaaatttaaatcagagcggaatgacctggagtcttcatacgtgcccgtttccgctcctcctcccaatagctccgagcaatacagcagcggcgcccagtctatcccttccacagtgaccgtgatagctcctgcccatcactccgagaacacgactgaatcctggagcaactactacaataaccactcatcatctaactcctttggacgcaatttaccccctaaacgccgctgcagggactatgatgaaagaggcttttgtgtgctcggcgatctatgccaattcgaccatggcaacgaccctctggttgtcgacgaagtagcccttcccagcatgatcccattcccaccaccccccccaggactgcctcccccacctccgcctggcatgcttatgcctcctatgcctggtccgggaccagggccaggtcccggccctgggccgggacccggccctgggccaggtcctggacattccatgaggctgccagtcccacaggggcacgggcagcctcctcctagtgtggtcttgcccatcccaaggcctccaattacccagagctccctcattaactctcgcgaccagcctgggacatctgcagttcctaatcttgctagcgttgggacaaggcttccccccccgctgccccagaacctgctatatacggtgtccgagcgccaaccgatgtacagcagggagcatggtgcagccgcctcagagcgcctccagctggggactccaccacccttactcgccgctagattagtgccaccccggaatctgatggggtcctcaatcggttatcataccagcgtgtctagccctactcctctggttccagacacctacgagcctgatggctacaatccagaagctcctagcatcacatcctcaggcagatcacaataccgacagttcttcagccgcacccaaactcagcggcctaatctgataggacttacctccggagacatggacgttaatccaagggccgccaacatcgtgattcaaactgagcccccagttcctgtgtcaattaattccaacattactcgcgtcgttcttgaacccgattcccgcaaaagggctatgtcgggactagagggccccctcacaaagaaaccttggctagggaaacaggggaataacaatcagaataagcctggcttcctgaggaaaaatcaatatactaatacgaagctggaggtgaaaaagatacctcaggaattgaacaacatcactaaactcaatgagcactttagcaagttcggcactatcgtgaacatccaggtggcctttaagggcgatcccgaggcagcgctgattcagtaccttacgaacgaggaagctagaaaggctatttcttcaaccgaggccgtgcttaacaataggtttatccgggtactgtggcatcgagagaacaacgaacagcccacactccagtccagcgctcagctcctgctacagcagcagcaaacgctctcacacttgtctcagcagcaccatcacctgccccagcacctccatcagcagcaggtcctggtggcccagagcgctcccagcactgtgcatggcggaattcagaaaatgatgtccaaacctcagaccagcggagcttacgtgctgaacaaggtgccagtaaaacacagactcggtcatgccgggggcaaccaatcggatgccagccatctcctgaatcaatctggcggggctggggaggactgccagatcttttctactcccgggcatccgaagatgatctactcctcttcgaacttgaaaactcctagtaaactctgttccggctcaaaatcccacgatgtgcaggaagtacttaagaaaaagcaggaagcaatgaagctccaacaggacatgaggaaaaagcgacaggaagtcctcgagaagcagattgagtgtcagaagatgctcatttctaagctagagaagaataagaacatgaagcccgaggagagggccaacatcatgaagacgctcaaggagcttggcgagaagatcagccagctcaaggacgagctgaagaccagctcggcagtgagcactccaagcaaggtcaaaaccaagaccgaggctcagaaagagctcctggataccgagctcgacctccacaagcgcctgtctagcggggaggataccaccgagctccgcaagaaactgtcacagttgcaagtggaggccgcccggctcgggatccttcctgttggacgggggaaaacaatgtctagccagggcaggggccgaggcagagggcggggaggcagaggacgggggagcttgaatcacatggtggtggaccaccgcccaaaagcgctgacggtgggtggatttattgaagaggaaaaggaggatctcctgcagcacttctctaccgctaaccagggccccaagttcaaggacagaaggctgcaaattagttggcataagcccaaggtgccctctatctcgaccgagacagaggaggaagaagtgaaagaggaggagacagaaacttctgatctgttcctgcctgacgacgatgacgaagacgaggatgagtatgagtctaggagttggagaaggtag

SEQ ID NO: 23035 - DNA, 1818 bp, synthetic construct
  source 1..1818: mol_type = other DNA; note = Synthetic coding sequence
atggaggccgacatcatcaccaacctgcggtgccggctgaaggaggcggaagaggaacggctgaaagccgctcagtatggccttcagctcgtggagagccaaaatgagctgcagaatcagctggacaagtgcagaaacgagatgatgaccatgacggagagctatgaacaagagaagtataccctccagcgggaggtcgaactgaaaagccgcatgcttgaaagcctgtcatgtgagtgtgaggcgatcaagcagcaacagaagatgcatttagagaaacttgaggaacagctcagtcgctcccacgggcaggaggtgaatgagctgaaaacaaagattgaaaaattgaaggttgagcttgatgaggccaggctttctgaaaagcagttgaagcatcaggttgatcatcagaaggagctgctctcctgtaagtccgaggagcttagggtcatgtctgagagggttcaggagagcatgtcgtccgagatgttggcattacagatcgaactaaccgaaatggaatcgatgaagaccacactgaaagaagaggtaaatgagctgcaatatcggcaggagcagttagagttgctgattacaaatctgatgagacaggtggaccgtcttaaagaggaaaaggaggaaagagaaaaggaagctgttagttattacaatgcactcgagaaagccagagtggctaatcaggatctgcaggtccagttggatcaggcgctccaacaggccctcgatcctaacagcaagggcaatagtctgtttgctgaagttgaggacaggcgggccgccatggaacgacaactgattagcatgaaggttaaataccagtctctgaagaagcagaatgtgtttaacagagaacagatgcagcgcatgaagctccagatcgccaccctgctgcagatgaaaggatcacaaaccgaattcgagcagcaggaacgccttcttgccatgttggagcagaaaaacggtgagatcaagcacctcttaggcgaaatcaggaatctcgaaaagtttaagaacctctacgacagtatggaatcaaaaccatcagtggattcaggcactcttgaggacaacacctattacacggatctgttacaaatgaagctggataacttgaacaaagaaatcgagagcaccaaaggcgagttgtctattcagagaatgaaggcattattcgaaagccagcgggccttagatatagagcgtaagcttttcgctaacgagcgatgcctccagctgagcgaaagtgaaaacatgaaactgcgagctaaattggatgagctaaagctgaaatatgagccagaggagacagtcgaggtcccggtcttgaagaagagaagagaagtcttacctgtggacatcacgacagctaaggacgcatgcgtgaataactcagccttaggaggggaggtgtataggttaccaccccagaaagaggagacgcagtcctgtcctaattcactcgaagacaacaatcttcagctggaaaagtcagtctctatatacacacctgtagtgtcactcagtccccataagaatctcccggtcgacatgcagcttaaaaaagaaaaaaagtgcgtgaagctaattggcgttccagcggatgctgaggcactgtcagaacgctccgggaacacacctaactcaccccggctagcagccgagtcaaagctgcagacagaggtcaaggaaggtaaggaaacctcctcaaaattagagaaggaaacttgtaagaagctgcatccaatcctgtatgtttcttccaagtctactcccgagacacagtgcccccaacaatag

SEQ ID NO: 23036 - DNA, 888 bp, synthetic construct
  source 1..888: mol_type = other DNA; note = Synthetic coding sequence
atgatggccaagaagccccccaagcccgccccccggcggatcttccaggagaggttgaaaattactgccctgccactctactttgagggctttctgctgataaagcggagtggataccgggagtacgaacactactggacagagcttcggggtacaaccctgttcttctatacggataaaaagtccatcatctatgtcgacaagctagacattgtggaccttacctgcctcaccgaacagaacagcaccgaaaaaaactgtgcaaagtttaccctggtgctgccaaaggaggaagtccagctgaaaactgagaacacagaatccggggaagagtggagaggattcatcttaactgttacagaattgtccgtgccgcagaatgtttctttgctgcctgggcaggttatcaagctccacgaagttctagagagagagaagaagcgaagaatcgagactgagcagagtaccagcgtggaaaaggagaaagagcctactgaggactacgtagatgtgcttaatccgatgcccgcgtgtttctacaccgtatctaggaaggaggcaactgagatgctgcagaaaaacccaagcttaggcaacatgattttgaggcccggctcggattcgagaaattactccataacaatacggcaggagatcgacataccaaggatcaagcactacaaggttatgtccgttgggcagaactatacaatcgaactcgaaaagcctgtcacactgcccaacttattcagtgttattgactacttcgtgaaggaaactcgaggtaacctgcgcccctttatctgttccacagatgaaaacaccgggcaggaaccaagcatggagggccggtctgagaaactgaaaaaaaatccacacatagcctag

SEQ ID NO: 23037 - DNA, 4821 bp, synthetic construct
  source 1..4821: mol_type = other DNA; note = Synthetic coding sequence
atgttccacatctgccccgccgagaacctgtaccagaaccggttcctgggacttgccgcaatggctagcccgagccgcaactcccagtcccggagaaggtgcaaggagccactgaggtactcttacaaccctgatcagtttcacaatatggatttgcggggaggaccccacgacggggttactatccctcgctcaacgagcgacactgacttagtaacttctgactctcgctccacccttatggttagtagttcttactactctataggccattctcaggatctagtcattcactgggacatcaaagaggaggtggacgccggagactggatagggatgtatctgatcgatgaagtgctttctgaaaattttcttgactacaaaaatcgcggagtaaatgggtctcaccgtggccaaattatatggaaaatcgacgctagttcttatttcgtggagccagaaacaaagatctgcttcaaatactatcacggggtaagcggggccttgcgggcaacgacccccagtgtaacggtgaagaattcagccgcccctatatttaagtcgatcggcgccgatgaaactgtccaaggacaagggagccgaagactcatttcattttctctgtccgacttccaggccatgggcctgaagaaaggaatgtttttcaatccagacccgtatttgaagattagcatccagcccggaaagcactccattttcccggccttgccccaccatgggcaggagaggcgatcaaaaattatagggaacactgtcaaccctatctggcaggctgaacagtttagtttcgtctcacttcctaccgacgtcttggagattgaagttaaggataaatttgccaaaagtagaccaataataaagaggttcctgggtaaactgagcatgcccgttcaaagactccttgagcgtcatgccataggagacagagtggttagttatacactcggccgccgtctgcctacagaccatgtgagtggccagttgcagttcaggttcgagattactagcagcatacacccagccgatgacgaagagatctctctgtccactgaacctgaatccgcacagatccaggacagccccatgaataacttgatggaaagcggcagtggcgagccccggagcgaggctccagaaagttctgaatcatggaagccagagcagctaggggaaggctctgtgcctgacggccctggtaaccagagcatcgagctgtcgaggccagccgaggaggctgcagtcatcactgaggctggagaccaggggatggtcagcgtggggccagaaggggccggcgagctcctcgcccaagtgcagaaagacattcagcctgcgccttcagccgaggagctggcagagcaacttgacttgggagaggaggcaagtgcactgctgttggaagacggagaggcccccgcttcaaccaaggaggaaccactagaagaggaggccacaacacagtcaagagctggaagggaagaagaggagaaggaacaggaggaggaaggtgacgtgtccacactggaacaaggcgagggtcgactgcaactgcgcgcctcagttaagagaaagtcacgaccgtgctcacttcctgtctcagagctggaaacggtgattgcctcagcgtgcggcgaccccgagacgccacggacgcactacatcaggatacataccttactccattcaatgccgtccgcacagggaggaagcgccgctgaggaagaggacggggcagaagaagaatctacacttaaggactctagcgagaaagacggactgtctgaggtagacaccgtggccgctgacccttccgctcttgaggaggatagggaagaaccagaaggcgctactcctggaaccgctcaccctgggcactctgggggacactttcccagcctggctaacggagctgcgcaggatggcgatacacacccgagtactggttcagagtctgactccagccccaggcagggaggtgaccactcatgcgaggggtgtgatgcaagctgctgtagtccctcttgctatagctcatcttgctactccaccagctgctatagttcttcctgctattcagctagctgctatagtccatcctgctacaacgggaataggttcgctagccataccaggttctcaagcgttgacagtgctaaaatatccgagagcaccgtgttctctagtcaggatgatgaagaggaggagaatagcgcgtttgaatctgtgccagatagtatgcaatcgccagagttggatcccgagtccaccaatggtgccggtccatggcaagatgagcttgcagcccccagcgggcatgttgagcgaagccccgaaggtctcgagagccccgtcgctggtccctcaaacagacgggagggagagtgtcccatattgcacaattcccagcctgtgtcccagctcccgtcactgcgtcctgagcaccatcattaccccactatcgatgagccacttcctccaaattgggaagctagaattgatagtcacgggcgggtgttctacgtggaccacgtgaaccgaaccaccacctggcagaggcccactgctgccgcaactcctgacgggatgcggagatccggtagcatacagcagatggaacagttgaacagacgatatcagaacatccagcgtaccatcgctacggaacgaagcgaggaggatagcggaagccagagttgcgaacaggctccagccgggggtgggggcggagggggatcggacagtgaggcagagagtagtcagtcttctttggacctgaggcgggagggcagcttgtcacctgtgaattcccagaagatcactctcctcctgcagtcccctgccgtgaagttcatcacaaaccccgaattcttcaccgtccttcatgctaactactccgcctaccgcgtcttcacgagcagcacctgtctcaagcacatgatattaaaggtccgaagagacgcccgaaatttcgagcgctaccagcacaacagggacctggtgaattttatcaacatgttcgcagataccaggctggaactgccaagaggttgggaaatcaagaccgaccagcaaggcaagtctttttttgtggatcataactccagggccaccacattcatagaccctaggattcctttacagaacggccggttacccaatcacctgacacacaggcaacacctccagcgactgcgaagttattccgcgggagaggcatccgaggtcagcaggaatcggggggccagtttgctcgcccgccccgggcacagcctggtggcggccattcgtagccagcatcagcacgagagtctacctttagcctacaacgacaagatcgtagcctttctgcgtcagcctaatatcttcgaaatgctacaggagagacagccctccctggcaaggaatcacaccctcagagagaaaatccactacattcggacagaggggaaccatgggctagagaagctgtcttgcgatgccgacctggtgatacttttgtcgctgttcgaggaagagattatgtcctacgtcccacttcaagcagcgtttcatccggggtactccttttcacccaggtgttccccctgtagttcgccccagaactcccccgggctccaacgcgcttcagctagggccccatccccatatagaagagatttcgaggcaaagctgcgcaacttttacaggaagctagaggccaagggattcggccaggggcccggcaagatcaagcttatcatacggcgcgatcacctgttagaaggtacgtttaatcaagtgatggcctactccaggaaagagttacagagaaataagttgtatgtgaccttcgtgggcgaagaaggcctcgattattcaggacctagccgagaattcttctttctgctatcccaggagctctttaacccctattatggcctgtttgagtactccgcgaacgacacttacaccgtacagatctcacctatgagtgcttttgtcgagaaccatctggagtggtttaggttctctggtaggatcctgggcctcgctctcatccatcagtatctgttagatgccttttttacacggccattctataaggccctacttagactgccctgtgacctttcagatttggaatacctggacgaagaattccatcagagcttgcaatggatgaaggacaacaacatcactgatatcctggaccttactttcactgtgaacgaagaagtgttcggccaggtcaccgaaagggaattaaagtccgggggggcaaacacccaggttactgagaaaaataagaaagagtatatcgagcgtatggttaaatggagagttgagcgaggcgtggtgcagcagacggaggccctagtaaggggcttttacgaagtggttgactctagactggttagtgttttcgacgctagggagcttgagctggtcatcgccggaacagctgagatagacctgaacgactggcgtaataataccgagtataggggaggataccacgatgggcacttggtcatccgctggttttgggccgcagtggagagatttaacaacgagcagcgcttgagattgctacagttcgtgactgggacaagcagtgtgccctatgagggtttcgccgcactgcgtggctcaaacggactacgccgattttgtatcgagaaatggggaaaaattacctcactcccaagggcacacacctgttttaacaggctggatctgccaccctatcctagctactccatgctgtacgaaaaactgctcactgccgtcgaagaaacttccactttcggcctggagtag

SEQ ID NO: 23038 - DNA, 2373 bp, synthetic construct
  source 1..2373: mol_type = other DNA; note = Synthetic coding sequence
atgggcacccggaagaaggtgcacgccttcgtgcgggtgaagcccacggatgactttgctcacgagatgatccgctacggcgacgataagaggtcaattgacatccacttgaagaaagacatacgacgcggcgtcgtgaacaatcagcagactgactggagtttcaagctggacggagtccttcacgatgcttctcaggatctggtatacgaaactgtagccaaagatgtcgtaagtcaagctctggatgggtataatgggaccatcatgtgctacggtcaaacgggcgcagggaagacctacactatgatgggcgccactgaaaactacaaacatagaggcattctgccccgcgcgcttcaacaggtttttcgcatgatcgaagagcgacccacacatgcaatcacagtaagggtgtcatatctggagatttacaatgagtccctgtttgacctcctttctactctcccttacgtgggtccctccgtaacgccgatgactattgtagagaatccacagggggtgtttatcaaagggctgtccgtgcacctgacctctcaggaagaagacgcattttcactgctattcgaaggggaaactaacaggattatcgctagtcataccatgaacaagaactctagtcgctcacattgtatatttacaatttacctcgaagctcattctcgcacgttgtccgaagaaaagtacatcactagtaagattaacctcgtggatctagctggatctgaaagactcggaaaatccgggtctgaaggtcaggtgttgaaggaagccacctacattaataaatccctgtccttcctggagcaggcaatcattgctctcggcgaccagaagcgggatcatattccattccgccagtgcaagttgacccatgccctgaaggacagtctgggggggaattgcaacatggtcctagtgactaacatctacggagaggccgcccagctggaggagactctgtctagcctgcgcttcgccagcaggatgaaactggtgacaactgagcctgcaattaacgagaagtatgacgccgagaggatggtgaaaaatctggaaaaagagttggccctccttaagcaagaattagcaatccatgacagcctaaccaatcggacgttcgtgacttacgatcctatggacgagatccagatcgcagaaataaatagtcaggtgcggcgctatctggagggtacccttgatgaaatcgacataatttcactgcgccagattaaagaggtttttaaccaattcagggtagttctgtctcagcaggagcaggaagtggagagcacattgcgacgcaagtacaccctcatcgataggaatgattttgcagctatcagtgctatccagaaagctgggctggttgacgtggacgggcatctcgttggcgagcccgagggtcagaactttggactgggggttgcacctttctccaccaagcccggaaaaaaagcaaagtcgaaaaagacattcaaagagccactgtcatcgttagccagaaaagaaggagctagttccccagtcaatggcaaagatcttgactacgtatccacttctaagactcaactggtcccttcctcaaaagacggagatgtgaaggatatgctgagtcgagatagggaaacaagttcaatcgaaccgcttccctcagactctccaaaggaggaacttaggccaattcggcctgataccccgccctcaaaacctgtggcctttgaggagttcaaaaatgagcagggctcagaaatcaacagaattttcaaggaaaataaatcaattctcaacgagcgaaggaagcgtgccagcgaaacaacacagcatattaacgcgattaaacgggagatcgacgtgacaaaagaagccttgaatttccaaaaatccttacgggagaaacagggaaaatatgagaataagggcctaatgatcattgacgaggaggagtttctacttatactgaaactcaaagacctgaagaagcaataccgctcggaatatcaggatctgcgtgacttaagggctgagatccaatattgtcagcatctagtcgaccagtgtcgtcataggctgctgatggaattcgatatctggtataatgagtcttttgtgattcctgaggacatgcagatggcattaaaaccagggggctccatcagacccggaatggttcccgtaaaccggatagtctctttgggagaggacgaccaggacaaattctcacaattgcaacagagggtgcttccagaaggtccagacagcatctctttttataacgctaaagtcaaaattgagcagaagcacaattacttaaagacgatgatgggcctgcagcaggcccacagaaaatag

SEQ ID NO: 23039 - DNA, 876 bp, synthetic construct
  source 1..876: mol_type = other DNA; note = Synthetic coding sequence
atggccagcgtgaccctgagcgaggccgagaaggtgtacatcgtgcacggcgtccaagaagatctgcgtgttgacggaagggggtgtgaggattaccggtgcgtggaggtagagaccgatgtggtcagtaacacgtccggttccgcacgtgtgaaactaggacatacggacatcttggtcggcgtgaaggctgagatggggactccgaaactggagaagcctaatgaaggatatcttgaatttttcgtggattgttccgcctccgccacccctgaattcgagggacgaggtggggatgacctcggcacagaaattgccaacactttatatcgcatctttaacaacaagagcagcgtcgaccttaagaccctgtgcatctcccctcgcgagcattgctgggtcctctatgttgacgtgctgcttctggagtgcggcggtaatttattcgacgccatctctatcgcagtgaaggccgctttattcaacacacggatcccccgcgtcagggtactcgaagacgaggaaggttccaaggacatcgagctttccgatgacccctatgattgcattcggctgagcgtagaaaatgtaccatgtattgtgacactgtgcaaaatcggctacaggcacgtggtggacgctacactccaggaagaggcctgctccctggcttctctccttgtaagcgtcacctctaaaggcgtggtaacgtgcatgcggaaggtcggaaaagggtctcttgacccagaatctattttcgaaatgatggagaccggaaaacgcgtcggcaaggtcctccatgcgtccctgcagtccgtggtccacaaagaggagagcctggggcctaagaggcagaaggtgggcttcttgggctag

SEQ ID NO: 23040 - DNA, 2382 bp, synthetic construct
  source 1..2382: mol_type = other DNA; note = Synthetic coding sequence
atgttctggaagttcgacctgcacagcagcagccacatcgacaccctgctcgagcgggaggacgtcaccctcaaagagctgatggacgaggaggatgtgctgcaagagtgcaaggcacagaacaggaagctgatcgaatttctgctgaaggctgagtgtcttgaggatttggttagcttcataatcgaagagcctccccaagatatggatgaaaaaataaggtacaagtacccaaatattagctgtgaactgttgacatctgatgtgagccagatgaatgaccgactcggcgaggacgagagcctgctcatgaaattatacagctttcttctgaatgattctcccctcaaccctctgcttgcatccttcttttcaaaggtgctgtctattctcatcagcagaaaacctgagcagatagtggatttcctcaaaaaaaaacatgacttcgttgacctaattattaaacatattggcacctctgcgataatggacctgctgctgagactcttgacctgtattgagccaccccaaccccgacaggacgttcttaactggctgaacgaagaaaaaatcatccagcgactggtcgaaatcgtgcatcccagccaggaagaggatcggcacagcaacgccagccaatctttatgcgagatcgtcagactctctcgggatcagatgttgcaaatccagaatagtactgagccagaccctctactagccactctggagaaacaggagatcatagaacagctactctcgaacatttttcacaaggaaaagaatgaaagtgccatcgtctccgctattcagatcctgcttaccctgctcgagacacgcaggcccacgtttgaggggcacattgagatttgccctcccgggatgtcacattccgcctgtagcgtaaataagagtgtgctggaagcgataagagggaggttagggtctttccatgagctactcctggaaccacccaagaacatgttctttaagtacacgtggaataattttctgcatacacaggtagagatttgtatcgcactaatattggcaagtccattcgagaataccgagaatgctactatcacggatcaagattctaccggagataacctgctgttgaaacacctgtttcagaaatgtcagttaattgaacgaatacttgaagcctgggagatgaacgagaagaagcaggcggagggaggcaggcggcacggttacatgggacacttaactcggattgccaattgtatagtccattctacggacaagggcccgaactccgcccttgtgcagcagctgataaaggatctccccgatgaggtgcgagaacgttgggagaccttctgcacatccagcctgggggagactaacaagaggaacaccgtggacttagccttcagcgattaccagatgcagcaaatgactagcaatttcatcgaccagtttggctttaacgatgagaaattcgcggatcaggacgacataggcaacgttagtttcgatcgagtgagcgacataaactttaccctcaatacaaatgagtccggaaatattgccctttttgaggcttgttgtaaagaaagaattcaacagttcgatgacggcggtagtgacgaggaggatatatgggaggagaaacatattgcctttaccccggagtcccagcggcgaagttcttctgggtctacagactctgaggagtccacagacagtgaagaggaagatggagcaaaacaagacctgttcgagccgtctagtgccaataccgaggacaaaatggaggtcgatctctcagagcctccgaattggtctgcgaacttcgacgtccctatggaaactactcacggagcccccttggacagcgttgggtctgacgtctggtcaactgaggaaccgatgccaactaaggagaccggctgggcctctttctccgagtttacatcttctctgtcgacaaaggatagtctgcggtcaaatagccctgtagagatggagacgagcactgaacctatggacccgctgactccctcagccgcagctctggctgtgcagccggaggctgctggttcagtcgcaatggaggcatcatcggatggcgaagaagatgctgagagcacggataaagtcacagagactgtcatgaacggcggcatgaaggaaaccctctccctgactgtggacgctaagactgagaccgcagtctttaagtcagaagagggaaagctctccacaagccaggatgcggcctgcaaggacgccgaagagtgtccagagacagctgaggcaaagtgtgcggcccctcgaccccccagttcatctccagagcaacgaaccggccagccgagtgcaccgggtgacacctcggttaacgggcccgtgtag

SEQ ID NO: 23041 - DNA, 3375 bp, synthetic construct
  source 1..3375: mol_type = other DNA; note = Synthetic coding sequence
atggaccccttcaccgagaagctgctggagcggacccgggcccggcgggagaacctgcagcgcaagatggccgaacgccccacagcagccccaagatcaatgacacatgctaaaagagcccgacagcccctgagcgaagccagcaaccagcagccattaagcgggggcgaagaaaagagttgcaccaaaccttctccgtctaagaagaggtgttccgataacacagaagtggaggtgtccaatttggagaataagcagccggtggagtctacatcagccaagagttgctccccttctccagtgagcccacaggttcagccacaggcagctgacacaatatctgacagtgtggccgtccctgcgtcactgctgggtatgcgtcggggattgaattctcgcttagaggccactgctgcctcgagcgttaaaacccgaatgcagaaactcgccgagcagcgacgacggtgggataacgatgacatgacagacgacattcctgagtcgtcacttttctctccaatgccctccgaagaaaaagccgcctcgccacctcgcccactactctcaaacgcgtctgccacgccggtggggaggagaggcagactggcaaatctggccgccacaatttgctcgtgggaggacgacgtcaaccacagcttcgcgaagcagaatagtgtccaggaacaacctgggactgcctgtctgagtaagttctcatctgcatcgggagcaagcgcaagaatcaattcaagctccgttaaacaggaagccacattttgtagccagagagatggcgacgctagcctgaataaggccctctcctcatcagccgacgacgcatccctcgtgaacgcctcaattagcagctccgtgaaagctaccagtcctgtcaagtccaccacttcgatcactgacgcaaagtcgtgcgaaggacaaaatcccgagttgttacctaaaacccctatctcccccctgaaaaccggtgtcagcaagccaattgtgaaaagtaccctgagtcaaacagtcccaagcaaaggtgagttgtctcgcgaaatctgcttgcagtcccaaagcaaggacaagagtactacccctggcggtaccgggataaagcccttcttagagcgatttggggagcgatgccaagagcatagcaaggagtccccagcgagatcaacgcctcaccgcactccaatcatcacacctaacaccaaggccattcaagagcgtttatttaagcaggatacatcctcatccaccactcatttggcccagcagctgaaacaggagcgccagaaggagctggcctgtctgcggggccggtttgacaagggtaatatatggtccgctgagaaggggggcaactcgaagagtaagcagctggaaacgaagcaagaaacacactgtcagagtacccccctgaagaagcatcagggtgttagtaagacccagtcgttgcctgtcaccgagaaggtgaccgaaaatcagatccccgcaaagaatagcagcacagagcctaagggcttcactgagtgtgagatgactaagtcgagtcctctgaaaatcacattgtttctggaggaagataaatccttgaaagtgacttctgaccccaaggttgagcaaaaaatagaagtgatcagggaaatcgagatgtccgtcgacgatgacgacatcaatagctctaaggttatcaatgatttgttttcagatgtgttggaagaaggcgagctggatatggagaaatcacaggaagagatggatcaagcactcgccgagtccagcgaggagcaggaggacgcactgaatatatccagcatgtccttgctggctcctctagcccagactgtgggcgtggtatccccagagtctctggtatccactccgagattagagctcaaggacacctcacggtctgacgagtcccctaagccagggaaattccagagaacgcgagtgcctcgcgcagaatctggcgactccctagggagcgaggatcgggacctgctctacagtatagacgcatatcgatcccaaaggtttaaagaaacggaacgacctagcatcaagcaggtaatagttagaaaagaagacgttacttccaaactggatgagaaaaacaatgctttcccttgtcaggtaaacattaagcaaaaaatgcaggagctgaataacgagatcaacatgcagcaaaccgtgatttaccaggcctcccaagccctgaactgttgcgtggatgaagaacacggaaaagggtccctggaagaggccgaggccgagaggctgttgctgatcgctacaggcaagcgcaccttacttatcgatgagctgaacaagctgaaaaacgaaggaccccagcgcaagaacaaggcctccccacagtccgagttcatgcctagtaaggggtctgtcacattgtctgagattcgtctgccactcaaggctgatttcgtctgcagcacagtgcagaaaccagatgctgctaactattattacctgatcattcttaaagccggagccgagaacatggtcgctactccactggcatctacctctaattcccttaatggcgatgccctgacttttacgactacctttaccctgcaggacgtgtctaacgattttgaaattaacatcgaagtgtattcgctggtgcagaagaaggatccttctggacttgacaaaaaaaaaaagacctctaagtccaaagctattacccccaagcggctgctcacttccatcaccactaagtcaaacatccactcatctgttatggcttcacccggcgggctaagtgctgtcagaacaagcaacttcgcattagtgggctcttacactctttccctctcctcagttggcaacactaagttcgtactagacaaggtcccctttctctcaagtctcgagggccacatctacctgaaaatcaagtgccaggtgaacagttctgttgaagagcgtggcttcctgaccattttcgaagacgtgtccggatttggagcctggcatcgtcgttggtgtgttctgtctggcaattgtatttcctactggacatatcccgatgatgaaaagcggaaaaatccgatcggaagaattaacctggccaactgcacctcgcgccagatagaacctgctaacagggagttttgtgctcgccggaacaccttcgaacttataacggtacgcccccaacgcgaggatgatagagaaactctggtatcacagtgccgcgatacgctgtgtgtcacaaaaaactggctgagcgcggatacaaaggaggagagagacttatggatgcagaagctcaatcaggtgctggtcgatatccgcctctggcaaccagatgcatgctacaagcctataggaaagccctag

SEQ ID NO: 23042 - DNA, 1365 bp, synthetic construct
  source 1..1365: mol_type = other DNA; note = Synthetic coding sequence
atgctgaagcagatcctgagcgagatgtacatcgaccccgacctgcttgcagaactatcagaggaacagaagcagatcttgttcttcaagatgcgggaggagcagataaggagatggaaggaaagggaagcagccatggaaagaaaagagagcttgcctgtgaagccacgtcccaaaaaggagaacggtaagtccgtccactggaagctgggagcggacaaagaagtctgggtgtgggtcatgggagaacatcatctggataagccatacgatgtgctttgcaacgagataattgcggaacgcgctcgtctgaaagctgaacaggaggccgaggaacctaggaaaacccattcggaggagttcaccaattctctgaagacaaagtcccagtaccacgacttacaagctcccgataatcagcagaccaaagacatttggaaaaaagttgccgagaaggaggaactcgagcaaggcagcagacctgccccaactctggaggaggagaaaattagatcactgagctccagttctcgtaacatccaacaaatgttggccgattccatcaaccggatgaaggcgtatgcttttcatcagaagaaggagtccatgaaaaaaaagcaggatgaagagatcaaccaaattgaggaagagagaaccaaacagatttgtaagtcttggaaggaggattctgaatggcaggcttcgctgcgaaaaagcaaagcagcagacgaaaaaagacgatccctagctaagcaggcccgcgaggactacaagcgcctgtccctcggtgcccagaagggtcgagggggagagcggctgcagtcacctctgcgggttccgcagaagccggagcgcccccccctcccacccaaaccccagttcctcaactcgggagcttatcctcagaaaccactcagaaaccagggagtggtcaggacactttcctctagcgcacaggaggacatcattcgatggttcaaggaagagcaactgcctctgcgagcaggctatcagaagacatcagacacgatcgccccatggtttcacgggattctcacattgaagaaggccaacgagctcttactctctactggaatgccgggatcctttctcatcagggtgtccgagaggattaagggatacgcactctcttacctgtccgaagacggctgcaaacacttcctgattgacgcaagtgccgacgcttattccttcctgggcgtggatcagctacagcacgcgaccctcgccgacctggtagagtaccataaggaagagcccattacctcacttggtaaagagctcctgttgtacccttgcggccagcaggaccaacttcccgattatctcgagctttttgaatag

SEQ ID NO: 23043 - DNA, 1497 bp, synthetic construct
  source 1..1497: mol_type = other DNA; note = Synthetic coding sequence
atggacgagaccgagtggatccaccggcaccccaaggccgaggacctccgggtgggcctgatttcctgggccgggacatatctcacttttgaggcatgtaaaaataccgtcacagcgactgccaagagtctcggtagacgtcagacctgggagatcctcgtgtctaacgaacacgagacacaggcagtggtgcgcttgaagagcgtccagggcctttacttactgtgcgaatgcgacggtaccgtatgctacggacgtcccagaacctcacatcatggttgttttctattgcggttccataggaattcaaaatggaccttgcaatgtttgatctcaggccgctaccttgaatctaatggaaaggatgtgttctgtaccagtcacgtattgagcgcgtatcatatgtggacgcctcggccagccctgcatgttcacgttattttgtactcaccgattcatcgctgctatgcgagagcagaccccactatggggaggatctgggtcgacgcagctgtgccatgcctggaggagtgcgggttcttgctgcatttccgtgacggttgttatcacctagagacctccacccaccacttcctgtcccatgtagacaggcttttctctcagccatcttctcaaactgcgttccacatgcaggtgcgccctggcggattggtggcactctgtgatggtgaggggggtatgttgtacccacagggaacccaccttcttctgggaatgggttgtaacccgatgagaggcgaggaatggttcatcctccagcactgccccacatgggtgagtctgagaagcaaaaccggtcgctttatctcagtaatctacgatggtgaagtgagggcagcctccgagcgcttgaatcggatgagtttatttcagtttgagtgcgactctgagtcccctaccgttcagctgcgatccgcaaatggctattacctcagtcaacgcagacacagggccgtcatggctgatgggcacccactggagagcgataccttcttcagaatgcactggaactgcgggcggatcatattgcagtcgtgtcgaggccgctttctgggaattgcgcctaacagtctcctcatggctaatgtaatcctccccgggcccaacgaggaatttggaatcctgtttgcgaataggtcctttctggtgttgagggggcggtacggttatgtgggatcgtcttctggtcacgatctgatccagtgcaatcaagatcagcccgaccgaatccatctccttccctgccgccccgggatctaccacttccaggcacagggcgggtcattctggtccatcactagtttcggaacctttcggccatggggcaaatttgccttgaacttctgtattgagttgcagggctccaatctgttaacggtcctggccccaaacgggttctacatgcgcgcagaccagtccggcaccttactcgcggattccgaggatattaccagagagtgtatatgggagttttag

SEQ ID NO: 23044 - DNA, 1377 bp, synthetic construct
  source 1..1377: mol_type = other DNA; note = Synthetic coding sequence
atggagcgggagcccagcgccagcgaggccgcccccgccgccgccgccttgtttgcttggggggcgaactcctatggccagttaggactgggccataaagaagacgtactcctgccccagcagctgaatgacttctgtaagccaaggtcggtacggcggatcaccggtggcggaggtcattctgccgtggtgaccgatgggggagacctatttgtctgcggccttaacaaagacggacaactgggtctgggccatactgaggacattccctattttaccccctgcaaaagcctgtttggatgccccattcagcaggtggcctgtgggtgggactttacaatcatgcttaccgagaatggacaggtcttatcctgtggaagcaactcttttggtcagctgggtgttcctcacgggccgcggaggtgtgtggtcccgcaggctattgagctgcataaagagaaggttgtctgcattgccgccggacttcggcacgctgtggcggctacagccagcggaatcgtttttcagtggggcaccggactcgcctcatgtggcagacgcctgtgtccaggccagaccctgcccctgttttttacagctaaggagccgtctagagttactggacttgaaaattcaaaggctatgtgtgtgctggccggtagtgaccactccgccagcctgaccgacgccggggaggtgtacgtgtggggatctaacaagcacgggcaactcgctaacgaagccgcttttctgcccgtaccacagaagattgaagcgcattgctttcagaacgagaaagtcaccgcaatttggtcaggatggacgcatctggtggcccagacggaaactggtaagatgttcacctggggacgagcagattacgggcaactgggcaggaaactagagacttacgaggggtggaagttagaaaaacaggattcttttctgccttgctcccggccgcctaactctatgcctagctctcctcattgtctgaccggcgcaacagaagtctcttgcgggagtgagcacaatttagccataattgggggggtgtgttatagctggggctggaacgagcacggaatgtgcggagatggaaccgaagcgaacgtgtgggcccccaagcctgttcaggccctgctctcctcttcaggcctcttagttggctgcggtgctggtcacagtctggcgttgtgtcagcttcccgctcaccccgctctggtgcaagacccaaaggttacttatttgtcacccgacgccattgaggataccgagagccagaaagctatggataaggagagaaattggaaagaaagacagagtgaaacaagtacacaatcacagtcggactggagcagaaacggaggcctgtag

SEQ ID NO: 23045 - DNA, 2961 bp, synthetic construct
  source 1..2961: mol_type = other DNA; note = Synthetic coding sequence
atggagcggatgaactggctgagccggctggccagccggggccccggccatcgaatccctcaaggcgcgaatctgcagactcccgtgatggcagaccccgaaacatgcttaatggtgttcaaaaatcactggtcccaagtggtgagaattctggagagacaggggccaagggctgccccaggtggggccgacgatctgagcgcagtacgcaaccacacgtaccagatgttaaccctcctcgctgaggaccgggcagtcccgtcggccccaactggacctggcccattactggaatttgctctgcatgaggacttgctaacccgcgtactgacttggcaactgcaatgggacgagctaggagacggtgttgaagagcgtcgggccgagcaactcaagctgtttgagatgctggtgtctgaagcgcggcagcctctcttgcggcacggacctgtgcgcgaggcactcctgacactgctggacgcttgcggccgtccagtcccctcgtcacctgcccttgacgagggcctggtgttgctattgtctcagctgtgtgtctgcgtggcacaagagccgtccctattagagttctttctccagcctcccccagagcccggcgctgctccgcgactcctgctgtttagcagacttgtgccattcgtgcatcgcgaggggactcttggccaacaggccagagacgcactgttacttctgatggcgctgagtgcaggctcccctaccgtgggtcgatatatcgccgaccatagttacttctgccctgtcctcgcaaccggtctgtccgcgctgtacagctccctgcctagaaaaattgaagtccccggagacgattggcactgccttaggagagaggactggcttggcgtgcccgccctggctctcttcatgagctctctcgagttttgcaacgccgttatccaggtagcccatccccttgtgcagaaacaactggttgattacattcataacggttttctggtccccgtgatgggccctgccttgcacaagacctccgtggaagagatgatagcttctaccgcgtacttggagctttttctccggtccatcagtgaacccgcgcttctgcgcacatttctccgtttcctgcttctgcatcgccacgatactcacaccatccttgataccttggtggcccgaattgggtctaactcacgcctttgcatggtctccctgagtttgtttagaaccctgttaaacctttcctgcgaagacgtattgttacagctagtgttgcggtacctagtgccctgcaaccatgtgatgctttcgcaaaaaccagcggtgcgggacgtggatctttatggccgagccgctgataaattcttaagtctaattccacgatgttgtaggcatcatgcaccatctccaccacgccccgagcacgcctcctgggcccgtggaggaccgagccgcgagaccggccggagggaggatatcacaggccctggcagcccatcggtcgacagctcatctgtcacgacagtcccccgacccagtacgcccagtcgcctggcgctatttctgcggcagcagagtctggggggtagcgaatctccaggacctgctccttgctcaccaggtctaagcgccagcccggcgtcttcacctggcaggaggcccacacctgctgaagagcccggcgaactggaggacaattacctcgaatacctcagagaagcacgaagaggagtggaccgctgtgtaagggcctgcagaacgtggtctgcaccctacgatggtgagaggcctagtcccgaaccaagtcccttcggaagtagaactaagaagcggtcacttttaccagaagaggataggaataacgtgggagaaggtgaggaggaggagttaggcaggaggggccgggctgggggagcgggcgaggggcccggacatttgccacctccacaactgaatggcgtaccaggttcttggcccgaaggagctaaaaaagttcgtcttgtgcctaaggagggagcgggagagctcttagaaggcatcagcgagggcatggcgggcctcgaagggtttgggcaggagttaagagagctggaagtcgctctgtcaaacggcggcaccgggtcagagagcccattagagcctcctctgcctctggaggaggaagaggcctacgaatcgttcacttgcccgcctgaaccgccaggtccctttctgagctcccccctgagaacgctgaatcaactcccctcacagccctttacgggaccctttatggcagtgcttttcgcaaaacttgagaacatgctgcagaattccgtctatgtgaatttcctcctaaccgggctggtcgcccagctcgcttgtcaccctcagcccctgttaagatcattcctgcttaataccaacatggtcttccagcctagcgtgaaaagcttgctgcaggtgctgggctctgttaagaacaagatcgagaattttgcggctagccaggaggactttcctgcgttgttgagcaaggctaaaaagtacctgattgccaggggcaagttggattgggccgagggtcccgccgccggacctgcaccccgacgcagcgacccactagtgaaatcaagacgtccaagcctcggggaactcctgttgcgtcacgcacattcgccaacgcgcgctcggcaggcggcgcagctcgtgttgcagccagggagggacggagccgggctaggactgtccggcggcagcccgggggctagcacgcccgtgttgcttacgcgggggggagctcccgagcgccagggggaagccctaagggtaaaaaacgcagtttattgtgccgtgatttttcccgagttcctaaaggaactggctgccatatcccaggctcatgccgtgacctctccgttcctcttagagacctctgaagaggggtccgggcctttgatcagtggctgtggccctctcaatccgtag

SEQ ID NO: 23046 - DNA, 6723 bp, synthetic construct
  source 1..6723: mol_type = other DNA; note = Synthetic coding sequence
atggacgacaagggcgaccccagcaacgaggaggcccccaaggccattaagcccaccagtaaggagtttcgcaagacatggggattcaggcggacaacgatagccaagcgcgagggagcgggggatgccgaagcagaccctctcgagccccccccaccacagcagcagctgggactgtctctccgccgcagtggacgccagcctaaacggactgagagagtagagcaattcctgactatcgcaaggcgacgcggtagacgctcaatgcccgtgtcacttgaagacagcggagagccgacgtcctgccccgccaccgacgccgagacggccagcgaaggctctgtcgagtctgcaagtgaaaccaggagcggtccgcagtccgcctctacagcggtgaaagaacgccccgcttcgtcagagaaagtgaaagggggtgatgatcacgacgatacttctgactctgacagcgacggacttaccctgaaggaactacagaacagattaagacgcaagagggagcaggagcccaccgaacggccactgaaaggcattcagagtaggctgcggaaaaaacgcagagaggaaggtccggcggagactgtcggaagcgaagcctccgacaccgtggagggagtgctcccaagtaagcaggaacctgaaaatgaccaaggcgtagttagccaggccgggaaagatgaccgcgagagtaagcttgaaggtaaggcagcccaggatattaaggacgaggaacctggagaccttggcaggcccaagccagaatgtgaagggtatgatccaaatgcgctgtattgcatctgccgtcagccccacaataatcgattcatgatttgctgcgaccggtgcgaggagtggttccacggggattgtgtcggtatcagtgaggcacgcggcagactgttggagagaaatggcgaagattacatatgtcctaactgtaccatccttcaagtccaggatgagacgcatagcgaaaccgcagatcaacaggaagccaagtggagaccgggcgatgccgacggtaccgactgcacaagtatcggtacaatcgaacagaaatcctctgaggaccagggaatcaagggacggatcgagaaagccgcaaacccatcaggtaagaagaaactgaaaatcttccagcctgttattgaggcacctggggcatcgaaatgcatcggcccggggtgttgccatgttgcccaacctgactccgtgtactgttcaaacgattgtatcttgaagcatgctgcagccacaatgaagttcctttcctccggcaaggagcaaaagcccaagccaaaagaaaaaatgaaaatgaagcctgaaaagccatccttaccaaaatgtggggcacaggcagggataaaaatatcatccgtccataagcgaccagctcctgagaagaaggaaacaaccgtgaagaaagccgtggtcgttcccgcccgttccgaggccctgggaaaagaggcggcttgtgagagcagcaccccttcatgggcctcagaccacaactataatgcagtaaagcctgagaagactgccgcgccctcaccctctttgctctataaaagcaccaaagaggatcggaggtctgaagagaaggctgcagcgatggcagcctccaagaagactgcaccacctggctcggcagtcggaaaacagcccgccccacggaacctggtgcctaagaaaagttcattcgctaacgtcgcagccgccacacccgccatcaaaaaacctccgtccggattcaaaggcacaattccaaagagaccttggctgtcagctacacccagctcaggggcctcagccgctcggcaggccggtccggctccggctgctgctacagcagcctcaaaaaagttccctggctccgccgcgcttgtcggcgccgtgagaaaacctgttgtcccaagcgtgcccatggcaagcccagcccctggcagactcggcgcgatgtcagctgcgccgtcacaaccaaacagccagattcggcagaacatcagacgctccttgaaggagatcttgtggaagcgggtcaatgattcagatgacctaatcatgaccgaaaacgaagtagggaagatcgccttgcacatcgaaaaagagatgttcaatctatttcaggtcacagacaataggtacaagagcaagtaccggagcatcatgtttaacttgaaggaccccaagaaccagggactgtttcacagggtgcttcgggaagagatctcgcttgcaaagctggtgaggctcaagcccgaggagctggtgagtaaggagctttcaacttggaaggaaaggcccgcacggtcggtcatggagtctcggaccaagcttcataacgaatctaaaaagactgcgccgagacaggaggctatcccagacctagaggactcccctcctgtttctgacagcgaggaacagcaagaatcagctagggccgttccggaaaagtccaccgcccccttattggatgtgttctctagcatgttgaaggataccacttcccaacatcgcgcacacttattcgatctgaactgtaaaatttgcactggacaggtaccctccgctgaagacgagcccgcccctaagaaacagaagctcagtgcttctgtgaagaaggaagatctgaagtccaagcacgattcttcagccccagatccagctcctgacagtgcagacgaggttatgcccgaagccgtgccagaagttgcctcagaaccagggctggagagcgcatctcatccaaatgttgaccgaacctacttcccagggcctcccggggacggtcacccagaaccttctcctctggaggatctctcaccctgccccgcttcctgcggatctggggttgtcaccaccgtgaccgtttccggaagggatccccgaacggctccatccagttcatgcaccgccgtggcctcagctgcatcaaggcccgacagtacccatatggtggaagctcgacaagatgttccgaagcccgtgctgacaagcgtcatggtcccaaaaagcattttggctaagccaagttcttctccagacccacgatacctcagcgtgcccccgtctcccaacatctccaccagcgagtctagatctccaccggagggcgacactactttgtttctaagcagactcagcacaatttggaagggcttcataaatatgcaaagcgttgcaaagttcgtgacaaaggcttatcctgttagtggttgttttgactacctgagcgaggacctccctgatactatccacatcggcggacgtatcgccccaaaaaccgtgtgggactacgtgggcaagctcaagtcctcagtgtcaaaggaattgtgcctgatacggtttcatcctgctaccgaggaagaggaagttgcatacatttctctctactcttatttcagttcccgtggtcgttttggcgtggtagctaataataaccgccatgtaaaggatctttacctaatacccctgtcggcacaggacccggtcccgagtaaattgcttccgttcgaagggcccggattggagtcacccaggcccaatatcattctgggacttgtgatctgtcagaaaatcaaaagacccgccaactctggggaactagataaaatggatgaaaagcgcacccggctgcagcccgaggaagccgatgtgccggcctacccaaaggttgcaacagtgcctcagtccgaaaagaagcccagcaagtaccccttgtgcagtgccgacgcggccgtcagcactactccgccaggcagcccgcccccacctccaccgttacccgaacctcccgtcctgaaggttctctcttccctgaaacccgccgccccctcacctgcaaccgctgctactaccgctgccgcggcatctaccgcggcatctagcaccgctagtagcgcgagtaaaacagccagtccgctggagcacatcctgcagacactctttggaaaaaaaaaatcctttgacccctcagccagagagcccccaggctcaacagctggactgcctcaggagccaaagacaacagccgaagacggggttccggccccacccctcctcgatcctatagtgcagcagttcggacaattcagtaaggataaggcacttgaggaagaggaagatgaccgcccttacgatcccgaggaggaatatgacccggagagagccttcgatacgcagctcgtggaacgggggcggagacacgaggtggaaagagcccctgaagcagccgcagccgagagggaggaggttgcttatgatccggaggacgagaccatccttgaagaggccaaagtgacagtcgatgacctacccaatcgaatgtgtgccgacgtgcgtcggaactccgtagaaaggccggccgagcccgtcgccggggccgctaccccctcactggtcgaacagcagaagatgcttgaagagctaaataagcaaattgaggagcagaaacgacagcttgaagagcaagaggaggcactgcgacagcagagagcggccgtgggagtttctatggcacacttctctgtgtccgatgcgctgatgtctccccccccgaaaagctctttacccaaggctgagctctttcaacaggagcagcagtccgccgacaaaccagcctccctgccccctgcgtctcaagcctctaaccaccgagatccgcggcaggcacggcgcttggcaactgagacaggggagggagagggggagcctttgagtcgactgagcgcccgtggcgctcagggcgccctaccggagcgggatgccagtcgcggtggtttggtcggacaggcgcctatgcccgtgcctgaggaaaaagagcctgcctccagcccttgggcatctggagaaaagccccctgcgggaagtgagcaggatggctggaaggctgagcccggagaaggcacacgccccgccactgtgggagactccagcgcccgaccggcaaggagggttctgctgccaaccccaccatgcggagctctccagcctgggtttccactgcagcatgacggagaaagggatccgtttacctgtcctgggttcgcatcgcaagacaaagctttgggaagtgcccagtacgaggatcctaggaacctacactctgcgggacgaagttcgtcacccgctggggagaccgaaggagatcgggaaccccaagcccgccctggcgaaggcactgcacctctgcctcctcccgggcagaaggtgggggggagtcagcctccgtttcaggggcagcgagaaccgggtccgcacgctcttggaatgtccggcttgcacggaccaaactttccaggccctcgcggtccggcccccccattccctgaggaaaatatcgccagcaacgatggcccccgcggaccgccaccagcccgatttggcgcacagaagggaccgataccatcgctgtttagcggccaacacggaccgcccccgtatggagattcgaggggcccatcaccgagttacctaggagggcctcgaggagtggccccatctcagttcgaagaacgcaaggacccccatggcgagaaacgagaattccaggacgccccatataacgaggtgacaggagctcctgcccagtttgagggtaccgagcaggctccatttctcggatcccgcggcggtgctcccttccaattcggagggcagcgtagaccccttctgtctcagctgaaagggccccggggtggcccacccccctcacaattcgggggacagaggggtcctcctccaggccatttcgttgggcctaggggccctcacccgagtcagtttgaaacagccagaggcccgcatcctaaccagtttgaaggcccaagggggcaggccccaaacttcatgccaggccctagagggattcagcctcaacagttcgaagatcagcgagtgcactctcctcccagattcaccaatcagagagcgcctgctcccctgcagtttggcggacttcgagggtcagcgccattctctgagaagaacgagcaaacaccctcgcgttttcactttcagggccaggctccacaggtcatgaaaccaggaccgagacctcttctggagttgcccagtcacccacctcagcataggaaagaccgatgggaggaagccggtccaccatccgctctttcttcgtctgctcctggccaggggccggaggctgatggccagtgggcgtcagccgacttcagagaaggaaaagggcatgagtacaggaaccagacgttcgaagggagacagagagagcgatttgacgttggacctaaggagaagcctctggaagaacccgacgcccagggcagggcctccgaggatcggaggcgtgagagagagcggggacggaattggtcacgagaaagagactgggatcgcccaagagagtgggaccgacatagggataaggattcaagtcgagactgggataggaacagagagaggtccgccaatcgggatcgtgaacgagaggccgatcggggcaaagagtgggaccgtagtcgggagagatcccgtaacagggaaagagagcgcgacaggcggagagaccgtgatcgatctagatccagagagcgcgacagagacaaggcacgcgaccgggaacggggcagggacagaaaagatagaagcaagtctaaggagagtgctagggacccgaaacccgaagcctcacgggcttccgacgccgggaccgcaagccaggcatag

SEQ ID NO: 23047 - DNA, 1635 bp, synthetic construct
  source 1..1635: mol_type = other DNA; note = Synthetic coding sequence
atggacgacaagggcgaccccagcaacgaggaggcccccaaggccatcaaaccaacatcgaaagaattcaggaagacttgggggttccgcaggacaacgatcgccaaaagggagggggctggtgacgccgaggccgatccactggagccaccaccccctcaacaacaactgggtctgtctttgagacggagtggccgacagcctaaacggacagagagagtggagcagttccttacgattgcccgacggagaggcaggagatcgatgccagtgtcacttgaagacagtggagaacccacatcttgcccagcaactgacgccgagaccgctagcgaaggcagcgtggagagcgcctccgaaacacgttccgggccccagagcgcgagcactgccgtcaaggaaagacctgcctccagtgagaaggtcaaagggggggatgaccatgatgatacgagtgacagcgactcagacggacttacccttaaagaactccaaaatcgcctgcgacggaaaagagaacaggagcccaccgaaagaccgctgaaagggatccaatctcgcctgcgcaagaaacgcagagaagaagggcccgctgaaacagtcggaagtgaagcgtccgatactgtggaaggagttctccctagtaagcaggaacccgaaaacgatcaaggggtggtgtcacaggcaggaaaagacgacagggagagtaagttagaaggaaaggcggctcaggacatcaaggatgaggagcccggggacctgggacggcctaagcctgaatgtgaaggatacgacccgaacgctctgtactgtatctgtagacagccgcataataatcggttcatgatttgctgcgacaggtgtgaagaatggttccacggggactgtgtgggcattagtgaggcgcggggacgtctcctggaaaggaacggtgaagattacatttgccccaactgcaccattctgcaggtccaggatgaaacacacagcgaaactgccgaccagcaggaggcaaagtggcgtcctggcgatgccgacggcacagattgtactagcatcggtaccattgagcagaagtcctcggaagaccaagggataaaggggcgaattgaaaaagccgctaatcccagcggcaagaagaagctgaaaatatttcaacctgtcatcgaagcccccggtgcctcaaagtgcatcgggcccggctgttgccatgttgctcaacctgatagtgtctactgtagtaatgattgcatcctgaagcacgccgccgctaccatgaagttccttagtagcggcaaggagcagaagcccaaacccaaagagaagatgaagatgaaacccgaaaagcccagcctccctaagtgtggagcgcaggcggggataaaaattagcagtgtgcataagagaccagcacctgagaagaaagaaacgacggtaaaaaaggccgttgtggtccccgccagatccgaagctctgggaaaagaagctgcgtgcgaaagcagtactccctcgtgggcctccgatcataactataatgcggtcaagccggagaaaactgctgcccctagtccatcccttctgtataaatgcagcggcaagtactcttactccttacacccctccctgatagcatag

SEQ ID NO: 23048 - DNA, 1164 bp, synthetic construct
  source 1..1164: mol_type = other DNA; note = Synthetic coding sequence
atggagcggccccccccccgggccgccggccgggaccccagcgccctccgcgccgaagcgccatggctccgcgctgagggcccgggccctcgagcagccccagttaccgtgcctacacccccccaggggagctctgtcggaggaggctttgcggggctcgagttcgctcgacctcaggagagtgagccacgagctagcgatcttggggctcccagaacttggacaggagcggcagctgggccgcgtactccctcagcccacattcctgtgcccgctcagagggccacaccgggaaaggcaaggctcgacgaggtcatggccgccgccgccctgacctcattgagcacgtccccgctgctccttggagctcccgttgcggccttcagcccagagcctgggttagaaccctggaaggaggcactggtaagaccacctgggagttacagcagctctagcaactccggagactgggggtgggatctcgcgtcggaccagagctcaccctctacaccgagtccacccctgcctcctgaggctgcccacttcctgttcggcgagccgaccctcagaaagaggaaaagtccagctcaagttatgttccagtgcctgtggaagagttgtgggaaggtgcttagcacagcctcagccatgcagcggcatatacgattggtccatctgggcaggcaggccgaacctgagcagagcgacggggaagaggatttctactacacggaactggacgtgggggtggatactctgacagacggcctgagcagcctgactcccgttagtccgacagcaagcatgccacccgcctttccgcgcctggagttaccagagctgctggagccccccgccctcccctcccccctgcgacccccagccccgccattgccacccccaccagttctgtcaaccgtggctaatcctcaatcatgccactcggatcgcgtttaccagggctgcctgacccctgctagacttgaacctcagcccaccgaagtgggtgcttgcccacctgcactcagctctcgcatcggtgttaccctccgcaagcctcgtggtgatgccaagaaatgccgcaaagtctatgggatggagcgccgtgacttgtggtgcaccgcctgcagatggaagaaggcatgccagcgcttcctcgattag

SEQ ID NO: 23049 - DNA, 414 bp, synthetic construct
  source 1..414: mol_type = other DNA; note = Synthetic coding sequence
atgctgcggttctgcgccggcctgagcgacttcgcccccgtggccgtgcggagtctccaggatcttgcacgtatcgccatccgcgggaccataaagaagatcattcatcaggaaacagtgtccaagaacggaaacgggctcaaaaacacgccacgcttcaagagacgtcgggtcagacgtcgacgtatggagaccattgtgttcttggataaagaggtatttgcttccaggatcagcaatcctagcgacgacaactcttgtgaggacctcgaggaggagaggagggaggaagaagagaaaaccccccctgaaacaaaacccgatcctccagttaatttcctccgtcagaaagtgctgtcgctgcctctgcccgaccctttgaaatattatctcctctactatagggagaaatag

SEQ ID NO: 23050 - DNA, 2505 bp, synthetic construct
  source 1..2505: mol_type = other DNA; note = Synthetic coding sequence
atgcggctgctggacggcaagcagaccagccggtacagcgagaacgcctgtgaaaaaaagattttttctatatatggccattaccccgtagtccgagcagctctgcgacgtaaagggtgggtagaaaaaaagtttcacttcctgcccaaggtgatcccggacgtggaggatgagggcgcaagagttaacgatgacacctgtgcaaaagtaaaagagaaccaggagatggccctggaaaagactgacaacattcacgacgtcatgagtcgcctggtgaagaatgaaatgccatacttgttatggaccataaaaagagatatcatcgattatcacagcctgacatacgatcaaatgcttaaccactatgccaagacagctagttttactaccaagattgggctgtgtgtaaatatgcggtccctgccttggtacgtccccgccaaccccgattcattctttcccaggtgttactctttgtgcaccgagagtgagcagcaagaatttctcgaagacttcaggcgaacaatggccagctccatccttaagtgggtcgtgtcgcaccagtcctgcagtagaagctccagaagtaagccacgtgatcaacgggaggaagctggatcttcagatctctctagtaggcaagatgcagaaaatgctgaagccaaactgcgcggcctccctggccagctggtcgatatcgcatgtaaagtctgtcaagcttaccttggtcaactagaacatgaagatatcgacacttcagcagacgcagtcgaggatctgaccgaggcagagtgggaggacttaactcagcagtactattctctcgtgcaggtgccactagggtccagtattgtgctgtgcatttttaagattcagaaggtgatgatgtcgttcgaacctccaaccgcccgcgatcgccagtgtcaggcactgctgaatcggattacctctgtgaatccccaaacagacatcgacggactcagaaacatctggatcataaaaccagcagcaaagagccgggggagaggtgagagcccagatattgtatgcatggatcgagtagaagagatcctcgaactcgcggcagctgaccacccccttagtcgggacaataaatgggttgtacaaaaatacatcgagacacccctgctgatctgcgacaccaagttcgacattaggcaatggtttctcgtgaccgactggaatcccctgactatatggttttacaaggagagttacctcaggttctctacccagaggttttcccttgacaaactcgacagtgctattcacctttgcaataacgctgtgcaaaaatatctcaagaacgatgtgggacgaagtcctctcctccccgcccacaacatgtggacttcaactcggttccaggagtacctgcagagacagggacgtggagccgtctgggggagtgtgatctatcccagcatgaagaaagctattgcacatgccatgaaggttgcacaagaccatgtggagccgagaaaaaactccttcgagctgtacggggctgatttcgtgctcggccgtgactttcgcccatggctgatcgaaataaactctagtcccactatgcaccctagtacccccgtcacagcccagctgtgcgcacaggtacaggaagataccattaaggtggctgtagacagatcatgcgacatcggtaacttcgagttgttatggcgacagcctgttgtggagccacctccgttcagtggatccgatctgtgcgtagcaggagtctccgttaggagagccaggcggcaggtgctgccagtgtgcaatctaaaggcctcggcttccttgttagatgctcagcctctgaaggcgagggggcctagtgccatgcccgatcccgcccaaggtccaccaagccctgcactgcaaagggatttaggcttgaaggaagagaagggcctccccctggctctgctggctccacttaggggagctgccgagagcggtggcgcagcccagcccaccagaacaaaagcagccggcaaggttgaattgccggcatgtccctgtcgccatgtagacagccaagcccccaatactggtgtgccagttgctcagcccgctaagtcatgggaccccaaccagttgaatgctcaccctctggagcccgtgctccgtggattgaaaaccgccgagggcgctctccgacctcctcccggagggaaaggtgaggggacagtttgtagcaggctgccccatcacggtcaccacgtagccgcgtgccagactaccggaaccacctgggacggaggaccaggcgtatgtttcctgagacagctcttggcgagcgaactacctatgggccctggactgcctagggacccccgtgccccaccttgtctagtgtgtcgcgggctgcttccccccgccgggccatgcaagcgatgtcgttctttctgcgctgccgtgctgcaaggagcctcattcgtgcggctcggcggtcgtagctgttctcctaggactccttag

SEQ ID NO: 23051 - DNA, 759 bp, synthetic construct
  source 1..759: mol_type = other DNA; note = Synthetic coding sequence
atgtgcagcaccagcggctgcgacctggaggagatccccctggacgatgacgatctcaacactatagaatttaaaatcctggcctattacacaaggcatcacgtgttcaagtctactcccgctttattttctcccaagcttctccggaccaggagcttgagtcaacgaggcctaggcaattgtagcgctaacgaatcttggaccgaagtatcttggccatgccggaattcacagagtagcgaaaaggcaattaatcttggcaaaaagaagagttcttggaaggctttctttggtgtcgtggagaaggaggattcacagagcacccccgcaaaagtgtcagcacaaggccaacgaaccctggaatatcaagattctcactctcaacaatggagcaggtgcctctccaatgtcgaacagtgccttgaacacgaggctgtggatcccaaagttatatccatagccaatcgcgtcgctgagatcgtgtactcctggccccctccacaggctactcaggcgggcgggtttaaatccaaagagattttcgttacagaaggtctgtccttccagttgcaggggcatgttccagtcgcgtcgagcagtaagaaagatgaggaggaacagatccttgcgaagattgtcgagttgttgaagtatagcggtgatcagttagagaggaaggataccgcctttatccccattcctttagttgatacatcaattcagggctttccacaggatggtctgatggcctgcatttag

SEQ ID NO: 23052 - DNA, 261 bp, synthetic construct
  source 1..261: mol_type = other DNA; note = Synthetic coding sequence
atgagcctgcccctgaaccccaagcccttcctgaacggcctgaccggaaagcccgtcatggttaaactgaagtggggcatggaatacaaaggatatctggttagtgtcgatggctacatgaacatgcagctggctaataccgaggagtatatcgatggagcactgtccggacacttgggcgaggtgctgattagatgtaataatgtgttgtatatcagaggcgtggaggaagaagaggaagatggcgagatgagagaatag

SEQ ID NO: 23053 - DNA, 1281 bp, synthetic construct
  source 1..1281: mol_type = other DNA; note = Synthetic coding sequence
atggccagcggccacagcctgctgctggagaacgcccagcaggtggtgctcgtgtgcgcacgcggagaaagatttttggccagggatgctcttcgatcgttggcagtcctagaaggggcctcccttgtagtcggaaaggacggctttatcaaggccatcgggccagctgacgtcattcagcgacagttctctggagagacatttgaggaaattatcgactgcagtggaaaatgcatcctgccaggtctagtggacgcccatactcatccagtatgggccggggagagggttcacgaattcgccatgaaacttgccggcgcaacttacatggagatccatcaggccggcggtggcatccactttactgtggagagaaccagacaggccaccgaagaagaactgtttaggtctctgcaacagcgtttgcagtgcatgatgagagctggcacgaccttagtcgaatgcaagagcggctacgggctggatctcgagaccgagctgaaaatgctccgcgttatcgagagagcccgcagggagctggacattggaattagtgccacgtactgcggagcgcattccgttccaaaaggcaagacagctactgaggctgctgacgatattatcaacaaccacctccctaagctcaaggagcttggccgcaatggcgaaatccacgtcgataatattgacgtgttctgcgagaagggcgtgttcgacttggactctacccgccggattctgcaacggggcaaagacatcgggctgcagataaacttccacggggacgaactacacccaatgaaggcagcagaacttggggcggaactgggcgcccaggcaataagtcacctcgaagaagtctccgatgagggtatagtagcaatggcaacagctcgatgttccgcaattctattgcctactactgcttatatgctacgcttaaagcaaccccgggcacgaaagatgctagatgagggggtaattgtcgccctgggctccgactttaatccgaatgcttactgtttcagtatgcctatggtgatgcacctcgcctgcgtcaatatgcggatgagcatgcctgaggcccttgcagccgctactattaatgccgcatatgccctgggaaagtcacacacacacggtagccttgaggtgggtaagcagggagacttgataattattaactcctcgcgatgggaacatttgatctatcagtttggtgggcaccatgaacttatcgaatacgtcatcgccaagggtaaactaatctacaaaacctag

SEQ ID NO: 23054 - DNA, 1263 bp, synthetic construct
  source 1..1263: mol_type = other DNA; note = Synthetic coding sequence
atgttcagccccggccaggaggagcactgcgcccccaacaaggagccagtcaaatacggtgaactcgtggtgctgggctataatggtgcccttcccaacggggaccgagggcgccgaaaatctcggttcgcgctttacaaacggccaaaggccaacggagtcaaacccagtaccgtgcacgttatatctactccccaagcctcgaaagctatctcctgcaaaggccaacactcgatcagctacaccctgtccaggaaccagacagtcgtcgtcgaatatactcacgataaggatactgacatgtttcaagtcggcaggtccaccgagtcaccgattgattttgtcgtgactgacacaatcagcggatcacagaatacggatgaagcacagattacccagtctaccatatcgagatttgcctgtagaatcgtctgtgaccgaaatgaaccatacaccgcaaggatcttcgcggctgggttcgacagtagtaaaaacattttcctaggcgaaaaggccgctaaatggaaaaatcccgacggccatatggatggactgactacaaacggcgtactcgtgatgcatcctcgcggaggctttaccgaggagagtcaacccggcgtgtggcgggaaatctccgtgtgcggcgacgtatataccttaagggagacacgctccgctcagcagcgcgggaaactggtggaatccgaaactaacgtcctgcaggatgggagccttatagatctctgtggagcaacactgctctggaggaccgcagatggactgttccatacaccgacccagaaacacatcgaggcactgcggcaggagattaatgccgctagaccccagtgccctgtgggtctgaacactctcgcttttcccagcattaaccgcaaggaggtggttgaggagaaacagccttgggcctacctctcttgcggacatgtgcacggctatcacaactgggggcacaggtccgatacggaagcaaacgagcgcgagtgccccatgtgccgaactgtcggaccttatgtaccgctgtggctcggctgcgaggcagggttctacgttgacgctggtcctcctacccacgcttttactccatgtggacacgtgtgctccgagaagtctgctaagtactggtcccagatcccactcccacacggcacccatgccttccacgctgcttgtcccttctgtgcgacccagctcgtgggcgagcaaaattgcattaagcttatctttcaaggaccaattgactag

SEQ ID NO: 23055 - DNA, 1056 bp, synthetic construct
  source 1..1056: mol_type = other DNA; note = Synthetic coding sequence
atgatcgtgcagcgggtggtgctgaacagccggcccggcaagaacggcaaccccgtcgccgagaactttaggatggaggaggtgtatttgccagacaatattaacgagggccaagtccaggtgcgcacactttatcttagtgtggacccctacatgcgctgtagaatgaacgaggacacaggtacagactacataacaccctggcaactgtcgcaggtggtggacgggggcggaattggcattattgaagaaagcaaacacacaaacctgaccaagggtgacttcgtgacatccttctattggccatggcaaaccaaagtgatactcgacggaaacagcctagaaaaagtcgaccctcagttagtagacggacacttaagctactttctaggagcgatcggcatgccagggctcacatccctgataggtattcaagaaaagggccacattacagcgggctccaataaaacaatggttgtttctggcgccgcaggggcttgcggatcggtggcaggacagattggccactttttggggtgcagccgcgtcgtcggcatctgcggaacacacgaaaaatgcatcctgctcacgagcgaactgggctttgatgctgccatcaattacaagaaggacaatgtggcagagcagcttcgcgaatcctgtccagcaggagtcgacgtgtacttcgacaacgtaggcggaaacattagcgacacggtgatttcccagatgaatgagaacagtcatataatcctttgcggtcagatatctcagtataacaaggatgtcccctaccctcctcctctaagcccagctattgaggcaatccaaaaagagcggaacattactcgagagagatttctcgtccttaattataaggacaaattcgaacccgggatcttacaattgtctcagtggtttaaagaaggcaagctgaaaatcaaagagactgtaatcaatggccttgagaacatgggagcagctttccagtccatgatgactggcggaaacataggaaagcaaatcgtctgtatttccgaagaaatcagcctctag

SEQ ID NO: 23056 - DNA, 2172 bp, synthetic construct
  source 1..2172: mol_type = other DNA; note = Synthetic coding sequence
atggccgaggaggaggagaccgccgccctgaccgagaaggtgatccggacacagagagttttcatcaatttactcgactcatattctagcggcaatatcggcaagttcctgtccaactgcgttgtgggcgccagtctcgaggaaattacagaagaagaagaagaggaggacgaaaataagagcgcgatgctggaggccagcagcaccaaggtgaaagagggcacctttcaaatcgtgggtacattaagcaaacctgacagtcctagaccggatttcgcggtggaaacctatagcgccatttcacgggaagacttactgatgaggctgctagaatgtgacgtgattatctacaatattaccgagtcgtcacaacaaatggaggaagcaatttgggcagtgtcagctttgagcgaggaagtgagtcactttgagaagcgtaagttgttcattctgctatccacagtcatgacgtgggcaaggtcgaaagctctggaccccgaagattcagaggtgccatttactgaggaagattataggagacggaaaagccatcctaacttcctggatcacataaacgccgaaaagatggttctgaagtttggcaaaaaggctagaaagttcgctgcctacgtcgtggcagctggcctccagtacggggccgagggaggcatgctgcacacattcttcaaaatggcgtggctgggcgaaattccggccttgcccgtctttggggacggaaccaacgtgatcccaaccatccacgtgctcgatcttgccggtgtgattcaaaatgtcatcgaccatgttcccaagccgcattacttggttgccgtggatgagagcgtacatacactcgaggacattgttaaatgtattagtaagaatacaggacccggcaaaatacagaaaataccccgggagaatgcttatctgaccaaagacctgacacaagattgtttggatcacctgttagtgaaccttcgcatggaagccttgtttgtaaaagaaaacttcaatattaggtgggccgcccaaactggattcgtcgagaatatcaataccattctgaaagagtacaaacagtcccggggtttaatgcccatcaaaatttgcattctcggcccaccggccgtgggcaagtcctcaatcgccaaggagcttgccaactattacaaactgcaccatatccagctcaaggatgtcatctctgaagcgatcgccaagctcgaagctattgtcgctcccaacgatgtcggagagggcgaggaggaagtggaagaggaggaagaggaggagaatgttgaggatgcccaggaattgcttgatgggatcaaagaatccatggagcagaacgccgggcaactggatgaccagtatattatccggttcatgaaggagaagctgaagtcaatgccctgccgcaatcaggggtatatcctagatggcttccccaagacctatgatcaagccaaagacctctttaaccaggaggatgaagaggaggaggatgatgtgcggggtcgcatgttcccattcgataaattgattatccccgagttcgtgtgcgccctcgacgctagtgacgagttcctgaaggaaagggtgattaacctacccgagtccatcgttgctggtactcattacagccaggatcggttcctccgggccctttccaactacagggatataaacattgatgatgagactgtgttcaattactttgacgagctcgaaattcacccaatccatatcgacgtgggcaagttggaagacgcacagaaccggcttgcaattaaacaacttattaaagagattggagaacccaggaactacggtctgacagacgaggaaaaagctgaagaagagcggaaagcagctgaggagaggctagcccgagaggccgcagaggaagccgagcgagaacatcaggaagcagttgagatggcagagaagattgcaaggtgggaggaatggaataagcgattggaggaagtcaagagggaagagcgcgaattactggaggctcagtcaatcccactgaggaactatctcatgacatacgttatgccaactctcattcaaggcctcaacgagtgctgcaacgtcaggcctgaagatcctgtcgactttctcgctgaatacctgtttaaaaataacccggaggcccaatag

SEQ ID NO: 23057 - DNA, 1245 bp, synthetic construct
  source 1..1245: mol_type = other DNA; note = Synthetic coding sequence
atgcagaccttcctgaagggcaagcgggtgggctactggctgagcgagaaaaaaattaaaaagttgaactttcaggcattcgcggagttatgtcgaaaaaggggaatggaagttgtccagttgaatcttagtcgccccatcgaggagcaggggccactggacgtgattattcacaagttgaccgatgtgatacttgaggctgaccagaatgattctcagtctctggagctcgtacaccggttccaggagtatatcgatgcacacccagaaactatcgtactggacccgttgccagccatcagaacactcctggaccggagtaaatcttatgagctaattagaaaaattgaggcttacatggaggacgatagaatttgctctcccccctttatggagctaacttcactttgtggggacgacaccatgcgcctcctggaaaagaatggcttgactttccccttcatctgcaagacacgggtcgcccatggcaccaactcccatgagatggctatcgtgtttaatcaggaaggactgaatgccatccagcccccttgtgtggtgcaaaatttcatcaaccataatgcagttctctataaggtcttcgtagtaggcgagtcttataccgtcgtgcaaagaccttctctgaagaattttagtgccgggacgagtgatcgcgagtccattttcttcaactcccacaacgtgtcaaagccggaatcttcatccgtgttgactgaactcgataagatcgagggggtatttgagagaccctctgacgaagtgattagggaactgtctcgtgccctcagacaggcccttggggtgagcctgttcggaatagacatcatcattaacaatcagaccggacagcacgcagtgatcgatattaacgcgtttccaggatatgaaggcgttagcgaatttttcacagatctcttaaaccatattgcaactgtcctccagggccagtccaccgcaatggctgccaccggcgatgtggcgttgctgcggcactcaaagctgctggccgaaccagccggcggactagtgggcgagcgcacttgctccgcatcccctggctgctgcggtagcatgatgggacaggacgccccgtggaaggccgaggcagacgccggaggaactgcaaagctgccccaccaacggttagggtgtaatgccggcgtctccccttcattccagcagcattgcgtcgcgagcttggctactaaggcaagctcccagtag

SEQ ID NO: 23058 - DNA, 600 bp, synthetic construct
  source 1..600: mol_type = other DNA; note = Synthetic coding sequence
atgcggttccggttctgcggcgacctggactgccccgactgggtgctcgcagagataagcactcttgcaaaaatgagctcagtcaagctccggttgctctgcagtcaagtgcttaaggagttgctggggcaggggattgactatgagaaaattctgaaacttacagcagatgccaaattcgagagcggtgatgtgaaagccactgtggctgtcctctcttttatactgagctctgccgccaagcactccgtggatggcgagagcctaagctcagaactccagcagttgggactgcctaaagaacatgcagcaagcctttgcagatgctacgaagaaaaacaatccccgcttcagaagcacctgcgggtgtgcagcctccggatgaatcgcctggctggcgtcggttggcgcgtcgattacacgttgtcgtcttccctcctgcaaagtgtggaagaaccaatggtccacctgcgtctggaggtagcagcagcgcccgggacacccgcacagcccgtagccatgagcttgagtgcagacaagttccaggtattgctggcagaactgaaacaggcacaaaccctcatgagttctcttggatag

SEQ ID NO: 23059 - DNA, 1224 bp, synthetic construct
  source 1..1224: mol_type = other DNA; note = Synthetic coding sequence
atgagccaccggaagttcagcgccccccggcacggccacctgggcttcctcccacataaacggagccaccgtcaccgtggcaaggttaaaacctggcctagggacgacccgtctcagcccgtgcatctgacggcgtttttgggctataaagccgggatgacgcacactttaagagaggtccatcgaccgggcctcaaaatctctaagcgggaagaagtcgaagccgtaaccatcgtcgagacacctccgctggtcgttgtcggcgtcgtagggtacgtagctacccctagggggctaaggagctttaagacgatttttgcagaacacctgtctgatgagtgccgcagaaggttctacaaggactggcacaagtctaaaaagaaagctttcacgaaggcctgtaagcgatggagggacaccgacggcaagaaacagctgcagaaagacttcgcagccatgaagaagtattgtaaagtgatcagagtcatagtgcacacccagatgaaactcctgccttttcggcagaaaaaggctcatatcatggagatccagctcaacggaggcaccgtcgctgaaaaggtcgcgtgggcgcaggcccggctcgagaaacaggttccggtccattcagttttttcccagtcagaggtcatagatgttatcgccgtgactaagggacgtggcgttaagggcgtgactagtaggtggcacaccaagaaactgccgaggaagactcacaaaggtctgcggaaggttgcctgcataggcgcttggcacccggcccgggtcggctgctcaattgctagagccggacagaagggataccatcatcgcacagaactgaacaaaaaaatatttagaattggtcgtggtccccatatggaagacggtaaactggtcaagaataacgcctccaccagctacgatgtgacagcgaagtctattacaccactgggaggatttccccactatggtgaagtgaataatgactttgtgatgctgaaaggctgcattgccggcactaagaagagggtcattacgcttaggaaaagtctgttggtccaccatagtaggcaggcagtagaaaatatagaactgaaattcattgatactaccagcaagtttggacatggacgctttcaaactgctcaggaaaagagggcctttatgggtccacagaagaagcacctagagaaagagactcctgagacgtcaggagacctctag

SEQ ID NO: 23060 - DNA, 7323 bp, synthetic construct
  source 1..7323: mol_type = other DNA; note = Synthetic coding sequence
atgagcagcagcggctacccccccaaccagggcgccttcagcaccgaacagagccgctaccctccacactcagtccagtatacatttcctaataccaggcatcagcaagagtttgccgtgccagactatcgttccagtcatcttgaagtctcgcaggcaagccagttactccagcagcaacagcagcaacagcttcggcgcaggcctagcctgctgtctgaatttcatccaggatccgaccgcccacaagagcgcaggacttcttatgagccatttcacccgggtccaagccctgtcgaccatgactcactggagtctaagagaccccggctggaacaggtgtctgattctcattttcagagggtgtccgccgctgtcttacccctagtgcaccctcttcctgagggcctgagggctagtgctgacgccaagaaggatccggcattcggaggaaaacacgaggccccctcaagccctatctctggacaaccctgcggcgatgaccagaacgcctccccatctaagttaagtaaggaagaactcatccagagtatggacagggtggatcgcgagatagctaaggtggagcaacaaattttgaagctgaagaagaagcagcagcagctggaggaggaggcagccaaacctccagaaccggagaagccggtaagtccccccccagtggaacagaagcacagaagtattgttcagatcatctatgacgagaaccgtaaaaaggcagaggaggcccataaaattttcgagggtctcgggcccaaagtcgagctgccactgtacaatcagccttccgacacgaaggtatatcacgagaacatcaagactaaccaggtcatgcggaaaaaactcatcctttttttcaagaggagaaatcatgcccgaaaacagagagagcaaaaaatctgccagagatacgaccagctcatggaagcatgggaaaagaaggtagaccggattgagaataacccaaggcggaaagctaaggaatccaagacgagggagtactacgaaaagcaatttcctgagatacggaagcaacgggaacagcaagagcggttccagagggtgggacagcgtggagctgggctgagtgctaccatcgcccggtccgagcatgaaatctctgagattattgatgggctcagcgagcaggaaaacaacgagaagcagatgagacagctttccgtgatcccaccaatgatgtttgatgccgaacagagaagggtgaagtttataaacatgaacgggttgatggaagatccaatgaaggtgtacaaagacaggcagttcatgaacgtgtggacagaccacgaaaaggaaattttcaaggacaagttcatccagcacccaaagaacttcggcctgatcgcgagttacctggagcgtaagtctgtgccggattgtgtgctctactactacctgaccaaaaagaatgaaaactataaagcgctcgtgcgccgaaactacggaaagaggcgtggccgcaatcagcagatagcaaggcctagccaggaagaaaaggttgaagagaaggaggaggacaaggccgagaagacagagaaaaaggaggaagagaagaaggacgaagaggagaaagatgagaaagaagattcaaaagaaaatactaaggaaaaggacaagatcgatggtactgctgaggagaccgaagagagggagcaggctactccaagggggagaaaaactgccaacagtcaagggcgaagaaaaggccgcatcacgcggtcaatgactaacgaagctgcagctgccagcgctgccgccgccgccgctaccgaagagccccctccaccactgcccccccctccggagccaatttcaacagagcccgtagaaacatcccggtggacggaagaggaaatggaggtggctaagaagggcctggtggagcatggtaggaactgggcagccattgctaagatggtgggcaccaagagcgaggcccagtgcaaaaatttctatttcaactataaaagacgtcacaaccttgacaatctgctccagcagcacaagcagaagacaagccgcaaaccccgagaggagagggatgtttctcagtgcgagagcgtggcttccaccgtttcagcccaggaggatgaagacattgaagcatctaatgaggaggagaaccccgaagacagcgaagtggaagctgtgaaaccgagcgaggactcaccggagaacgcaaccagtcgcggtaatactgagcccgcagtggagcttgagccaacgaccgaaacggctccaagcacgagcccttcacttgcggttcctagtaccaagccagccgaagacgagtcagtggagactcaggtgaatgactccatctccgccgaaaccgcggaacagatggacgtggaccagcaagagcacagcgccgaagaggggagcgtttgtgatccaccgccagccaccaaggctgactccgtggatgtggaagttcgcgttcccgagaatcatgctagcaaggtcgagggagacaatactaaggagcgagacttggatagggctagcgagaaggtggagcctagggacgaagacttggtcgtggcccagcagattaatgcacagcgacccgagccacagtcagataacgatagctccgccacgtgttcggcagacgaagacgtcgacggggaacccgagcgtcagcgcatgtttcctatggatagcaagcctagccttctcaacccgacaggctccattcttgtgagtagcccgctgaagcctaatcctctggatctgccgcagctgcagcatagagctgctgtgattccacctatggtgtcttgtactccctgtaacatccccatcggaactcccgtgtccggatacgcattgtaccagcgccacatcaaagcaatgcacgagagcgctttactggaggaacagaggcagcgtcaggagcagattgacttggagtgtaggtcctctacatccccttgcggtactagtaagagtccaaatcgggagtgggaagtactccagccagccccgcaccaggtgattaccaatttgcccgagggagtacggttgccaacaacgcggccaactaggcccccgcctcctctgatcccttcttctaaaacaacggtcgcctctgaaaagcctagcttcattatgggcgggagtatctcccagggcactcccgggacatatctcacttcccataaccaggcaagttatacacaggagacgcctaaacctagtgttggctccatctcactcgggcttccacgacaacaggaatcagccaaaagcgcaaccctgccttatattaaacaggaagagtttagcccacgtagccagaactcacagcccgagggcctgctcgttagggctcagcacgagggagttgtgcggggaacggcgggtgctattcaggaagggtcaataaccagaggtacaccaacctctaaaatctcagtagaatctattccgagcctacggggaagtataacacagggtacacccgccttaccccagacaggcattccaactgaagcactggttaaggggtctattagcagaatgccgattgaagatagcagccccgaaaagggccgagaagaagctgcctccaagggccacgtgatctatgaggggaagtcagggcacattctttcttacgataacattaaaaacgcacgggaaggaaccagaagccctcggacagcccacgagatatctttaaaacggagctacgagagtgtcgaggggaacattaagcaggggatgtctatgcgagaaagcccagtgagcgcacccctggagggcctgatctgcagggccttgccgcgtggtagcccgcactccgatttgaaggagcgaacggtgctctcaggctccatcatgcagggcaccccccgagccacgaccgagagctttgaggacgggcttaagtaccctaagcagatcaaacgggaatctccaccaattcgggcctttgagggagcaattaccaaaggaaagccttatgatggcattaccactataaaagaaatggggcggtctattcacgagattccacgacaggatattctgactcaggaatccaggaagacccctgaggtggtgcagtctactcgtccaattatagaaggatctattagccaggggacccctataaagttcgacaataattccggccagtcagcaatcaaacacaacgttaaaagtcttattactgggccctctaaactgagccgggggatgccacctcttgaaatcgtgcccgagaacatcaaggtggtcgaacggggcaaatacgaggacgtgaaagccggtgaaaccgtgagaagcaggcacacatccgtggtaagttctggcccctccgtcttaaggagtaccctgcatgaagcaccaaaggcccagttgtcgcccggcatctacgacgacaccagcgccaggaggacaccggtttcttaccagaatacaatgagtagaggatcccctatgatgaaccgcacttccgacgttaccatatcgagtaataagtccactaaccatgagagaaagtcaactttgactcccacacaaagagagtcaatccccgccaaatcccctgtgcctggagtggacccagttgtctcacactccccattcgaccctcaccatcggggctcgacggccggggaggtgtacagaagccatctcccgactcacctagaccccgccatgccattccacagagccctggatccggctgccgccgcctatctttttcaacggcagctctcacctacgcctggatatccaagccagtatcagttgtacgcgatggagaatacccgtcagaccatcctcaacgactacataacctctcagcaaatgcaagtgaacctgcggcctgatgtcgctagaggtctttcgcctcgtgagcaaccgcttggcttgccataccccgccactcggggtattattgatctgactaatatgccaccaaccattttagtgccgcacccaggaggaactagcaccccacccatggaccgcattacctatatccccgggacccagataacgttcccacccaggccatacaactcggcctcaatgtccccaggacacccaactcacctggccgctgccgcttcggccgagagagaaagagagcgtgaaagagaaaaagagagggaacgtgagaggatcgctgccgctagtagcgacctgtatctgcggcctgggtccgagcagccaggccggcctgggtctcacgggtacgtacgcagccccagtccctccgtgcggactcaggaaacgatgttacaacaacgtccttccgtgtttcaagggacaaacggaacgagcgtgattacccctttagatcctacagctcagcttagaatcatgcccctgcccgcaggaggtccaagcattagccagggcctgcccgcaagcagatataacactgctgccgatgcccttgcagcccttgttgacgccgccgcatccgccccccagatggacgtgagcaagaccaaggagtccaagcacgaagccgctcggctcgaagaaaatctgcgctcccggtccgctgcggtgagtgagcagcagcaactagaacagaagaccctcgaagtggaaaaacggtctgtacagtgcctctacacttcatctgccttcccttccggcaagcctcagcctcacagctctgtggtgtatagtgaagccgggaaggataaagggccccctcccaagtctagatacgaggaagaacttcggacgagggggaaaacaacgattaccgcagcaaactttatcgatgtgattattacgcgtcaaatcgcttctgacaaagatgcccgggagcggggttcccagtcttctgactcttcttcaagtctatcaagtcatcgctacgagaccccttcggatgccatagaggtgattagtccggcttctagccctgcccccccccaggaaaaactccagacataccaacccgaggtggtcaaagccaaccaggccgagaatgaccctactcgccagtacgagggccctctacaccattatcgaccccaacaggagagcccctcgccacagcagcagctgccacctagttctcaagccgaagggatgggccaggtcccacgtacacacagactgattacactggcagatcacatctgccaaattattacgcaagactttgccaggaaccaggtgagctcccagaccccacagcaaccccccacctctaccttccaaaatagccccagtgcactggtgtccacccccgtcagaaccaaaacctctaacagatactcgcctgagtcccaggctcagagtgtacatcatcaacgacccggttctagggtgtcccctgagaacctggtcgacaagagccgggggtcgcgccccggtaagtcccctgagcgaagccatgtttccagtgagccttatgagccaatttcacccccccaggttcctgtcgtacatgagaagcaagacagtttacttcttttatcccagcgaggagctgagcccgctgagcagcgaaatgacgctagatccccaggttccataagttaccttcctagctttttcacaaagttggaaaacacaagcccaatggttaaatccaagaaacaagaaatcttccggaaattgaactcctctggcggaggagactccgatatggctgccgcccagcctggaacggaaatcttcaaccttcccgcagttactaccagcggttcagtgtctagtcgcggccactcctttgcagaccctgcatctaatctggggctcgaagatatcataaggaaggcactgatgggttctttcgatgacaaagtggaggaccacggggtggtgatgagtcagccaatgggagtggtccccgggaccgccaacacatccgtggttacttctggcgagacaaggagggaagagggagatccctccccgcattctggaggtgtgtgcaagccaaaactaatcagcaaatccaactctcgtaagtcaaaaagccccattccaggacaaggttacttgggaacggagcgtccgtctagcgtgtcatccgtgcacagcgagggcgattaccaccggcagacccctggatgggcctgggaggaccgaccatcatctacaggtagcacccagtttccatacaaccctctgaccatgcgtatgttatcatcgaccccccctacccccattgcatgtgcccccagcgccgtgaaccaagcagcgcctcatcagcaaaatcgaatctgggaaagggagcccgcgcccttactgtctgctcagtatgagactctctccgattctgacgactag

SEQ ID NO: 23061 - DNA, 2313 bp, synthetic construct
  source 1..2313: mol_type = other DNA; note = Synthetic coding sequence
atgctgcagcaggtgaacggccacaaccccggcagcgacggccaggctcgcgagtatctgagggaggacctgcaggagtttcttggcggcgaagtgcttctctacaagttggatgacctgacgagagtcaatccagtgacattagagactgtcctgcgctgtctgcaggcccgctacatggccgatactttttacaccaacgccggctgcaccctcgtggctctgaatcccttcaaacccgtgccgcaactttacagccctgaacttatgcgggagtaccatgcagcaccccaaccccagaagttgaagcctcacgtgttcaccgtgggggagcagacctacaggaacgtgaagtccctgattgagcccgtgaatcagagcatcgtggtttcaggagagtcaggagctggaaagacgtggacaagccgctgcctgatgaaattttatgccgtagtggccacatctcccgcatcctgggagtcccataagatcgcagaaagaatcgaacagagaatcctgaattccaatcctgtgatggaagccttcggcaatgcctgcacccttcgaaataacaattccagccgcttcggcaagttcatccagctgcagctcaatcgggcgcagcagatgactggcgccgctgtacaaacttacctgctcgagaagaccagggtggcttgtcaggcgagtagcgagcggaacttccatatcttctaccagatctgcaaaggcgcaagcgaggatgagcgtctgcaatggcatctccctgagggggctgctttctcctggctgcccaatcctgaacgcagcctcgaggaagactgcttcgaggtgaccagagaagccatgctccacctggggatcgacactcctacccagaacaacatcttcaaggtactggccggtctactccatctgggcaacattcagttcgctgctagtgaggacgaggcccagccatgccagcccatggatgatgctaagtattctgtccgcacagctgctagccttctgggactgccagaagacgttctccttgagatggtgcagattcgcaccatccgcgccggtaggcagcaacaggtgttcaggaagccttgcgcacgggcagaatgcgataccaggcgggactgtctcgctaagcttatatacgcacgcttattcgattggctggtgtctgtcataaactcgtctatctgcgcagacaccgatagctggactacatttattggccttcttgacgtatatgggtttgagagctttccggacaattcccttgaacagctctgcattaattacgctaacgagaaattacagctggaagcctgcggcctcgtcgagacaattcatataagtgcagcaggatttccgatccgggtctcccataggaattttgtggaaaggtacaagctcttacggagactccacccatgcacctcctccggacccgatagcccttaccccgccaaggggctgcctgaatggtgtccgcactccgaggaggctactctggaacctctaatacaggacatcctgcacaccctgcctgtgttgacacaagccgccgccattaccggggactcagcagaggcaatgccagcccctatgcactgcggccgtactaaggtattcatgactgattctatgttggagctgctggaatgtggtcgggcaagagtgttggaacagtgtgcaaggtgcattcagggcggctggcggagacatagacatagggaacaagaacggcaatggagagctgtgatgctgattcaggccgctatacgctcctggctaacacggaagcatatccagagacttcatgcggccgccacagtgatcaagcgcgcatggcagaaatggcgcatccggatggcatgcttggctgctaaagagctggatggagtagaggagaagcatttctcccaggccccatgttccctttccacctcaccactccagacccggctcctcgaagccattattcgcctctggccgctggggctggtgctcgcgaacaccgccatgggagtaggatcatttcagcggaaactagtggtgtgggcctgtcttcagttgccaaggggttccccctccagctataccgtccagactgcccaggaccaggctggagtgacatctatccgtgctctcccgcaaggctcaatcaaattccattgtcgcaagagtccattgcgctacgcggacatatgccctgaaccatcaccctactccatcactggcttcaaccagatattgttagagcgacacaggctgattcatgtcacaagcagtgctttcactggtcttggatag

SEQ ID NO: 23062 - DNA, 2796 bp, synthetic construct
  source 1..2796: mol_type = other DNA; note = Synthetic coding sequence
atggccgaggtggaggccgtgcagctgaaggaggagggcaaccggcacttccagcttcaggactacaaggcagccaccaacagttactcccaggctctcaagctgacaaaggataaggccctactcgccactctgtatagaaaccgggccgcctgtggtctgaagacagaaagctacgtgcaggccgctagcgacgctagccgggctatcgatattaattcttccgatatcaaagctttgtatcgccggtgtcaggccttggagcatttaggtaaactcgaccaggcattcaaagatgtccagcgctgcgcaaccctggagcctagaaatcaaaattttcaggagatgctccgtaggttaaacaccagcattcaggagaagttgcgggtacagttctctaccgactctcgagttcagaagatgttcgaaatccttctggacgagaactcggaagccgacaaaagagaaaaagcagccaataacctgatcgtgctcggaagggaggaagctggggctgaaaaaatcttccaaaacaacggcgtggctctgctccttcagctgctcgatacgaagaagccagagctggttctggccgcggttcgcacattatcgggcatgtgttccggtcatcaggcacgagctaccgtgatcctgcacgccgttcgcattgaccggatatgctcactgatggcggttgaaaacgaggagatgtcactggctgtgtgtaatctgctgcaggccataatagactctttatctggtgaagataagagagaacaccgaggaaaagaagaggcattagtgcttgatactaaaaaagatctcaagcagatcacaagccacttactagacatgctagtaagcaaaaaggtctcgggccagggcagggaccaggccttgaatttgctcaacaagaacgttccaagaaaagacctggccatacacgacaactccagaacaatctatgtggtggacaatggactccgcaaaatactcaaggtagtgggccaggttccagaccttcctagctgtctacctcttacggataatacaagaatgttggcctccatactgattaacaagctatatgatgatctgcgatgcgatccagaacgagatcactttcggaagatctgcgaggagtacatcactggaaaatttgaccctcaggacatggacaagaacctgaatgctatccagaccgtaagcgggatcctgcaggggccgttcgacctcggcaatcaattgctgggtcttaaaggggtgatggagatgatggttgcactctgcggctcagagagggagactgatcagctggtggccgtggaggctcttattcacgcatctacaaaactgagtagagccacgtttataatcacaaacggagtctctctcctgaagcagatttataaaaccacaaagaatgagaagattaaaattagaacgctggttgggctctgcaagcttggatctgcaggcgggaccgactacgggctgcggcagtttgccgaaggctctacggaaaaactggccaagcaatgccggaagtggttgtgcaacatgtccatcgatactaggacacgccgatgggccgtcgagggtcttgcctatctgaccctggatgcagacgtgaaggatgacttcgtacaggatgtccccgctctccaggctatgtttgagctggctaaagccggtacaagtgacaagaccattctgtacagcgtcgccaccaccctagttaactgcaccaacagttacgacgtgaaagaggtcattccagaattagtacagctggccaagttttccaagcagcacgtaccagaagaacatcccaaagataagaaagattttatcgacatgcgagtgaaaagactgcttaaggccggggtgatcagcgccctcgcctgtatggtgaaggccgacagcgcgattctcacagaccagactaaggaactgttagcccgcgtcttcctcgccttgtgtgataatcctaaagatcgtgggacaattgtggctcaggggggcggcaaggcattaatcccattagccctggaaggcacagatgtcggtaaagtcaaagccgcccacgcgttagcaaagatcgctgcagtgagcaatcccgatattgcctttcctggagaacgagtttacgaggtggtacggcccctagtgcgtctgctcgacacacagagagacggactacagaattacgaggcactgctagggctcaccaacctgtctggcaggtctgacaaactgcggcagaagatctttaaagaaagggctctccctgatatcgagaattacatgtttgagaatcatgaccaactgcgccaagctgcaacggagtgtatgtgtaatatggttctgcataaagaagtgcaggaacggttcttggccgatggcaacgatcgcctcaaactggtggtgttactgtgcggagaggacgacgacaaggtgcagaatgccgctgcgggcgccctagcaatgctaaccgcagcacataagaagctgtgcctaaagatgacgcaggtcactacgcagtggctggaaatcttgcagaggctgtgccttcacgatcagctgagtgtgcaacaccgcgggttggtcatcgcctacaaccttctggccgccgatgcggagttggctaagaaattggtggaaagtgagctgctggaaattctgacggttgttgggaagcaggagccagacgaaaagaaagctgaggtagtccaaaccgccagagaatgcctgattaagtgtatggattacgggttcataaagcccgttagttag

SEQ ID NO: 23063 - DNA, 2022 bp, synthetic construct
  source 1..2022: mol_type = other DNA; note = Synthetic coding sequence
atggccagccagttctgcctgcccgagagcccctgcctgagccccctcaaaccacttaagcctcactttggcgacatccaggaggggatatatgtagccatccagcgttcagacaagcgtattcatctcgccgtagttaccgagattaaccgagaaaactattgggtgaccgtagaatgggttgagaaagccgtcaagaaggggaaaaagattgacctggagaccatcctcctcctcaatcccgccctcgactcagcagagcatcccatgccccccccacctttgtcgcccctggcccttgccccctcatcagccatccgagaccagcgcacggcgacgaagtgggtggcaatgattccgcagaaaaaccagaccgcgtctggcgacagtctcgatgtcagggtgccctccaaaccatgccttatgaagcagaagaaatccccttgcctctgggaaatccagaaactccaagaacaaagagaaaagaggaggcgcctccaacaagagattcgggctagaagggccttagacgtgaacactagaaacccaaactatgaaataatgcacatgattgaagagtatcggcgccatttggacagctccaagattagcgtcctggagcctcctcaggaacaccgaatatgcgtctgtgtacgtaaaagacccttgaatcagcgtgagaccacactgaaggacttggatatcataactgttccctcagacaatgttgtgatggtgcacgagtcaaaacagaaggtggatttgacgcggtaccttcagaaccagacgttctgttttgaccatgcattcgatgataaagctagtaatgagcttgtttatcaatttacagctcagcccctggtcgagtccatcttcaggaaaggtatggctacttgtttcgcctatggtcaaacaggctcagggaagacctacaccatgggaggcgatttttccgggacggcacaggactgctctaaaggaatatacgcactggtggctcaggacgtgttcctgctactgcggaactctacctacgagaaattggatcttaaagtatacggcacgttcttcgagatttacggaggcaaggtgtacgatctcctgaactggaagaagaaactgcaagtgttggaggacggcaatcaacagatccaggtggtcggcctccaggaaaaggaggtgtgttgtgtggaggaggtcctgaacctggtcgagattgggaatagctgcaggacaagcagacagaccccggttaacgctcactcttcccggtcccacgcagtgttccagatcattctcaaatctggaagaattatgcatggcaagttcagtttggtggatctggccgggaacgaaagaggggccgataccactaaagctagtagaaaacgccagctcgaaggtgctgaaattaacaaatcattacttgcactgaaggagtgcatactggctcttggtcaaaataagccacacacgccatttagggcatccaagctgacactcgtactccgagatagcttcattggccagaactcctcaacctgtatgatcgccaccatctctcctggcatgacatcttgcgaaaatacactgaacacacttcggtatgcaaatcgggtgaagaagttaaacgtggatgtgcgtccataccaccgcggtcactacccaatcggtcacgaagcaccccgcatgcttaagagtcatatagggaatagcgagatgagcctgcagagggacgaatttatcaaaatcccctacgttcagtctgaagaacagaaagagattgaagaggtggaaacactccccactctgctgggcaaagacacaacaatttctggtaagggaagctcccaatggcttgaaaacatccaagaacgtgccggcggtgtccatcatgatattgatttttgtatagcgcgctccctctccatccttgagcagaaaattgatgcgctcactgagatacaaaagaagctcaagctgttgctcgccgatttacatgtaaaatccaaggtggagtag

SEQ ID NO: 23064 - DNA, 1236 bp, synthetic construct
  source 1..1236: mol_type = other DNA; note = Synthetic coding sequence
atggccaccaccgccaccatggccaccagcggcagcgcccggaagcgcctgctgaaggaggaggatatgacaaaggtagagtttgagacgtccgaggaggttgacgtcacccccactttcgatacaatgggcttaagagaagatctgctcagagggatttacgcatatgggtttgagaaacccagcgccatccagcagcgggccataaagcagatcatcaagggtcgtgacgtgattgcgcagtctcaatccggcactggaaagaccgcaactttttcaatttctgtgctgcagtgcctggatattcaggtgcgggagacacaggccctcattctcgctccgacccgggagctggcagtacaaatccaaaaaggacttctggctcttggcgattatatgaatgtgcagtgccacgcctgtatcggtgggacgaacgtaggagaggatatcaggaagttggattacgggcagcatgtggtggccggtactccaggacgggtgttcgacatgattagacggaggagcctgagaacaagggctattaaaatgttggtgctagacgaggcagacgagatgctgaataagggtttcaaggaacagatttacgacgtatatcgttatttgccacccgcgacacaagtggtccttatcagcgccactctgcctcacgagatcctcgagatgacaaacaaattcatgacggatcctatccggattctcgtcaaaagggatgaactgacccttgaagggattaagcagttctttgtggcagtggaaagggaggagtggaagttcgataccttatgcgacctgtacgatacactgaccattactcaggccgtgattttctgcaatacgaagaggaaggttgactggctgaccgaaaaaatgagggaggctaattttactgtcagtagcatgcacggggacatgccccagaaagagagagagagtataatgaaagagttcaggtccggtgcctcacgcgtgctgattagcactgacgtttgggcccgcgggctcgacgtcccccaagtttctctgatcatcaattacgatctgcccaacaatagggagctgtatattcaccggataggcaggagcggcaggtatgggagaaaaggagtcgcgatcaacttcgttaagaacgatgacatccgaattctgcgtgatatcgagcaatattactcaacgcagatagatgaaatgccaatgaatgtcgccgaccttatttag

SEQ ID NO: 23065 - DNA, 1683 bp, synthetic construct
  source 1..1683: mol_type = other DNA; note = Synthetic coding sequence
atggagctgcccgccgtgggcgagcacgtgttcgccgtggagagcattgagaagaagcgcatccgaaaagggagggtagaatacctggtgaaatggaggggctggtcgcctaaatataatacttgggaacccgaggagaatatcttggatccccggcttctgattgctttccagaaccgcgaaagacaagagcagctcatggggtacagaaaaagagggccaaaacccaagccgctggttgtccaggtgcctacattcgctagaagaagtaacgtgctaacgggactgcaagacagctccacagacaaccgggcgaagctggatttaggcgcccagggcaagggtcaggggcaccaatacgaacttaactcaaagaagcatcaccagtatcaaccacacagcaaggagagagctggaaaacctccgccacctggcaagtctggaaaatactattaccagctcaactctaagaagcatcatccttatcagccagatcccaaaatgtacgacctacagtatcagggagggcacaaggaggccccaagtcctacctgccctgatttgggagccaaatcgcatccccctgataaatgggcccagggcgcgggcgcaaaagggtacttaggggctgtgaaacccctcgctggggcagccggggcacctggcaaaggctctgagaaagggcccccaaatggaatgatgccagccccgaaggaagccgtgaccggtaacggcatcggtgggaaaatgaagattgtaaagaacaagaataagaacggccgaatcgtaatcgtaatgtcgaaatacatggagaacggaatgcaggctgtgaaaattaagtcaggtgaagtcgcggagggagaggctcggtcaccctctcataagaaaagagcggctgatgaaagacacccacctgccgatcgcacctttaagaaggctgcaggcgccgaggaaaagaaggttgaggcccctcctaagaggagggaagaggaagtgtccggggtgtccgacccgcagccacaggatgcagggtcacggaaactcagccctaccaaagaggccttcggagagcagcctctgcagctgacgactaaacccgacctgctggcgtgggacccggctaggaacacacaccctcctagtcaccaccctcacccccatccccatcatcaccaccatcaccaccaccatcaccaccatgctgtgggcttgaacctatctcatgtcagaaagcggtgtttatcagagacacacggcgaaagagaaccctgcaagaaacggctcactgccagaagtatctcaacgccaacttgtctgggaggaagccccgctgcagagcggccagccgacctgccacctgccgctgccctaccccagcccgaggtcatactgctcgacagcgacctcgacgagcccattgacctgcggtgtgtcaaaaccaggtcagaggcaggtgagcctcctagttctcttcaggtaaaacctgagacgcctgcaagcgctgctgttgctgtcgctgctgccgctgcgccgacgactactgccgagaagccccccgccgaagcacaagacgagcctgctgaatcactttcagagttcaaacccttctttgggaatatcataattaccgacgtcaccgccaactgtttgaccgtgacatttaaagagtacgtgaccgtctag

SEQ ID NO: 23066 - DNA, 1218 bp, synthetic construct
  source 1..1218: mol_type = other DNA; note = Synthetic coding sequence
atggacagcctggtgaccgccaacaccaagttctgcttcgacctgtttcaggagatcggtaaggatgatcgacacaagaacattttcttctccccgcttagtttgtctgcagctctaggcatggtacgactgggggctcgttcagactctgcccaccaaatcgacgaggtgttacattttaacgagtttagccaaaacgagagcaaggagccagatccttgcctgaaatctaacaagcagaaggccggctctcttaataacgaatctggactggtgagctgctatttcggccagttactgtctaagctagacagaatcaagaccgattacaccctttctattgccaatcgactctatggggagcaggagttcccgatctgtcaggagtatctggacggagtgatccagttttatcacaccacaatcgaatcagtggactttcagaagaaccctgagaagagtagacaggaaatcaacttctgggtggagtgtcaaagccagggaaagattaaagagctgttcagtaaggacgccatcaacgcagagactgttttagtgctcgttaacgccgtgtactttaaggctaagtgggaaacttattttgaccacgaaaacactgtcgacgctccattctgcctcaacgctaatgagaacaaatccgtgaaaatgatgactcagaaaggcctgtaccggatcgggttcatcgaagaagtgaaagcccagattctggagatgcgatatactaaagggaagctgtccatgttcgtattgttgccgtcccattccaaggacaatctgaaagggctcgaggaactcgagcgtaagattacctacgaaaagatggttgcttggtcaagtagcgagaatatgtccgaggagagcgtcgtgctctcatttccacggtttacgctggaagatagctacgaccttaactctatcttgcaggatatgggcatcactgatatcttcgacgaaacccgggcagacctcaccggcatatcaccatctccaaacttatatctctccaagatcatccataagactttcgttgaggtggatgagaacggaacacaggctgccgccgccactggcgccgtggtctctgaacgatcactgaggtcttgggttgaattcaatgcaaatcacccctttctattctttattcgacacaacaaaacgcaaaccatcctgttctacggcagagtctgctctccatag

SEQ ID NO: 23067 - DNA, 3537 bp, synthetic construct
  source 1..3537: mol_type = other DNA; note = Synthetic coding sequence
atgctgcggatgaagctgcccctgaagcccacccaccccgccgagcccccacccgaagctgaggaacctgaggcggatgcaagaccaggagctaaagccccaagccgcaggcggagggactgtcgacccccccctcctccgccccctcctgcggggccttccagaggcccactcccaccccctcccccgccccgaggtctgggtccccctgtggcagggggcgccgcagccggcgccggtatgccaggcggggggggcggaccatctgctgctttgcgtgagcaggagagggtctacgagtggtttggccttgtgctgggttcagctcagaggctcgagttcatgtgcgggctgctggacctgtgcaacccactggaattgcgctttctgggtagttgtcttgaagatctggccagaaaggactaccattacctccgggattccgaggcgaaagcaaatggattatccgatccaggacctctcgctgacttccgggagcctgcggtacggtctcggctaatcgtctacttagccctgttggggagcgagaacagggaggccgcggggcgcctgcataggttgttacctcaagtcgatagcgttctgaagagcctgagggctgctcgcggtgagggaagccgaggaggtgcagaggacgaacggggcgaagacggcgacggtgagcaggacgctgagaaagacgggtctgggcccgagggcggaatcgtggagcctcgtgtcggtgggggcctcggttcaagagcgcaagaggaacttctgctgttatttacgatggcctcattacacccagcattcagcttccaccagcgtgttaccttacgtgagcatctggagaggctgcgcgccgctctgcgcggggggccggaagacgctgaggtcgaggttgaaccctgtaaattcgccggccctcgggctcagaacaactcggcgcacggtgattacatgcagaataatgagagcagcttgatcgagcaggcacctataccccaggacgggctcacagtggccccacacagggcccaacgcgaggccgtccacatcgagaaaatcatgctgaagggagtccaacggaagcgggccgacaagtattgggaatacacttttaaggtcaattggtctgacttaagcgttactacagtgactaagacacaccaggaattacaggagtttctgttgaaactaccaaaagagttgtcatcagaaacgtttgataagacgatccttcgcgccctgaaccagggcagtttgaaacgagaggagcgacgccatcctgatctcgagccgatcctgcgacaactgttcagttcctctagccaggcctttcttcagagtcagaaagtgcattcatttttccagtccatctcctcagacagtctccactccattaataatctgcagagttccctgaaaacttcaaagatcctcgagcacctcaaggaggattcctccgaggcgagcagtcaggaagaagatgtgctgcagcacgcgatcatccataaaaagcacaccggaaagagtcctatcgtgaataatattggtacttcctgttccccccttgatggactgacaatgcaatacagcgagcagaacggtatagttgattggagaaaacagtcctgcacaacgatacaacatcccgaacactgcgtaactagcgccgaccaacactcggccgaaaaacgttctctctcctctatcaacaaaaaaaagggcaagccacagaccgaaaaagagaagattaagaagaccgacaacaggttaaattctcgtattaatggaatccgactgagtactccacagcacgctcacggaggtactgtaaaggatgttaatctcgatattggaagcggtcacgatacatgtggcgagacctccagcgagagttactcctccccctccagtccgcgtcacgacggtcgagaatcatttgagagtgaggaggagaaagatagggatacagattccaacagcgaagactccgggaatccttccaccactcgcttcaccggatacgggtccgtcaatcagaccgttacggttaaacccccagtccaaatcgcaagtcttggaaatgagaacggcaaccttcttgaagatccactaaactcaccgaagtatcaacacatttcatttatgcccactctgcactgcgtcatgcacaacggtgcacagaaatcagaggttgtggtccccgcccccaaacccgctgatggcaagacaattgggatgctcgtgccatcccccgtggccatttcagcaatccgcgagagtgccaattcaaccccggtgggcatcctgggcccgactgcctgcacgggagaatctgaaaagcacctcgaactacttgctagtccgttacctattccttcaaccttcttaccccacagctctactccagctcttcacctgactgtgcagcggttaaagctcccaccaccacagggctccagcgagagctgtaccgtaaacatcccacagcagccccccggcagcctgagtatcgccagtcctaacaccgcattcatccccatccataatccaggatcgttccctggatcccctgttgctacaactgaccctataacgaagtcagcatctcaggtggttggacttaatcaaatggtgccacagatcgaggggaacaccgggaccgtcccccagcctactaacgtgaaggtggtgctcccggccgccgggctgtcggcagctcaaccacctgcttcttatccattaccaggcagcccactggctgctggcgtcctcccctctcagaacagcagtgtgttgtctactgcagccacatctccccagcctgctagcgctggaattagccaagcccaggcaactgttcctcccgctgtgcctacccacactccaggaccagcccccagcccctctccagctctgactcacagcaccgcccagtctgatagtacctcctatattagcgccgtcggaaatacaaacgctaatgggaccgtcgttccaccccagcagatgggatccggaccctgtggcagctgcggccgcaggtgttcctgcggcaccaacggcaatctgcagctgaacagctactattatccaaatcctatgccaggcccaatgtacagggtccctagtttttttactctgccatctatttgcaacggcagttatttgaatcaagcccatcagtccaatggcaatcagctgccgttcttcctcccacagactccctacgcaaatggattggtgcatgaccctgtcatgggctcacaagccaactacgggatgcagcaaatggcaggcttcggccgtttttatcctgtctaccccgcccctaatgtggtggctaatacgagtggcagcggtccaaaaaagaacggaaacgtttcttgctacaactgcggcgtttccggacactatgctcaggactgcaagcagtcctcaatggaggccaaccagcagggaacctaccgccttcggtatgcccctcctttgccccccagtaatgacacccttgattccgctgactag

SEQ ID NO: 23068 - DNA, 411 bp, synthetic construct
  source 1..411: mol_type = other DNA; note = Synthetic coding sequence
atgcccggcaagaaggcccggaagaacgcccagcccagccccgcccgggcccccgctggccccgctgggacagccggcacagccagggatcaggctggctttgccatcggtatgcagctcaggtttacccgcggcaagaaactactgtctagctcactgtcctcctccccacttgccctacctcggggccatgaggagcaagttcaggttgcggggagccgggtatgctactccactcaggagatctggaggcagaccgagctcccggcagagacatcagagtctgacattcagactttgttgttacgcaaccttaccgctagtaagacgtgcatgagggggctattacagaaatcattcctgagaagatgtactttccatcagttcgaggaaaggctccattgcaactag

SEQ ID NO: 23069 - DNA, 879 bp, synthetic construct
  source 1..879: mol_type = other DNA; note = Synthetic coding sequence
atgaaggccaccgtgctgatgcggcagcccggccgggtgcaggagatcgttggggcactgaggaaggggggaggtgaccgactgcaagtaattagcgattttgatatgactttatctagattcgcctacaacggcaaacgctgcccatcttcctataatatactcgacaattccaagattatatctgaggagtgcagaaaggagttgaccgccctcctgcatcattattatcctatcgaaatcgaccctcacagaacggtgaaagaaaagctgccccatatggttgaatggtggaccaaggcgcataatctgctttgtcaacagaaaatccagaaattccaaatcgctcaagtggtgcgagagtctaacgccatgttaagggaggggtataaaacctttttcaacaccctgtaccataataatattcccctatttatctttagcgctgggattggagacattcttgaagagatcatccggcagatgaaagtgtttcatcccaatattcacatagtttctaactacatggacttcaacgaggatggattcctgcagggcttcaagggtcagctgattcatacctataacaaaaacagctcagcctgcgaaaacagtggatatttccagcagctcgaaggaaaaaccaatgtcattcttctcggcgacagtattggcgatctgacaatggccgatggggtgccgggcgtccagaatattctcaagatcgggtttttgaatgataaagtggaagagaggcgcgagaggtacatggactcgtatgatatcgtcctggagaaagacgagacactagatgtcgtgaatgggctgttacagcacatattatgtcagggggttcagttggaaatgcagggcccctag

SEQ ID NO: 23070 - DNA, 2010 bp, synthetic construct
  source 1..2010: mol_type = other DNA; note = Synthetic coding sequence
atggacctgcggaccgccgtgtacaacgccgcccgggacggcaagctgcagttactccagaagcttctatctggacgttctcgggaagaattggatgagctgacaggcgaggtagccggaggcggcacaccactgcttatcgctgcgcggtacggccacctggatgtcgtagagtatctggtcgatagatgcggcgcttctgtggaagccggggggtctgtacacttcgacggggagacgattgagggcgcacccccactatgggccgcttccgctgctggacacctggatgtcgtgcggagcctgttaagacggggcgcaagcgtaaaccgcacgacccgaacaaattccacaccattgagggcagcgtgctttgacggtcatttggaagtggtgaggtacttggtgggcgagcatcaggctgatctggaagtggcgaatcggcatggacacacgtgcttgatgatttcctgttataaggggcaccgggaaatcgctcgctatctgctagagcagggagcacaggttaatcggagaagtgccaagggcaacacagccctgcacgactgtgcggaatcaggatcattagaaatccttcagcttttactgggctgtaaagcacggatggaacgcgatgggtacggaatgaccccactgcttgccgcatccgtgaccggccacaccaatatagtggagtacctaattcaggagcagccagggcaggagcaggtggcaggtggagaagctcagcctggactcccacaagaggatccctcaacatcccaggggtgcgcgcagccccagggagctccatgttgctctagcagccccgaggagcctctgaacggcgagagttacgagagctgctgccccacaagccgggaggctgccgtggaagcactggagctcctcggcgctacgtacgtggataagaaaagggatttattgggagcactcaaacactggagacgcgcaatggagctgagacaccaaggcggggagtatctgccaaagcccgaaccaccacagctggtgctcgcatatgactactctcgtgaagttaacactacagaagaactagaagcactgattactgatccagatgaaatgcgcatgcaggcactgctgatacgtgagagaatcctgggcccaagccatcctgatactagttattatatccgctaccggggcgcagtgtatgctgactccggcaacttcgagagatgtatccgactctggaagtacgccttggacatgcaacaaagtaacctggaacctctatctcccatgaccgcttcatcttttttaagtttcgcggagctattttcgtacgtgctccaggacagagctgcaaaaggaagtctaggcacccagattggctttgccgatcttatgggggtattaactaaaggggtgagagaagtcgaacgtgccctccagctgccgagagaaccaggtgacagcgctcagtttacgaaagccctcgccataattttgcacctgctctacctgttagaaaaagtcgagtgtacgccaagccaagaacacctgaaacaccaaactgtgtacaggttgctgaagtgtgccccgcgcggaaagaacgggttcacccctcttcatatggcagtcgataaggatactacgaatgtcggccggtaccctgtgggccgattcccctctctccacgtggtaaaggttctgctggattgcggtgcggaccccgactcccgcgattttgataataacaccccgctgcacatcgccgcccagaataattgtccagccatcatgaatgcgttgattgaggccggggcccacatggatgccacaaatgctttcaaaaagacggcttacgagctgctggacgagaagttgctggcgcgggggactatgcagcctttcaattacgtaactctccagtgtctggccgccagggccctggacaaaaataaaatcccatacaagggcttcatcccagaggacctggaggccttcatagaactccactag

SEQ ID NO: 23071 - DNA, 720 bp, synthetic construct
  source 1..720: mol_type = other DNA; note = Synthetic coding sequence
atggccgccaccctgctggccgcccggggcgccggccccgcccccgcttggggcccagaggcttttactcctgattgggagagcagggaagtgagcacgggtactacaatcatggccgtccaatttgatgggggggtggtgcttggtgcggatagccgcacaaccaccggaagctacattgctaatagggtcacagacaagctgacgcctatccatgaccggatattctgctgccgctcaggatccgccgctgacacccaggccgtggccgacgcagtcacctatcaactggggttccattcaattgaactgaacgagcccccactagtacacactgcagcctctctcttcaaggagatgtgctaccgatacagggaggaccttatggctgggattattatcgcgggatgggacccacaagaaggaggccaagtttactctgtccctatgggcggaatgatggtgcggcagagcttcgccataggagggagcggaagtagctatatatacggctacgtggacgctacctaccgggagggtatgactaaggaggaatgccttcagtttacagctaacgcgctcgccctcgccatggagcgagacggatcttcgggaggcgtcattcgtctagccgccattgctgagtccggtgtggagagacaggtgcttctcggtgaccagataccaaaattcgccgttgcgactctgcctccagcttag

SEQ ID NO: 23072 - DNA, 1383 bp, synthetic construct
  source 1..1383: mol_type = other DNA; note = Synthetic coding sequence
atgaacttcagcgaggtgttcaagctgagcagcctgctgtgcaagttttctcctgatggcaaatacttagcctcatgcgtgcagtaccgcctggttgttcgggacgttaatacgctccagatattacagctgtatacttgtttggaccagattcagcatatcgagtggtccgccgatagcctctttatcctctgtgctatgtacaagcgcggactagttcaggtgtggtcgctggagcagcctgaatggcactgtaagattgacgaggggagcgctggactggtggccagctgctggtcccccgatggaagacatatcctcaatacgaccgaatttcatctaaggatcaccgtttggtctctgtgcaccaagtcagtgtcttacattaagtatcccaaggcctgccttcagggcattactttcacacgggatggaagatatatggccctagccgagagaagggactgtaaggactatgtcagcatcttcgtgtgcagtgactggcaactgctgagacacttcgatactgatacccaggatctcaccggcatcgagtgggcacccaatggttgtgtgctggccgtgtgggatacatgtttggagtataaaattttgctgtattcactggacggtaggctgctgtctacttattcggcttacgagtggtcactcggaattaagtccgtcgcttggagcccctcctcgcagttcctggcagtaggcagttacgacgggaaagttcgcatacttaatcatgtgacttggaaaatgattaccgaattcggacatcccgctgcaatcaacgacccaaagatcgtagtttacaaggaggctgagaaaagcccacaactgggcctgggttgtctgagctttccgccgccacgagccggcgccggccccctcccctcctccgaaagcaagtatgaaattgcttcagtgcctgtgtccttacagacactaaagccagtgaccgatcgggccaaccctaagattgggataggtatgctggccttctctcctgatagctatttcctcgccacccgaaacgacaatatccctaatgctgtatgggtatgggatatccagaaactgaggctcttcgcagtgttggagcagttgtccccggtgcgcgcgtttcaatgggacccacagcagcccagactggctatatgtacaggggggagcaggttgtatctgtggtctccagctggatgcatgagtgtgcaagtccccggagagggggacttcgcagtgctcagcctatgctggcacttaagtggtgacagcatggcgctgctatcgaaggaccacttctgcctgtgttttctcgagaccgaggccgttgtcggaacagcttgtcgccagctgggcggccatacatag

SEQ ID NO: 23073 - DNA, 282 bp, synthetic construct
  source 1..282: mol_type = other DNA; note = Synthetic coding sequence
atgagcggcctgcgggtgtacagcaccagcgtgaccggcagccgggagataaaatctcagcagtccgaggtgacaagaatcctcgacggaaagcggatacagtaccagctggtcgacatttcccaggataacgcactgagggatgaaatgcgagccctggctggaaaccccaaggccactccccctcagatagtaaatggcgaccagtattgtggagactacgagctgttcgttgaggccgtggaacagaacacgctgcaagaattcttgaagcttgcatag

SEQ ID NO: 23074 - DNA, 1920 bp, synthetic construct
  source 1..1920: mol_type = other DNA; note = Synthetic coding sequence
atgaacctggagaagctgagcaagcccgagctgctgaccctgttcagcattctggagggagagctcgaagcacgggatctggtcatagaggcccttaaagcccagcatcgcgacacattcatcgaggaaagatatgggaaatacaacatctccgaccctctgatggctctgcaaagggactttgagacacttaaagaaaagaacgatggggagaagcagcccgtctgcaccaaccccttatccatactcaaggtggttatgaaacaatgtaaaaacatgcaagagagaatgctgtcacagctggctgccgctgagagcagacacagaaaagtgatactggacttagaagaggagagacagcggcacgctcaggacacagcagaaggcgatgacgtcacctacatgctagaaaaggagagggaacgacttacccagcagctcgaattcgagaagagtcaagtgaagaaattcgagaaggagcagaagaagctttcctcccagctggaagaagagcggagccggcacaaacagctgtctagcatgctagtgctagaatgtaagaaggccacaaataaagctgctgaggaaggtcagaaggcgggggaactgtcactgaagctggaaaaggaaaagtcgcgcgtgtcgaagcttgaggaggagctcgcagcagaacggaaacgcggcttacagacggaggcccaggtcgagaagcagctgtctgagttcgacatagagagagagcagctgagggcaaaactcaatagggaagagaaccggaccaagacgctgaaggaagagatggagagtctgaagaaaattgtgaaggatctggaggcatcccatcagcactcgtcacctaatgaacagctcaagaaaccagtgaccgtctccaaggggacagcaactgagccactgatgttgatgtccgtcttttgccagacagaaagtttcccagctgagagaacgcacggaagcaacatcgcaaagatgactaacaccggcctccctggtcccgcgacccctgcatactcatatgccaaaactaatggtcattgtgaccctgaaattcagacgacgcgggaattaacagccggtaataacgtcgagaaccaggtccctcctcgcgaaaagagcgtggcattagcgcaggaaaagcccgttgagaacggcggctgcccagtggggattgagacacccgttcccatgccttcgcccctctcgagctcaggctccagcctcagcccaagttccactgccagctcctcactcaccagcagtccctgcagttctccggtgctgacaaaaaggctcctgggttcttcagccagtagccctggctatcagagttcctatcaggtcggtattaatcagaggtttcatgccgcacggcataagttccaaagccaggcagatcaggaccaacaagccagcggattgcagtcccccccaagccgcgatctgtccccaaccttaatagataacagcgctgcaaagcagctcgcccgcaataccgtaacgcaggtgctgagccggttcacatcgcagcaaggacctattaagccagtgagtcccaactccagtccttttggcactgattaccgcaacctcgctaacaccgccaacccccgcggcgacacctcccattcgccaactcctggaaaggtaagttcccccctgagtccactgtccccaggaattaaatcacctaccattcccagggccgaaagagggaacccccccccgattcctccaaagaagcccggcctgaccccatcccccagcgcaactactccattaactaagacccattcgcaagctgcctcattgaccactgctgaggacctggcaagctcgtgcagcagcaatacggtcgtggccaacggaaaagacgtcgaactactgcttcccaccagctcttag

SEQ ID NO: 23075 - DNA, 2487 bp, synthetic construct
  source 1..2487: mol_type = other DNA; note = Synthetic coding sequence
atgcggttcctggaggcccggagcctggccgtggccatgggcgacaccgtcgtcgaacccgccccgcttaaaccaacctcggagcccacatcaggaccaccaggcaataacggggggagtctgctttcagttattaccgaaggggttggagagctatccgtcattgatcctgaggtagcccaaaaggcctgccaggaagttctcgagaaggttaaacttctgcacggaggtgtcgcagtgagttcaagaggcactccgcttgagctggtcaatggtgacggggtcgactcggagatcaggtgtctagatgacccgccagcccagataagagaggaggaagacgagatgggcgcagctgtcgcctccggaactgctaagggggcccgccggagaaggcagaataactctgccaagcagagctggctgctgcgtctttttgagtcaaaactgttcgatatctcaatggccatttcctacctgtataactcaaaggaacccggtgtgcaggcctacatcgggaatcgactgttctgtttcaggaacgaggacgttgacttctatttgccacagctgctgaacatgtacattcacatggatgaggacgtcggcgacgcaatcaagccatacattgtacatagatgcaggcagagtattaacttcagcttgcagtgcgccttgctattgggagcttactcttccgacatgcacatttcgacacagaggcactcacgaggcacaaagctccggaaattaatactgtctgacgaactcaagcccgcccaccgaaagcgcgaattaccctcactatcaccagccccagacacaggcctatccccgagcaaacgcactcaccagaggagcaaatctgatgctaccgctagtataagtctctcatctaacctcaagcgaactgcctcaaacccaaaggtagagaatgaggacgaagaactgtcaagctctacagaatctattgataactccttcagctccccggttcgactggcacccgagcgagagttcattaagagcctgatggccatcggaaagcgtctggctaccctgccgaccaaggaacagaagacacagagactcatctccgagttgtcacttctcaatcacaaattaccagcacgagtgtggttgccaaccgccggattcgaccaccacgttgtccgtgtgccccacacacaggccgtcgtacttaactccaaggacaaggctccatatctgatttatgtggaggtgctggagtgcgagaactttgacacaaccagcgttcccgctcgcatcccagaaaacaggatccggagcaccagaagcgtcgagaatctgcccgaatgcggaatcacacatgagcaacgcgctggaagtttcagtacggtgcccaactatgacaacgatgacgaggcttggagtgtggatgacataggggagcttcaagtggagctgcccgaggtccacactaatagctgtgacaatatctcccaattcagcgttgattccattaccagtcaagagtccaaggagcccgtctttattgctgcgggcgatattaggcgtaggcttagtgaacaacttgcccacacccctacagcttttaagagggacccggaggacccttcagcagtcgcattaaaggagccatggcaagaaaaggtgaggcgcattcgggaaggctcgccgtacgggcatctgcccaactggcgcctactctcagtgattgtgaaatgcggcgacgatctgcgccaggagcttctagcttttcaggtactgaaacagttgcagtcaatctgggagcaggagcgcgtgccactttggatcaaaccttataagatacttgtcattagtgccgattctggcatgattgagccggtcgttaacgctgtgtccattcaccaggtgaagaagcagagtcagctctcactcctagattattttctacaggagcatggaagctacacaacagaggcttttctgtctgcccagaggaacttcgtacaatcatgtgcaggatactgtcttgtctgttatcttttgcaggtcaaggacaggcataacgggaatatcctgctggacgccgagggacatatcatccacattgattttggattcatactgagctctagtcctcggaatcttggctttgaaacttccgcattcaagttgactaccgaattcgtagatgttatgggagggctggatggggacatgttcaattactataaaatgctcatgctccagggcctcattgccgctcgcaagcacatggacaaagtcgtgcaaatcgtggaaattatgcagcagggatctcagcttccatgcttccacggctcatccaccatccggaaccttaaagaacgcttccacatgtccatgacggaagagcagctgcaactcctggtggagcagatggtcgatgggagcatgcgtagtattacgaccaaactgtacgacggctttcaatacttaaccaatggcatcatgtag

SEQ ID NO: 23076 - DNA, 4233 bp, synthetic construct
  source 1..4233: mol_type = other DNA; note = Synthetic coding sequence
atggccgacaccgacctgttcatggagtgcgaggaggaggagctggagccctggcagaaaataagtgacgtgatcgaggacagcgtcgtcgaggactacaactcggtcgacaaaactactaccgtgagcgtctcccagcagccagtctctgctcctgtccccattgcggcacacgcatctgtcgctggccacctcagcacttccacaacggtctctagcagtggggcgcagaattctgactcaacaaaaaaaaccctggtaacccttattgctaataataacgccggcaatcctctggtgcagcagggcggacagcctctcatcctcacacagaatcctgcaccaggactaggtaccatggtaacacagcccgtgctacgaccagtccaggtcatgcaaaacgctaaccacgtgacctcctcccccgtggcttcacagcccatatttattaccactcaggggttccccgtgcgaaatgtacgtccagtgcagaacgccatgaaccaggtcggcattgtgctaaacgtgcaacagggacagacagtgcgtcccatcacccttgtgcctgcaccgggcacccagttcgtgaagcccacagtgggagtgccacaggtcttttcacagatgactcctgtgcgaccaggttctaccatgccagtgaggcccactaccaacacatttaccactgtaatcccagctacgctcacaatcagatcaaccgtgcctcagagccagagtcagcagaccaagagtacccctagtacaagtaccacaccaactgcaacacaaccaaccagcctgggtcagctggccgtgcagagccctggtcaaagcaaccaaaccacaaatcctaagttggccccaagtttcccctcgccccccgctgtgtctatagcatccttcgtgacggtcaaacgtcctggagtgaccggcgaaaacagtaatgaggtggccaaactggtcaacacccttaacaccatcccgtccctggggcagagccctggaccagtggttgtgtccaacaactcatctgcacacgggagccaaagaacgtccggccctgaatcaagtatgaaagtcactagctccatccccgtttttgatctacaggacgggggcagaaagatttgtccacggtgcaacgctcagttcagagttactgaagctctgagaggccacatgtgttactgttgccctgagatggtcgaatatcagaagaagggtaagtcacttgactctgagccgagcgttccgagcgcagccaaacctccaagccctgagaaaaccgcccctgtagcctctaccccctcgtcaacaccaataccagccctttcgcccccaacaaaggtccctgaaccgaacgagaacgtcggcgatgccgtccagacgaaactgataatgctggttgatgacttttattacgggagggatggtggcaaggtggcgcaactcactaatttccccaaagtggccactagttttcggtgcccacattgtactaaacgcttgaaaaataacattagatttatgaatcatatgaagcatcacgtagaattggaccagcagaacggggaggttgatgggcatacaatctgtcaacattgctatagacagttctcaacgccattccaactgcagtgtcatctggaaaacgttcactcaccttacgagtctaccacgaaatgcaaaatatgtgagtgggcatttgaatcagagcccctcttcctccaacatatgaaggatactcacaagcccggtgagatgccctatgtctgtcaggtttgtcagtaccgttcttccctctactcggaagtagatgttcacttccggatgattcacgaggatacaaggcacctactttgtccttactgtctgaaagtcttcaaaaatggcaatgctttccagcagcactacatgcggcatcagaagcgcaacgtgtaccactgtaacaaatgtaggcttcaattcctgttcgccaaggacaaaatagaacataagctccagcaccataaaaccttcaggaagccaaaacaactagagggacttaagccaggaacaaaggtgaccatccgagcctcccgtgggcagccacgaactgtgccagtatcctcaaatgatactccaccctctgccctgcaagaagccgcacccctcacttctagcatggacccacttcctgtgtttctatatcctccggtgcagagaagtatacagaaacgcgcggttcgcaagatgagcgtgatggggaggcagacctgcctggagtgctctttcgagatcccagactttcctaaccacttccccacctacgttcattgctcactttgcaggtacagcacttgttgcagtagagcctatgcaaaccatatgatcaacaaccatgtgcccaggaagtctcccaaatatttggcactgttcaagaattcggtatccgggatcaaacttgcctgcaccagctgtactttcgtcacttcagtgggggacgccatggcaaagcaccttgtgttcaaccccagccaccgcagctctagcattttgccccgcggacttacctggatcgcacattccaggcatgggcagactagagacagagtgcatgaccggaatgtgaagaatatgtacccccctccatcgttccctactaataaggccgccactgtgaaaagtgccggcgcgactcccgctgaaccagaagagctcttgactccattggctcccgcactgccatcgccagcgtctacggcaacaccgccacctacacccacccacccacaggcattggccctgccccccttggcaaccgagggcgctgaatgcttgaacgtggatgatcaggatgaagggtctccagtaacgcaagaacctgagcttgccagcggaggcggcggctctggcggtgttggcaaaaaggagcagttgagtgtgaagaagttgcgtgtcgtgttgtttgccctgtgctgcaatactgaacaggctgccgagcattttcggaacccgcagcgacggatcaggagatggctccgacgctttcaagcatctcaaggagaaaacctggaagggaaataccttagctttgaagctgaagagaaactggcggagtgggttctaacccaacgcgaacagcagttgcctgtgaacgaggagaccctgttccagaaggccacaaagatcgggaggtcgctggaaggaggtttcaaaatcagctacgagtgggctgtgcggtttatgctgagacatcatctgacaccacatgcccggagagccgtcgcacatacccttcccaaggatgtggcagagaatgctgggctgttcatcgattttgtgcagcggcagatccacaatcaggacttacctctctccatgatcgtggccatcgacgagatttccctgtttttggacaccgaggtcttgtccagcgacgatcgcaaggaaaatgccctccaaacagttggcactggagagccttggtgcgatgtggtgctggcaatcctggcagatgggaccgtgcttccaactctcgtcttctaccggggccagatggaccagcccgcaaatatgcctgattctatcctccttgaggcaaaggagtccggctacagcgacgacgagatcatggagctgtggtccactagagtctggcagaaacacactgcatgtcagcgcagtaaaggcatgttggtcatggactgccatcggacccacctctcagaagaggttttagctatgctgtcagctagttctacccttccagcagttgttccagccggctgcagcagtaaaatacaaccattagacgtgtgtattaagcggactgtgaagaatttcttacacaaaaagtggaaggagcaggctagagaaatggctgatacagcctgcgatagcgatgtcctgctccaattggtgttagtttggctgggtgaggtgctgggcgtgatcggagattgtcccgaattagttcagaggtcatttctggtcgcaagtgtgttacccggccctgacggaaacataaacagtccgaccaggaacgccgacatgcaagaagagctcattgcctccctcgaggaacagttgaagcttagcggagaacactcggaaagttcaacgcctcgaccccggtcttctcctgaggagaccatcgagcccgagtctcttcaccagctgttcgagggggagagtgaaaccgagagtttctacggctttgaagaggcagatctcgacctcatggaaatctag

SEQ ID NO: 23077 - DNA, 1488 bp, synthetic construct
  source 1..1488: mol_type = other DNA; note = Synthetic coding sequence
atgccccagctgctgcagaacatcaacggcatcatcgaggccttcagaagatacgctaggacagaggggaactgcacagcgctcactcgaggagagctgaaacgcttgcttgaacaggaatttgcagacgtgatcgttaagccacatgacccagctactgttgatgaggtcctgagattactggatgaagaccatactggcactgtggaatttaaggaattcctcgtcctcgtgtttaaggtggcacaagcttgcttcaagacactgtcggagagtgccgaaggggcatgcggatcacaggaatctggttcactccacagtggagcatcccaagagcttggagagggacagcgatctgggaccgaagtggggagagccgggaaggggcagcattacgagggttcctctcaccggcaatcccagcaggggtctcgggggcagaatcgtcctggtgtgcaaactcaaggccaagccacaggatctgcttgggtgtcatcttatgacaggcaggccgaaagccaatcacaggaaagaatttcccctcaaattcagttgtcaggccagactgaacagacacaaaaggcaggtgaaggaaagcgaaaccagaccaccgagatgaggcccgagcggcaacctcagacccgcgagcaggatagagcccatcaaactggtgagacagtgaccgggtcagggacccagacccaggccggagcaacacagacggttgaacaggattctagccatcagactggaagaacctcaaaacagacacaagaagccactaacgaccagaatcgcggcacggaaacacatggccagggccgctctcagaccagtcaagctgtgacaggtggccacgcgcagatccaagccggcacacatacacagacccctacacagaccgtcgagcaggactctagccaccaaacgggctcaacaagtacccagactcaggaatctaccaatgggcagaatcgtggcactgagatccacggccagggaagaagtcagacatctcaggcagtgacaggtgggcatacccagattcaggccggctcacacaccgagaccgtggaacaggatcgatcccaaacggtttcacatgggggagcccgcgagcagggtcagacccagactcaacctgggtctggacagcgatggatgcaggtctctaacccggaggctggcgaaacggtcccaggaggccaggcgcaaaccggcgctagcaccgagagcggtagacaggagtggtcatccacacaccccagacgctgtgttactgaggggcagggcgacaggcagcccacagtagtgggtgaagagtgggttgacgatcacagccgcgagaccgtcatcttacgtctggaccaaggtaaccttcatacttctgtctcttccgctcagggccaggacgccgctcagagcgaggagaaacgtggtataactgccagggagctgtattcttatcttagaagtacgaaaccatag

SEQ ID NO: 23078 - DNA, 1233 bp, synthetic construct
  source 1..1233: mol_type = other DNA; note = Synthetic coding sequence
atgaacatgcccagcacccccctggcccccaccaccggcaccgccacctgttcctggtccgcgagcacctgcacaactacacgacctgccgtccggcctcctagtttcccacaccgcccacctggcaatgccgctctccctagcctgatgccatcacggccaacacaggtcgctggtcagtgcggggcgggaaataattgggcaaaaggtcactacactgaaggagctgagctaatggagtcggtgatggacgtggtgcgtaaggaggccgaaagttgtgattgccttcaggggttccaactcacacacagtctgggcgggggcactggatccggcatggggaccctccttctgtccaagatccgtgaggagtaccccgatcggattattaacaccttttccatcctcccaagccccaaggtctctgacacagtcgtggagccctacaacgccaccctatctgtgcaccagctcatcgagaacgccgatgagacgttctgtatagataatgaggccttgtatgatatctgctccaaaaccctgaagctccccacacccacctacggagatttgaatcacctcgtctccgctacaatgtcaggggtgactacctgcttacgatttcctgggcaacttaacgcagatcttcggaaactggccgtcaacatggtgccctttccacgcctacactttttcatgcccgggtttgcccctttgacaagccgcggtagccagcagtatagggccttgaccgttgccgaactgacacagcagatgttcgacgctaaaaatatgatggcagcctgtgaccccagacacgggcgctacttgactgccgcagcgatttttcgagggcggatgcctatgcgggaagttgatgaacagatgtttaacattcaggacaagaattcctcatactttgctgactggcttcctaataacgtgaaaactgccgtgtgtgatatcccccctagagggcttaagatgagcgcgactttcatcggtaataataccgccatccaagaattgtttaaacgggtctcggagcaatttaccgccatgttcaggcgcaaggcatttttacactggtatacaggggaaggcatggatgaaatggagttcactgaagccgaaagcaatatgaatgatctcgtctcggaataccagcagtatcaagatgctactgccgaggaggaagaggatgaagagtatgctgaggaggaagtggcatag

SEQ ID NO: 23079 - DNA, 2106 bp, synthetic construct
  source 1..2106: mol_type = other DNA; note = Synthetic coding sequence
atgggcagcgccgccgacgtgcggttcagcctgggcaccaccacccacgcacctcctggcgttcacaggaggtattcggctctccgagaggaatctgccaaagactgggaaacgagtcccttaccaggcatgctggcacctgccgcggggcccgcgtttgactccgaccctgaaatatcagatgtggacgaagatgagcctggtggactcgtgggcagcgcagatgtggtgagcccatcaggtcactccgatgcacagacacttgccatgatgctgcaggagcagctcgatgcaatcaacgaagagatccgaatgatccaggaggagaaggaatccacagagctgcgagcagaggaaatcgagacccgcgtgacgagtgggtctatggaagcactaaacctcaagcagctcagaaaacgaggatctatccccacctctttaacggccctgtctctcgctagtgcctcaccccccctctcaggcaggagtactcccaagttaacttctcgaagtgccgcccaagacttggacaggatgggggttatgacgcttccaagcgatctcagaaaacatcgaagaaaactgctcagtcctgtgagcagagaagagaaccgagaggataaagcaaccataaagtgtgagacctcccccccatcaagtccgcgaacactgaggttggagaaattgggtcacccagctttatcccaagaggaaggcaaatcagctctggaagatcaaggatccaacccgtcctcctctaattcctcacaggatagcctgcacaagggcgctaaaagaaaaggaataaagagctctatcggtcgcctgttcgggaaaaaggagaagggccggctcatccaactgtcacgggatggcgccactggccacgtgcttctgaccgactcagagttttcaatgcaggagcccatggttcctgcaaagttgggaacacaggccgaaaaggaccggagactgaaaaaaaaacaccaactcctagaggacgctaggcgcaagggcatgccgtttgcccagtgggacgggccgacggtggttagttggttggagctctgggtgggaatgccagcctggtacgtggctgcctgtagggctaatgtgaaatccggggctatcatgtctgccctgtccgataccgagattcagcgcgagataggaatcagtaacgccttgcatcgtctgaagctgagattagctatacaggagatggtgagtctgacctcgccgagcgccccccctactagtcgcacttcatccggaaatgtctgggttacgcacgaggagatggagacactagagacgagcacgaagacagatagcgaggagggttcctgggcgcagaccttagcttacggagatatgaatcacgaatggatcgggaacgaatggttgccttccttagggctaccccaatatcggtcctacttcatggaatgcctcgtggacgctagaatgttggatcatctaactaaaaaggacctgagagtccacctgaagatggtagactccttccaccgaacgagcctgcagtacggcatcatgtgtctgaagcgcttgaactacgacaggaaagaactggaaaagaggcgagaggaatcacagcatgaaattaaagatgtcctagtttggaccaatgaccaagtggtgcactgggtgcagtcaatcggcctgagggattatgctggaaacctgcacgaaagtggggtacacggcgcactgctggcactcgatgagaatttcgaccacaacactcttgccctgatcctgcagatcccaacgcagaatacgcaggcccggcaagtaatggagagggagttcaataatcttcttgccctcgggactgatcggaagctggatgatggagatgacaaggtgttccggagggcaccctcttggcgaaagcgtttcaggccccgggagcaccatggtcggggcggaatgctgtctgcttccgctgagactcttccggccgggttccgcgtgagcacccttggaacgctgcagcctcccccagcaccacccaaaaaaattatgcccgaggcccattcccactacctttacggacacatgctttccgcctttagagactag

SEQ ID NO: 23080 - DNA, 1029 bp, synthetic construct
  source 1..1029: mol_type = other DNA; note = Synthetic coding sequence
atggccagcgtgacccgggccgtgttcggcgagctgcccagcggcggcggaacggttgagaaattccagctgcagtcagacttactacgagtcgacatcatctcatgggggtgtacaatcaccgccctcgaggttaaggatcgtcagggccgggccagtgacgtcgtgttgggctttgcagaactggaaggttatttgcagaaacagccctactttggggcggtaatcggcagggtggccaaccggattgcaaaaggcacctttaaggtcgatggaaaggagtatcacttggccattaacaaggagccaaattctctacacggtggcgtacgggggtttgacaaggtgttgtggaccccgagagtactgagtaatggagtgcagtttagccgcatctctcctgacggagaggagggatatcctggggaactgaaggtgtgggtcacttatacacttgatgggggtgagctaatcgtgaactatcgcgcacaggcatctcaggccacgcctgtgaacctgactaatcattcatattttaatctggcagggcaagcgtcccccaacattaacgaccatgaggtgactatcgaggcggacacatacctgcccgtagatgagaccctgatcccgacaggagaagtggctccggtacagggtaccgcctttgacctcaggaagccagtggagcttggtaagcacctccaggacttccacctgaatgggtttgaccataatttctgccttaagggtagtaaggagaagcatttctgcgccagagttcatcacgccgcctccgggcgcgttttagaggtttacactactcagcccggagtacagttctacactgggaatttcttggatggtacactcaagggtaaaaatggggccgtgtatcctaaacatagcggtttctgcctggaaacccagaattggcccgacgccgtcaatcagcctagattcccccccgtcctgctgcgccccggggaggaatatgaccacaccacatggttcaaatttagcgtggcatag

SEQ ID NO: 23081 - DNA, 2295 bp, synthetic construct
  source 1..2295: mol_type = other DNA; note = Synthetic coding sequence
atgagcgacacccggcggcgggtgaaggtgtacaccctgaacgaggacaggcaatgggatgatcgaggcaccggccacgtgtcaagcacttatgttgaagagctgaagggcatgtccctgctggtgagagctgaatccgatgggagtttactgctggaatcaaagattaatcccaacacagcataccagaagcagcaggatactcttattgtctggagcgaggcagaaaactacgacctggcactgtcctttcaggaaaaagctggttgcgacgagatctgggagaagatttgtcaggtgcaggggaaagacccttcagtggaggtgacgcaggacctcatcgacgagagtgaagaggagcggttcgaggaaatgcccgagacctctcacctgattgatttgccaacgtgtgagctcaacaaactcgaagagattgccgatctggtgacatccgttctttccagcccgatcaggcgcgagaagctggccctggcactcgagaacgaaggatacataaaaaagcttctgcagctttttcaagcatgcgagaatcttgagaacaccgagggcttgcatcacctgtatgagattatcagaggtattttgttcctcaataaggcgaccctttttgaggttatgtttagtgacgaatgcataatggatgtggtcggctgtcttgagtatgatcccgcccttgctcagcccaaaaggcatagagaattcctgaccaaaaccgcaaagttcaaggaggtcatccctattacagattcagagctgaggcagaagatacatcagacctatcgtgtccaatacatccaggacatcattctgccaacccccagtgtgtttgaagagaactttcttagtacattgacctccttcatcttttttaataaggttgaaatcgtgagcatgttgcaggaagatgagaaatttcttagcgaagtctttgcacagttgacagatgaagccaccgacgacgacaaaagaagagagctggtcaatttctttaaagagttttgtgctttttctcagactctgcaaccacaaaacagagatgcttttttcaagacgctggccaagctcggaatcttgccagctctcgagatcgtgatgggcatggatgatttgcaagttagaagtgccgccacagacattttttcctatctggtagaattttcaccatctatggtacgagaatttgtcatgcaggaggcccagcagtcagacgacgacattctcctgattaacgtagtgatcgaacagatgatttgtgataccgacccagaactgggcggcgccgtacagttaatgggactcctacgcaccttgatagaccctgagaatatgctggcaaccactaacaaaactgagaaaagcgagttcctcaactttttttacaatcactgcatgcacgttctgacggccccacttctcaccaacacgagtgaggacaaatgtgaaaaagacaatattgtgggctctaataaaaataacaccatatgtcccggtgctctccggtttatgagaaggattattggactcaaggacgaattttacaatagatacatcactaaaggcaatctcttcgagcccgttatcaacgcgctcctggataatgggacacgctacaatctgctgaactctgcagttatcgaactgtttgaatttatcagggtcgaggatatcaagtcacttactgctcacatcgtggagaacttttacaaagccctcgagtccattgagtacgtacagactttcaaaggtcttaagaccaagtatgagcaagagaaagacagacagaatcagaagcttaatagtgtgccaagcatactgcggtccaatcgattccgcagggacgccaaggcactcgaggaggatgaggaaatgtggttcaatgaagatgaagaggaagagggaaaggccgtggttgcccctgtggagaagcctaagccagaggacgacttcccggataattatgaaaagtttatggagaccaagaaggcaaaagagtcagaagacaaagaaaaccttccaaaaagaacctcacccggtggctttaaattcacattctcccactcagccagcgcagctaatggcacaaacagcaaatcagtggtggcccagattccacccgccacttctaatggctcttcctctaagacgacaaacttaccgacctccgtcaccgcaaccaagggcagtcttgtcggactggttgattatccggacgatgaggaagaggacgaggaggaagaaagctctcctaggaaacgaccacggttgggctcctag

SEQ ID NO: 23082 - DNA, 231 bp, synthetic construct
  source 1..231: mol_type = other DNA; note = Synthetic coding sequence
atgagcaaggcccacccccccgagctgaagaagttcatggacaagaaactgtctctgaagcttaatggcggtcgtcacgtgcagggcattctccggggattcgacccttttatgaacctcgtcattgacgaatgtgtcgaaatggcaacttccgggcagcaaaataacattggcatggtggtgatccgaggtaattccattataatgttagaagccctagagcgcgtgtag

SEQ ID NO: 23083 - DNA, 528 bp, synthetic construct
  source 1..528: mol_type = other DNA; note = Synthetic coding sequence
atgcagctgacccaccagctggacctgttccccgagtgccgggtgaccctgcttctgtttaaagacgttaaaaatgccggcgacttgagaagaaaagcaatggagggaaccatcgacggttccctgattaatcccacggttattgtggaccccttccagattttagtagccgccaataaggctgtacacctttataagctgggtaagatgaaaactcgaaccctgtctacagaaattatattcaacttgtctccgaacaataatatttcagaggccttgaagaaattcggcatctcagccaatgatacgtctatcctgatcgtgtacatagaggagggtgagaagcagattaaccaggagtacctcatctcccaggtggaggggcaccaggttagtctcaaaaacctgcctgagattatgaacatcaccgaagtgaaaaagatttacaaactgtcctcacaggaagagagcattgggaccctacttgacgcaatcatctgtcgtatgagtaccaaagatgtcctttag

SEQ ID NO: 23084 - DNA, 909 bp, synthetic construct
  source 1..909: mol_type = other DNA; note = Synthetic coding sequence
atggccctgcacgacatggaggacttcaccttcgacggcaccaagaggttatctgtgaactacgttaaggggattcttcagccaaccgatacttgcgatatctgggataagatatggaacttccaggccaagcccgatgatctgctgattagcacataccccaaggccggaacgacgtggactcaagaaattgtggaactgattcagaacgagggcgatgtggagaaaagcaaacgggccccgacccatcagcgttttccgtttttagaaatgaagatcccttctctagggtcaggactggagcaagcccacgctatgccctctccccgtatactgaaaacccatctaccctttcacttgcttccacccagtctactggagaagaattgtaaaattatctacgttgcccgcaaccccaaggacaacatggtttcatattaccactttcagaggatgaacaaggctcttcccgcccccgggacttgggaagagtacttcgagaccttcttggccggcaaagtctgctggggaagttggcacgaacatgttaagggttggtgggaggccaaggataaacataggatcctgtatttgttctacgaagatatgaagaaaaacccgaagcacgaaatccaaaagctcgcagagttcattgggaagaagctggacgacaaagtcctggataaaattgttcattatacgtcctttgatgtcatgaaacagaacccaatggccaactactcttctattcccgccgagatcatggaccatagtatttcaccgtttatgagaaaaggagccgtgggagactggaaaaagcattttaccgttgcccaaaatgaaagattcgacgaagactacaaaaagaaaatgactgacactagacttacgttccatttccagttttag

SEQ ID NO: 23085 - DNA, 2892 bp, synthetic construct
  source 1..2892: mol_type = other DNA; note = Synthetic coding sequence
atgtggtgcctgcactgcaacagcgagcggacccagagcctgctggaactggaactggactccggggtcgagggtgaagctccctcatccgaaaccggaacgtccctggactctccttctgcctacccacaggggcccctggtgccaggctccagcctatcaccggaccattatgagcataccagtgttggagcctacggattgtactctggaccacccggtcagcagcaaaggacccgccgacccaagttgcagcactccaccagcattttgcgcaaacaggccgaggaggaggccatcaagaggtcccggagcttgagcgaaagctacgaactgtctagtgatctccaggacaaacaggtcgagatgttagaacggaagtatggggggcgattagtcaccaggcacgctgcacggacaatacagacagcattccgccagtatcagatgaacaagaattttgagcggttaagaagctccatgtctgaaaatcgaatgtcccgccgcatagttctgtctaacatgagaatgcaattctccttcgaaggacccgaaaaagtgcattcctcttactttgaggggaaacaagtgtccgttacgaacgatggtagccaactcggagcgctggtcagtcccgagtgcggggacctttccgagcccacaacattaaaatcacctgccccctcatctgatttcgcggatgcgattactgagctggaggacgccttctcacggcaggtcaaatccttggctgagtcgatcgatgatgctctgaattgccgctctctgcacaccgaagaggcacctgcccttgatgcggctagagccagagacacagagcctcagacagctctgcacggtatggatcaccggaaactcgacgagatgactgcttcgtattcagatgtcacactttatatagacgaagaggagctgtccccaccattgcccttgtcacaggccggggataggccttccagtactgagtcagatctcaggctgcgggcaggcggagcagcgccagactattgggccctggcacacaaggaagataaagcagacaccgatacatcatgcaggtccactccctctctggaacggcaggaacagcggctccgagtcgaacacctacctctgctcacaatagagccaccaagtgattccagtgtcgatttaagtgatcggtccgagcggggcagcctcaaacggcagtccgcctatgaaaggtcattgggagggcaacagggctctcctaagcatgggcctcatagtggggcacctaagagtctgccacgggaggagcccgagcttcggcctagacctccaaggccactggattcacacttggccattaacggcagcgcaaaccgccagtctaaaagcgaatccgactatagtgacggtgacaacgattctatcaattctacttctaattcaaacgacaccatcaattgctcatcagaatcgtcctccagagactccctgagagagcagacgcttagcaagcagacataccacaaggaggctcgtaactcttgggactcccctgcgtttagcaatgatgtcattcgaaaacgccactaccggattgggctaaatctgttcaataagaaaccagagaaaggcgtccagtatctgatcgaacgagggtttgtgcccgacacacctgtcggcgtggcccactttttgttgcagcgaaagggcctcagcagacagatgatcggcgagttcctggggaacaggcaaaaacagttcaaccgcgacgtcctcgattgcgttgttgacgaaatggactttagtacgatggaattggacgaggctctgcggaaattccaggcccacattagagtccaaggcgaggcgcagaaggttgagcggttgatcgaagccttctcccaaaggtactgcatttgcaatccaggggtcgtgcggcagttcaggaatccggacaccattttcatcttggccttcgccataattttgctcaacacagatatgtatagccctaacgttaagccagaacgtaagatgaagttagaggactttataaagaacttgcgtggggtcgacgacggcgaggatattccgcgcgaaatgctgatgggcatatacgagaggatcagaaagcgggaactgaaaacaaatgaagaccacgtttcccaagtccagaaagtggaaaaattgatcgtcggtaagaaacccatcgggtccctgcatcccggtttggggtgtgttctgagcctgcctcaccgaaggcttgtctgttactgtaggttgttcgaagtccccgatccaaacaagcctcaaaaactgggcttgcaccagcgtgagatttttctattcaacgacctgctagtggtcaccaaaatttttcagaagaagaaaaatagcgtaacttacagtttccggcagtccttctctctgtacgggatgcaggtgctgctctttgagaatcaatattatcctaatggaatcaggctgacttcctccgtgccgggcgccgatattaaggtgctcatcaactttaatgcccccaacccacaggaccggaagaaatttacagatgacctacgcgagtctatcgccgaggtgcaggagatggagaagcatcgcatagaatcagagctcgagaagcagaaaggtgtggtgaggccttcaatgagtcagtgttcttcacttaagaaagagtccgggaacggcaccctgtcacgggcttgtctcgatgactcatatgctagcggagagggcctgaagagatctgctctatcatcatccctacgggacctctccgaagcgggcaagcgcggacgacgatcatccgctggaagccttgaaagcaatgtcgaattccagccttttgaaccactgcaaccaagcgtgctatgcagttag

SEQ ID NO: 23086 - DNA, 711 bp, synthetic construct
  source 1..711: mol_type = other DNA; note = Synthetic coding sequence
atggccagcctggaccgggtgaaggtgctggtgctgggcgacagcggagtcggcaaaagtagtttggtgcacctgctgtgtcagaaccaagtgctcggaaatccatcttggactgtggggtgcagtgtcgatgtgcgggtccatgattataaagaaggcacccctgaggagaagacctactatattgagctgtgggatgttggcggctctgtcggatcggcgtcttcggtgaagagtaccagggcagttttttacaactccgttaatggtattatctttgttcatgatctgactaacaagaagtcctcccaaaatttacgacgatggagccttgaggcgctgaaccgcgatctcgtccctacaggcgtgttagtgaccaatggcgattatgaccaggagcagttcgctgataaccagatccccttgttggtcattggaaccaagctcgaccagatccatgaaacgaaacggcatgaggtcctgacaaggaccgccttcctcgccgaggacttcaaccctgaggagatcaatctagattgcaccaacccgagatatcttgctgctggtagcagcaatgcagtgaagctctcgagattctttgataaggtgatcgaaaagcgctacttccttagagaaggcaatcagatccctggcttcccggaccgcaagcgctttggggctggcacgctgaaatctttgcattacgattag

SEQ ID NO: 23087 - DNA, 2784 bp, synthetic construct
  source 1..2784: mol_type = other DNA; note = Synthetic coding sequence
atgcagagcatcctgtaccacggcctgatccgggaccaggcctgccgcaggcagaccgactactggcagttcgttaaagacatcaggtggttatccccccacagcgcccttcatgtggagaagtttatatccgtccacgagaacgatcagtctagcgccgacggagcatccgagcgtgccgtagccgagctttggctgcaacactcgctgcagtatcattgcctgagtgctcagctcaggcctctgcttggggaccgccaatacattagaaaattctacaccgatgcagcgtttctgttatcagatgctcacgttaccgcaatgcttcaatgtctggaagccgtggaacagaataatccccgcctcctggcgcagatcgatgccagcatgtttgcacggaagcacgaatcccccttgttagttacgaaatctcagagcctcaccgcgctgccttcctctacatacactcctccaaatagctatgcccaacattcttattttggctcgttcagttctctgcatcaaagcgtgcctaataatggatctgaacgtaggagtacatcttttcccctgagcggtcctcctcgaaagcctcaggaaagtcgcggccacgtcagtcccgcagaggatcagacgattcaggcccctcccgtttctgtgagcgctctggcccgtgacagccctctcacgcccaacgaaatgtcttcctccaccctgacctcccctatcgaggcaagttgggtcagctcccaaaatgactccccgggagacgccagcgagggccccgagtacctcgccatcgggaacctggatcctagagggcgaaccgcaagctgtcagagccatagctccaatgcagaaagttcctctagcaatctgttcagctctagtagctcccagaagccagactctgccgcctccagtctgggggatcaggaaggcggaggcgaatctcagctgagttctgttctccgaagatcgtccttctcagaagggcagaccctgactgtaacctcaggagccaagaaatcacatatcaggagccattccgacactagcatagccagccgaggtgcacccggcggaccaaggaacataacaatcattgtggaggacccgatcgccgaatcctgcaacgacaaggccaaattgagaggcccgcttccttattcaggccagtcatcagaagtgagtactcctagcagtctgtatatggagtacgagggagggcgttacttgtgttctggcgagggaatgtttaggcgcccctcggaaggacagagtctgatatcctatctgtctgaacaggactttggcagctgcgcggatctggaaaaggagaatgcacacttcagtatctccgaaagccttatcgccgcgatcgagctaatgaaatgtaacatgatgagtcaatgtcttgaagaggaagaggtagaggaggaggactccgaccgcgagatacaagagctcaagcagaaaattcgactaagacgccaacagatcaggactaaaaacttactccccatgtaccaggaagccgaacacggatccttcagagtcacatctagtagtagccagttctcctcccgcgactcagcccagctttcagacagtggaagcgccgatgaggttgatgagtttgagatccaagatgctgacataagaaggaataccgcttcttcgtctaagtcttttgttagttcccagtctttctcgcattgcttcctgcacagtaccagcgccgaggccgttgctatggggctgctgaaacagtttgaggggatgcaactgcctgccgccagcgaactcgagtggctggtccctgaacatgacgccccacagaagctgttgccgatccccgactcactgccgatatcacccgacgacggacaacacgctgatatatacaagctgcgaatcagagttaggggcaatcttgaatgggcacctcctaggccgcagattatattcaacgtgcatcccgcccccactagaaaaatagccgtcgctaagcagaactaccgatgcgcaggttgcggaatccggactgatcccgattatattaagaggttaagatattgtgagtacctggggaaatatttctgtcagtgctgccatgaaaatgcccagatggctattccatcaagagtgctccggaagtgggacttctctaaatattatgtgtcaaatttcagtaaagacctcctgattaagatatggaacgacccattgttcaatgtgcaagatataaatagcgccttatataggaaggtcaaactcctcaatcaggtgcggctcttacgcgtgcagctctgccatatgaagaatatgtttaagacatgcaggctcgcaaaggagctgctggactcgttcgacaccgtcccaggccatcttaccgaggatctccacctatattcactgaacgacctaactgcaacaaggaaaggagagctgggaccccgccttgccgaactaactagagctggagccactcatgtggagcgatgtatgttgtgtcaagcaaagggtttcatttgcgaattttgtcagaacgaagacgatattattttcccatttgagctccataagtgcaggacatgcgaagagtgtaaagcttgctaccataaggcgtgttttaagagtgggtcctgtcctagatgtgagcggctgcaggctaggcgggaggccttagccaggcagtctctcgagagttacctgtccgattatgaggaggagcccgcggaggcactcgcactcgaggctgcagtgttggaggccacctag

SEQ ID NO: 23088 - DNA, 300 bp, synthetic construct
  source 1..300: mol_type = other DNA; note = Synthetic coding sequence
atggccagcgccagcgcccggggcaaccaggacaaggacgcccactttcctcccccaagtaagcagtcactcttattctgccctaaatcgaagttgcacattcaccgcgccgagatctccaagatcatgcgagaatgtcaagaagagtccttttggaagcgtgctttaccatttagcctggtttccatgctggttacccagggcttagtctatcaagggtatctggctgcaaattcgaggttcggctcattgccaaaagttgctcggacagcgtccctgccagtaaggaacgcaaagtag

SEQ ID NO: 23089 - DNA, 786 bp, synthetic construct
  source 1..786: mol_type = other DNA; note = Synthetic coding sequence
atggtggtgctgagcgtgcccgccgaggtgaccgtgatcctgctggacatcgaagggaccactacgcctatcgccttcgtgaaagacattttgttcccctacatcgaagagaatgtgaaagagtacctccagactcactgggaggaagaggaatgtcagcaagacgtcagcttactgcgcaaacaagccgaagaggatgcccacttggacggtgctgtgcccatccccgccgcatctggaaatggagtggatgaccttcaacaaatgatccaggcggtagtggacaatgtgtgttggcagatgtccctcgaccgtaagaccaccgccctgaagcaactgcaggggcatatgtggcgggcggcctttactgcagggagaatgaaggcagagttctttgccgacgtcgttcccgccgttcgtaagtggcgtgaagccggtatgaaagtctacatctatagcagtggttctgtagaggcacagaaacttctattcggacacagtacggaaggagatatcctcgagctagtcgacgggcatttcgataccaagattgggcataaggttgagtcagagtcataccggaagatagccgatagcataggctgtagtactaataacatactctttctgaccgacgtcaccagggaggctagcgcagccgaggaggccgacgtgcacgtggcagttgttgtgagacctgggaatgctggcctgactgatgatgagaagacatactattcccttataactagctttagcgaactgtaccttccatctagcacctag

SEQ ID NO: 23090 - DNA, 1188 bp, synthetic construct
  source 1..1188: mol_type = other DNA; note = Synthetic coding sequence
atggccgaggacggcctgcccaagatctacagccacccccccaccgaatctagcaaaacacctaccgctgctaccatttttttcggcgccgataatgccatccctaaatctgagactaccatcactagcgagggcgaccacgtgacgtctgtcaacgagtacatgttagaatctgattttagcacaacaacagataataaactaacggccaaaaaggaaaagcttaagtccgaggatgacatggggaccgacttcatcaaaagcaccactcatctccagaaagaaatcacctctctgaccgggaccacaaactccatcacaagggattctataacggagcacttcatgcccgtgaagatcgggaacatttctagtcctgtcaccactgtgtctctgatcgacttttccacagatatcgccaaggaagatatcctcttagccaccattgacactggtgacgccgagataagcatcacgagtgaggtgtcaggcactctgaaagatagctcagctggggtcgccgatgcccctgctttccccagaaaaaaggacgaggctgacatgagcaactataattcttcaatcaaaagtaatgtcccagctgatgaagccgtccaagtgaccgattcaacgattcccgaggccgagatcccgcctgcgccagaggagagttttaccactatcccagacattactgcattagaggaagaaaagatcactgagatagatttgtctgtgctggaggatgacacaagtgcagtggcaactttgacagatagtgacgagaagtttattaccgtgttcgagctcacaacatccgctgaaaaagacaaagacaagagggaggacacactgctgactgatgaagaaactactgagggcgcctcaatctggatggaaagagatacagccaatgaagccgagactcactctgtcctgctcaccgctgtggagtctagatacgatttcgttgttccagctagcatcgccaccaacttagtcgaagagagttctacggaggaggacctgtcagagaccgacaatacggagaccgtgcctaaaataaccgaacccttttctggaacgactagcgtgctggatactccagattataaagaagatacctccactacagagaccgatatattcgagctcctcaaagaggagccagatgaattcatgatttag

SEQ ID NO: 23091 - DNA, 921 bp, synthetic construct
  source 1..921: mol_type = other DNA; note = Synthetic coding sequence
atgtacttctgctggggcgccgacagccgggagctgcagcggcggcggacggccggttcacctggagctgagctgctgcaggctgcctcaggtgagcgacattcactgctgttactgactaatcaccgcgtgctgagctgtggcgataattccagagggcagttaggtcgcagaggcgctcagcgcggagaattgcccgaacctatccaggccctggagaccttgatagtagatcttgtctcgtgcggcaaggaacactctttggcagtgtgccataagggcagagttttcgcctggggcgccgggtctgagggacagttgggcatcggagagttcaaagaaatctcttttacccctaagaagatcatgacactcaatgatatcaagatcatccaggtgtcttgcgggcattatcactccttggctctgagtaaagattcccaagtcttctcctggggtaagaactcacacggtcagttaggattgggaaaagagttcccctctcaggcctctccacagcgtgtaagaagcttggaaggcatcccactcgcccaggtagctgctgggggagcccacagttttgcgctgtcactgtgcggcactagctttggatggggcagtaactctgcagggcagcttgccctcagcggccgcaacgtgcccgtccagtccaacaagccactgagcgttggggccttgaagaatctgggagtggtttatatctcttgcggagatgcccacaccgccgtgctcactcaggatggaaaagtctttacgtttggcgacaaccggtccgggcaactggggtactcaccaacacccgagaagagaggaccacagttggtggaaagaattgacggccttgtaagccagatagactgcggacgtaactcaaagcacgggttcatgacattcttctag

SEQ ID NO: 23092 - DNA, 909 bp, synthetic construct
  source 1..909: mol_type = other DNA; note = Synthetic coding sequence
atgggcaactgctgctggacccagtgcttcggcctgctgcggaaggaggctggtcggctacagagggtggggggggggggagggtccaaatatttccgcacatgttcccgcggagagcatttgactatcgagttcgaaaacctggtggaatctgacgagggcgagtcacctgggtcttctcatcgtccactgacagaggaagagattgtggatctgcgggaacggcattatgacagtatcgcagagaaacagaaggatttggataagaagatccaaaaggagcttgcccttcaggaagagaaactgagactggaagaagaggctctctacgcagcgcagcgagaggcggcaagagccgctaaacagaggaagctgcttgagcaggaaagacagagaattgtccagcagtaccaccccagtaacaatggcgaatatcaatcctcgggccctgaagacgacttcgagtcctgcttacgtaacatgaagagtcaatacgaagtgtttcgaagcagccggttgagctctgacgccactgtgttgaccccaaacacagagtcctcttgcgatctgatgaccaaaaccaagagtacctctgggaatgacgatagcacatccttagatctggagtgggaagacgaggagggtatgaatcggatgcttcccatgcgagagaggtctaaaacggaagaggatatcctccgtgctgcactcaagtactcaaataaaaaaaccggatctaatccaacttccgccagcgacgacagcaacgggctcgagtgggagaacgattttgttagtgccgagatggacgacaacgggaacagtgagtattccggctttgttaatcccgtgctggaactgagtgactctggcattagacactcggataccgaccagcagacacggtag

SEQ ID NO: 23093 - DNA, 1641 bp, synthetic construct
  source 1..1641: mol_type = other DNA; note = Synthetic coding sequence
atggccaccctggtggtgaacaagctgggcgccggcgtggacagcggccgccagggaagtaggggcacagcagtggtaaaggtgctggaatgcggggtgtgtgaagatgtgttttcgctgcagggcgacaaagtgccgcggttactcctatgtggccacacagtgtgccacgattgtctcacgagactcccactgcacgggagagcaatccggtgcccctttgatcggcaggtcactgatttgggggatagcggagtttgggggctcaaaaaaaactttgccctcctcgagcttcttgagcgcttgcagaacggcccaataggccagtatggggcggccgaggagtccatcggaatctcaggagagtccattatccgatgtgacgaggatgaggcccatcttgccagcgtttactgtactgtgtgcgctacacacctgtgtagtgaatgtagtcaagtcacccatagtaccaaaactctggccaagcacaggagggttcctcttgccgataagcctcacgaaaaaactatgtgcagccagcatcaggtacatgccatagagttcgtctgccttgaggaaggctgtcagacttcgcccctcatgtgttgtgtgtgtaaagagtacggcaagcaccagggccacaaacacagtgttttggaacccgaagcaaaccaaattagggctagcatcctggatatggcacattgtatcagaacattcacagaggagatctcagactatagtcgcaagcttgtgggaatcgtccagcacattgagggtggtgagcagattgtcgaagatgggatcggcatggcacacactgagcacgttccgggtacagctgaaaatgccagatcttgcataagagcttacttttatgacctgcatgaaaccctatgcaggcaggaggagatggcactatccgttgtggatgctcacgtccgggagaagttgatctggctccggcagcagcaggaggacatgacaatcctgttatctgaagtgtccgccgcttgtctgcattgtgagaagactctgcagcaggacgactgtcgcgtggtgctagccaaacaagaaataacaaggctgctagaaacactgcagaaacagcagcagcagttcaccgaagtcgccgatcatatacagctggatgcttcgatcccagtcactttcacgaaagataacagggtccacattggcccaaaaatggagatacgtgtcgtgacactcggactggatggtgcaggcaaaaccaccattctgtttaaactgaaacaggatgaatttatgcagccaattccaacaattgggttcaatgtggaaactgtcgaatacaagaatttaaagttcacaatctgggatgtcgggggtaagcataagctgcggccactgtggaaacactactatctgaatacacaggcagttgtgttcgtggtcgactcttctcaccgtgaccgcatctcagaggcccattctgagctggcaaagctccttacagaaaaagagttaagagatgctctgcttttaattttcgccaataagcaagacgtggctggagccctgagcgtggaagaaattacagagctgttgagcctgcacaagctctgttgtgggagaagttgcttttccgacaatatgtag

SEQ ID NO: 23094 - DNA, 609 bp, synthetic construct
  source 1..609: mol_type = other DNA; note = Synthetic coding sequence
atggccgtgcccgccgccctgatcctgcgggagagccccagcatgaagaaggccgtaagtctgatcaacgccattgatacaggacgcttccctcggcttctgacaagaattctccagaaactccatctgaaagcagagagctcattttccgaggaggaagaagagaaactccaggcagccttctctctggagaagcaggacttacatcttgtccttgagaccatttctttcatcttggagcaggctgtgtaccacaatgtgaaaccggcagccctccagcagcaactcgagaatattcaccttcggcaagataaggcagaagcttttgtgaacacctggagctcaatgggacaggaaacagtggaaaagtttaggcagagaatccttgccccctgcaagcttgaaacggtgggttggcagctgaatttgcagatggcccatagtgctcaggccaaactgaagtcgcctcaggcagtactccaacttggcgtgaacaatgaagactccaaatccctggagaaggttctagtcgagtttagtcataaagagctgtttgacttttataataaactcgagacaattcaggcacagctggatagtctcacatag

SEQ ID NO: 23095 - DNA, 1521 bp, synthetic construct
  source 1..1521: mol_type = other DNA; note = Synthetic coding sequence
atggaggccgacatcatcaccaacctgcggtgccggctgaaggaggccgaagaggagcgtctgaaggccgcacagtacggacttcaactggtggaaagccaaaatgaattgcagaatcaacttgataagtgtcgaaacgagatgatgactatgaccgaaagctacgagcaggagaagtatactcttcaaagggaggtggaactcaaatcccgcatgctggaatctttgtcatgtgagtgtgaggctatcaaacaacagcagaaaatgcatctcgaaaaacttgaggagcagctatcccgcagccacggccaagaggtgaacgaactgaaaaccaagatcgaaaagctaaaggtggaattggatgaggccaggctgtcagagaaacaacttaagcaccaggtggatcaccagaaggaactgctgagctgtaaatctgaggaattgagagtcatgtccgaacgagtccaagaatctatgtcatctgaaatgctcgccttgcagatcgaactgactgagatggagtcgatgaaggtgaagtaccagagtctcaagaagcagaatgtttttaatcgagaacagatgcaaaggatgaaattacagatcgccaccctcctgcaaatgaaggggtctcagacagagttcgaacagcaggaacgtctgctggcgatgctggaacagaagaatggtgagatcaagcacctcttgggggagatcagaaatctcgaaaaattcaaaaacctttacgatagtatggagtcaaaacctagcgttgatagcgggaccctggaagacaacacatactatacggacttgctgcagatgaaactggacaatttgaataaggaaatcgaaagtaccaaaggtgagctgtcgatccagcggatgaaagctctattcgaatctcagagagcactggatatagagagaaagttattcgccaacgagcggtgcctgcagctctctgagtcagaaaacatgaagctgcgagccaaattagatgagttgaagctgaagtacgaaccggaggaaactgtggaagtaccggtgcttaaaaaaagacgggaggtattgcctgtcgatataacaacagctaaggatgcgtgtgtcaataactcagctctcggcggtgaagtctatagacttccacctcaaaaggaagaaacacagagctgccctaattcactcgaggataacaatctgcagctggagaagagcgtcagtatttatacaccagtcgtgtccctttcaccccacaagaatcttccggttgacatgcagctgaagaaagagaagaagtgtgttaaactcattggcgtccctgccgatgcagaggctctctccgagaggtctggcaatacaccaaactcaccgagacttgccgccgagagcaaattgcagactgaagtgaaagagggcaaggagacatcgagtaaactggagaaggaaacatgcaaaaagctccatcctattctttatgttagtagcaagagtacccctgagacccagtgcccacagcagtag

SEQ ID NO: 23096 - DNA, 1842 bp, synthetic construct
  source 1..1842: mol_type = other DNA; note = Synthetic coding sequence
atggccaccatccccgactggaagctgcagctgctggcccggcggaggcaggaggaagcatccgtgcgggggcgagaaaaggccgagcgagaacgcctaagccaaatgcccgcttggaaacgggggctcctcgaacgccgaagagcaaaactgggcctgagccccggggagccctcccctgtgcttgggacagtggaggcaggtccccctgatccagatgaaagcgctgtgttgctggaagcaattgggcctgttcaccagaacagatttatcagacaggagagacagcaacaacagcagcagcaacagcgctcagaggagttattggctgaacggaagccgggaccgctggaggctagggaaagaaggccttcgcccggcgagatgcgggatcagtcccccaaaggccgcgagtcaagagaggagcgattatctccgagggaaactcgcgagaggcgcttgggtattggtggtgcacaggagctgagtttacgcccacttgaagctcgcgactggaggcagtcacccggcgaagtgggagacaggagcagcagactttcagaagcgtggaagtggaggctcagccccggagaaactcccgaaaggagccttcgtctggcggaatcacgagaacagagcccgaggaggaaggaggtagaaagccgcctcagtccgggagaaagtgcctatcagaagctgggacttactgaggcgcacaaatggcgtcccgactcccgtgagagccaggagcagtcactggttcagttagaagctaccgagtggcggttgcgatcaggcgaagagaggcaggactattccgaagagtgtggtaggaaggaggaatggccggtaccaggggtggctccaaaggaaacagctgaactcagtgaaacccttaccagagaagcacagggaaattcttcagctggcgtagaggcggccgaacagagacctgtggaagacggagagcgggggatgaagcctactgagggttggaagtggacgctaaactctggcaaggcccgagagtggacaccgagggacatagaggcccagacacaaaagcccgagccccctgagtcagcagagaagctattggaatctcccggggttgaggcgggcgagggtgaggcagaaaaggaagaggctggggcccagggccgcccactgagggcccttcagaattgctgtagcgttccaagtccattgccccccgaggacgctggaacgggggggctcagacagcaggaagaagaagcggtggagctccagcccccgccaccagcgcccttaagcccacccccgcctgctcctaccgcccctcagcctcccggcgatccccttatgtcacggctgttttacggcgttaaagccggccctggtgttggggccccaaggcgtagtggacataccttcactgtgaacccacgacgatctgtgccgcccgcgacaccggcaacccccactagccctgccaccgtggatgcagcagtgcctggggccggtaagaaacgataccccactgctgaggaaatcctggtactgggcgggtacttgagattgagtagatcctgcctcgccaagggctccccggagcggcaccacaagcagctgaaaatctccttctccgagacggcgttagagacaacttatcagtacccgtctgagtcgagcgttctggaagaactgggcccagagccagaggtacccagcgctccaaacccacccgccgcacaaccagatgatgaagaggacgaagaggaattactgctgctgcaacccgaattacagggcggactgagaactaaggctctcatcgtagatgaatcttgcagacgttag

SEQ ID NO: 23097 - DNA, 654 bp, synthetic construct
  source 1..654: mol_type = other DNA; note = Synthetic coding sequence
atgagctggacctgcccccggtgccagcagcccgtgttcttcgccgagaaagtttcatcattgggaaaaaattggcacagattttgtcttaagtgtgagagatgtcattcaattttgagtccgggcgggcacgcagaacataatgggaggccttactgccataagccatgctacggggcactcttcggtccccggggcgttaacatcgggggggtaggatcttacctctacaatcccccgaccccctcacctggctgtaccacgcccctttcaccctcctctttctctcctccgaggcctcggacagggctccctcagggaaagaagagcccacctcatatgaaaacttttaccggcgaaacgagtctctgccctggatgcggtgaacccgtctatttcgcagagaaggtgatgagcctcgggaggaattggcatcggccctgtctaagatgccagcggtgtcataaaacattaacagcagggagtcatgccgagcacgatggggttccatattgccatgttccgtgctatggctatcttttcggcccaaaaggaggacaaccccatcctaggcactgggacgggatgtacatgcctgaggtgtggcatgtgcacggcctatgggtgtgtgtggacaatttcccatgcgggtag

SEQ ID NO: 23098 - DNA, 1503 bp, synthetic construct
  source 1..1503: mol_type = other DNA; note = Synthetic coding sequence
atgaaccagcggcggagcgagagccggcccggcaaccaccggctgcaggcatacgctgagccagggaaaggcgattctggcggcgccgggcctctcagtggatccgcccggcggggccggggcggagggggagcgatccgcgtgcggcgtccttgctggtcagggggggcaggccgcgggggaggccccgcctgggctgtgcgtctgccgacggtcacagccgggtggacctggccagcactgaggacattgtcttctctgagagctgggccttccgaacctcacagtcctggcaggaggccacctcgggctgggagacccttatgccaggcagatccccagcccggtaaggcagctagaagatctctcgagccggacccggcacagacaggtccccggcccgcgcgcgccgccggtatgagtgaggcacggaaggggccagacgaagctgaagagtcacaatacgactcaggcattgaaagcctccgatctttaagatctcttccagagtctactagcgctccggcttcaggtcccagcgacggaagccctcagccatgcacacatccccccggccctgtaaaagagccacaagaaaaagaagacgcagacggagagcgggcggactcaacatatggcagctcttccttaacttacacactgtccttgctaggtggtccggaggcagaagacccagcacctcgactgcctttgccacacgtgggcgccttgagtcctcagcagctggaagctctgacatatatctcagaggatggtgataccctcgtacatcttgccgtgattcacgaggcaccagccgtcctgttgtgctgtttggcattgctacctcaggaagttttggatatacagaataatctgtaccaaaccgcactccatctggccgttcacctcgatcagcctggagccgtccgggctctcgtactgaagggagcgagcagagcactccaagaccggcacggggatactgcgttgcatgtggcatgccagcgccaacatctagcatgtgctagatgtcttttagaaggccggcccgagccaggtaggggaacatcacatagcttagatctgcagctccagaattggcagggactcgcttgtctacatatcgctacactacagaaaaaccagcctctcatggaactcctgcttcgcaatggggccgatattgacgtccaagaaggaacgagtgggaaaactgcactccatcttgccgtcgagactcaggaacgcggcctggtacagttcctgctgcaggccggtgctcaggtggacgcaaggatgctcaacggctgcactcctttgcatctggccgccggcaggggtctgatgggcattagttccaccctctgcaaggctggtgctgactcattactaaggaacgttgaggatgagactccacaggacttgaccgaagaatccctggtcttactcccctttgatgatttgaagattagtgggaagctgctgttgtgcaccgattag

SEQ ID NO: 23099 - DNA, 1881 bp, synthetic construct
  source 1..1881: mol_type = other DNA; note = Synthetic coding sequence
atggagggcccccgggagaaccaggacccccccccccggagcctggctcggcatctctccgacgcggaccgcctgaggaaagtcatccaggaattggtggacacagagaagtcgtatgtgaaagacctcagttgtctttttgaactgtacctggagccactccagaatgagaccttcttgactcaggatgaaatggagagtctttttgggtctctgccagaaatgctcgaattccaaaaagtgttcctagagacacttgaggatgggatctccgcttcatccgatttcaacacacttgagacgcccagccagtttcggaaactcttgttttcccttggagggtcctttctctattatgctgatcattttaagttgtattcaggtttctgcgccaaccatattaaagtgcagaaggtacttgagagagcgaagacagacaaggcgtttaaggcttttctcgacgcccgcaatcccacaaaacagcatagcagcacccttgagtcgtatttgatcaagccggtgcagcgtgttctgaaatatcccctgctgcttaaggagcttgtgtctctaacagaccaggaaagtgaggagcactaccatttaacagaagctttgaaggcaatggaaaaggtggcctctcacattaatgaaatgcagaagatctacgaagattacggtacagtgtttgatcagctcgtggcagaacaatccggcactgagaaggaggtcacggagcttagcatgggggaactgctcatgcatagtaccgtgtcctggctgaacccattcctgtcacttggcaaggcacggaaggatctcgaacttactgtcttcgtatttaaacgggctgtgatattggtgtacaaggaaaattgcaaattgaaaaaaaaactgcccagcaattccaggccagctcacaattctacagatctggacccattcaaattcagatggttgattccaatttcagcgctacaggttcgcctgggcaatcctgccggtacagaaaacaacagtatctgggaattaatccacaccaagtcagagatcgaaggaaggcctgagaccatcttccaattgtgttgcagcgattctgagagcaagaccaacattgtgaaggtgatcaggtccattctgcgcgaaaacttcaggcgacacattaagtgcgagctgcccctcgaaaagacctgcaaggataggttagttcctctgaaaaatagggttccagtttctgctaagctggccagctccagatcactcaaggtgcttaagaactcgtcgagtaatgagtggacaggagaaactggtaaaggcactctcctcgacagcgacgagggctctttgtctagcggcacacagtcgtcaggttgcccaacggccgagggccggcaggattcaaagtccacctctcctggaaagtacccccaccccggactggcagacttcgcagacaacttgatcaaggaatccgacattctttctgatgaggacgatgatcatcgccaaacagtgaaacaaggctcacctaccaaggacattgagatccagttccagcgattaaggatctcggaggatccagatgtgcaccctgaagccgaacagcaacccggtcccgagagcggggaagggcagaagggaggggaacaacccaagctcgtgcgagggcacttctgccctatcaaacgcaaggccaacagtaccaaacgcgacagagggactctcttaaaggcacagattcgacaccaatccttggacagtcaatctgagaatgctaccatcgacctcaattcagtgctcgaacgggagttttcagtgcagagccttacctccgtggtgtccgaagaatgcttctacgagactgagtcccatggtaaatcctag

SEQ ID NO: 23100 - DNA, 1596 bp, synthetic construct
  source 1..1596: mol_type = other DNA; note = Synthetic coding sequence
atggccgccgtgaagaccctgaaccccaaggccgaggtggcccgggctcaggccgcgctcgccgtcaacataagcgccgcaaggggactgcaagatgtactgcggacaaatctgggccctaaaggaaccatgaagatgttagtgagtggcgcgggcgatataaaactgacaaaagatgggaatgtgctgctccatgagatgcagatccagcaccctacagcctccctgattgccaaagtcgctacagcccaggatgatattacgggcgatggaacgacatccaacgtgctcatcatcggggagctcctcaagcaggccgacctttatatttctgagggactgcaccccagaatcatcacggaaggatttgaagccgccaaagagaaggcgctgcaattcctggaagaagtgaaggtgtctagggagatggatagggaaacgttgattgatgtagcccgcacatcactccgcactaaggtgcatgccgagctggccgacgttctaactgaggccgtcgtggacagcatactggcaatcaagaaacaagatgagcccatcgacttgttcatgattgagatcatggaaatgaaacacaagtctgagaccgataccagcttgattcgcggccttgtcttagaccatggagctcgacacccagatatgaagaagcgcgttgaggatgcgtacatcctgacgtgcaacgtctctctggagtatgaaaaaacagaggtgaatagtggattcttttataagagcgctgaagagcgtgagaaactcgtcaaggctgagagaaagtttatcgaagaccgcgttaaaaagatcatagaattgaagcgaaaagtctgcggggacagtgacaaggggtttgtggttattaatcagaaggggattgacccattttctcttgatgctttgtctaaggagggaattgtggcgctcaggagggccaagaggagaaacatggaacgactaactctagcatgcggaggggtggctctaaacagtttcgacgacctatcaccagattgcctggggcatgcgggactggtgtacgagtacactcttggggaggagaaattcacctttatcgagaagtgcaataacccacgatctgtcactcttttgatcaaagggcccaataagcatacgctgactcagatcaaagatgccgtgagggacggactgcgggccgtcaaaaatgctattgacgatggctgtgtggtgccaggggcgggagctgtcgaagttgcgatggctgaggcgttaatcaagcacaaaccaagcgttaaaggcagggcacagctgggagtccaggcctttgccgacgcgttgctcattatccccaaagtgttagcccagaacagcggctttgatctccaggagacactcgtgaagatccaggccgaacacagtgaaagcgggcagctggtgggggttgatctgaatacgggcgaaccgatggtggccgcagaggtgggcgtttgggataattattgtgtcaagaaacagctattgcactcgtgcactgtgatagctacaaacattttgttggttgacgaaatcatgcgcgcaggcatgtcaagcctcaaaggctag

SEQ ID NO: 23101 - DNA, 666 bp, synthetic construct
  source 1..666: mol_type = other DNA; note = Synthetic coding sequence
atgagcgccttcggccacgacgaggcctggatggaggccggcggctttggactagaggccgccgagcggactgaataccagtctctctgtaagtcgaagctcctttttctgggagagcaaagtggtaaaacttccatcatctcccgctttatgtataactcattcggatgcgcctgtcaagcgacagtcggaatagactttctctcaaaaactatgtacttggaggaccagattgtgcaattgcagctgtgggacacagctgggcaggaacgctttcactcgctgataccctcttatataagggacagcacaattgccgtcgtcgtttacgacatcactaacatcaactcatttaaggagacagataagtgggtcgagcatgtgcgggccgaacggggagatgatgttgttatcatgttactcgggaacaagattgacctggataacaagagacaggtgactgccgagcagggagaagagaagtctaggaatctcaatgtgatgttcatagagacctctgcaaaaaccggatacaatgttaaaaaactgtttaggcgggttgcaagtgccttgctgtccactcgaacttcaccaccccctaaagaagggacggtggaaattgagctagagtccttcgaagaatcagggaaccggtcctactgttag

SEQ ID NO: 23102 - DNA, 6222 bp, synthetic construct
  source 1..6222: mol_type = other DNA; note = Synthetic coding sequence
atggccgaggtgcggaagttcaccaagcggctgagcaagcccggcaccgccgcagagttgcgacagtcagtgtctgaggccgtgcggggtagcgtagtcttggagaaagctaaagtggtagagcccctggattacgaaaatgtaatcgcccagaggaagactcagatctatagcgatcccctgagagacttgttgatgttccctatggaagatatttcaatcagcgttatcggtcgacagagacgcactgtacagtcgacggtgccagaggacgcagagaaacgcgcacagagcctcttcgtgaaggagtgcataaagacctactcaaccgattggcatgtcgtcaattataaatatgaggatttcagcggtgactttcgcatgcttccttgcaagagccttaggccggagaagatccctaaccatgtctttgaaattgatgaggactgcgagaaggacgaggacagcagctcattgtgctcccagaaggggggggtcattaagcagggctggctgcacaaagccaatgtgaactcaacaattacagtgacaatgaaggtgtttaagagacggtacttttatctcacccagctccccgacgggtcatatatcttgaattcatataaagacgaaaagaatagcaaggagagcaaaggttgcatttatctggatgcctgcatcgatgtggtgcagtgccccaagatgcgccggcacgcttttgagctaaaaatgcttgacaaatattcccactatctcgcggccgagactgaacaggagatggaagaatggctgattaccctcaaaaaaattatccagattaacaccgacagtctggtgcaggagaaaaaggagacagtcgagactgctcaggacgacgaaacttcaagccagggaaaggccgagaacatcatggccagcttggagcggagcatgcacccagaactcatgaagtacggccgggagactgaacagctgaataagttatcacggggtgacggtcgacagaatctatttagcttcgattccgaggtgcaacgccttgatttcagcggaattgagcccgatatcaagccattcgaagagaagtgcaacaagagatttctggttaattgtcatgatttgaccttcaatattctgggccagattggagataatgcaaaagggccacccaccaatgtcgaaccattttttatcaatctggccttgtttgacgtgaaaaacaactgtaaaatcagtgcagattttcacgttgatcttaatcctccaagtgtgcgtgaaatgctgtggggctctagcacccagctcgcctctgacggctctcctaagggaagcagccccgagagctacattcatgggattgctgagagtcagctgcggtacattcagcagggtatctttagcgtgaccaacccgcaccctgagatcttcctggttgcgagaatcgaaaaggtcctgcagggaaatattacccattgtgctgagccgtacattaagaactccgatcctgtgaagaccgctcagaaagtgcaccgaacagcgaagcaagtttgttcccggctcggccaatacaggatgcctttcgcgtgggccgcgcgacctatcttcaaggacactcagggatcactcgacttggacgggcgtttttccccactctacaagcaggattcgtcaaaactttcctctgaagatatcctgaagctactgagtgagtataaaaaaccggagaagacaaagctccaaatcattcctggtcagctcaacattactgtggagtgcgttcccgtagatttgtccaactgcatcacctcttcctacgtacctctcaagcccttcgagaaaaactgccagaacattacagttgaggtggaagaatttgtgcctgaaatgacaaaatactgttatcccttcaccatttacaagaaccacctgtacgtgtaccccttgcagctgaagtacgacagccagaaaacctttgctaaggccagaaatatcgcagtgtgcgtggagtttcgagacagcgacgaatcagatgcatccgccctcaaatgtatctacggcaaacctgccgggtcagttttcacaaccaacgcctacgcggttgtcagtcatcataaccagaatccggaattctatgacgagatcaagatagagctgcctatccatctccaccagaaacatcatttgctgtttaccttttaccacgtctcctgtgaaataaacactaaagggaccaccaagaaacaggataccgtggagaccccagttgggtttgcatgggtgccattattaaaggatgggcgaatcattacctttgaacagcaactgcccgtgtccgccaacctgcccccagggtacctgaacctgaacgatgcagaaagccgacgtcagtgcaacgttgacattaagtgggtggatggggccaaaccattgttaaagatcaagtcccacctggagtcaaccatttacacacaagatcttcacgttcacaagttctttcatcactgtcagctaattcaatccggaagcaaagaggtacccggggaactgattaaatacctcaagtgcctccatgcaatggagattcaggtgatgatccaatttctgccagtgatcttgatgcagctgtttcgcgtgctgacaaacatgacacatgaggacgatgtccctattaactgtacgatggtactacttcacatagtatctaaatgccatgaggaaggtcttgactcctacctgagatccttcataaaatattccttcagaccagaaaaaccttcggctcctcaagcacagctcatccacgagacccttgctaccactatgatcgctatacttaaacagtcagcagattttctcagcattaacaagcttcttaaatactcctggtttttctttgagattattgccaagtcaatggcaacttatctcctggaagaaaacaagatcaagttgccacgtggtcagcggtttccagagacatatcatcatgtcctgcactctcttctgctggcgatcatccctcacgtcactatcaggtatgctgaaatccctgatgagtctcggaacgtcaattattccctggctagttttctcaagcggtgtctgacgctcatggatcgaggcttcatttttaacctcatcaatgactatatcagcggttttagcccaaaagacccgaaagtattggctgagtacaagtttgagtttctgcagaccatttgtaaccacgagcattacattcctctaaatttacccatggcatttgccaagccaaagctacaaagggtgcaggacagtaatctggagtactcactgtcagacgagtactgcaaacaccattttctggtcggattacttttgcgggagacatcaattgctctgcaggacaactatgagattagatacacagctatcagtgtgattaaaaacttgctgatcaagcacgcattcgacacgcgataccaacacaagaatcagcaggcaaagatcgcccagttatatcttccttttgtgggcctactgctagagaatatccagagactggcgggtcgcgataccctttactcctgtgccgccatgcctaacagcgcgtctagagacgagttcccatgtgggttcacttcaccagcaaatcgaggttccctctcgaccgacaaggacacggcctacggtagttttcagaacggccacggaatcaaaagagaggatagcagagggtcactgattcccgagggtgccactggatttcccgaccaggggaacacaggcgaaaacacccgacagtccagcacacggtcttccgtatcgcagtacaaccgcctggatcagtacgagattcgaagtcttctgatgtgctacttgtacatcgtcaaaatgattagcgaggacaccctgcttacatactggaacaaggtctcccctcaggagctgatcaatatcctgatcttgctggaagtttgcttgtttcatttcagatacatgggcaagcggaacattgcccgggtccacgacgcctggttaagcaaacattttggaatcgatcgcaaatcacagacaatgccggccttaaggaaccggagtggcgttatgcaagccaggctgcagcacttgtcatcattggaatcttctttcacgctcaatcacagctctaccacaaccgaggctgacatttttcaccaggccttattggagggcaataccgctaccgaagtttccttgaccgtgctagacaccatttcgttctttacccagtgcttcaagactcagctgctgaataatgacggacacaatccattgatgaagaaagtgtttgatattcacttggcctttctgaaaaacggccagagcgaagtgtctctcaaacacgtcttcgcaagtttgcgagcctttatttctaaattcccttctgccttctttaaaggtagggtgaacatgtgcgcagctttctgttatgaggttctgaagtgctgtacctcaaaaatctctagtacaagaaacgaggccagcgctctgctctacctcctgatgaggaataacttcgagtatacaaaaagaaagaccttcttacgcacccacttgcagatcattatcgcagtgagccagctcattgccgacgtggccctgtcaggtgggtcccgattccaggaaagcttatttattattaataatttcgctaatagcgacaggcctatgaaggctaccgcttttccagccgaggtgaaagacctcacaaaacggattaggaccgtgcttatggccactgcccaaatgaaggagcatgagaaagacccggaaatgctgatcgatctccaatattctctggctaaatcatacgccagcactcccgaattacgtaagacatggctcgattcaatggcgaaaatccacgtgaaaaatggagacttctccgaggctgccatgtgttacgtgcatgtggccgccctagtcgctgagttcctccaccggaagaagttgttccctaatggctgcagcgcattcaagaagatcactcccaacatcgatgaggagggagcaatgaaagaagatgctggcatgatggacgtgcactattcagaggaagtgctcctggaactgctggagcaatgtgtggatggtctttggaaggctgagaggtacgagatcattagtgagattagtaaacttatcgtgccaatctacgaaaaaagaagagagttcgagaagttaacacaggtctatcgtacgctgcacggcgcttataccaagattcttgaagtcatgcatactaagaaacgactccttggcacatttttccgcgttgctttctacggccagtccttttttgaggaagaggacggcaaagaatacatatataaggaacctaagctgacgggcctgtcagagatctccctgcgcctggtaaagctgtacggcgaaaaatttggtactgaaaatgtcaaaatcattcaggacagcgataaggttaacgcaaaagagctggaccctaaatatgcccacatccaggtaacctacgtgaaaccctatttcgatgacaaggagctgactgagcgaaagacagagtttgagaggaaccacaatatttcccgatttgtttttgaggcgccctacaccctgagtggcaagaagcagggttgcatagaagaacaatgcaagcgtcgaacaattctgactacgagtaattcattcccttacgtgaagaaacggatcccaattaattgtgagcagcagattaacctcaagcctattgacgttgctacggatgaaattaaggataagaccgcagaactccaaaagctctgcagttcaacggacgtcgacatgatccaattacagctgaagctccaagggtgtgtgagtgtgcaagttaacgctggacccctggcttatgccagagcctttctgaacgacagccaggccagcaaatatccacctaaaaaagtttctgaactgaaggacatgttccgcaaatttattcaagcctgctctatcgctctggagttaaacgaacgccttataaaagaggaccaggtggagtatcacgaaggactgaagagcaacttcagagacatggttaaggagcttagcgatatcatccacgaacagatccttcaggaggataccatgcacagtccctggatgtcgaacactttgcacgtcttttgcgcaatcagtgggactagcagcgatcggggatatggatccccaaggtatgccgaggtctag

SEQ ID NO: 23103 - DNA, 1644 bp, synthetic construct
  source 1..1644: mol_type = other DNA; note = Synthetic coding sequence
atgggcggctgcatccccttcctgaaggccgcccgggccctgtgccccaggatcatgcctcctctgctgctgctctcagccttcattttcctggtgagcgtgctcggtggggctccaggccacaaccctgaccggaggaccaaaatggtgtctatccactctctctctgagctcgagcgcctgaagttgcaggagacagcctaccatgaactagtcgctagacattttttgtctgagttcaaacctgacagggccttacccatcgataggcccaataccctggacaaatggttcctgattctcagaggccagcagcgcgctgtctctcataaaacgtttggaatctccctggaagaggtcttggttaatgaattcacaaggagaaagcacctcgagttgacagctacaatgcaagtggaggaagccactggacaagccgctggaagaagaagaggaaatgtcgtccggcgagtgttcgggagaattcggcggttcttcagtagaagacgaaatgagcccacgctgcccagagagtttactcgccggggtcggcgcggtgctgtgtcagtcgacagcctcgccgaactggaggacggagccctgcttttgcagaccctccagttgtccaaaatcagttttcccattggacaaagactgcttggcagtaaacgtaaaatgtcgctgaaccctatcgccaagcagataccccaggtcgtcgaggcatgctgccagtttattgagaaacacggcctatctgccgtgggaattttcaccctggaatactctgtgcagagggtgcgtcagttaagagaagagttcgaccaggggctcgatgtcgttttggatgacaatcagaatgtccatgatgttgcagcactcctgaaggaattctttcgggacatgaaagattcgttattgccagacgatttatacatgtcatttttactgaccgccaccctgaagccacaggaccagcttagtgcgctgcagcttctggtgtacttgatgcccccttgtcacagcgataccttggagaggttgctcaaggccctccacaagattacggagaactgtgaggatagcatcggcatcgatggtcaacttgtgcccggcaatcgcatgacatcaactaatttagcactggttttcggatccgccctgctgaagaaggggaagttcgggaaaagagagagtcggaagacgaagctgggaatcgaccactacgtcgcctcggtcaacgttgttagggccatgatcgataactgggatgtcctgttccaggtgccaccacacattcagcggcaggtggccaagcgggtgtggaagtcttccccagaggcacttgacttcattagacgcagaaacctgagaaaaattcagtctgctcgcattaaaatggaagaagacgccctgctgtccgaccctgtcgaaacctcggctgaggcccgagctgccgtgcttgcgcaatctaagccatctgacgaggggagctctgaagaaccggccgtgccttccggtaccgcgcggtcacacgacgatgaagagggcgccggtaatccccccatcccagaacaggatagaccgctgttgagagtcccacgcgagaaggaggccaagacaggcgtgtcctacttctttccttag

SEQ ID NO: 23104 - DNA, 5613 bp, synthetic construct
  source 1..5613: mol_type = other DNA; note = Synthetic coding sequence
atggcccggtggatccccaccaagcggcagaagtacggcgtggccatctataactacaacgcatcccaggatgtagaactttctcttcaaatcggtgacaccgtgcacattctcgaaatgtatgaaggatggtacagaggatacacactgcagaacaaatccaaaaagggaatttttcccgagacatacatccacctgaaggaggccactgttgaggatttgggtcaacacgagaccgtgatcccaggggagctgccattggtacaggagctgacttccacgctgagggaatgggcagtaatttggagaaagctttatgtaaacaacaagctgacactcttccggcagttgcagcaaatgacttatagcctcattgaatggcgctcccaaatactctcagggactttgcctaaagacgaactggccgagctcaagaaaaaagtgaccgccaagatcgatcacggtaatcgcatgctgggactcgatctcgttgtgcgcgacgacaacggaaatattctggacccagacgagacctccaccatagcgctttttaaggcacacgaagtggcaagcaaaaggatagaagagaaaatccaggaggaaaagtccatcttgcaaaaccttgatctgagagggcaatcaatcttttcaacgatccatacgtacggactgtacgtgaacttcaaaaattttgtatgtaacatcggggaggatgcagaactgttcatggctctctatgacccagaccagagcactttcatcagcgaaaactacctgatccgctggggtagcaacggcatgccaaaggagattgaaaagctcaataatcttcaagcggtgtttacagatctttctagcatggatctcattcgcccgcgggtcagcttggtgtgccagattgttagagttgggcatatggagcttaaggagggtaaaaagcacacctgtggcctccggaggccattcggtgttgcagttatggatatcaccgacattatacatggcaaagtggacgacgaggagaaacagcactttatccccttccagcagattgccatggagacctatataagacagagacagttaatcatgtccccccttataacctcacatgtgattggagaaaatgagccactaacaagcgtgctcaacaaggtgatagcagctaaggaggtcaaccataagggtcagggattgtgggtgagcctgaaactgctgccaggtgatctcacacaggtgcagaaaaacttttctcacttggtggatcggtcaacagccattgcaagaaaaatggggttccctgaaattatcctcccgggtgatgtgagaaacgatatttatgttaccttgattcacggggaatttgacaagggcaagaaaaaaaccccgaagaacgtggaggtgaccatgtcagtacacgatgaagaaggcaagctattagaaaaagctatacaccctggggcgggttacgaaggcatttctgaatacaaatccgtcgtctattaccaggtaaaacagccctgctggtacgagacagttaaggtgagtatcgccatcgaggaggtgacacgatgccacatccgcttcacatttaggcatcgtagctcccaagagacccgggacaaaagtgaacgcgctttcggagtggcattcgtgaagctaatgaaccctgacggcactacactgcaggacggccggcatgatctagtcgtgtacaagggcgataacaagaagatggaagacgctaagttctacctcactttgcctggcaccaaaatggaaatggaggagaaagagcttcaggcgtccaagaacttggttaccttcacaccctccaaggattccacaaaggactcgtttcagattgccacactgatttgttctaccaaactgacccagaacgtcgacttgctgggacttttgaattggagatcaaacagccagaatattaaacataacctcaaaaaactcatggaagtggacggaggggaaattgtgaaattcctgcaggacacactggacgctctgtttaacataatgatggaaatgagcgattccgaaacctacgacttcctcgtttttgacgctctggtctttatcatcagtctgatcggagacataaaattccagcacttcaacccagttcttgagacctatatttacaaacacttttccgccacactcgcctacgtaaagctgtccaaagttctgaacttctacgttgccaacgccgatgacagctcaaagaccgagttgctttttgctgctttgaaagccctcaaatatctatttaggtttattattcagtctcgagttctgtacctcaggttctatggccagtcgaaagacggcgacgagttcaacaattctatccgccagctttttctggcctttaatatgctcatggaccgcccactggaggaagctgtcaaaatcaagggagccgccctgaaatatctgccctcaatcatcaatgatgtcaagctggtgttcgatcctgtagaattgtctgtgctgttctgcaagttcatccagagtatccctgataaccagctggtcagacagaaactcaattgtatgactaagatcgttgagtccaccctattccggcaatcagagtgtagagaagtgctgttgccccttctcacagaccaattgtctggacagctggatgacaacagtaacaagcccgaccatgaggccagcagccagctgctgagtaacatactggaagtgctcgataggaaagacgtcggagctacagctgtccatatccagctcattatggagcgactgctgaggaggatcaacaggacagttatagggatgaataggcagagtccccatatcggcagctttgttgcctgcatgatcgccttgctgcaacagatggacgacagccattacagtcactatatctccacatttaagacgagacaagacataatcgattttctgatggagacatttattatgttcaaagacctgataggcaaaaatgtatatgcaaaagactggatggtaatgaatatgacgcagaaccgggtcttcctaagagctatcaaccagtttgctgaagtgttgacacgcttcttcatggaccaagcgagcttcgagctccagctgtggaataattacttccaccttgccgtcgccttcctgacccacgagtcactacagcttgagaccttctctcaggctaaacggaacaagatcgtcaagaagtatggcgacatgcgaaaagagatcggcttccgaatccgcgatatgtggtacaaccttggacctcacaaaatcaagtttatcccatccatggtcggcccaattctagaggtgacactcacaccggaagtcgagctgcgcaaggccacaatacccatcttttttgacatgatgcagtgcgagttcaattttagtggcaatggtaattttcatatgttcgaaaacgagctgatcactaagctcgaccaagaagtcgagggcggccggggggacgagcaatacaaggtgctgctggaaaagctcttactcgagcactgcagaaaacacaagtatctgtcttcatccggcgaggtgttcgccttgcttgttagctccctgctcgagaatctgctggattaccgcaccattattatgcaggacgagtcaaaggaaaacaggatgtcatgcaccgtgaacgtgctcaacttttataaagagaaaaagagagaagacatttatatcagatatctctacaagttgagagatctgcaccgggactgtgagaattacaccgaggctgcctatactttactgcttcacgccgagttgctacagtggagcgacaaaccctgtgtgccccaccttctgcagaaagattcatactacgtttacactcagcaggaactgaaagagaaactgtatcaggagattatctcttacttcgataaggggaagatgtgggaaaaggccatcaagctcagcaaagaactggccgagacttatgaatcaaaagtgttcgattacgagggactcgggaaccttctgaagaaaagagcctccttctacgagaacattatcaaagctatgcgaccccagcccgagtatttcgccgtcgggtactacggacaggggtttccgagctttctgagaaataagatttttatatatagggggaaggaatatgagcgccgcgaggactttagcctccggctgctgacacaattcccaaacgcagaaaaaatgactagtactacaccaccaggtgaggacattaagagttcccccaaacagtatatgcagtgctttacagtcaaaccagtcatgagccttccgccgtcctataaggataaacccgtgccagagcagatactgaattactatcgggcaaacgaagtccagcagtttaggtatagcagaccttttaggaagggcgagaaagatccagacaatgaattcgcaacgatgtggatcgagcgaaccacttacaccacagcctacaccttcccaggcatactgaaatggtttgaggtaaagcagatctctacagaagagatctctcccctggagaacgcaattgagacgatggagcttactaatgaaaggatatcgaattgtgtgcagcagcacgcatgggatcgaagcttgtcggtacatcccctcagcatgctgctgtccggtattgtggatcccgccgtgatgggagggttctctaactacgagaaggccttttttacggaaaagtacttacaagaacaccctgaggatcaggagaaggtcgaactcctgaaaaggctgattgctctgcagatgcctttgttgaccgaaggcattcgaatccacggtgagaagttgaccgagcaactgaaaccattacacgaacgtctgagtagttgtttccgggagctcaaggaaaaagtagaaaagcactacggtgtcatcacactgccccctaacctaacggaacgcaaacagagcagaaccggatcaatcgtcctcccttatatcatgtcaagcactctgcgaagactttctatcaccagtgtgaccagttccgtagtttccacatcctcaaattcctccgacaatgccccctcccgacccggctccgacggaagtattcttgagcctctgcttgagcggcgcgcctcttcgggcgccagggtagaggacctctcactgagggaggaaaactctgagaacagaatcagcaagtttaaaagaaaggactggagtctgtctaaaagccaggtgatagccgagaaagccccagagcctgacttaatgtctcccacacgcaaagcacagcgaccaaagtcactgcagttaatggacaacaggttaagccctttccacggtagctcacctccacagtcaacccccttgagtccgccccccctaacaccgaaagccaccagaacgctgagtagccccagtctgcagacagacggcatcgctgcaacccccgtgcctccacctccccccccaaagtctaaaccttatgagggctcccagagaaacagtaccgagctggccccccccttgcccgtgcgcagggaggcaaaagcgccgcctcccccccctcccaaagcaaggaagtcaggcatccccacatcagagcccgggtcccagtag

SEQ ID NO: 23105 - DNA, 1623 bp, synthetic construct
  source 1..1623: mol_type = other DNA; note = Synthetic coding sequence
atgagcgccagcctgaactacaagagcttcagcaaggagcagcagacaatggacaacctggagaagcaattgatctgccctatctgtctcgaaatgttcactaaaccagttgtgatcctcccttgtcagcataatctgtgtagaaaatgcgcgagtgacatttttcaagctagcaatccctacctacccacccgcggggggactacaatggcctcaggaggaagatttagatgtccgagctgcagacatgaagtggtcctagacagacacggcgtctatggcctgcagcgtaacctactggtagaaaacattatcgacatctacaagcaggagtccaccagaccggaaaagaagtctgaccagcccatgtgtgaggagcacgaggaggaaaggatcaatatctactgcctgaactgtgaggttccgacctgtagtctctgtaaagttttcggagcacacaaggattgccaggttgcgccactgacccacgtgttccagcgccagaagtccgagctgtccgatgggatcgccattctggtaggatccaatgatcgggtgcagggggtaattagtcaacttgaggatacctgtaagacaatcgaagagtgctgccgaaagcaaaagcaagaattgtgtgagaaatttgattacttgtatggcattctagaggaaagaaaaaacgaaatgacacaagtgatcacgcgcacacaggaagaaaagcttgagcacgtacgggccctgattaaaaaatactcggaccaccttgaaaatgtgtcaaagctggtggaatctgggatccagtttatggatgaaccagagatggctgtgttccttcagaacgcaaaaactcttcttaaaaagatcagtgaggccagtaaagcctttcagatggagaaaattgaacacggatacgagaatatgaaccattttaccgttaatctgaacagagaagagaaaataatccgcgaaattgatttctaccgcgaggacgaagacgaagaggaggaggaggggggagagggggaaaaggagggagaaggcgaagtgggaggtgaggcagtcgaggttgaagaggttgaaaacgtgcaaactgaatttcctggggaagatgagaatcccgagaaggcatccgaactgagccaggtagagttacaagccgctcctggcgccctccccgtcagtagccccgagccaccaccagcactgcctccagccgccgacgcccccgttacacagggcgaagttgtccctaccggatcagaacaaacaacggaaagtgaaacacccgtaccggcagccgccgaaaccgccgatccgctgttttaccccagctggtacaagggccagactaggaaggcaactaccaatcccccctgcacgccaggctcagagggactagggcagatcggaccccccggttccgaggactccaatgtccgcaaggctgaagtggctgccgctgctgcttctgaaagagccgcagtctccggaaaggagacctcggcccccgctgccacttcccaggagcttgttatttgccttgcactgttggcattcttaatccttcactacatctggtcccagattcagtgccttatatttacattgatggactggatatag

SEQ ID NO: 23106 - DNA, 3252 bp, synthetic construct
  source 1..3252: mol_type = other DNA; note = Synthetic coding sequence
atgagccagacccaggactacgagtgccggagccacaacgtggacttgcctgaatcaagaatccctggatctaatacccggctcgagtgggtggaaattatcgagcctcgcaccagggagcggatgtacgcaaatctggtcactggcgaatgcgtgtgggacccgcctgcgggcgtgcgcatcaaacggacaagcgaaaatcagtggtgggagcttttcgacccaaacacatcccgtttttattactacaatgccagcacccagcgcactgtgtggcacaggccccagggatgtgacatcattcccctcgctaaacttcaaactttaaaacagaacacagaaagtcccagggcctccgcagaatcctctcccggcagaggaagtagtgtgagcagagaagggagcacctcctcatcactggaaccagaacccgacactgaaaaggctcaagagctcccggcgagagccggccgcccagccgccttcggaaccgtgaaagaggactcaggatcttcttcgccccccggagtcttccttgagaaggattacgagatctaccgggactactctgcagatggtcagctgttgcattataggacttcctcactccgctggaattcaggcgctaaagaacgcatgctgatcaaggttgcagaccgggaaccgagctttctggcagcacaggggaacgggtatgctcctgacggccccccgggcgtgcgatcacggaggccttccggatcacagcacagcccgtccctgcagacattcgcacctgaagcggacgggacaatcttctttcccgagcgccgaccgtcaccatttctgaaacgggctgaactgcccggatcttcctcacccctgctggcccagccaaggaagccatcgggtgatagccagcccagttctcctaggtacggctatgagccaccattgtacgaggagcccccagtcgaatatcaagcgcccatctacgacgaaccacccatggacgtgcagttcgaggcaggcggcggctaccaggccgggagtccccagaggtcccctggccggaaaccccgtccattcctccagccgaataagcagggcccgcctagtccctgtcagcagctggtgctcactaaacagaagtgtccagagcggtttctctccctcgagtattcccctgccggaaaagagtatgtgcggcaactggtttacgtagagcaagccgggtcgtctccaaagctcagggctggccctaggcacaagtacgctcccaatcccggcggcggttcatactccttgcagccctccccatgcctgctgcgagatcaaaggctgggtgtgaagtcaggagattatagcacgatggagggcccggaattgcggcattctcagcccccaacccctcttccccaggcccaggaagatgcaatgtcctggagtagtcagcaagacaccctgtcgtcaacgggatactcccctgggacaagaaagcggaagtcaagaaaaccatctttgtgccaagccacctcggccacacctacagagggacctggcgatctcctcgtggaacaaccactggctgaggaacagccaccctgtggtacatccctggcccccgttaagagagcagagggggaagccgaaggggctaggggagcagccgagcccttcctcgcccaggccaggctcgcgtgggaggcccagcaggcacacttccatatgaaacagagatcttcctgggactctcagcaggatggaagcggttacgagagcgacggggctctcccattgcccatgcctggaccagtggtcagagcgttcagtgaggatgaagcactcgcacagcaggagaatcggcactggaggcgcggaacatttgagaagctcgggtttccccaaatactgcttgagaaatcagttagcgtgcagacaaatctggcttctcccgagccttacttgcatccttctcagagcgaagacttggctgcttgtgcccagtttgagtccagtcgacagagccgtagtggcgtacccagctcctcttgtgtgttccccacatttactcttcgcaagccatctagtgaaacagacattgagaactgggctagcaagcatttcaataagcacacacagggcctgttccggcgcaaggtctccatcgctaacatgctggcctggtctagcgagagtattaagaaacccatgattgtgaccagcgacagacatgtgaagaaagaggcctgcgaactgtttaaactgatacagatgtacatgggcgaccgccgcgccaaggctgacccattgcacgtggctttggaggtcgccacaaaaggctggtctgttcagggactacgtgacgagctctatatccagctctgtcggcaaactaccgagaacttccgtctggaatctctcgccaggggctgggaactgatggcgatctgcttggcattttttccacccacaccaaaatttcatagttatctagaggggtacatttataggcatatggaccccgttaacgacaccaagggagtggccattagcacatacgcaaagtactgctaccacaagttacaaaaggccgccttgactggagctaagaagggcctcaagaagccgaatgtcgaggaaattcgtcatgctaagaacgcggtttttagcccttcaatgtttggcagtgctcttcaagaagtgatggggatgcagagggagaggtacccagaacgccagctgccctgggttcagactcgtcttagtgaagaggtcctcgctcttaacggggaccagactgagggtatttttagagtgcctggagacatcgacgaggtcaacgcccttaagctccaagtcgatcagtggaaagtgcccaccggcctggaggacccacacgtccctgcatctctgctgaagttgtggtatcgggagctcgaagagccgttaataccacacgagttctacgaacagtgtatagcccattacgacagccccgaggctgcggtggctgtggtccacgccctgccacgcattaaccgcatggtcctgtgttatctcatcaggtttctgcaggtttttgttcagcctgcaaatgtcgcagtgaccaagatggacgtgtccaacttagccatggttatggcccctaactgcctgcggtgccagtccgacgacccccgagtcatctttgagaacacacgcaaagagatgtcattcctgcgggtcctgattcagcacttagatacttcttttatggaaggcgttctgtag

SEQ ID NO: 23107 - DNA, 426 bp, synthetic construct
  source 1..426: mol_type = other DNA; note = Synthetic coding sequence
atgggcaagggcatccccctgaacgaccaggaccggatcccctggctctgcaacctgcatgatatcctgttgcgtgatgtggccagcgggcagcgggtggttctggcctgcagcgccctgaaaaaaacttaccgcgacattctgactcagggcaaggatggggtcgccttgaagtgcgaagaatcaggcaaagaggctaaacaggccgagatgcagcttctcgtagtccacctaagcggatctttcgaggttataagtggccgactcctgaaaagagagggacacttcatgcctcctgagctcctccagtcccaatttgaaactttggagccgcctgccgctccagagaacttcattcaaatatcggtcgacaagaatgtgtcagagatcatcgcgacgatcatggagactctcaaaatgaagtag

SEQ ID NO: 23108 - DNA, 1701 bp, synthetic construct
  source 1..1701: mol_type = other DNA; note = Synthetic coding sequence
atggacatccagctggaccccgcccgggacgacctgcccctgatggctaacacatcccacatcttggtgaaacactatgtactggatctcgacgtggacttcgaatcacaggttattgaaggcacgatcgtgctatttctggaggacggcaacaggttcaagaagcagaacagttcgattgaggaggcttgccagagcgaaagcaacaaagcatgcaagttcgggatgcccgaaccatgccatatcccagttactaacgccaggacttttagctctgaaatggagtacaatgactttgcaatttgcagtaagggcgagaaggacacctccgataaagatggcaatcacgacaatcaggaacacgcctccgggatatcgagctctaagtactgctgcgacacaggcaaccatggcagcgaagattttcttctggtgttggactgttgcgatcttagtgtgttaaaggtggaagaggtagacgtggctgccgtcccagggcttgagaaatttactcgatcacccgagttgacagtggtgtccgaggagtttagaaaccagatcgttagagaactggtcaccctgcctgcaaacaggtggcgagagcagttggactattacgcacgctgtagccaggctcctgggtgtggagaactgctgtttgataccgacacttggtccctgcagatcaggaaaacgggcgcccagacagcaactgacttcccgcatgccatacggatatggtacaagaccaaaccagagggccgctccgttacttggacatcagatcaatctggccgcccttgtgtgtataccgtagggtctcctataaacaatcgcgccctttttccttgtcaggaacctcctgtcgcaatgagtacttggcaggctacggtgcgggccgcagcgagcttcgtggtcctgatgtcaggggagaattctgcgaagcccacacagctgtgggaagaatgctcaagttggtattactacgtgacaatgccaatgccagcttcaacctttactattgcagtgggatgttggaccgaaatgaaaatggaaacttggagcagcaacgatctggctacagagcgccctttctccccaagtgaagcaaatttccgccatgttggcgtttgcagccacatggagtacccctgcaggttccagaatgcaagcgccactacccaggaaattatcccacatagggtcttcgccccagtgtgcctcaccggcgcctgtcaggagacacttcttaggttgatccctccgtgtctgtccgcggcccacagcgtgctgggagctcaccccttttcacgactggatgtccttatcgtgccagcgaacttcccgtccctcggtatggcatcaccacacatcatgttcctcagccagagcatcctcaccggaggaaatcatctgtgtggaaccagactctgtcatgaaatcgcccacgcatggtttggcttggccattggagctagggattggacagaggaatggctgtcagaggggttcgctactcatctcgaggacgtgttttgggccacagctcagcagctggctccatacgaagcccgagagcagcaggagcttagagcgtgcttacggtggaggagactgcaggatgaaatgcagtgttcgcctgaagagatgcaagttctgagatttccacacgtgggaggctgcagtggctcttttagctag

SEQ ID NO: 23109 - DNA, 1266 bp, synthetic construct
  source 1..1266: mol_type = other DNA; note = Synthetic coding sequence
atgcccttcctgcacggcttccggcggatcatcttcgagtaccagccccttgtggacgccatcttggggtcgttgggaattcaagaccccgagcgccaggagtctctggaccgcccctcctacgtggctagcgaggagtcccgaatactcgtcctgacggagctgctggaacgcaaagcccattctccgttttaccaagagggagtgtccaacgcccttctgaagatggccgaattggggttaaccagggctgctgatgtcttgttacgtcacggagctaacctcaattttgaagacccagtgacttattataccgctctccatatcgctgtcctgcgtaaccagcccgatatggttgaattgctggtccaccacggagctgatgtgaacagaagggacagaatccatgagtcttctccccttgacctggcctccgaagagcctgagcgtcttccctgcttacagaggctgctggacctgggggcagatgtcaacgccgctgataagcacggcaaaacagctctgctgcacgcgttagctagcagcgatggggttcaaattcacaacaccgaaaatatacgacttctcctggaaggaggagccgacgtcaaagccacaacaaaagacggagacactgtctttacatgcattatcttcttactaggcgaaaccgttggcggcgataaagaagaagcgcagatgataaacagattctgcttccaagtgaccaggctcctgctggcacatggggccgatccatctgaatgccccgcacatgaatcgctgacacacatatgcctcaagagcttcaagctccactttccccttttgcgattccttctagagtcgggagcagcctacaactgctccctacacggcgcatcttgttggtctggcttccatatcatcttcgagagactgtgttcacaccccggatgtaccgaagacgaaagccacgctgacctgctgcggaaggctgagaccgtcctggatcttatggtgaccaacagccagaagctgcaattgcccgagaacttcgacatccaccccgtcggatctctcgctgaaaaaattcaggctttgcacttctccctccgtcagctggagtcgtacccaccccccttgaagcacttatgcagagtggctattagactgtatctccagccatggccagtggacgtgaaagttaaggccctgccgctgccagacaggctgaagtggtacctcttgtcagagcatagcggttcggttgaagacgatatctag

SEQ ID NO: 23110 - DNA, 594 bp, synthetic construct
  source 1..594: mol_type = other DNA; note = Synthetic coding sequence
atgcccttcctgcacggcttccggcggatcatcttcgagtaccagccactcgtcgatgccatcctggggtccctcggtatccaagaccccgagcgacaagaaagcttggatagaccttcctatgtggcctccgaggaatcgcgcatcctggtcttgaccgaactgttggaacgcaaagcccactccccattttaccaggaaggggtcagtaatgccctcctaaagatggccgagctgggacttaccagggcggccgatgtcttgctgcgccacggcgcgaatctcaatttcgaggacccagtcacttactacacagctctgcatattgccgtactgcgaaaccagccagacatggtggagctcttggtccaccacggtgctgacgttaaccgcagggatagagaaaaactactgtgttctatgctgtggccagctgccacggggtgcagatctacaattttacgcacctttgttagctactggaaagaaggacaaacttctaggccacctccaaagatggggacacaatgctcccctgccagctccagttgcttagttagaccatgggaagggacgaagcgccggccgagatag

SEQ ID NO: 23111 - DNA, 684 bp, synthetic construct
  source 1..684: mol_type = other DNA; note = Synthetic coding sequence
atgagcgacatcaacctggactgggtggaccggcggcagctgcagcggctggaggaaatgctgattgtggttgacgaaaacgataaagtgattggcgccgacacaaaacgaaactgccatctgaacgagaatatcgaaaagggactgctgcaccgggccttttctgttgtgttgttcaacactaaaaatcgaattttgatacagcaacgatcagatacgaaggtcacgtttccaggatatttcactgattcctgcagctctcaccccctctacaatcccgccgaactggaagagaaggatgccataggcgtgcggcgtgctgcccagcgcagactccaggccgagctggggatcccaggagagcagatttcacccgaggacatcgtttttatgaccatttatcatcataaggccaaatctgacaggatatggggcgaacatgagatctgttacctgttgctggttcgtaagaacgttacccttaatccagatccgtctgagacgaagagcatactctacctttctcaggaagaactgtgggaactcttagagagagaggcaagaggtgaagtgaaagtgactccctggttaagaacaatcgctgagagattcctctaccgatggtggcctcacctggacgatgtgactcccttcgtggagctccacaagatacaccgcgtctag

SEQ ID NO: 23112 - DNA, 864 bp, synthetic construct
  source 1..864: mol_type = other DNA; note = Synthetic coding sequence
atggaggtgatggagggccccctgaacctggcccaccagcagagcaggcgcgctgaccgactgctcgcggccggcaagtatgaggaggcaataagctgccataagaaagctgccgcatatttaagcgaggccatgaaactcacacaaagcgaacaggctcacctatcccttgaattacagagggattcacacatgaaacaactgttactgatccaggagagatggaaacgtgctcagagagaggagaggctcaaggcccagcaaaacaccgataaggatgccgccgctcatctccagacatcgcacaagccaagcgccgaagatgccgaggggcagtcccctctatcccagaagtattctccttccactgagaaatgcctcccagagatacagggtatattcgacagggacccggataccctgctatacctcctacagcaaaaaagcgagccagccgaaccttgtatcggcagtaaagcaccgaaggatgataagacgatcatcgaggaacaggctacgaaaattgcagatttgaaacgccacgtggaattccttgtagctgagaacgaaaggctccgcaaggaaaataagcagctgaaggccgagaaagcccgtctcctgaaggggccaattgagaaggagctggacgtggatgcggactttgtcgagacatccgagttgtggtctctcccccctcatgccgaaacagcaacagcatcctcaacctggcagaaatttgccgcaaatacaggaaaagccaaggacattcctattccgaacctgcctcccctagacttccccagcccagaattacctcttatggagttgtctgaggatatcttgaagggcttcatgaataactag

SEQ ID NO: 23113 - DNA, 2844 bp, synthetic construct
  source 1..2844: mol_type = other DNA; note = Synthetic coding sequence
atgtgcgtggacagcctggtgcggatctgcagcggcctgagctacggccgtataagaaatatcaagtcgttaagcgatatacaaatcgttcaggtagcatgcggctactatcacagcttggccctgtctaaagctagcgaagtgttttgctggggccagaacaagtacggccaactcggcctgggtactgattgcaaaaaacaaacatccccacagttgctgaagtctttgctggggatccctttcatgcaggtggcagccggaggggcccatagcttcgttctcaccctgagcggcgccatcttcggatgggggaggaacaagtttgggcaacttggccttaatgatgaaaatgatcgatacgtccctaatctcctaaagtccctgcggagccagaaaatcgtttacatctgttgtggcgaagaccacacggccgctctgacaaaagaaggcggcgtgtttacctttggggctggcggatacggacagctgggccacaacagtacttcccacgagattaacccacggaaagtctttgaactaatgggatccattgtcaccgagattgcttgcgggaggcaacacacgagcgcttttgtcccctcctccggccgcatttacagcttcgggttgggaggaaacggtcagttgggtactggttccacgagcaacaggaagagtccattcacagtgaaggggaactggtacccgtacaacggtcagtgtctgcccgacatcgattctgaggagtatttttgcgtcaaaaggatcttcagcggcggggatcagtccttctcccactacagcagtccgcagaactgtggtccgccggacgactttcgatgtccaaatcccacaaagcaaatatggactgttaacgaagctctgattcaaaaatggttaagctatccaagtggccgctttcccgtggagattgccaacgaaatagacggcaccttcagcagttcgggctgtttaaacgggtcattccttgcagtgtccaacgatgatcattatagaaccgggacccggtttagtggagtggacatgaacgccgcccgcctgctgttccataagttaatccagcctgaccacccacagatttctcagcaggtggcggcctctttagaaaagaacctgattccaaagctgacctcatccttacccgacgtggaggcactacgtttctacttaaccctcccagaatgccctctgatgtcggacagcaataatttcacgacgatcgccatccctttcgggaccgccctcgtcaacctcgaaaaagcaccacttaaggtgctggagaactggtggagtgtcctggagcctcccctctttctcaagatcgtggaactgttcaaggaggtggtggttcatttattgaagttgtacaaaattggcatccctccaagcgaacggaggatctttaatagcttcctgcatactgcccttaaagttctcgaaatcctgcatcgggttaacgaaaagatgggccagatcattcagtatgataaattctacattcatgaagtgcaggagctgatcgacataaggaatgactacattaactgggtccagcaacaagcatacggtatggatgtgaaccatggactgactgaattagccgatatccccgtcaccatttgcacctacccttttgttttcgacgcacaggcaaagacaaccctgttacagaccgatgcggtcctccagatgcaaatggccatcgatcaggctcacaggcagaacgtgtctagcctgttcctcccggtgatcgagtctgtgaacccctgcttgattctggtggtgaggagggagaatattgtgggagatgcgatggaggtgttacggaaaacaaagaacatagactacaaaaagcctttgaaggtgatttttgtgggagaggacgccgtcgacgccgggggagttaggaaagagttctttctgctgattatgcgcgaactgctcgatcccaagtatggcatgtttcgctattatgaggattcccgactgatctggttctctgataagacctttgaagactccgacctgttccatctgattggcgtgatttgtggtttggctatttacaattgcaccatcgttgatcttcactttccactcgcactgtataaaaaacttctgaaaaagaaaccgtctctggacgatcttaaggaactcatgccagacgtagggaggtccatgcaacagttgttggattaccccgaggatgatatcgaggagactttttgcctgaactttacgattactgtagaaaatttcggagccacagaggttaaagaactcgtgttgaatggagctgatactgctgtgaacaagcagaacagacaagaattcgtcgacgcttatgtggactatatctttaataaaagcgtagcatctctctttgatgcctttcatgctgggtttcacaaagtttgtggtggtaaagttcttcttctttttcagcctaacgaacttcaagccatggtgattgggaatactaattacgactggaaagagctagagaagaatacagagtataaaggtgaatactgggccgagcacccaaccatcaagatcttttgggaggtctttcatgaactgcctctggagaagaaaaaacagttcctgctgttcctcacagggagcgaccgcattcccatactgggtatgaaatcactgaagctggtcatccagagcaccggggggggggaggagtacctgccagtgagccacacctgcttcaacctccttgatctgcctaaatatacggaaaaggaaactctacggagcaaacttatccaggccatagatcataatgaaggattcagcctaatttag

SEQ ID NO: 23114 - DNA, 2541 bp, synthetic construct
  source 1..2541: mol_type = other DNA; note = Synthetic coding sequence
atgcccgccttcctgggcctgaagtgcctgggcaagctgtgcagcagcgaaaaaagcaaagtcacctcatcagagcggacatccgctcggggaagcaacaggaaacggctcatcgttgaagatcgccgagtctctggcaccagctttaccgcacacagacgggctaccatcactcacctcctgtacctttgtccaaaagactattgcccgagaggaagggtgtgcaattcagtggacccatttgtcgcccatccacaggatccccaccacccatccgagaagccggtgatacactgccacaaatgtggggagccctgtaagggagaggtgctgcgcgtgcagacaaagcactttcacattaagtgctttacctgtaaggtctgcggctgtgaccttgcgcagggaggtttctttatcaagaacggggaatacctgtgtacactcgactatcagcgtatgtacgggactaggtgccacggatgcggagaattcgtggagggcgaggtcgtaaccgccctgggcaaaacctaccacccaaactgctttgcttgtacaatatgcaaacgtcccttcccgccaggagaccgggtcaccttcaacggccgcgattgcctatgccagctgtgcgctcagccgatgtcttctagcccaaaggagaccaccttcagctctaactgcgccggctgcggcagggacataaaaaacggacaggcactcctggctctcgataagcagtggcacctggggtgcttcaaatgcaaatcatgcgggaaggtgttgactggggaatatatttccaaagacggcgcaccttactgtgaaaaagactaccaaggactattcggcgtcaaatgcgaggcgtgccatcagtttataacgggcaaggtgttggaagctggcgacaagcactatcacccctcctgcgcaaggtgctcccgatgcaaccagatgtttacagaaggggaggagatgtatctgcagggctccactgtgtggcaccctgattgcaagcagtccacaaagaccgaggagaagttgaggctgcccaatatacgacggagctcatctgactttttctatagtaaaagcctaataaggagaaccggacggtcccctagcttgcaacctacaaggaccagttcagagagcatttattcacgccccgggtctagcatacccggatcaccaggccacacaatatacgcgaaagtggacaacgaaattctcgattataaggatctagccgccattcctaaggtaaaggccatctatgatatcgagaggccagatctaatcacatacgaacctttctacacatccggatatgacgacaaacaggaacggcagtcactgggagagagcccccggaccctgagccctactccttctgccgaggggtaccaggatgtccgcgataggatgattcatagatccacttcgcagggaagcatcaacagtcctgtttatagtcgtcactcctacacccccaccacaagtagatccccacagcacttccatcggcctgaacttctcagcccaggagtacagcgcctgtcatatctgcggacgtcatccctgtcccccacccacagtgactctcgtccaaacccccccttcaggcatcactttatcccccacatcaaaggcaacgaaccaagctcgggcagaaattcaccactgccctataggccagactcccggcccctcacacccacatacgcccaggccccaaagcatttccatgtaccggaccagggaataaatatatataggaagcctcctatctacaagcaacatgccgcactggccgctcaaagcaagagttctgaggatataatcaagttcagtaaatttcccgccgcgcaggcccccgacccaagtgaaactcccaagatcgagactgatcattggccaggtcctcccagttttgcagtggttgggccggatatgaagcggaggtcatctggacgcgaagaggacgatgaagagcttcttcgcaggaggcaactgcaggaagaacagctcatgaagctgaatagcggactgggccagctcattctcaaggaagaaatggagaaggaatcacgcgaaagaagctctctactggcttcccggtatgattcgccaatcaacagtgccagtcatatcccttcctctaagacagccagcttacccggctacggtcgcaatggccttcaccgaccggtaagtactgactttgcgcagtacaatagttatggcgacgtgtcaggaggagtgcgagattatcagacacttcctgatggtcatatgcccgccatgagaatggatcggggggtgtctatgccaaatatgctggaaccaaagatcttcccatatgagatgctgatggtcaccaataggggcaggaataaaatactgcgagaggtggacagaaccaggttggagcgacatttagctcccgaggtgtttagagaaatctttggcatgagtatccaagagtttgatcgattgcccctgtggaggaggaatgatatgaaaaaaaaagccaaactcttttag

SEQ ID NO: 23115 - DNA, 594 bp, synthetic construct
  source 1..594: mol_type = other DNA; note = Synthetic coding sequence
atgttcggctgcctggtggccggccggctggtgcagaccgccgcccagcaggtagctgaagacaagttcgtttttgatctgcccgactacgaaagcattaaccacgttgtggtgttcatgctgggaaccattcctttccccgagggcatgggaggcagcgtttatttttcttaccctgacagtaacggtatgccagtctggcagctgctcggtttcgttactaatggcaagccatcggctatcttcaagatttctgggctgaaatccggtgaagggtctcagcaccctttcggagctatgaatattgtgcgtacaccaagcgtggcccagattggcatctccgtggagttgctagatagtatggcccagcagactcccgttggaaatgctgccgtctcctccgtggatagcttcacccagtttacccagaagatgcttgacaacttttacaattttgcttcctccttcgctgtgtcacaggcgcagatgacaccaagccccagcgagatgttcatcccggcgaacgtcgttcttaagtggtacgagaatttccagcgccggctagcgcagaatccattgttctggaaaacatag

SEQ ID NO: 23116 - DNA, 930 bp, synthetic construct
  source 1..930: mol_type = other DNA; note = Synthetic coding sequence
atggtgttccccgccaagcggttctgcctggtgcccagcatggagggcgttaggtgggcatttagttgtggcacatggctcccgtcccgggctgaatggctgctggctgttaggagcattcaacccgaggagaaggaaagaatcggccagtttgtttttgcaagagacgccaaagccgctatggccggccggctgatgattcgcaagcttgtcgctgagaaacttaatattccctggaaccatataaggctgcagaggactgccaaaggtaaacctgttctcgctaaggatagcagcaatccatatcccaactttaattttaacatctcccatcagggggattatgccgtcctggccgccgagcctgaactgcaggtggggatagacattatgaagacaagcttccccggaaggggaagcatccccgagtttttccacattatgaagcgaaaattcaccaataaggaatgggagactattaggtcctttaaggatgaatggacgcagttagacatgttttaccgcaactgggcactgaaagagtcattcattaaagctatcggcgtgggcctgggattcgaactgcagcgcctcgagtttgatctcagccctttaaacctggatatcggccaagtctacaaagaaacccggctcttcctggatggtgaggaggagaaggaatgggctttcgaggaatctaagatcgatgagcatcatttcgtggcggtcgcgctaagaaaaccagacggaagccgacatcaagacgtgccgagccaggatgattctaaacctacacagaggcagtttacaatactgaattttaatgacctgatgtcctcggccgtccccatgacacctgaggatccatccttctgggactgtttttgtttcacagaagaaatcccaatcagaaatgggactaaatcttag

SEQ ID NO: 23117 - DNA, 1599 bp, synthetic construct
  source 1..1599: mol_type = other DNA; note = Synthetic coding sequence
atgcagagctgcgagagcagcggcgacagcgccgacgaccccctgtctaggggccttagacggcgtggccagccaagagtcgtggttattggggctggcctggccggactagccgctgccaaagccctgcttgaacagggattcaccgacgtgaccgtgctggaagcctccagtcacattgggggtagagtccagagcgtgaaactggggcacgcaacctttgagctcggagctacttggattcacgggtctcacggtaaccctatttatcaccttgccgaagcaaatggactgctggaggagactactgatggagagcggtcagtgggaagaatcagcttgtactcaaagaacggagttgcttgttatctgacaaaccatggcagacgcatcccaaaggacgttgtggaggagtttagtgacctctataatgaggtctacaatttgacgcaggaatttttcaggcatgataaaccggtgaacgcagaatcacaaaactcagtcggagtattcacgcgagaagaggtgaggaatcgaattagaaatgaccccgacgatcccgaggctactaagcgtctgaaactcgccatgattcagcagtacctaaaagtggagagctgcgagtcttcaagccactctatggacgaggtcagtctgtccgcattcggtgagtggaccgagattcctggggcccatcacatcatcccatccgggttcatgcgtgtcgtggagctcctagccgaggggatcccagcacacgttatccagctgggtaaacccgtgcgatgtatacactgggaccaggctagtgccagacccagaggtcctgaaatcgagcctagaggcgtcttgaaaaggcagtatacctctttctttcgcccaggtctgcctacggagaaagtggccgccatccataggctcgggattggtactaccgacaagatcttcctggagttcgaggaaccattttgggggcccgagtgtaatagtctccagttcgtctgggaagatgaggcagagagccacacattaacataccctcccgaactctggtatcgaaagatatgtggctttgacgtcctgtatccccctgagcggtatggacacgtgttgagcggttggatctgcggagaagaagcacttgtcatggagaaatgtgacgacgaggccgtagccgaaatatgtaccgaaatgcttcgtcaattcacgggaaatcccaatatcccaaagcccaggaggattctcaggagtgcttggggatcaaacccctacttccgagggtcatactcctacacacaggttgggtcatcaggggcagatgtggagaagttggcaaagcctctgccttataccgagtcaagtaaaactgcacacggatcctccactaagcagcagccaggacatctgttttcttccaagtgtcctgagcaaccgctcgacgcaaataggggtgcggtcaagcccatgcaagtgttattctcaggagaagcaacacaccgcaaatactattccacaactcatggggcgctcctcagcggccaacgtgaggccgctcggctgatcgagatgtaccgagatctgttccagcaaggcacctag

SEQ ID NO: 23118 - DNA, 2349 bp, synthetic construct
  source 1..2349: mol_type = other DNA; note = Synthetic coding sequence
atggacagcagcatccacctgagcagcctgatcagccggcacgacgatgaggcaactagaaccagcactagcgagggcttagaagaaggcgaggtggaaggtgaaaccctgctgattgtcgaatctgaagatcaggccagtgtggatctgtcacatgatcagtccggagattcactgaacagtgatgaaggcgatgtctcttggatggaagagcagttgtcatatttttgcgacaagtgccagaaatggatccccgcctctcagttaagggagcagctgagttacctgaagggagataacttcttcaggttcacttgttccgattgcagcgcagatggtaaagagcagtacgaacggcttaagctgacctggcagcaggtcgtgatgctcgccatgtataacctgtctcttgagggaagcgggcgacaggggtacttccgatggaaggaggacatttgtgctttcattgagaagcactggactttcctactgggcaaccgcaagaagacttccacctggtggtccaccgtggccggctgcctgtctgttgggtcgcccatgtacttccggtcaggtgcccaggagttcggggaaccgggttggtggaagctcgtgcataataagccacctactatgaaacctgagggagaaaagctcagcgccagcacccttaagataaaagctgcgagtaaacccacacttgatccaatcattaccgtggaaggccttcgtaagagggcatcgcgcaacccagtggagtccgctatggaacttaaggagaaacgatccaggacacaggaagctaaggacatcagaagggctcaaaaagaagccgccggtttccttgatcggtccacctcttctacaccagtaaaattcattagcagagggcggcgccctgatgtcatcctggaaaagggggaagtgattgacttttctagcctgagcagttccgatcgtactcccttaacgtcccccagtccctcgccatctctcgacttttctgcccctgggaccccagcctctcatagcgcaacacccagcctgctgtcagaagctgatctgatccctgatgtaatgcctcctcaagccctctttcacgacgacgacgagatggagggcgacggggtgatcgaccccggaatggaatatgtaccgccacctgccgggtccgtggccagcggccctgtagtgggggtccgtaaaaaagtgagaggacctgagcaaattaaacaggaggttgaatccgaggaagaaaagcctgatcgtatggatatcgatagcgaagataccgacagcaacaccagtctccagacaagagcaagggagaaacgaaaaccccaattggaaaaggataccaaacctaaagagccccgatacaccccggtgtcgatttacgaggagaaattgctccttaagagactggaggcttgcccaggggcagttgccatgactcccgaagcccgccgactcaagaggaaattgattgtccgacaagccaagcgcgataggggtcttcccctgtttgatctcgatcaggtagtcaacgccgcactgctgctggtggatggaatttacggggccaaggagggcggaatcagtagactgcctgcaggtcaagctacatatcggaccacctgccaggacttcaggattttggacagatatcagacctccctgccttcccgtaagggattccgccatcagacaactaaattcttgtaccggttggtcggatccgaggacatggctgttgaccagagtatcgtctctccttatacaagcaggatcttgaagccttacataagaagggactacgaaactaagccacccaagctacagctgctgtcgcagatccggagtcatctgcaccgctctgacccacactggacgcctgagcctgatgcccccctagattactgctatgtgcggcctaatcacattccaacaataaattcaatgtgccaggagttcttttggcctgggatcgatctttctgaatgcctgcagtatccagacttctcggtcgtagtattgtacaagaaggtcattattgcctttgggttcatggtgccagatgtaaagtacaacgaggcgtatattagcttcttgtttgttcaccccgaatggaggagggccggtatcgcaacttttatgatttatcatctgatccagacctgcatgggtaaagacgtgacgttacacgtgagcgcgtctaaccccgccatgctactttatcaaaagtttggctttaagactgaggagtatgttctagacttctacgataaatactaccccttggaatcaaccgaatgtaaacacgccttcttcttacgactcaggcggtag

SEQ ID NO: 23119 - DNA, 2745 bp, synthetic construct
  source 1..2745: mol_type = other DNA; note = Synthetic coding sequence
atgggcaccaccgcccccggccccatccacctgctggagctgtgcgaccagaaactgatggaattcctgtgcaacatggacaacaaagatctggtctggttggaggaaatccaggaggaggcggaaaggatgttcacacgggaattttccaaagagcctgaactgatgccaaaaacccccagccaaaaaaaccgccgcaaaaaaagacggatcagttacgtgcaagacgaaaacagggatcctatccggcggagactttcccgtagaaagagtcggtcatcacagctgagtagccgcagactgcggtctaaggattcagtggaaaagcttgccaccgtggttggcgagaatggatccgtattacggcgcgttactcgcgccgcagcagctgcagccgccgctaccatggccctggccgccccatcatcacccacacccgaaagtcccaccatgctgactaagaagcctgaggacaaccacactcaatgccagttggtgccagtcgtggagatcggtatttcagaacggcaaaacgccgagcaacatgtgacccagctgatgagcaccgagccattgcctcgaaccttgtctcccactccagcgtcagcgacggccccaactagtcagggcatacctacaagtgacgaggaaagcacccccaaaaagtccaaagctcggattctcgagagcattacagtttctagtctgatggcaacccctcaggaccctaaaggccagggggtggggaccggccgctccgcatcaaagcttagaattgcacaggtgtctcccgggccccgggattcacccgccttcccagattctccttggcgagagcgcgtgcttgctcctatcctgccggataacttttccacaccgacaggaagtcggactgattcccagagtgtgcgccattcaccaatcgcacctagtagcccaagccctcaggtgctggcccagaaatacagcttggtagccaagcaggagagcgtcgtgcgtagggcttcaagaaggctggcgaaaaagacagccgaggagcccgccgcctcaggcaggatcatttgccacagttacctggaaagactcctgaacgtggaagtcccgcagaaggtgggctccgaacaaaaagagcctcctgaagaagcagagcctgtggcagcggcagagccagaggttccagaaaacaacggaaataatagctggccacacaacgatactgagatcgctaattccacccccaacccgaagccggccgcgtcttcccccgagactccatcagctggacagcaagaagccaagaccgatcaggccgacggccctcgggagcccccacaatccgcaaggcggaaacgcagttacaaacaagccgtctcagagcttgacgaagaacagcatctggaggatgaggagctgcagcccccgcggtctaagacaccgtcttccccctgtcccgctagtaaggtcgtccggcccctgaggacttttctgcatacagttcagcgaaaccagatgctgatgacacccaccagcgcaccccgcagtgtgatgaagtctttcatcaagcgaaacactcccctgagaatggatccaaaagagaaggagcggcagaggctggagaacctccgtcggaaggaagaggccgagcagctcagaaggcagaaagtggaggaggataaaagaagacggctggaggaggttaaactcaaacgggaagaacgattgagaaaagtcctccaagcacgcgagcgggtcgagcaaatgaaagaagaaaagaagaaacagattgaacaaaaatttgctcagatagatgagaagacagagaaggccaaagaagagagactggcagaggagaaggctaagaagaaagccgccgccaagaagatggaggaggttgaggcccgccggaaacaggaagaagaggcaaggagattaagatggctgcagcaagaggaggaagaacggcgacaccaggaattgcttcaaaaaaaaaaagaggaggagcaggagcggcttcggaaagctgctgaggcaaaaagattggccgagcagcgcgagcaggagaggcgggagcaggagaggagagaacaggaacgacgggaacaagagcggagggagcaagagagaagagaacaggaacggcaactagcggaacaagaaaggagaagagaacaagagcgccttcaggccgaacgcgagctgcaggagagggagaaggccctcagactacaaaaggagcaactgcaaagagaactcgaggaaaaaaagaagaaggaggaacagcagcgcttggccgaacgccagttgcaggaggaacaggagaagaaggctaaggaggctgccggggcctcaaaggcacttaatgtgaccgtcgatgttcaatcccccgcatgcaccagctaccagatgacaccccaaggtcatcgtgccccacccaagatcaaccctgacaactacggcatggacctcaactcagatgattccacagatgatgaagcccaccctagaaagcctatccccacatgggcccgcggaactccactctcgcaggcaatcattcaccaatattatcacccccctaaccttctcgaacttttcgggaccattttgccccttgatctggaagacatctttaagaagtcgaaacccaggtaccacaagagaacatccagcgcggtgtggaactccccgcccctgcaaggcgcccgggttcccagctctctggcctactccctgaagaaacattag

SEQ ID NO: 23120 - DNA, 4149 bp, synthetic construct
  source 1..4149: mol_type = other DNA; note = Synthetic coding sequence
atggacgaggaggagaaccactacgtgagccagctgcgggaggtgtatagctcatgtgacacaaccggcactggtttcctggacagacaggaacttacgcagctctgcctcaaacttcacctggagcagcagctgcccgttcttctccaaacactcctgggcaacgatcatttcgcgcgcgttaattttgaggagttcaaagagggctttgtggctgtactatcttcaaatgccggcgttcgacccagcgacgaggattcctctagcctggaatctgccgcgtcctccgcaatccccccaaaatacgtcaacggctccaaatggtatggcagaaggtcacggccagaattgtgcgacgccgcaaccgaagctcggcgcgtgccagaacaacagacacaggcttccctgaagtctcatctttggagatcggcaagccttgagtctgtcgagagccccaaatccgacgaggaggctgagagtactaaggaggcacagaacgagttatttgaggcacagggccagctccaaacctgggactccgaggattttgggtcaccccaaaaatcatgctcgcctagcttcgacacacctgagtctcagatccgcggtgtatgggaagaactgggcgttggttccagcgggcatctcagtgaacaagaactcgccgtggtgtgtcaaagtgtcggcctgcagggacttgagaaagaagagctcgaggatctgttcaataagctcgatcaagacggcgacggcaaagtaagcctggaggaattccaacttgggttgttttcacacgagcctgcgctcctacttgagtctagtacccgcgtaaaaccttcaaaagcctggtcacattaccaggtccctgaggaatccggctgccacactaccacgacatcctcactcgtgtccttgtgttcgtctctcaggctgttctcctcaatcgacgatgggtccggctttgcttttccggatcaagtgctggctatgtggacacaggaagggatccagaacggcagagaaattcttcagtccttggacttttcagtggacgaaaaggtgaaccttcttgaactgacctgggccctcgacaacgaattaatgaccgttgattccgcagtgcagcaggccgccttggcctgctatcaccaggaactgtcgtatcagcagggacaggtggaacaactcgctcgtgagagagataaagcccgccaggatctggagagagcagagaagcgcaacctcgagttcgtgaaggagatggacgactgtcatagcaccctcgagcagctgaccgaaaagaaaatcaagcacttggagcagggctacagagagcggctgtctctgttgcggtcagaagtggaggctgagcgggagctcttttgggagcaagctcaccgacagcgggccgcgttagaatgggacgtaggtcggctgcaggcggaggaagcagggttgcgagagaagctgacacttgcactgaaggaaaattcgcggctgcagaaggaaatcgttgaggtggtggagaaactctccgacagtgagcggctggccctgaaacttcagaaagacctcgagttcgtacttaaggacaaactggaaccacaatcagccgagttactggcacaggaggagagattcgctgccgttctcaaggagtatgagctgaaatgtcgggatctgcaagatcggaacgatgagcttcaagccgaattagaagggctgtgggctcggctgcctaagaacaggcacagtccaagttggtcacccgacggtcggaggagacagctgcccggactgggccctgccggaatatccttccttggcaactcggctcctgtgagtattgaaacagaacttatgatggagcaggtgaaggaacactaccaggatcttcggacccagttggaaactaaagtcaattactatgagagggagattgctgcactgaagcgcaactttgagaaggagcgaaaggatatggaacaagcccgtcggcgtgaggtatccgtgctggagggccagaaggccgatctggaggagctgcacgaaaaaagccaggaggtgatttggggcctgcaggaacagttacaggatacagcccgggggcccgagcctgaacaaatgggcctggctccatgttgtacacaggctctgtgtgggctcgccctgcgtcatcacagtcacctgcaacaaattcgacgcgaagccgaggccgagctctctggggagctgagcgggttaggggctctgcctgccaggagggacctgaccctggaactggaggaaccaccacagggacctctccccagggggtcccagaggagtgagcagctcgaacttgaaagggccttaaagcttcaaccatgcgcttccgagaagcgagcgcagatgtgtgtctctctggctctcgaagaagaggagctagaattagccagaggtaagagggtggacggaccctccctggaggccgaaatgcaagccctccctaaggatggtctggtggcaggctctggtcaggagggtactcgcgggctgttgccactgagaccaggttgcggcgagcgtccgttggcgtggttggcccccggcgatggcagagaaagtgaagaggcagccggtgcaggccccagacggagacaggcccaggacactgaagctacacagagccccgcccccgctcctgcgcccgccagccatggcccctctgaacgctggtcacggatgcagccttgtggggtagacggtgacattgtgcctaaggaacccgaaccatttggcgctagtgcggccggccttgaacagccaggcgcccgggagctgcccctgctgggcaccgaaagagacgcctcacagacccagccacggatgtgggagccgccattgcggcccgcagcctcatgccggggtcaggctgagaggctgcaagcaatccaggaggaacgcgcccgctcctggtcacggggcacccaggaacaggcctccgaacaacaagcccgcgcagagggtgcactggaacctggctgccacaaacactcagtggaggttgcccgcaggggaagtctgccctctcatcttcagctggccgaccctcagggttcatggcaggagcagttggcagcccccgaggagggagagacaaaaattgcgctggagcgggagaaagacgacatggagacaaagctgcttcaccttgaggacgtcgtgagagcactggagaagcatgtcgacctgcgagagaacgacaggctggagttccaccgactgtcagaggagaatacgctgctgaaaaatgatttgggaagagtgaggcaggagcttgaagcagcggaatccacacacgacgcacagcgcaaggaaattgaggtgctcaaaaaggataaagagaaggcatgtagtgaaatggaggttctcaaccgccagaatcagaattataaggaccagctgagccagctgaatgtgcgagttctccagcttggtcaggaagccagcacccaccaggctcagaacgaagagcacagagtaaccattcagatgctgacccagtctctagaggaggtcgtgcggtccggccaacagcaatccgaccagatacagaagttgcgcgtggagttggagtgcctcaaccaagaacatcagtctttgcaactgccttggtcagaactgactcagactctggaggagtctcaggatcaggtgcagggggcgcatctcaggcttcgtcaggcacaggctcagcatcttcaggaagtgaggcttgtgccacaagacagagttgccgagttgcaccggctcctcagcctccaaggagagcaggctagaagacggttggatgcacagagagaagagcatgaaaaacagctgaaagccaccgaggaacgagtggaggaagcagaaatgattcttaaaaacatggaaatgctgctccaagagaaggttgataagctgaaggaacaattcgagaagaatacgaaaagtgacctactgctcaaggaattgtatgtcgagaatgcccacctggtcagggccctgcaggctacggaagagaagcaacggggggctgagaagcagtctaggctgctcgaggagaaagtgagggcattgaataaactcgtttctagaattgctcctgccgctctcagcgtgtag

SEQ ID NO: 23121 - DNA, 4383 bp, synthetic construct
  source 1..4383: mol_type = other DNA; note = Synthetic coding sequence
atggccggccggcccctgcggatcggcgaccagctggtgctggaggaggactacgacgagacctatattccttctgagcaggagatactggaatttgccagagagattggaattgatccgattaaggaaccagagcttatgtggctggccagggagggtattgtcgcacccctgcctggcgagtggaaaccgtgtcaggatatcactggagatatttattatttcaactttgcgaacggtcagagcatgtgggatcatccctgtgacgaacattaccgctccttagtcatccaggagcgcgcaaaattgagcacttccggcgccatcaagaaaaaaaaaaaaaagaaagagaagaaggacaagaaagacagagatcctcctaaatcgagcttagctcttggctcatccctggcccctgtccacgtccctcttggcggactggcccctctgcgagggctggtggacactccaccaagcgcgttgcgcggctcccagtcggtctctttgggaagttctgttgaaagcggtaggcaactcggcgaactgatgctgccttcacagggcttaaagaccagcgcttatacaaaagggctgctgggatcgatatacgaggacaagaccgcactgagcttgctcgggctcggggaggagaccaatgaggaggatgaggaggagtccgacaatcagtctgttcatagctccagtgagccactacgcaatctgcaccttgatatcggcgcactgggaggggactttgagtacgaggaatccctacgtacatcccagccagaagaaaagaaggatgttagcctggacagtgacgccgctggacctcccacaccctgtaagccctcctcacccggcgccgattccagcctctcgtccgccgtgggcaagggtcgtcaaggcagcggcgctagacctgggctgccagagaaggaggagaatgaaaagagcgagcctaaaatctgtcggaacttggtgacacctaaagccgatccgaccggaagcgaaccagctaaggcctctgagaaagaggcacccgaggacaccgtggatgccggagaggagggctcacgaagagaggaggcagctaaagagcctaaaaaaaaggcaagcgccctggaagaagggtctagcgacgcgagtcaggaactggaaatctccgaacatatgaaagaaccccaattaagtgattcaattgcatccgaccctaagagctttcacgggcttgatttcgggttcaggagccgaatctcagagcatctcctggacgtcgacgtgcttagccctgtcttagggggagcttgtcgacaggcgcaacagccactggggattgaggataaagatgactcccaatccagtcaggacgaactgcagtccaagcagagcaaaggactggaggagcgtctgtctcccccgttaccccacgaggagcgggcccagtctccacctaggagcctggccacagaagaggagcccccacagggccctgaaggtcagccggaatggaaggaggcagaagagttgggtgaagactcagccgcttctctgtccctccagttgtctttgcaaagggaacaggcgcccagcccacccgctgcctgtgagaagggcaaggagcagcactctcaggccgaagagctaggcccgggccaggaggaggccgaagaccccgaggagaaagtcgccgtctctccaacaccgcccgtgagcccagaggtgagaagcaccgaaccagtcgcacccccggaacagctatctgaagccgcacttaaggcgatggaggaggcagtggcgcaagttctggaacaggaccagcgtcacctcctggaaagcaaacaggagaaaatgcagcaacttcgtgagaaattgtgtcaggaagaagaggaggagatcctgcggctccaccagcagaaagagcagagtctgtcaagcctgcgcgagaggcttcagaaagccatcgaggaggaggaggcacgaatgcgggaagaggaatcacaaagattgtcctggctcagggcccaggtacagagctctacgcaggccgatgaagaccagatacgtgccgagcaagaggcatccttgcagaagttgcgcgaagaactagagtcgcagcagaaagccgaacgcgcatctttggaacagaagaataggcagatgctcgaacagctgaaagaagagatcgaagcctctgagaagagtgagcaggcagctctgaatgccgccaaagagaaggccctgcagcagctgagagaacagctggaaggtgagcgcaaggaggctgtggcaactctggagaaagaacattcagccgagctggagcggctgtgttcaagcctcgaagctaagcaccgggaggtcgtgtcttcgttacaaaagaagatacaggaagcccaacagaaggaggaggctcaattgcaaaaatgtttgggccaggtcgagcatcgtgtgcaccagaagagctatcacgtggccggatacgagcatgagctaagttcccttctgcgggagaaacggcaggaagtggaaggagagcatgagcgacgtctggacaaaatgaaggaggaacatcagcaagtcatggcaaaggccagggagcaatacgaggctgaagaaagaaaacagagagccgaattgcttggccacctgaccggggaactggagcggctccagcgtgcccatgagcgcgagctggaaacagtacggcaggaacagcacaaaaggttagaagatcttcgcagacggcacagggaacaggagcgcaaattacaggatctggagctggatttggaaactcgggccaaggatgtgaaagcgcgccttgccctcttagaggtgcaggaggagacagcccgacgagagaagcaacaattgctagacgtacagcggcaagttgcactgaagagcgaggaagccaccgccacacaccagcagctggaagaagcccagaaggagcacacgcacttactgcagagtaaccagcagctacgcgagatcttggacgaattgcaggctaggaaattgaagctcgagtcacaggtagacctgttgcaggcgcagtctcaacagcttcagaaacatttcagcagcctggaagccgaagcccagaagaagcagcaccttctgcgcgaggtaacagtcgaagagaataatgcctctccccacttcgaacccgatcttcatattgaagacctccggaagagtcttggtactaatcaaacgaaagaggtgtcctcctcattgtcacagtctaaagaggatctatatctggattctctctctagccacaatgtctggcatcttctgagcgctgagggagtagccctgcgttcagccaaagaattcttggttcagcaaactcggtctatgcggagaagacagaccgctttgaaggcggcccagcagcactggagacacgagctagcttccgcccaggaggtggctaaggatccacccggaattaaggccctagaagacatgcgaaagaatctggagaaagagacgaggcacttagatgagatgaaaagcgccatgagaaagggtcataaccttctgaagaaaaaagaagaaaaactcaaccagcttgaatcttcactctgggaggaggcctctgacgagggaactttaggcgggtctcccacaaaaaaggctgtcaccttcgacctatccgatatggattctctgtcctcggagtcctcggagagtttcagcccacctcatagggagtggtggcggcaacaacgcattgacagcacacccagcctgacatcacgcaagatacacggcctatcccacagtttgcgccaaatcagctctcagttatcctctgttctgagcattctggatagtctgaacccacagtctccgcctcctctactcgcatccatgccagctcagctgccacctagggacccgaagtctactccaacaccaacctactatggctcactggcgaggttttcagctctcagcagtgcgacacctaccagtacgcagtgggcttgggattccgggcaaggccctcgactgccctcctcagtggcccagaccgtagatgactttcttctcgaaaagtggcggaagtactttcccagcggcatcccacttctgtctaattcgccgactcctttagagtctagacttggatacatgtcagccagcgagcaactccgcttgctccagcattcccattcccaggtacccgaggctggcagcaccacctttcagggtatcattgaagccaatcgtcgctggctggagagggttaagaacgatcctaggctaccactgttctcttccacaccaaagcccaaagcaaccctgtcgctactccaactgggcctcgatgagcacaatcgcgtgaaggtgtaccggttctag

SEQ ID NO: 23122 - DNA, 1881 bp, synthetic construct
  source 1..1881: mol_type = other DNA; note = Synthetic coding sequence
atgatggccaacgacgccaagcccgacgtgaagaccgtgcaggtgctgagagacaccgcaaatcgactcagaattcactcgattcgcgcaacttgcgcctcgggttccggacaacttacttcgtgctgcagcgcggctgaggtggtatccgtgctgtttttccatacaatgaaatataagcaaacggacccagaacaccccgacaacgatcgttttatcctttcgcgggggcacgccgcccccatcctgtatgctgcttgggtggaggtgggggatatcagcgagagtgacctgctaaatcttcggaaactccatagcgacttggaacgacaccccaccccccgactgccctttgtcgacgtggcaaccggctccttagggcaggggctcggcaccgcgtgtggaatggcatatacgggtaagtacctggacaaggcatcctatcgggtcttctgtctcatgggggatggtgagtctagcgagggctcggtgtgggaggcgttcgcatttgcatctcactacaaccttgacaacctcgtggcagtttttgacgtcaataggctaggacagagcggacccgcccccctggaacacggagccgatatctaccagaattgttgcgaggctttcggctggaatacgtatctcgtcgacggacatgatgttgaagccttgtgccaggccttctggcaggcgtcccaagtgaaaaacaagcccacagctattgtcgccaaaactttcaagggccgcggtatacctaatatcgaggacgcggaaaattggcatggcaaaccagtgccaaaagaacgcgcagacgctattgtcaagctcatcgagtcgcagatccagactaacgagaacttaatccctaaatcacccgtggaagattccccgcagatcagcataacggacataaaaatgactagcccccccgcctataaggtaggggataagatagccacccagaaaacttatggattagctttggctaagctgggcagggcaaacgagcgcgtgatcgtattatccggtgacacaatgaactcgacattttccgagatcttccgcaaagagcatccagaacgatttattgaatgcatcatagccgagcaaaatatggttagcgtggcgctcggatgtgccacaagaggccggaccattgcttttgcgggcgcattcgccgcctttttcaccagggcattcgatcagttacgcatgggtgcaattagccaggcaaacattaacctgatagggtcccactgtggagtgagcacaggcgaggacggcgtaagccagatggccctcgaggatttggccatgttccggtctatcccgaattgcaccgtcttttacccaagtgacgccatcagcacagaacacgccatctacctggctgcaaatactaagggaatgtgtttcatccgtacaagtcagcctgaaactgctgttatttacacaccccaggagaatttcgagatcggacaggccaaagtggtccggcacggcgtgaacgataaagtcacagttatcggggccggcgtcactctgcatgaagctttggaggcagccgatcatctgtcccagcaaggcatctccgtccgggtgattgaccctttcactatcaagcctctcgacgccgctactatcatctccagcgcaaaggccacgggcggcagggtcattaccgtcgaggaccactatcgggagggaggaatcggtgaggctgtctgtgctgcagtgagccgagagccagatatcctggtccaccagttagccgtgagcggcgtgccccagcgcggaaagacctcagagctcttggacatgtttggcatatctactagacacattatcgcagcggtgacattgacgctcatgaagtag

SEQ ID NO: 23123 - DNA, 999 bp, synthetic construct
  source 1..999: mol_type = other DNA; note = Synthetic coding sequence
atggccaccatcaagagcgagctgatcaagaacttcgccgaggaggaggctatccatcataacaagatcagcattgtgggaacagggtccgtgggagtggcatgcgctattagcattctcctaaagggcctgtccgatgagcttgtgctggtggatgtggacgagggcaaattgaaaggagagactatggaccttcagcatggctcgccattcatgaaaatgccgaacattgtttcctcaaaggactacctagtgactgccaactctaatctcgtgattattactgccggcgcgcgccagaagaaaggcgagactcggttggatttagtacagcgtaatgtgagcatctttaaactcatgattccaaacatcactcagtattctccccattgtaagctcctcattgtcaccaacccagtggatattctgacttacgtagcctggaagctctcaggttttccaaagaaccgcgtaatcggcagcgggtgcaatctggattcagccaggtttcggtacttcattggacagaggttgggcattcacagcgagagctgccacggcctaattctgggagaacacggggacagttctgtgcctgtgtggtccggggtgaacatagctggcgtacctctcaaggatcttaatcccgacattggcaccgacaaggacccagagcagtgggaaaatgtccataagaaggttatttcttccggctatgagatggtgaaaatgaaaggatacactagctggggcatctcactgagcgttgccgatctgacagagagcattctgaaaaatctgcgaagagtgcatcccgtcagcaccctgtccaaaggactatacggtattaacgaagacatcttcttgagtgttccatgcatcctgggggagaatgggattactgacttaattaaagtgaaactgacccttgaagaagaggcgtgtcttcagaagtccgccgagacactctgggaaatccaaaaagaattaaaactgtag

SEQ ID NO: 23124 - DNA, 972 bp, synthetic construct
  source 1..972: mol_type = other DNA; note = Synthetic coding sequence
atgcccgagatgcccgaggacatggagcaggaggaggtgaacatcccaaaccgtagggtgctagttaccggggccactggtcttctagggagagcagtgcacaaggagttccagcaaaacaactggcatgccgttggctgcggattccggagagctagaccaaaattcgagcaagtaaatctcctcgactcaaacgcagtccaccatatcattcatgactttcagccccacgtaatcgtgcattgtgcagctgagcgaagaccggacgttgtcgaaaaccaacctgatgccgcatcccaacttaacgtcgacgccagcggcaacctcgctaaagaagccgcggctgttggtgcttttctgatttacatttctagtgattatgtgttcgatggcacgaaccctccttatcgtgaggaagacatccctgcccccctgaatttgtatggcaagaccaagctggacggtgaaaaagccgtcctggagaataacctgggcgctgctgtgcttaggattcctattctctacggcgaggtagagaaattggaagaaagcgccgtgactgtgatgttcgacaaggtacaatttagcaataagagtgccaatatggatcattggcagcagcgattcccaactcatgttaaggatgtggcaacagtttgcaggcagttagcagaaaaacgcatgttagatccgtccattaagggtaccttccactggtctggcaatgagcagatgaccaagtatgagatggcctgcgccattgcagatgcatttaatctcccctcctctcatctccggcccatcacggattctccagtgctcggagcccagcgtccaagaaatgcccaacttgattgttccaaactggagactttaggtataggccagagaacgccgttccgcatcgggatcaaagaatccttgtggcctttcctgattgataaacgctggcgccaaaccgtgttccactag

SEQ ID NO: 23125 - DNA, 3285 bp, synthetic construct
  source 1..3285: mol_type = other DNA; note = Synthetic coding sequence
atggccgagagcagcagcgagagcgaccacttccggtgccgggaccggttgtccccttgggccgcaaggagcacccacagagggacccgcagcttgcccacagtagaggtgaccgaaaaagtgaacaccataacgtcgaccctccaggatacatccaggaacctccgacaagtggaccagatgctggggcgttatcgagagtattccaatggtcaggcaggtgctatcgagcatctgaaagagtccctcgaacaatcgatagaccagctccgatcccagcgtctgctgagaaacagcggtgggagatccatctctgtgacatccctgtccgcgagtgatctcgacggtggcaccgggagtgagctgcatcattttccccctaccagcccattaaaggactacggtgacccacaaggcatcaaaagaatgcggtctagaactggcgtgcggttcgtgcaagagaccgatgatatgacacagcttcacggatttcaccagtctttacgagacctgagttctgagcagataagactcggcgatgatttcaatcgcgagctgagccgtcgctccaggtccgacgcagagactaaacgagctctggaagagcttacagagaagcttaatgaggcgcagaagcaggaagtggtgtccgatagagttgagcggcggctgcaagagcttgagcgcgagatgcgcaccgagcgcgagctggtagagcgtcgacaagaccagttgggcctgatgagtctccagttgcaggaagcccttaaaaagcaggaagccaaagcagatgaacacgaaggcgcgatcaaaaacaagctgcggcagaccgagaccgaaaaaaatcagttagagcaggagctcgagttgagccgcagactgctcaaccaatcggagggtagtagagaaacactgctgcaccaggtggaggagctgcgcacccagttgaccaaggccgaaggggatagaaaaggtctgcagcatcaggtgagtcagatatccaaacagcagagcaattatcaggatgaacaaggggaggattggcgctttagacggggagtggagcgagaaaaacaagatttggagaaacagatgagcgacctgcgcgtacagctgaatttcagtgccatggccagtgaactggaagaggtgaaaaggtgtatggagcggaaagataaggagaaggcacacctggcgtcacaagtggagaacctaacacgcgaactagagaatggggaaaagcaacaactgcagatgctagatagattaaaggaaatacagaatcacttcgacacatgtgaggcagagaggaagcacgccgatttacagatttcagaattgacgaggcatgcagaggatgccaccaagcaggctgagcggtatttgtccgaactgcagcagagcgaggctctgaaggaagaggccgaaaaacgccgggaggaccttaagctaaaagcacaggagagcatcaggcagtggaaacttaagcacaaaaagctcgaaagggctctcgaaaagcagagcgaaacagtagacgagttaactgggaaaaataatcagatcttgaaagaaaaggatgagctgaaaacacagctctatgccgcactccagcaaatcgagaatctgagaaaggaattaaacgatgtgcttaccaaacgggccctccaggaagaggaactacattccaaggaggagaagctgagggatatcaagtcccaccaggctgaccttgagctggaggtgaagaacagtctagatacaatccacagactggagtcagagctgaaaaagcagtcgaagatacagtcccagatgaaagtggagaaagcccatctagaagaggagatcgccgaattgaaaaagtctcaggcacaggacaaagccaagctgctcgagatgcaggagtccattaaagatctgagtgctattagagcagatcttgccaacaagctcgcagaagaagagcgggccaagaaggctgtactgaaggatctgtccgacctgactgcccaggcaaagagccgcgacgaagaaaccgccactattattacacagttgaagcttgagagggacgtgcaccagcgggaattgaaggatctcacctcatctttgcaaagtgtcaaaactaagcacgaacagaatattcaggaactcatgaagcatttcaaaaaggagaagtccgaggcagagaatcatatcagaaccctgaaagcagaatcgctggaggaaaaaaacatggccaaaatccaccgaggacaactggagaagcttaaaagccagtgtgatagattgacagaggaactaacacagaatgagaatgaaaacaaaaagcttaaactaaaatatcagtgcttaaaggatcagttggaagagcgagagaagcatatttctatcgaggaggaacacctacgacgaatggaagaggcccgcctgcagctgaaggaccagctgctgtgcttagagactgagcaagaatctatcctaggtgttattggaaaggaaattgacgcagcttgcaagacatttagcaaggactccgtggagaaactcaaggtgttttcaagcggacccgacattcattacgacccacacagatggctggccgagtccaaaaccaagctacagtggctgtgtgaggaactgaaggagagagagaatcgcgagaaaaatctgcgtcaccagctaatgctctgccggcagcagctacgaaacttgaccgagaataaagaatctgagcttcagtgcttattccaacagatagaacgtcaagaacagctattggatgaaatacatcgggagaaaagagatttattggaggagacccaacgtaaggatgaggagatggggagcttacaggatagggtgatagcactcgaaacatctacccaggtcgctctggaccacttggagagtgtaccagagaagctgagcctgctggaagacttcaaagacttccgtgattcttgttcaagcagtgagcgcactgatggtcggtatagcaaataccgcgtgaggcggaacagcctgcagcaccatcaggatgacacgaagtatagaacaaaatccttcaaaggggacagaaccttcctcgaaggaagtcacacaagaggcttagatcatagctctagctggcaagaccacagcaggttccttagcagccccaggttcagctacgttaatagctttacaaagcgtaccgtggctccagactcagccagcaacaaagaagatgctacgatgaacggcacttccagccagccgaagaaagaagaatacggttcctag

SEQ ID NO: 23126 - DNA, 1011 bp, synthetic construct
  source 1..1011: mol_type = other DNA; note = Synthetic coding sequence
atgaagaaggagcacgtgctgcactgccagttcagcgcctggtaccccttttttaggggagtgacaataaagagtgtcattctacctctcccacaaaacgtgaaagattacctcctggacgatggcaccttggttgtcagcggcagggacgatccacctacccacagtcagcccgacagcgatgacgaggccgaagaaattcaatggagtgatgatgagaataccgctacattgacagctcccgagttcccagaattcgccaccaaagtccaggaagccattaattccctggggggaagcgttttccccaaactgaattggtctgcccctcgggatgcctattggattgccatgaattcctccctgaagtgtaaaaccctctccgacatcttcctgctctttaagtcctctgatttcatcactcgcgacttcacccagccctttatccactgcacagatgattcaccggacccgtgtatagagtatgagctggtgctccggaaatggtgcgaattgatccccggcgcagagttccggtgcttcgttaaggagaacaagttgattggaatctctcagcgcgactacacccagtactacgaccacatttccaagcagaaagaggagatcagacggtgtatccaggacttcttcaaaaagcacatccagtacaaattcctggacgaggatttcgtatttgacatctatagggattcaagaggaaaagtatggttgatcgactttaaccccttcggcgaagtcacagattcactcctgtttacctgggaggaactgatcagcgagaataatctgaatggagacttctcggaagtagacgcccaggagcaggacagtcctgcgttcaggtgcacaaatagcgaagtgacagtccagccgtccccctacctgagttatagactgcctaaggattttgtggacttatccaccggcgaggatgcccacaagctgatagatttcctgaaactgaagaggaatcagcaggaagatgactag

SEQ ID NO: 23127 - DNA, 1248 bp, synthetic construct
  source 1..1248: mol_type = other DNA; note = Synthetic coding sequence
atgaagctgagcctgaccaaggtggtgaacggctgccggctgggcaaaattaagaatctgggtaagactggggatcatactatggacatcccagggtgcctgctctatactaaaacagggtccgctcctcatctgacacatcacaccctgcacaatattcatggagttcctgcgatggcccagctgacactatctagtctcgccgaacatcacgaggtcctcacagaatacaaagagggggttggaaaatttatcggcatgcctgaatccctactgtattgttcactgcacgatccagtgagcccctgtcccgccggttacgtaacaaacaagtccgtgtccgtgtggtctgtcgccggaagggtggaaatgactgtttcaaagttcatggctatacagaaggcgttgcagcccgattggttccaatgtctctctgatggagaagtgagctgtaaagaggccacaagcatcaaaagagtgcgaaaaagcgtagatcgcagcctgctctttttggataactgtctgaggttgcaagaggaatcagaagttctgcagaaatccgtgattatcggcgtaatcgaggggggtgacgtcatggaggagcggctcaggtctgctagagagacagccaagcgacccgtggggggcttcttgctcgatgggtttcaggggaaccctacaacattggaggctaggctgagactcctgtccagcgtgactgctgaactgcctgaagacaaaccccggttaatcagcggggtatctcgaccagatgaagtgctcgagtgcatcgaacgcggagtcgacctcttcgagagttttttcccatatcaagtgaccgagagggggtgtgccctgaccttctctttcgattaccagcccaacccggaggaaaccttactgcagcagaacggtactcaggaagaaattaaatgtatggaccagatcaagaagatagaaacaacgggctgcaatcaagaaatcacctccttcgagatcaatttaaaggagaagaagtaccaggaggatttcaacccattggtgagaggatgcagttgctactgttgcaaaaaccatacccgagcatatattcaccacctcctcgtcacaaatgaattacttgccggggtgctgctcatgatgcataactttgagcactattttggattctttcattatatcagggaggccctgaaaagtgacaaactggcacagctaaaggagctcattcatagacaggcaagttag

SEQ ID NO: 23128 - DNA, 1770 bp, synthetic construct
  source 1..1770: mol_type = other DNA; note = Synthetic coding sequence
atgcccaccgtgagcgtgaagcgggacctgctgttccaggccctgggccggacatatacagacgaggaatttgacgagctctgttttgagttcggcctcgagcttgatgagattacgagtgagaaagagatcatctccaaggagcagggcaacgttaaggctgcaggagccagtgatgtggtcctgtataagattgatgtgcctgccaaccggtacgacctattgtgcctggaaggactggtacgcgggctgcaggtgttcaaggagagaatcaaagcacctgtgtacaagcgggtaatgcccgatggaaagatacaaaagcttattataacagaagaaactgctaagatccgaccgtttgccgtggctgccgtcctccggaacatcaaatttaccaaggataggtacgactcatttattgaactgcaggagaagcttcatcaaaacatatgtagaaagcgggcactggtggccatcgggactcacgatttggataccctgtcaggcccttttacatatacagccaagcgaccctctgacattaagtttaagcccctcaacaagacgaaggagtacaccgcgtgtgaacttatgaacatctacaagacagataatcatctcaagcactacctgcatattatcgagaataagcccctgtaccccgtgatttatgactcgaatggggtggtgctgtccatgccacctattatcaacggcgatcattcgaggattactgttaacactaggaacatcttcattgagtgcaccggcaccgatttcaccaaagcaaagattgtgcttgatataattgtgactatgtttagtgagtattgcgaaaaccagttcacggtcgaagccgccgaggtggtgtttcctaacggcaagagtcatactttccccgaactggcgtatcggaaggaaatggtgagagccgatctaatcaataaaaaagtaggcattagagagacaccagaaaacttggcaaaactcctcactcgcatgtacctgaagtcagaggtgatcggtgatggtaaccagatcgaaatcgaaatccctcccacacgcgccgatatcattcacgcctgtgatatagtggaggacgccgccatcgcctacggatacaacaacatccagatgactctcccaaagacctatacgatagctaaccaatttccactgaataaactgaccgagctcctgagacacgatatggccgccgcaggatttacagaagctctgacttttgctctttgcagtcaggaagatatcgcagataagttgggagtcgacataagcgccaccaaggcagtacatattagcaatcccaaaacagcagagtttcaagtcgcacgcaccactcttttacccggtctgctgaagaccatcgccgccaaccgcaaaatgcctctgccactgaagttgttcgagatctcggacatagtaatcaaggactcgaacaccgacgtgggcgccaaaaactaccgccacctgtgcgctgtttactacaataaaaatccaggcttcgaaattatccatggtctgctagatagaatcatgcagctgctggacgtaccccctggagaggataaagggggctatgtgatcaaggccagcgagggaccagcctttttcccagggcggtgcgccgaaatcttcgccagaggccagagcgtgggaaagctgggggtgctccatcccgatgtgatcacaaaatttgagctcacaatgccttgtagttctctcgagattaacgtaggcccattcttgtag

SEQ ID NO: 23129 - DNA, 477 bp, synthetic construct
  source 1..477: mol_type = other DNA; note = Synthetic coding sequence
atggccgcccagggcgtgggccccggccccggcagcgccgcccccccaggactcgaggcagcccgccaaaagcttgccctgcgcagaaagaaggtgctgagcactgaggagatggagctgtacgagcttgcacaggctgctggaggggcaatcgatccagatgtgtttaagatcctcgtagacttactcaagcttaatgttgcccctctcgccgtgttccagatgttgaagtcaatgtgcgcaggccaacgactagcctctgaacctcaggatcccgccgcggtgagccttccaacttcatctgtgccagaaactcgagggagaaacaaagggtcagcagctctggggggggcactcgctctcgccgagcgatcttctagggaaggctcctctcagcggatgccaaggcagcccagcgccacccgcttacccaagggcggcggacctggaaaatcccctacgcgggggtcaacatag

SEQ ID NO: 23130 - DNA, 675 bp, synthetic construct
  source 1..675: mol_type = other DNA; note = Synthetic coding sequence
atggtggaggacgagctggccctgttcgacaagagcatcaacgagttttggaataagtttaagtccaccgacacttcatgtcagatggccggcctcagagatacctataaagactccatcaaggcctttgctgagaaactgtccgtcaagctgaaggaagaagagagaatggtagagatgtttcttgaataccaaaatcagataagccgacagaacaagttgattcaggaaaagaaggataatctcctgaagctaatcgcagaggtgaagggaaaaaaacaggaactggaagtgttaaccgcaaatatccaagatctaaaagaggaatactctcgaaagaaggagacaatctctaccgctaataaggccaacgctgagcggctaaaaaggttacagaagtcagcggacctgtacaaggataggctcggccttgaaatccggaaaatctatggtgaaaaattgcaatttatatttacaaatatagaccctaagaatcccgagagcccattcatgtttagtctgcacctcaacgaggcgcgcgactatgaggtgtcggactcagcacctcacctagaggggctcgctgaattccaagagaacgtccgcaaaactaacaacttcagcgctttcctggctaacgttcgcaaagctttcactgccactgtctacaattag

SEQ ID NO: 23131 - DNA, 1728 bp, synthetic construct
  source 1..1728: mol_type = other DNA; note = Synthetic coding sequence
atgaagctgaccgacagcaccaagggctggatcgtgtgggccgccctggatagttctatgcgcgggatgagcctgtctgcaggatctagccccctccactccccaaaaatcacacctcatacatccccagcccctcggcgccgctcacacaccccaaatcccgcctcctacatggtcccttcctctgcaagtactagcgtaaacaacccggtatcccagactcccagctctggtcaggttattcagaaggagacagtgggaggcaccacctatttttacaccgacacaacacccgctcctttgaccgggatggtgttccccaactatcacatatatccacccaccgcaccccacgtggcatatatgcagcccaaagcaaacgcgccctcattctttatggccgatgagctgcggcaggagttgattaaccggcacctcatcacaatggcacaaatagaccaagcagatatgccagcggtgcctaccgaggtggattcttaccatagtttattcccactggagcctctcccgccgcctaaccgcatccagaagtcaagtaatttcgggtacataacttcctgttacaaagctgttaatagcaaagatgatcttccttactgcctgcgacgcattcacgggtttcgcttagtgaacacaaagtgcatggtgcttgtggacatgtggaaaaaaattcagcatagcaacatagtgaccctcagagaggtgttcacaacgaaagccttcgctgagcccagcctagttttcgcttacgacttccacgcaggcggggagaccatgatgtcccgacatttcaacgaccccaacgcagatgcgtactttactaagagaaaatgggggcagcacgaagggccactaccgcggcagcatgccggactactgccagagtccctgatctgggcctacatcgttcaactgtcaagtgcattgagaacaatccatactgccggattggcttgcagggtgatggatccaactaagattcttatcaccggtaagaccagattgcgcgtcaactgtgtcggcgtgttcgatgtactgactttcgacaactcccagaacaataaccccctagcccttatggcgcagtatcaacaggcagacctgattagtctcgggaaggtggtgcttgcactcgcatgcaacagcttggccggcattcaaagagagaatttgcagaaagcaatggagctggttacaattaactacagctctgatttgaagaacttaattctctacctactgactgatcagaaccgaatgagaagcgtcaatgatatcatgcctatgataggcgctcgtttttacacgcagctggatgcagcccagatgagaaacgacgtaatagaggaggatctcgccaaggaggtgcagaacgggaggctgtttcggctcctagcgaaactgggtacgattaacgaaaggcctgaattccagaaagacccaacctggtctgagacgggcgaccggtatctgcttaaactgtttcgggaccatctgttccaccaggtcactgaagcaggggctccctggattgatttgtcccatatcatatcttgcctgaacaagctggatgctggagtgcccgagaagatctcactcatttcccgggatgagaagtcagtcttagtcgtgacatatagtgacctaaagcgatgcttcgaaaacacatttcaggagctgattgcagctgccaacggacaattatag

SEQ ID NO: 23132 - DNA, 1785 bp, synthetic construct
  source 1..1785: mol_type = other DNA; note = Synthetic coding sequence
atggagagcaaccacaagagcggcgacggcctgagcggcacccagaaggaagccgctctgcgcgctttggtgcagcgaactggttatagcctagtgcaggaaaacggtcagcggaagtacggcggaccaccgcccggatgggacgccgcccccccagagcgcggctgtgagatcttcattggcaaactgccccgcgacctttttgaggatgagttgattcccctctgtgagaaaatcggcaaaatctacgagatgcgaatgatgatggatttcaacgggaataataggggctatgcgtttgttacatttagcaacaaggtagaggccaaaaatgctattaagcagctgaataattacgagataagaaacgggaggttattgggcgtttgtgccagtgtggacaattgcagactgttcgtcggagggatacctaagacgaagaagcgcgaggagattctgtccgagatgaagaaagttacggagggcgtggtggacgtaatcgtttatccttctgcggctgacaaaactaagaaccgtggctttgcatttgtcgagtacgaatcccacagagcagccgctatggcccgaagaaagttactgccaggccgaatccagctgtgggggcatggcatcgccgtggactgggctgagcccgaagtggaagtcgatgaggacaccatgtctagcgtgaaaattctgtacgtcaggaatcttatgctgtctacatctgaggaaatgatcgaaaaagaatttaataatataaagcctggagcagtggaaagggtgaagaaaatcagagactacgccttcgtacacttctctaatcgggaagacgcggtcgaggccatgaaagccctcaacggaaaggtgctagacggctctcctatagaagtcaccctcgctaagcccgtggataaggacagctatgtccggtatacacggggcaccggtggacgcgggacgatgctgcagggcgagtatacgtatagccttggccaagtctacgatcctaccactacatatctgggcgcaccggtcttctacgcaccccagacctatgccgccatacctagcctgcactttcctgcgaccaaaggccatctctccaaccgcgctatcatccgcgcacccagcgtgcgcgagatctacatgaatgtaccagtgggtgcggcaggtgtgaggggtttaggcggccgggggtacctggcatacacaggtttgggaagggggtaccaggtgaagggggacaaacgcgaggataagttgtatgacatattacccggaatggagttaactcccatgaatccagtgacccttaaaccacagggtattaagctggcccctcagatcctcgaagagatctgtcagaagaacaattggggccaaccagtttaccagttacattctgctatcggacaagaccagcgacagttgtttctctacaagattacaattccggccctcgcctcccaaaaccccgcaatacacccatttacacctcccaagttgtctgcttttgttgatgaagctaaaacctacgccgcggagtatacgctccaaacactgggcatccccacagatgggggggatggcaccatggccacagctgccgctgctgcaaccgccttccctgggtatgcggtccctaacgcgacggctcctgtgagcgctgcacagctcaaacaggcagttacgctgggtcaggatctggctgcctacacaacgtacgaggtataccccactttcgccgttaccgctcgaggcgacgggtacggtaccttctag

SEQ ID NO: 23133 - DNA, 1167 bp, synthetic construct
  source 1..1167: mol_type = other DNA; note = Synthetic coding sequence
atgctggagggcagctggatcaaccggcgggaggacaagctgggcgtctattctctggtgcacttttccccaaagatgctgggctccgtggccactacactgcctcttagttccagtaatagcagtgggatgccgctggggtactacttgagttcaccacaaatcagcagggttaccatttctaccaccgggcaactgacctccaaggcaaccgtggggtcctgctctcgcgtggaaaattccttagatgcaagccctttttctgtccctaaaaagcaggatgaaagccccatgatcggggacggggaggactacttcctgagcctcttcggggatagcaaaaagctcaccgcccacagcaattatacacaaaagaccctgaagtatttctccatgattcttgaggaggtaggccaatttaccagctccagcctgggagatgtcgagattgccgaagtgaacgtcaaggggctgttcgttaaattgatcaacagttcccttgacaaagaaatggctatcggcgatcatatcttgcagcaaaatgtaaacggtcaaacaatttctttgtatcgatttctgcccaatatcgtgatgcaggccaatagtaccgtcacagtgtgggcagcggcctcagaagccaaacaccagcctccttctgatttcttgtggaaggaacaggataaatttcgcgccagtccggattgtatcaccatcttatgcaagccaaatggccaagcaatagcttggtatactccgatccattggaagcaggcctgggaaaaactcgatgctgatgtagagttcaaccgctgttcggtagtctctcctacattccggaaacgggtctttcaatggactgcgtccaccgctacaattaccaaagagaagcaagatcagcccaagaaggatatttcaaactatcaggttgagcaggcccaggtgctgctgaagagggagaaggaaattcctcccacagtcttccccaaccggtccccatggtgccagaatccctacgtctccgcgcatccctactgccccctgatcgaaccacacaacacatctacagccggaggccggttggacagacaaccccggactaggtccactcggcctaatcgagcgtccggaagcaaaaaaaagaaaacctccgagtcgcagaaacagtag

SEQ ID NO: 23134 - DNA, 744 bp, synthetic construct
  source 1..744: mol_type = other DNA; note = Synthetic coding sequence
atggaggagcagccccagatgcaggacgccgacgagcccgccgactcgggaggcgagggccgcgcaggggggccgccacaggtggccggtgcccaggccgcgtgctctgaagatcggatgactttgctactccggctgcgcgctcagaccaaacagcagctcctcgagtacaagtccatggtggatgccagcgaggagaagacccccgaacagatcatgcaggagaagcaaatagaagcgaagatagaggatctcgagaacgaaattgaagaggtgaaggtggcctttgaaattaaaaagctggcccttgacaggatgaggcttagcaccgcccttaagaagaatctggaaaaaatatcacgccaatctagtgtacttatggacaatatgaaacatctgctggagttaaacaagctgatcatgaaatcccagcaggagagctgggacctggaggaaaagcttctcgatattaggaaaaagaggttgcagttgaagcaggcctcagaatctaaactcctcgagatccaaactgaaaagaataagcagaaaattgatctggatagtatggagaattcggagcgtataaaaatcattagacagaacctgcagatggaaattaagattacgactgtaatccagcatgtgttccaaaacttgatactgggctcaaaagtgaattgggcagaggacccagctcttaaagagatagtactgcagctcgagaaaaacgtggatatgatgtag

SEQ ID NO: 23135 - DNA, 1458 bp, synthetic construct
  source 1..1458: mol_type = other DNA; note = Synthetic coding sequence
atggagttcctgggcaccacccagaccgccagctactgcggccccaagaaatgttgcggcctcacgtctttgccggcagtgcaggctcctgttatccaggaatgctaccagccatactacctgccagggtaccggtacttgaacagttggagaccttcgctgttctacaaaatagcgaatgtacagacatgccccgatgagtccactagtaccctgagaccacccactatcctaccgaccctgagatctgccctcttctctcgatattcaccacacgattgggaccagtccaaccagcttcaggtgcgtggtgctgaggcgagtcgcttgtgggcgtcacggcttactgatgacagtatgaggctcctccaagataaagatcagttgacccaccagatgcaagagggaacctgcagaaacctgggccaacggctgagcgacattgggttctggaagagcgagctgtcctatgagctggacagactactcacagaaaaccagaatttggagaccgttaagaggcggttagagtgtgccgccaatgaggttaactgccctctgcaggttgctctggaatgtctctatcatcgggaaaaaagaattggaattgacctggttcacgacaatgtagaaaaaaacctgattagggaggtcgatctcctcaagtgttgccaggaacagatgagaaaacttgcccagcgaatcgacatccagatgcgtgacaaccgtgatgcccagcacgttctggaaagggacctggaggacaagtcctctgcccagtgcatcgacgagaagtgcttcaacttgcggaatacatctgactgcatcagcttctttcacggaatggaaaaaattgatggaactatcagcgttcctgaaacttgggctaaattcagtaatgataacatcaaacattctcagaacatgcgtgccaattcaattcagctgcgtgaagaagctgagcacctgtttgaaacattgtcagaccagatgtggcgacagttcactgacacgaacctcgctttcaatgccagaatctctgaggtcaccgatgtgaaaaataagcttcaaactcaactggccaaaaccctacaggaaatcttccaggccgaaaacactatcatgctcttagaacggtcaatcatggccaaagaaggacccctcaaggtggcgcagacgcgactcgaatgtcggaccagaagacctaatatggaattatgcagagatatcccccagctgaaactagtgaatgaggtttttaccatcgatgatactctccagacgttgaagctacgcctgcgagagacacaggatacgctccaactgttggtgatgacaaaatgcaggctcgagcacgaactggccattaaggcgaacaccctctgcattgataaggagaagtgcatggggatgagaaagaccttcccgtgcactcctcgcctggtaggccacacgtag

SEQ ID NO: 23136 - DNA, 837 bp, synthetic construct
  source 1..837: mol_type = other DNA; note = Synthetic coding sequence
atgggcaagagcagcgagtggtgcgagcggatcgccggcatccagaagttcgtgctggagaaatggactaagaaggctaagcctgaagatactttgaatctttgtcagctgttaaataacgacttggcttcaactgtggtgtcctatccccgtcgttttgtgggcctggggacattgcctatgcaggctccagagctggcggtcaaggagatggagcgttgcgtgaaggagttggggttccctggggtacagattggaacccacgtcaacgagtgggacttaaacgcacaggagcttttcccggtctacgcagctgcggaacgcctcaaatgttctctcttcgttcatccctgggacatgcagatggacggcaggatggccaaatactggcttccctggctcgtggggatgcccgccgagaccaccattgccatttgttccatgatcatgggtggtgtcttcgaaaagttcccaaagttaaaggtttgtttcgcccacgggggcggcgcgtttccttttactgtgggacggattagtcatgggtttagtatgcgacccgacctatgcgcccaggataatccaatgaacccaaaaaagtacctgggttctttttacactgacgctctggtacacgatcctctatctctgaagctgctcacagacgtcataggaaaggacaaagtgatccttgggaccgactacccctttcctctgggagagttggagcctggtaagctgatcgaatccatggaggagttcgacgaggaaactaaaaataagctgaaagcaggaaacgcccttgccttcctgggcttggagagaaagcagttcgaatag

SEQ ID NO: 23137 - DNA, 2478 bp, synthetic construct
  source 1..2478: mol_type = other DNA; note = Synthetic coding sequence
atgagcagcagccccgtgaacgtgaagaagctgaaggtgagcgagctgaaagaggagctcaaaaaacggcgtctctccgataaagggttgaaagcagagttgatggagcgcctgcaagctgctttagacgatgaagaagcgggagggcggcctgccatggaaccaggaaacggatcactagacctcggtggggactccgccggaagatctggggctggcctggagcaggaggctgccgctgggggtgatgaggaagaggaggaggaggaggaagaagaggaaggcatcagcgccctggacggcgatcagatggagctgggggaggagaatggcgcagccggcgcagccgatagtggccctatggaggaagaggaggccgcctctgaagacgagaatggcgatgaccagggatttcaggagggagaggacgagcttggggacgaagaagagggtgcaggagatgaaaacggtcatggagagcagcagcctcagccccctgctactcagcagcagcagcctcaacagcagcgaggcgccgctaaggaggcagcaggaaagtcttcaggaccaacttcattgttcgccgtaactgtcgccccacctggtgcccggcaggggcagcagcaggctggagggaagaaaaaagctgagggtggaggtggcggaggacgacccggggcgccggctgccggagatgggaagactgaacagaagggaggggacaagaaacgaggcgtcaagcgcccacgagaagatcacgggcgaggatattttgagtacattgaggagaataagtatagccgcgccaagtcaccgcaacccccagtggaggaagaggacgagcatttcgatgacacagtggtttgcctggacacttacaactgcgacctgcacttcaaaatttctagggaccgactctctgcatctagcctcacgatggagtcgtttgccttcctttgggctggtggcagagcgtcctacggggtctccaagggaaaggtgtgttttgagatgaaggtgacagaaaagatacccgttagacacctgtatacgaaggacattgacattcacgaggtgaggattggatggagtctaaccacatctggtatgctgctcggtgaagaagaattttcttacggctatagcttaaaggggattaaaacttgtaattgcgagaccgaggactacggagaaaaatttgacgaaaatgatgtgattacctgctttgctaatttcgagagcgacgaagtggagctgtcctatgcaaaaaatggacaggaccttggcgtcgcttttaaaatcagcaaggaggtgctagctggaaggcccctcttccctcacgtgctctgccacaattgcgcagtggagttcaactttggtcagaaggagaaaccttacttccccatccctgaagagtataccttcatccagaatgtcccactcgaagacagagtgaggggaccaaagggtcccgaggagaagaaggattgcgaggtcgtgatgatgataggcttgccaggagctgggaagaccacctgggtgaccaaacacgcggcagagaacccgggcaagtataatatcctgggaaccaatacaatcatggacaagatgatggtggccgggtttaaaaagcagatggcggataccggtaaacttaataccctgcttcaaagagctccacagtgcctggggaagttcattgaaatcgccgcgaggaagaagaggaactttatacttgaccagaccaatgtctccgctgcggcacagagacggaaaatgtgtcttttcgcagggtttcaacggaaagctgtggtcgtgtgtccaaaggatgaggactataaacagcgcactcagaaaaaggcagaagtcgaaggaaaagatctgccagaacacgctgttctcaaaatgaaagggaatttcactttgcctgaggtggcggagtgttttgatgagatcacctacgtcgagctgcagaaggaagaggctcagaagctcctggagcagtacaaagaagaatccaagaaggccctgcctccagaaaagaaacagaacacaggtagcaagaaatcaaacaagaacaagagtggaaagaaccagttcaatcggggcggcggacacagaggacgtggcggcttcaatatgcgcggggggaatttccgcggcggagcacccggtaacaggggagggtacaataggcggggaaacatgccccagagaggcggcggaggcgggggttctggggggattggctatccttaccctagagcaccagtgttcccaggccgggggagctatagcaatagagggaactacaacagaggtggcatgccgaaccgtggtaattataatcagaacttccgtggacgtgggaataacagaggttacaagaaccagagccaggggtacaatcaatggcagcaaggccagttttggggacaaaaaccctggtcacaacactatcatcaggggtattactag

SEQ ID NO: 23138 - DNA, 945 bp, synthetic construct
  source 1..945: mol_type = other DNA; note = Synthetic coding sequence
atgcagaacgtgatcaacaccgtgaagggcaaggccctggaggtggctgagtaccttacacccgtcctcaaggaatcaaagtttaaggaaaccggtgttatcaccccagaagagttcgtggcagccggggatcacttggtccatcattgtcctacgtggcaatgggccaccggcgaggaactcaaggtgaaagcatacctgcccacgggtaagcagttcttggttaccaaaaatgttccctgttacaagagatgcaagcagatggaatactcagacgagcttgaagccattattgaagaggacgatggagatggcggctgggtcgacacgtaccataacaccggtatcactggcatcacggaagctgtgaaggagattacacttgagaataaagataatatcaggctgcaggattgttccgcactctgcgaggaggaggaggacgaagacgagggtgaggcagccgatatggaggagtacgaagaatcaggactgcttgagaccgacgaggcaaccctggacacaaggaaaatagtggaagcctgcaaggcaaaaactgacgccggcggagaggatgctatactgcagacacgtacctatgatctttatataacatatgacaagtattaccagacaccgcgcctttggctgtttggatatgacgaacaacgacagcctctgactgttgagcacatgtacgaggatatcagtcaagaccacgtgaagaaaacagtgacaatcgagaatcaccctcatttgccaccgcccccgatgtgttctgtccacccctgcagacatgcagaagttatgaagaaaataattgaaactgtagccgagggaggaggagaactgggtgtacacatgtacctacttatatttctgaagtttgtgcaggccgtgatccccaccatagaatatgactacaccaggcactttacaatgtag

SEQ ID NO: 23139 - DNA, 900 bp, synthetic construct
  source 1..900: mol_type = other DNA; note = Synthetic coding sequence
atggtggacaagaagctggtggtggtgttcggcggcaccggcgcccagggaggatccgtggcgagaaccctcctggaggacggcacctttaaagtgagagtcgtgacaaggaatcctagaaagaaggctgcaaaggagctcaggctccagggcgctgaagtcgtccagggggatcaagacgatcaggttattatggagctggctctgaatggggcctacgctacattcattgtgactaattactgggaatcctgtagccaggagcaagaagtaaagcaaggcaagctgttggctgacctggctagacgcttggggctccattatgtggtgtattcaggcctggaaaacatcaaaaagctcaccgccggcagactcgctgcagcccacttcgacgggaaaggtgaagtcgaggaatattttagggacataggagtcccaatgacgtccgtaaggctcccctgctattttgagaaccttctctctcattttctgccgcagaaagcccctgatggcaagtcttacctcctgtccctccccacaggcgacgtgccgatggatggaatgagcgtctccgatctcggcccagttgttttaagcctgctaaagatgcccgaaaaatatgtcggccaaaatattggcctctccacctgtagacacacggctgaggagtatgccgcactgctgactaagcacacacgcaaggtcgtccacgatgctaaaatgacacctgaagattacgaaaaacttggatttcccggtgcaagagacctggccaacatgttcaggttctatgccctgcgacctgacagggacatagagcttaccctgcgtctgaatcctaaagccctcaccctcgatcaatggcttgagcaacacaagggcgatttcaacctgctctag

SEQ ID NO: 23140 - DNA, 2571 bp, synthetic construct
  source 1..2571: mol_type = other DNA; note = Synthetic coding sequence
atggacatcagcaagggcctgcccggcatgcagggcggcctgcacatttggatttccgaaaataggaagatggttccagttcccgagggggcgtacggaaactttttcgaagagcactgctacgtgatcttacatgtgccgcagtcacctaaagccacgcagggggcatcatccgatctgcactactgggtgggcaagcaggctggtgcggaagcccagggcgccgccgaggcatttcaacagcgacttcaggacgagctgggaggacagactgtactccacagagaggcccagggtcatgagagtgactgtttctgtagctactttcgacccggcatcatctaccggaagggcggactggcctctgacttaaagcacgttgaaacgaatttatttaacatacagagactgttgcacattaagggacggaagcacgttagcgctaccgaggtcgagctctcctggaatagcttcaacaagggtgatatatttctgttggacttaggcaagatgatgattcaatggaatggccccaagacgtcaattagcgaaaaggctcgtgggctggctttgacctacagtctgcgggatcgggagaggggcgggggtagggcccagatcggtgtcgtggatgacgaggccaaagctcctgatttaatgcagatcatggaagccgtcctcggcagacgtgtaggatcactcagggcagccactcctagcaaggatataaatcagctgcagaaggccaatgtgcgattgtaccatgtctatgaaaaaggaaaggacttggtcgtgcttgaactcgccactccacctttaacccaagacctgctacaagaggaggacttctacatccttgaccaggggggctttaaaatctacgtgtggcaagggcggatgtcttctcttcaggaacgaaaagccgcattttcacgggcagtggggttcattcaagccaagggctaccctacttacaccaatgtggaagtggtgaatgacggggcagaatctgccgctttcaagcagctattccgaacgtggtccgaaaaaagacggcggaaccaaaagctgggcggtcgggataagtcaattcatgtcaagcttgacgtggggaagctgcacacacagccgaagttggccgcccaactgcgaatggtagacgatggctcgggcaaggtcgaggtgtggtgcattcaagatcttcatcgccaacccgtggatcccaagcgacatggccaattgtgcgccggaaactgttacctggtactgtacacctatcagcggctgggcagagtgcagtacatcttatacctatggcagggtcatcaggctactgctgatgagatcgaggccctcaattccaatgccgaggaactagatgtcatgtacggaggggtcttagtgcaggaacacgtgaccatgggttcagagcctcctcactttcttgctatctttcaaggtcagctggtgatctttcaggaacgggcgggccatcacggtaaaggacagagcgccagtaccacgaggctttttcaagtacaggggacggactctcataacaccagaacaatggaggttcccgcacgggcctcctctctcaattcatcagacatcttcctgctagtgacagcctcagtgtgctacctatggttcggtaaggggtgcaacggcgaccagagagaaatggctagagtggtggtaaccgttatttcccgcaaaaatgaagagaccgtcttggagggacaggagcctccgcacttctgggaagctctcggtggtcgcgcaccgtacccatccaacaaaaggctccccgaggaggtcccttcgttccagccaaggctcttcgagtgctcctcgcatatgggctgtctggtcctggctgaggtcggtttcttttcacaggaggacctggataagtatgacattatgcttttagacacgtggcaggagatcttcctctggcttggagaggcggctagtgagtggaaggaggctgttgcctggggacaggagtacttgaagacccatcccgctggcaggagccctgccactcccatcgttttggtgaagcagggacacgagccaccaacatttatcggttggttttttacatgggacccatataagtggacgtcacatccatctcacaaagaggtcgttgatgggtccccggccgccgcttcaacaatctctgagataactgccgaggtgaacaacttgaggctctcaagatggcccggaaacggcagggccggtgcagtggctcttcaagctctgaaggggtctcaagacagctctgagaacgatctcgtcagatcacctaaaagtgctggctcccgcacgtccagcagcgtcagcagcacatcagcaacaatcaatggcggactcaggcgagagcagctcatgcaccaggcggttgaggatcttccggaaggggtcgacccagcgcgccgtgaattctatttatccgatagcgactttcaggatatctttggaaagagcaaggaagaattttactccatggctacctggcgccagaggcaggaaaagaaacagctgggcttcttctag

SEQ ID NO: 23141 - DNA, 987 bp, synthetic construct
  source 1..987: mol_type = other DNA; note = Synthetic coding sequence
atggaggccaacggcagccagggcaccagcggcagcgccaacgactcccagcacgatcctggtaaaatgttcattggagggttgagctggcaaacctctcccgatagtctgcgggattacttcagtaagtttggagagatcagggagtgtatggtgatgagagaccctacaaccaaaagaagtaggggtttcggcttcgtgactttcgccgaccctgcttcagttgataaggttttgggccagcctcatcatgagctggactccaaaacaatcgaccctaaagtggcattccctagaagagctcagcccaagatggtgaccaggacaaagaagatcttcgtaggcggtctgagtgccaacacagtggtggaggatgtcaaacagtactttgagcaatttggaaaagtcgaggatgccatgcttatgtttgataaaactaccaaccgccatcggggctttgggttcgtgacattcgaaaatgaagacgtcgtggaaaaagtgtgtgagatacattttcacgagatcaataacaagatggtcgaatgtaagaaagcgcagcctaaggaagtgatgttcccacccggcactcgaggccgcgcccggggactgccatataccatggacgcatttatgttaggtatgggtatgctcggatatcctaactttgtagccacctacggtcgtggataccctggcttcgccccgagttatggatatcaatttcccgggtttcccgcagccgcctatggacctgttgccgccgctgctgttgcggccgccagagggtcagggtccaatccggcccgaccgggcggattccctggggccaactctcccggtccagtggccgatctttacgggcctgcttcccaggactccggcgttggaaattatatcagtgctgcgtctcctcagcctggttccgggtttgggcatggcatcgcaggacccctgattgccactgcatttaccaatggttaccactag

SEQ ID NO: 23142 - DNA, 654 bp, synthetic construct
  source 1..654: mol_type = other DNA; note = Synthetic coding sequence
atggagagcgtggccctgtacagcttccaggccaccgagagcgacgaattggcttttaacaaaggcgatacccttaaaatcctgaacatggaagacgaccagaattggtacaaggccgagctgcgcggcgtggagggcttcatccccaagaactacattcgagtgaagccccacccctggtatagcggaaggatcagccggcagttagccgaggagattctgatgaaaaggaaccatctgggtgcgttcctgatccgtgagagtgagagttctcccggtgaattcagcgtcagtgtgaattacggggaccaagtccaacacttcaaggtacttcgggaagcctcagggaaatatttcctgtgggaggagaagttcaattcgttgaatgagctcgtggatttttaccgcaccacaacaatcgcaaagaagcgacagattttcttacgtgatgaggaacctttgctcaagtcaccgggggcttgcttcgcacaggctcagttcgatttctccgcccaggacccatcacagctgagtttcagacgcggagatattattgaggtcctggagcgacccgatccgcattggtggcgcggtaggtcctgtggacgggtggggttttttcctcgtagctacgtgcagccggtgcatttgtag

SEQ ID NO: 23143 - DNA, 231 bp, synthetic construct
  source 1..231: mol_type = other DNA; note = Synthetic coding sequence
atgggcctgaagatgagctgcctgaagggcttccagatgtgcgtgagttcctcctcttcgtcccacgatgaggcccccgtgctgaacgacaagcacctcgacgtgccggacattatcatcactccgccgacccccaccgggatgatgctcccaagagacttggggtctactgtttggctggacgagaccggctcttgccctgatgacggggaaatcgatcctgaggcctag

SEQ ID NO: 23144 - DNA, 19863 bp, synthetic construct
  source 1..19863: mol_type = other DNA; note = Synthetic coding sequence
atggaccagccccagttcagcggcgccccccggttcctgacccggcctaaggccttcgtggttagtgtgggtaaagacgctaccctgagttgtcagatagtggggaatcctactccccaggtgtcctgggagaaagaccagcaaccagttgccgcaggagcccggttcaggctggctcaggatggagatctttatcggctcaccatcctggatcttgcactcggggattcaggccagtatgtctgtcgcgcgagaaatgcaattggtgaggccttcgctgctgtgggattacaggtcgacgcagaagccgcatgcgccgagcaggcaccacactttcttttacgacctacatctattagggtgagagaaggaagtgaggccaccttccgctgtcgggttggcggatctcctagaccagccgtgtcctggtccaaggacggacgcaggctgggcgagcccgacggcccccgggtccgcgtcgaagagctgggcgaggcgtctgcactgaggatcagggccgcaagaccccgcgacggcgggacatatgaagtgcgagctgaaaatcccttaggagctgcttctgcggcggccgctctggtcgttgactccgacgctgcggatacagcttcaaggcccggtacaagcaccgccgcactgctggctcatctgcagcggcgtagggaggcgatgcgcgctgagggtgcaccagcaagcccgccaagtacagggacccggacttgtactgtgacagagggaaaacacgccaggctgtcctgttacgtcaccggggaaccaaagcctgaaaccgtgtggaagaaggatggccagctcgtcaccgagggtcgaagacacgtggtgtacgaagacgcccaggaaaacttcgtgctcaagattctgttttgtaagcagtccgaccggggtctgtatacttgtaccgcatcaaatctggtgggacaaacctactcgagtgtcctagtggtggtgcgggagccagccgtgcctttcaagaagcgtctgcaggatctcgaggtccgcgaaaaggaatctgcaacctttttgtgtgaagttcctcagccaagcacagaagctgcttggtttaaagaggaaacccgtctgtgggcctccgccaaatatggaatcgaagaggaaggaacagaacgccgccttaccgtgagaaacgtgagtgcggacgatgacgccgtgtatatctgtgagacccctgagggaagccggaccgtagctgagctggcagttcaaggcaatttactccgcaagctccccaggaagactgccgttagagttggagatacagcaatgttctgcgtcgagctggctgtgccggtcggacctgttcactggctgcggaaccaggaggaggtcgtcgccggcggtcgggtggctatctctgctgagggcactagacacactctgacgatctcccaatgctgcctggaggacgtgggacaggtcgctttcatggccggcgactgccagacttccacacagttttgcgtctccgcccccagaaagcctccactccagccgccggtcgaccccgtggtcaaagccaggatggagagctctgtgatactgagctggtcaccccctccacacggagagaggcctgttactattgatggatacctggtcgaaaaaaagaagcttgggacttatacttggatccgatgtcacgaggccgagtgggtcgcaactcctgagttaactgtcgccgacgtggccgaagagggcaacttccagttccgcgtgagtgccctgaactcttttggccagtctccctatctggaatttccagggactgttcacttggcccccaaactcgccgtacggacccctctcaaagcggtacaggccgtggagggcggcgaggtgacattcagcgtcgatctgacagtagctagcgctggtgagtggttcctagatggccaggctctgaaagcctccagcgtgtatgagatccattgcgaccgcacacggcatacactgaccattcgcgaggttccggcgagtctgcacggagcacagttgaagtttgttgccaacgggattgagtcatcaatcaggatggaagtgcgagccgccccaggcttaactgccaataagcctcccgcagctgcagctcgcgaggtgctggcccgtcttcacgaggaggcccaactcctggccgaattatcggatcaggctgcagccgtgacctggctgaaagatgggcggacattgtcccctggtcccaaatatgaagtccaggcaagtgccggaaggagggtgcttctcgtgcgggatgtcgctagagatgacgccgggctgtacgagtgcgtatctcgaggtggaagaatagcttatcagctgagtgtgcaggggctggcccggttcctgcataaggacatggctgggtcgtgcgtggatgcagtcgcaggaggtcctgcgcagtttgagtgtgagacctccgaagcccacgtgcatgtgcactggtataaggatggcatggaactgggccatagcggtgaacgcttcctgcaggaagacgtgggcacaagacaccgcctcgtggccgctaccgttacacggcaggacgaagggacctacagctgccgcgtgggggaggactctgttgacttccgactcagagtgtccgagcctaaggtcgtgttcgctaaagaacaactggccaggaggaaattgcaggcagaagccggcgcttcagcaacactgagctgtgaggtagcccaggcgcagacagaagtgacctggtataaagatggaaagaagctgtctagcagctcgaaggtatgtatggaggccactggctgcacccgaaggctggttgtgcagcaggctggacaggccgatgccggggagtactcatgcgaggccggcggccagcgactgagctttcacctggatgtcaaggagccaaaggtagtgtttgctaaagaccaggtagcccatagcgaagtgcaagcagaggcaggagcttcggcgaccctctcgtgcgaggtggcacaggcacagaccgaagttatgtggtacaaagatggcaaaaagctcagcagttctctgaaagtgcacgtggaagccaaggggtgccgacggcgcttggtggtgcagcaggccggcaagactgatgccggagattactcctgtgaagcgcgtgggcagcgtgtgtcttttagacttcacatcacggagcctaagatgatgttcgccaaggagcaaagtgtacacaacgaggtccaggcggaggctggggcctccgctatgctttcatgcgaagtggcccaggcacagacagaagtcacatggtacaaagacggcaagaagctgtcaagctcaagcaaggtgggcatggaagttaaaggctgcacacgcaggcttgttttgccgcaggccggaaaggcagacgccggcgaatatagctgtgaagccggtggacagcgagttagcttccacctccatataactgagcccaagggcgtcttcgccaaggagcaatctgtgcacaacgaagtacaggccgaggccgggactacggccatgctgtcgtgcgaggtggcacaacctcagactgaggttacttggtacaaagacggcaaaaagctcagcagctcaagtaaggtgaggatggaagtcaaaggctgcactcggaggctcgtggttcagcaggtgggtaaagcagacgctggcgagtacagctgtgaggcaggggggcaaagggtgagcttccagctgcacattacggagccaaaggctgtgttcgcaaaagaacaactcgtccacaatgaggtgcggacggaggccggcgcgtctgcaacactgagctgtgaagtggcacaggctcaaaccgaagtgacttggtacaaagacggcaagaagcttagtagcagcagcaaagtgaggattgaggcggctggatgcatgaggcagcttgtcgtgcagcaggccggacaggccgacgccggcgaatatacctgcgaggctgggggccagcgcctgtccttccacctcgacgtcagtgagcccaaagctgtatttgcaaaggagcagttggcacacaggaaggtgcaggcagaggccggtgccatcgctaccctctcttgcgaagttgcccaggctcaaaccgaggtgacgtggtataaggatgggaagaaactcagtagttcgagcaaggtaaggatggaagcagtgggttgcacccggaggttggtcgtccaacaggcatgccaagcagacactggggaatactcgtgcgaagcagggggccagaggctgtctttctccctggacgtggctgagcccaaggtggttttcgctaaagaacaaccagtgcatcgagaagtgcaggcccaggctggagccagcacaacattgtcatgcgaagttgcgcaggcccagacagaagtgatgtggtacaaagacggaaaaaaactctccttcagctctaaggtgcgtatggaggcagtgggatgtactcgtagactggttgtgcagcaggcaggccaggccgtggcgggagaatactcctgtgaggcaggttcccagcggctgtctttccatctgcacgtagctgagccaaaagccgtatttgctaaggaacagccagcgagccgggaggttcaggccgaggcaggaacttctgccactctctcctgtgaagtggctcaggcgcaaactgaggttacgtggtacaaggacgggaaaaagctgtcctccagtagtaaggtccggatggaagctgtcggatgcacacggaggttggtcgtacaggaggctgggcaagccgatgctggagagtattcatgcaaggcaggggatcaacgcctttcttttcacttacatgtagccgagccaaaagtagtatttgcaaaggagcaaccagcacacagagaagttcaggctgaagcaggagctagtgcaacccttagctgcgaggttgcacaagcgcaaaccgaagtgacctggtacaaagacggcaagaagctcagttcgtcgagcaaagtgcgcgttgaggcagtggggtgcacgagacggctggtggtccaacaggctggacaggcagaagccggtgagtactcttgcgaagccgggggccagcagctgagttttcgactgcaggtcgccgaactagagccacaaatatcagagaggccttgtagacgtgagccactcgtggttaaggagcacgaagacataattctgacggctaccctggcgacccccagcgcggccaccgtgacgtggctgaaagacggcgtcgagatcagaagatctaagaggcatgagactgcctcgcagggagacacgcatactcttaccgtacacggagctcaggtgttagattccgccatctacagctgccgcgttggtgccgaggggcaagattttcccgttcaggttgaagaagttgcagctaagttctgtcggttactggagccagtatgcggggaactgggcggcactgtgaccttagcctgcgaattatcaccagcctgcgccgaagttgtttggcgctgtggcaatacccagctccgggtgggaaagcggttccagatggtggctgagggacctgtcagatcactcacggtgttaggactgcgtgctgaagatgccggcgagtatgtgtgcgagagcagagatgaccacaccagcgctcagctcacggtgtccgttccaagagtggtgaagttcatgtccggcctgtccactgtagtagcggaggaaggcggagaggctacttttcagtgcgtagtgagtcctagcgacgtggcagtggtgtggtttcgggacggggccctgctacagcctagcgaaaaatttgccattagccagtctggtgcgtctcacagcttgacaatatccgatttggtgctcgaagacgccggacaaattacagttgaggccgagggtgcaagcagttcagcggctctccgagtgcgggaggcaccggtgctgttcaaaaagaagctcgaaccacagactgttgaagaacgaagctccgtcacattggaggtagagctgactagaccatggcctgagctcaggtggactagaaatgcaactgccttggctcctggaaagaatgtggagattcacgctgagggagcccgacaccggctcgtgctccataatgttgggttcgcagacaggggcttcttcgggtgcgaaacccctgacgacaaaacccaagctaaactgactgtcgagatgcggcaagttaggctagtgagaggactgcaggctgtggaagcaagagaacaaggcactgccactatggaggtacagttgagtcacgccgatgtggatgggtcatggactcgagatggactgcgctttcagcaaggccctacatgccacctggccgtacgtggccccatgcataccctgaccttatccggcctgagacccgaggattccggcttgatggttttcaaggcagaaggcgtgcacaccagcgcacggcttgtggttaccgaactgcccgttagcttctcaaggccccttcaggacgtggtgacaactgaaaaggaaaaagtaaccctggaatgtgaactgagccgcccaaacgtagacgtgagatggttaaaggacggagtagaactgcgagccgggaagactatggccatcgccgctcaaggagcctgccgaagcctcactatctacagatgtgagtttgcagatcagggggtgtatgtgtgtgacgctcacgacgcccaatcgagcgcctccgtcaaagtccaggggcgcacctacaccttgatttataggcgagtcctagctgaagacgcaggcgagatccagtttgtagctgagaacgctgaaagccgggctcagctgcgggtgaaggagctgcccgtgaccctggtgcgtccgcttcgggataaaatcgcaatggaaaagcatcgcggtgtgctggagtgtcaagtgtcccgagcctctgcccaggtgcgttggtttaaggggtcacaggaactgcaacctggtcctaaatatgaactggtctccgacggcctctatcgcaagctcatcatcagcgacgttcatgcagaagatgaagacacatacacctgtgatgctggcgatgtaaagaccagcgctcagttcttcgttgaagagcagtccatcacaatcgtgagaggtctgcaagacgtgacagtgatggagcctgcacctgcctggtttgagtgcgaaacatcaataccaagcgttcggcccccaaaatggctcctgggaaagactgtgcttcaagccggcggtaatgtaggacttgaacaggaggggaccgtccacagactgatgcttagacgcacctgttccacgatgacggggcccgttcatttcaccgttggcaaaagtcggtcgagtgccagattggttgtgagcgacataccagtcgtgcttactcggcctttggagcctaaaacagggcgcgaactacagagcgttgtcttgagctgcgatttccggcctgctccaaaagcagtgcagtggtataaggacgacacacctctgtccccatccgagaaatttaaaatgagcctcgagggccagatggcggagctgcgcatacttcggctcatgcctgcagatgcaggagtttatcgctgccaggcagggagtgctcactcttcaactgaggtaacagtagaggctagggaagtgaccgttacgggccctctacaggacgctgaggccaccgaggagggctgggcaagcttctcatgcgagttgagccacgaagacgaagaggtcgagtggtccctgaatgggatgccactgtataatgattcgttccacgagatctcgcataagggccgtagacacacgcttgtccttaagtcgattcagcgggcagatgctggcatcgtgcgggcatcctcgcttaaagtttccacttccgcacggctggaagtgcgcgtgaaacccgtggtcttcttgaaagcgttggacgacctttcagccgaggaaagaggcactctggccttgcagtgtgaggtatccgaccccgaggcgcatgtcgtctggagaaaggatggagttcaactgggacctagcgacaagtacgacttcctgcacacggctggcacccggggactggtggtgcatgacgtgtcccctgaggacgcagggctttacacctgccacgtgggcagcgaggagaccagggcacgagtccgcgtgcatgatcttcatgtggggattaccaaacggttgaagacgatggaggtgctggagggagagagctgttccttcgagtgcgtcctctcacacgaaagtgcgtctgatcctgcaatgtggacagttggcgggaaaactgtgggaagcagcagcagattccaggccactaggcaggggcggaaatatatcctcgtggtcagagaggcggccccctcagacgcaggagaggtggttttctccgtgcggggcctcacatctaaggcctcgcttatcgttcgggaacgaccagctgccattatcaagccattggaggaccaatgggtggccccgggggaggatgtggagttgcgatgcgagctctctagggcaggcaccccagtacattggctgaaggaccggaaggcgattcgcaagagccagaagtatgatgtcgtgtgcgaggggaccatggccatgctggtcataaggggcgcttcattgaaagatgctggcgaatacacgtgtgaagtggaagcgagcaagagcacggcctcacttcatgttgaagagaaggccaactgttttacggaggagctcaccaacttgcaagtggaggagaagggaacagccgttttcacctgcaagaccgaacatccggcagccacggtgacctggagaaaaggtctgctggaactgcgcgcctcaggcaagcaccagccttcgcaggaagggctgacactgagacttactatttcagcactagagaaggctgatagtgacacatacacttgcgatatcgggcaagcacagtctcgtgcccagttattagtgcagggaagacgggtgcatattattgaagaccttgaggacgtcgatgtacaagaggggtcttcagctacatttcgttgcagaatatcaccagccaactatgagcccgtacactggttcctggataagactcccctgcacgcaaatgagcttaatgagatcgacgctcagccgggtgggtatcatgtgctgaccctgaggcagttagctctgaaggattctggaaccatatacttcgaggctggcgaccaaagagcttccgccgccctgcgggtgaccgagaaacctagtgtgtttagccgggagcttaccgacgccacgataaccgagggcgaagaccttacactggtctgcgagactagcacctgtgatattccagtgtgctggacgaaggacgggaagacacttagaggctccgccagatgtcagctgtcccatgaggggcaccgtgctcagctgctgataactggtgctactctgcaggactcaggcaggtataaatgcgaggccggaggagcatgtagctcatcaatcgttcgggtgcatgcaagaccagtgaggttccaggaagcactcaaagacttggaagttcttgaggggggcgccgccaccctgcggtgtgtgctctcaagcgtcgctgcgcccgtgaaatggtgttacggcaataatgtcttacggcccggggataagtattccttgcgacaggagggggctatgctggagctggtggtccgaaaccttcggccgcaggacagtgggcgatacagctgctcattcggtgaccagactactagtgccactttaactgtgacggcactccctgctcagtttatagggaagctgaggaataaagaggctacggagggtgccacagccaccctcaggtgtgaactatccaaggcagcccctgtcgaatggaggaaggggagcgaaacattgcgagatggggatcgttattgtttaagacaggacggagctatgtgcgagctccaaattcgcgggctggcaatggtggatgcagctgagtactcttgtgtatgtggggaggaaaggacctcggcctccttgacgatccggcccatgccagcccactttattgggcgactgagacatcaagagagcatcgagggtgccaccgccaccctgagatgcgaattgagtaaggctgcccctgtggagtggcggaaaggccgggaatcgctgcgcgacggtgaccgtcattctttgcggcaagatggtgcagtgtgcgagctgcagatatgtggactggcagtggccgatgctggggagtactcctgcgtttgtggggaggagaggacctctgctacacttacggttaaagcccttccagcgaaattcaccgaaggattacgcaatgaagaagcggtcgaaggggctaccgccatgctgtggtgcgagctgtcaaaagttgcccccgtggagtggcggaaaggcccagagaacctgcgtgacggagacaggtatatattgcgccaggaggggactagatgtgagctacaaatttgcggcttagccatggctgacgccggtgaatacctttgcgtgtgcggtcaagagcgaacatccgcaactctgacaatccgagccttgcctgccaggtttatcgaagacgtgaaaaatcaggaggcgagggaaggagctaccgcagtccttcagtgcgaactgaactccgccgcacccgtcgaatggagaaaaggtagtgaaaccctcagagatggcgatcggtactctttgcggcaggacggcacaaagtgcgagctgcagattagaggcctggccatggctgacacaggagagtactcttgtgtgtgcgggcaagaacgaacatctgccatgcttaccgttagagccctccccattaagtttaccgaaggtctcaggaatgaggaagccacagagggggctacagctgtactgcgctgcgagctgtccaagatggctcccgtggagtggtggaagggtcacgagacactcagagacggcgacaggcacagcctcagacaggacggagcaaggtgcgagctccaaattagagggctagttgccgaagatgccggcgaatacctttgcatgtgcgggaaggaaagaacctccgcgatgctaaccgtgagggctatgccttctaaatttatagaaggtctccgcaacgaggaggcgacagagggcgacacagctacactgtggtgtgagcttagcaaagcggcccccgtagagtggaggaagggacacgagacccttcgggatggggaccgtcattcattgcggcaggacggatcccgttgcgagcttcagattcggggattagcagtcgtggatgccggagagtatagctgcgtctgtggacaagagcgcacttccgcaactctcactgtcagagctctcccagcacgcttcatcgaagacgtcaaaaatcaggaagcgcgcgagggggccaccgccgtcctgcagtgcgaattgagtaaagcggcccctgttgaatggagaaaaggttcggaaaccctacggggcggcgacaggtatagccttcgccaagatggcaccaggtgtgagctccaaatccacggcttgagtgtcgctgatacaggtgaatactcatgtgtttgtggtcaggaacgaacatccgcaacactgacagtccgagctccgcagccagtgtttcgagagccccttcaatcccttcaggccgaggaagggtctaccgccaccctgcagtgcgagctttccgagccaacagccaccgtcgtgtggtcaaagggcggcctgcagctccaggcaaacggccgacgcgagccgcgactgcaaggctgcacagctgaattagtactgcaggacctgcagagagaggacaccggcgagtacacttgtacgtgtgggtctcaggccacttcagccactctcactgtgactgccgcccccgttaggttcttgagggagctccagcatcaggaggtcgatgaaggaggcaccgcgcacctgtgctgcgagctgagcagggcgggggcaagtgtagaatggcgaaaaggcagcctacaactcttcccttgcgcaaagtaccagatggtgcaggacggggccgcagctgaactgctcgtgagaggggtcgagcaggaggatgccggcgattatacgtgcgacaccgggcatacgcagagcatggcaagtttatcggtccgagtcccccggccgaaatttaagactagattgcagagccttgaacaggaaaccggggacattgcgcgcctctgctgccagctttctgatgctgagtccggggcggtggtccagtggctgaaggagggcgtggagcttcatgctggaccaaaatacgagatgagatcacagggggctacgcgtgagctgctgattcatcagctcgaggctaaggataccggagaatatgcgtgtgtaacagggggacagaaaacggccgcgtccctcagagttacagaaccagaagttacaattgtgaggggccttgttgatgctgaagtgacagcagatgaggacgtggagttcagctgcgaagtgtcaagggccggagctacaggcgtccagtggtgcctgcaaggtctcccactgcaatctaatgaggtgactgaagttgcggtgcgggatggtagaattcatacactcaggctcaaaggggtaactccagaagatgccggaacagtctccttccatcttggtaaccacgcctctagtgcccagcttacagtccgggcgcctgaggtgacaatccttgagcccctacaggatgtgcaactgtcggaggggcaagatgccagcttccaatgccggttatcacgggctagcggccaagaggccagatgggccctcggtggcgttcccttacaggctaatgaaatgaatgatatcaccgtagagcaaggaaccctgcacctgctgacccttcacaaggtcaccttggaagacgcaggtacggtgagctttcacgtaggcacatgttcctccgaggcacagctgaaagttacggccaaaaacaccgtcgttaggggtctggaaaatgtagaggcactcgaggggggggaggccctcttcgaatgtcagctatctcagccagaagttgctgctcacacgtggctcctcgacgacgagcctgtgcacacctcagagaacgcagaggttgtgttctttgaaaacgggctccggcacttgttgctgctgaagaacctccggccacaggactcttgccgcgtcacattcctcgccggcgacatggtaacaagtgcgttcctgaccgtaagagggtggcggctcgagattttggagccgcttaaaaacgctgcagtgcgggcaggagcccaggcctgtttcacctgtacactctccgaggccgtgccagtgggggaggcaagctggtacatcaatggagcagccgtgcagcccgatgactctgattggaccgtcacagcagacggcagtcaccatgccctgttgctgcggtctgctcagccgcatcatgcaggcgaggttaccttcgcttgtagggacgctgtggcatctgccagactgaccgttttaggccttcctgacccacctgaggacgctgaggtggtcgcacgcagtagccacacggttaccctcagttgggctgctcccatgtcagacggtggggggggactgtgcggttatcgcgtagaagttaaggagggcgccacagggcaatggcggctatgccacgaactagtaccgggcccagagtgtgtggtagatggcttggccccaggagagacatacagattccgcgtggctgccgtcgggccagtcggcgccggggagccagtgcacctcccccagacagtaagactcgcggagccccctaagcctgtgcctccgcagccatcagcacccgagagcaggcaggttgctgctggtgaggatgtgtccctggagctagaggttgtagccgaggctggggaagttatatggcataaaggtatggaacggattcagcccggtggacggttcgaagtcgtttcgcagggccgccaacaaatgttggtcatcaagggatttactgctgaggatcagggcgaataccattgcggactggctcagggatctatttgccctgctgctgcaacgttccaggtagcgctttcacctgcctctgtggatgaggcgcctcaacccagcttaccccctgaggcggcccaggaaggagacctgcaccttctatgggaggcccttgcacgtaagagaagaatgtcacgagaacccacactagactctatatctgagttgccagaggaggatgggcgttcacaacgcctgccgcaggaggcagaagaggtggctccagatctgagcgaggggtattccacagcggacgagctggcccggaccggggatgccgatctcagtcatacaagcagcgacgacgagagcagagcagggactcctagcttggtaacttacctaaagaaggcaggccggcccggaaccagtcctctggccagcaaggtgggagctcctgcagctccttctgtgaaaccacagcagcaacaggagccgctggctgcagttcgacccccactcggcgatttgtcaaccaaggatctcggtgacccttcaatggacaaagccgccgtgaaaattcaggcggcctttaagggctacaaggttagaaaagagatgaaacaacaggaaggaccaatgttttctcacacctttggcgacacagaggcccaggttggtgatgctctgcgcttggagtgtgtggtggcttctaaagctgacgtaagggcccgttggctgaaagatggcgttgaattgactgatggccgacatcatcatattgatcaacttggcgatggaacttgctcacttcttattactgggctcgatcgggctgacgctggctgctatacttgccaggtgagcaataaatttggacaggtcacccactcggcttgtgtagtggtgtctggttccgaatccgaggcagaatcatccagtggcggagagctagatgacgccttccggcgagccgcacgccgactgcaccgcctcttccgcaccaagtctcccgccgaagtatcagacgaagagctcttcctgtccgcggacgaggggcctgcagagcccgaagaaccggctgactggcagacctatagggaggatgagcactttatttgcatccgctttgaagctctgacagaagctcggcaggccgttactcggtttcaggagatgttcgcaacgctcggcattggcgtcgagattaagctagtggagcaagggcctcgccgggtcgagatgtgtatctctaaagagacaccggcgcccgtggttccacccgaacctttaccatcgttactgacttcggatgcagctcccgtgttcttgaccgaattacagaatcaggaggtgcaggacggctaccccgtctccttcgattgtgttgtgactggccaacccatgccctccgtaagatggtttaaagacgggaaactgttagaggaagacgatcactatatgataaacgaggatcagcagggtgggcaccaactgatcattacagccgtggtgccagctgacatgggcgtctacaggtgtttagccgagaatagtatgggcgtgagctcaactaaagctgaactgagagtggacctcacatctacagactatgatactgctgctgacgccacagagtccagcagttacttttcagcccagggctatctcagttccagggaacaggaaggaaccgaaagtacgacagatgaggggcaactgccacaggtggtggaagaactgcgtgatctacaggtcgctcctggtactaggctggcaaagtttcaacttaaggtgaaaggctacccagcaccccgcctgtactggttcaaagatgggcagcccttaacggccagcgcccacattcgcatgaccgataagaaaattcttcacactttagagataatcagcgtaacaagggaggactctggacagtacgctgcctatatctctaacgctatgggagccgcgtattcaagtgcccggttattggtgaggggtcctgacgagcccgaagagaaacccgcctccgatgtgcacgaacagctggttccccctcggatgttggagcgctttacaccaaagaaagtgaaaaagggttcgagtatcaccttcagcgtgaaggtggaggggagacctgtcccgacagttcattggctccgggaggaagccgagcgcggtgtgctgtggattggaccagatacccccgggtacaccgtggcaagctcagcgcagcaacatagcctcgttctgctggacgtgggacgccaacatcaggggacgtatacgtgcatcgcgtctaatgcggccggccaagctctttgtagtgcttccctgcatgtgtcaggtctgccaaaagtcgaggagcaagagaaggtgaaggaggctctgatcagcacattcctgcagggcaccactcaggctatcagtgcccaggggctcgaaaccgcaagtttcgccgatctagggggccagagaaaggaggagcccctagcggccaaagaagctttgggtcatttgtcgcttgccgaggtggggactgaggaatttctccaaaagctgacgtcccagattaccgagatggttagtgccaaaatcacccaagcaaagcttcaagtgcctgggggagacagcgatgaagatagtaaaacacctagtgccagccctaggcacggtcgcagcaggccatcctccagcatccaggaatccagttcggaaagcgaagatggcgacgcccgaggcgagatctttgacatctatgtggtgaccgcggattacctccccctgggtgcagagcaggacgcgattaccttgcgtgaaggccagtacgtcgaagtgttggatgccgcccaccctctgcggtggctggtgagaaccaagccgaccaagtcgtctccatctagacaaggatgggtatctcccgcttaccttgaccgacggctcaaactgagcccggagtggggtgctgccgaagctcctgagttccctggagaggcagtgagtgaagatgagtataaggccaggctttcctctgtgattcaggaactactgagctcagagcaggctttcgtggaggaactccagttcctgcagagccatcacttgcagcatctggagcggtgtccccacgtgcctattgcagtggcgggacaaaaggccgtgatatttcgaaatgtgcgtgacattggaaggtttcatagctcttttctgcaggagcttcagcagtgtgacacagacgacgacgtcgcgatgtgtttcattaagaaccaggcagcatttgagcagtacctggagttcctcgtaggccgcgtccaagctgagagcgttgtcgttagtaccgcgattcaggaattctacaagaaatatgccgaggaagcactcctggcaggggatccctcccagcccccccccccgcctctgcagcactacctggaacaaccagtggaacgagtgcagagataccaggctctgctgaaggagctaattaggaataaggctagaaataggcaaaactgcgcgctgctagagcaggcctacgcagtggtgagtgcgttgccacagcgcgctgaaaataaactacatgtgagtctgatggagaactacccgggcaccttacaggcgctgggggaaccgatccgacaaggtcactttatcgtgtgggagggcgcgcccggcgctcggatgccctggaagggtcacaatcgccatgtctttctgttcagaaatcacctggttatatgcaaaccccgtagggattctcgtaccgataccgtgtcctacgtttttagaaatatgatgaaactgtcctctatcgaccttaacgatcaggtcgagggcgacgatagggctttcgaagtgtggcaagagagagaagactcggtgaggaagtatctgctgcaagcccgtaccgccattataaagtcctcttgggtgaaggagatttgcgggatccagcaaagacttgcactgccagtttggagaccaccggactttgaggaagaactggcggattgtaccgcagagctgggagagacggtgaaactggcttgccgtgtgactggaactcccaagccagttattagttggtataaagatgggaaggctgtgcaggtggatccacaccatatccttattgaggatccagacggtagctgtgctctgattttagactcacttacaggagtggatagcgggcagtacatgtgtttcgccgcttccgccgcaggaaattgttccaccttaggcaaaatcctggttcaggttccgccccgttttgtgaacaaggtgagagcttctccatttgtggaaggagaagacgctcaattcacctgtactatcgagggtgccccttaccctcagataaggtggtacaaggacggggcgctgttgaccacgggaaacaaattccagacactctccgagccacgctccggcctccttgtcttggttatcagagcggcttccaaggaagatcttggcttgtatgagtgcgaactggttaacagattgggctcagcgcgtgcgtctgcggaattgcggattcagtcaccgatgttacaggctcaggaacaatgccatcgagagcaacttgttgcggccgtggaggtgactgaacaggagacgaaggttcccaagaaaactgtgattatagaggagaccatcaccaccgtcgtgaaatcaccccggggacaaaggcggagccctagtaaaagcccttcgcgtagcccaagccggtgtagcgcaagcccacttagaccgggcctcctcgcccctgacctactgtacttgcctggggcgggacagccacggcgcccagaggctgagcctggacagaaacccgtagtgccaacactgtacgtgacggaggcagaagcacattcgcctgcgctgcctggcctgtccggaccccaaccaaaatgggtggaggttgaggaaacaatcgaagtgagggttaagaaaatgggacctcaaggcgtgagtccgactaccgaagtgcctcggtcctcaagcgggcacctctttactctccccggagccacgcctggaggtgatcccaatagcaacaacagtaataacaaactgcttgcccaggaagcttgggctcaaggaaccgcgatggtgggtgtgcgcgaaccgcttgtcttccgcgtggacgcccgcggctccgtcgattgggcagcatcagggatgggctccttggaagaggagggcactatggaggaggctggggaggaggagggagaagacggtgatgcattcgtgacggaagagtctcaggacacccactccctgggcgatagggacccaaaaattttgacacacaatgggcgcatgttgacactcgcagatctggaggactacgtaccgggggaaggggaaaccttccactgtggaggcccaggcccgggcgctcccgacgatcctccctgtgaagtctcagtgattcaacgtgagatcggggagcccactgtgggtcagcctgtcctcctttccgtgggtcacgctctgggtccacgcggaccgttgggactatttcgccccgagccacggggcgcttctccgccgggaccacaggtcagatcactggagggaacctctttcctcttaagggaagcccccgccaggcctgttggctctgctccttggactcaaagcttctgcacccggatcagaaggagtgccgattcgggacaatcttccttcacaactgaactcagtactcagaccgtgaatttcggaaccgtcggtgaaaccgtgactttgcacatatgtcccgatcgagacggcgacgaagcagctcaaccctag

SEQ ID NO: 23145 - DNA, 1407 bp, synthetic construct
  source 1..1407: mol_type = other DNA; note = Synthetic coding sequence
atggccgcccccgacctgagcaccaacctgcaggaggaggccacctgtgcaatttgtctggattatttcactgaccctgtgatgaccgactgcggtcataatttttgtcgcgagtgtataaggcgttgctggggacagcctgagggaccctacgcatgcccggagtgccgggaactgagcccccagcggaacttgcgtcccaaccgccccctcgcaaagatggccgaaatggcaaggcgcctgcaccccccctcaccggttccacaaggcgtgtgtccagcccaccgcgagccactggccgctttttgtggagacgagctgcgtctcttgtgcgcagcgtgtgaacggagcggagaacactgggcgcacagagttcgtcctctccaggacgctgccgaggaccttaaggcaaagcttgaaaagtcccttgaacacctgagaaagcagatgcaggacgcccttctgttccaggcacaggcggacgagacatgtgtgctctggcagaaaatggtcgagtctcaacgtcaaaacgtgctgggggaatttgagcgcctgagacgtctgctggcagaggaggaacagcagctacttcagaggctcgaggaagaagagttggaggtgctgccacggttaagagagggagcagctcatttggggcagcagtctgcccacctcgctgaattgatcgcagaacttgagggccggtgtcagctccctgccctcggacttctccaggatattaaggacgccttgcgcagggtacaggatgtcaagctccagccccccgaagtcgtgccgatggaactgagaactgtgtgcagggtgccaggactagtggaaaccttgagacgctttcgcggcgacgtgactctcgatcccgacaccgcgaatccggaactgatcctgagtgaggacaggcgcagcgtccagcgaggagacctgcggcaggccctcccggattctccagagaggttcgatcccgggccatgtgtgctgggacaagagagattcaccagcgggaggcactactgggaggtcgaggtcggggatcggacatcttgggcactgggtgtttgcagagaaaatgtgaaccggaaagaaaagggagagctttctgcgggaaacggcttttggatccttgtgtttctggggtcatactacaattcttcggaaagggcattggcacctttgcgagatccccctcggagagtcgggatttttctcgattacgaggcgggccatctgtctttttactcggccacagatggaagcttgcttttcatctttccagagattcccttctctggtaccctaaggccactatttagccccctttcatccagtccaaccccaatgaccatctgcagacctaaaggtggttcaggcgacaccttggcacctcagtag

SEQ ID NO: 23146 - DNA, 813 bp, synthetic construct
  source 1..813: mol_type = other DNA; note = Synthetic coding sequence
atgagccccggcagcggcgtgaagagcgagtacatgaagcggtaccaggaacctcgatgggaggagtacggcccttgctaccgggagctgttgcactaccgcttgggccggcgactcctcgagcaggctcacgcgccctggctgtgggatgattggggccctgccggctcatccgaggattcggcaagctctgagagtagtggggccggcggtcctgctccgagatgcgctccaccgtcccccccccctccagtggaaccagcaacccaagaagaggcagagagacgggctagaggcgcgcctgaggagcaggacgctgaggcgggggatgccgaggcagaggatgccgaggacgctgcactccccgccttgccagttaaagacgtggaagacaagccagaacagcagaccagaacgagagagactgacaagtctcctacatcaacagaacccagacaacagccttcagcgcttttcgcaagggggaatcgaaaggccgtcaagagccctcaacgatcatcatccaagatcaaggaaaataaacaccctttcgccctttacggatggggcgagaagcagacagatacaggctcacagaagactcataacgtctgcgcttcagcacctgtgcatgaaatacacgagtccgcccttcgcgccaaaaaccgccgacaggttgagaagaggaagctcgttgcccagcgtcaacgggcccactctgtcgatgtggagaaaaacagaaagatgaaggcatcgagtagcgaaaacccatggatgacagagtatatgaggtgctattctgcgagggcctag

SEQ ID NO: 23147 - DNA, 2667 bp, synthetic construct
  source 1..2667: mol_type = other DNA; note = Synthetic coding sequence
atggacgagagcgccctgctggacctgctggagtgccccgtgtgcctagagcgtttagacgccagtgctaaggtactgccatgtcaacacaccttttgcaagcgctgccttttgggcattgtggggtcccgtaacgagctgcgttgccccgaatgtagaacgctagtcggctccggcgttgaggaattgccatctaacatcctgctggttcgcctactggacgggattaagcaacgcccctggaagccaggccctggcgggggctccgggacaaattgcacgaacgccttgagaagccagtcttcgacagtggccaactgctcttcaaaggatctgcagtctagccagggagggcagcaacctcgggttcagagttggtccccacctgtccgtgggattccacagctaccttgtgccaaagctctgtataactatgagggcaaagagcccggggatctgaaattttccaaaggtgatattatcatactgcggagacaggtggacgaaaactggtaccatggtgaggtaaacggcatccatgggtttttccctacaaacttcgttcagatcattaagcctctgccgcagcccccaccacaatgtaaagcattgtacgacttcgaagttaaggacaaggaagcagacaaggattgcctgccctttgctaaagacgatgttcttacggtcatcaggagggtggacgagaactgggccgagggcatgctcgccgacaaaattggtatatttccaattagttatgttgaattcaattcagccgctaagcagctgatagagtgggataaaccccccgtccctggagtggacgccggcgagtgtagctctgccgccgcgcagtcaagtacagcccctaagcatagtgacactaagaagaacacaaagaagcgtcactctttcacttctcttacaatggcgaacaagtccagtcaggcgagtcagaacaggcatagcatggaaatcagcccacccgtccttatatcctccagcaacccaacggcagcagcccggataagtgaactcagtggcttgagctgcagcgccccctctcaggtccacatatctaccaccggacttattgtcaccccgccaccgtcgtcccccgttacaacaggtcccagctttacatttcccagcgatgtgccttatcaggccgctctcgggactctcaacccacccctaccccccccaccattacttgcagcgactgttttagcctccactcccccaggcgccaccgccgctgccgccgctgccggcatgggcccgagacctatggccgggagcactgatcagatcgcccacctgaggcctcaaactaggcccagcgtgtatgtggctatatatccgtacaccccacggaaggaggacgaactggagctgagaaaaggggaaatgtttcttgttttcgaaagatgccaggacggttggtttaaagggactagtatgcacacgtctaagattggtgtgtttccagggaactatgtcgcgcctgttacccgcgccgtaactaatgcttcacaggcgaaggtccccatgtcaacagcaggccagacaagtcgaggggttactatggtaagcccatcaactgccggaggacctgctcaaaagctgcagggcaatggggtcgctggcagcccctctgttgtgccagcagccgtcgtgtcagccgcacacattcaaacatctccacaggccaaagttctgttgcacatgaccggccagatgactgtcaatcaagctaggaacgccgtcagaactgtagcggctcacaaccaggagagaccaaccgccgccgtcaccccaatccaggtgcagaacgctgcaggactgagccctgcatccgttggactaagccaccactcgcttgccagcccacaacctgctcccctgatgcccggatccgccacccacaccgccgcaatttctatctcacgcgcatccgcacctttagcttgcgcagccgcagccccactcacctcaccttcgattacctcagcaagccttgaggcagaaccgtcgggccgaatcgtaaccgtattgcctggactccctacctctccagactcagcatcctccgcgtgcggtaattctagtgcaacaaaaccagataaggactccaaaaaggagaaaaaaggattgcttaaattgctaagcggcgcctctactaagcgcaaaccccgtgtaagccctcctgcctctcccaccctggaagtcgagctgggcagtgcagagctgccgctgcagggggctgtgggccccgagcttccaccgggaggggggcacggtcgggcaggttcatgtcccgttgatggcgacgggcccgttactacagcagtcgctggagccgccctcgctcaggacgcttttcatcgaaaagctagttccctggatagtgccgttcccattgctcctccacctaggcaggcctgtagctctttaggacctgtccttaacgaatccagaccagtcgtttgcgaaagacatagggtggtagtgagctatcccccccagagcgaggccgagctggaactcaaggagggcgacatcgtcttcgtgcacaaaaaacgggaggacggctggtttaaagggaccttgcagcggaacgggaaaactggactattcccagggtctttcgtcgagaatatttag

SEQ ID NO: 23148 - DNA, 570 bp, synthetic construct
  source 1..570: mol_type = other DNA; note = Synthetic coding sequence
atgccccagaccgtgatcctgcccggccccgccccctggggcttccgtctgagcggaggtatcgacttcaaccagccactagttatcacccgcatcactcccgggtctaaggctgccgcagcaaacttgtgtccaggagacgtcatcctggctatcgatgggtttggtaccgagtcaatgacacacgctgacgcacaggataggatcaaggccgcagctcaccagctgtgcctgaaaatcgatagaggcgagactcatctgtggtcccctcaagtttcggaggatggtaaggctcaccccttcaagattaatctggaaagtgagccacaggagtttaagccaattggtaccgctcacaaccggcgggcacagccattcgtggccgccgcgaacatagacgacaagcggcaggtagtgagcgcctcatacaatagccccattgggttatatagcacttctaacatccaggatgcgctccacggccagctacgcggattgatccccagtagccctcagaaaaccggcaccaccctgaataccagcattattttcggtcctaacctgagctag

SEQ ID NO: 23149 - DNA, 1095 bp, synthetic construct
  source 1..1095: mol_type = other DNA; note = Synthetic coding sequence
atgccccagaccgtgatcctgcccggccccgccccctggggcttccgactttcaggcggtatcgattttaatcagccgctggttatcactagaattacacctggttcgaaagcagctgctgccaatctgtgccccggggacgtaatccttgccatagacgggttcggcaccgagtccatgactcacgccgacgctcaggatagaattaaggctgctgcacaccaactatgcctgaaaatcgataggggcgagacacatctgtggtcaccacaggtaagcgaagatggaaaggcgcatccctttaagataaacctagagtccgaaccacaggatgggaactactttgagcacaaacataacatacgcccaaaacctttcgttatccctggcaggtcctctggctgtagcacaccctcaggcatcgattgtggcagtgggcggagcactccctccagcgtctccaccgtctcgaccatctgtcccggggatcttaaagtggccgcgaaactggcaccaaacattcccctggaaatggaactccccggagtgaagatcgtgcatgctcaatttaatacccccatgcagttgtactcagatgacaatatcatggaaacgctgcagggccaggtgtctaccgcactcggtgagacccctcttatgtctgaacctactgcttctgtgcctccagagtccgatgtgtatcggatgctacatgataacagaaatgaacctacgcagccccggcaaagtggctctttccgggtcttgcaaggaatggtggatgatggaagcgatgaccgcccagctgggactcgaagtgttcgggcccctgtgaccaaggtgcatggaggatcaggaggcgctcagaggatgcccctgtgcgacaagtgtggatccggcattgttggcgcagtcgttaaggcacgagacaagtatcggcatccggagtgttttgtgtgcgctgactgtaacctgaacctcaaacagaaggggtactttttcatcgagggggaactgtactgcgagacccatgcgcgtgcccggacaaaacccccggaggggtatgacacagtcaccttgtatccaaaagcatag

SEQ ID NO: 23150 - DNA, 951 bp, synthetic construct
  source 1..951: mol_type = other DNA; note = Synthetic coding sequence
atgccccagaccgtgatcctgcccggccccgccccctggggcttccgcctcagcggggggattgacttcaaccagcctctggtaattaccaggatcaccccaggatcaaaagctgccgcagctaacctttgcccaggggatgtgatacttgccatcgacgggttcggaaccgaatccatgacccatgctgacgcacaggacagaataaaagccgcagctcatcaactgtgcctcaaaattgacaggggagaaacgcacctgtggagtcctcaggtgagcgaggacggtaaagcacaccccttcaagatcaatcttgagagcgagccgcaggaatttaagcccattggaaccgcacacaatcgaagagctcagccctttgtggccgccgccaatattgatgataaacggcaggtggtaagcgccagctataatagtcccatcgggctctatagtacatccaatatccaagacgcgctgcatggccagctgcgcgggctaatcccctcctcaccacaaaacgaaccaaccgctagtgtgccacctgaatctgatgtgtatcgtatgctgcacgataacagaaatgaaccaacccagccaagacagtccggcagttttcgtgtcctacagggaatggtcgacgatggatcagacgataggcccgccggcactcggtccgtgcgggcacctgtgactaaggtgcacgggggatctggcggcgcccagaggatgcccctgtgcgacaaatgtgggtccgggatcgttggggctgtggtcaaagcccgtgacaagtataggcaccccgagtgtttcgtgtgtgccgactgtaaccttaacctaaaacagaagggctacttctttattgagggcgagttgtactgcgaaacccacgcgcgagcccgtacgaaacctcctgagggatacgatactgtaaccctctatcctaaagcctag

SEQ ID NO: 23151 - DNA, 3303 bp, synthetic construct
  source 1..3303: mol_type = other DNA; note = Synthetic coding sequence
atgagctactaccagcggcccttcagccccagcgcctacagcctgcctgccagtcttaacagctccattgtgatgcagcacgggacctcactggactccacagatacgtatcctcagcatgcccaatctctcgatggtacgacatcaagcagcattcctttgtatcgttcctccgaggaagaaaagagagtcaccgttataaaagccccacactatccagggataggccccgtggacgaatccggtattcccaccgcaatacgcaccacagtggatagacctaaggattggtataagactatgttcaagcagatccacatggtccacaaacctgacgatgacactgacatgtacaacaccccttacacttacaacgccggactctacaaccctccgtattcagcacagtcacatccagctgcaaaaacacagacttaccgccccctcagcaaatcccattctgataactcacccaacgctttcaaagacgcctcctcccctgtcccacccccacatgttccaccccccgtcccgcccctccgcccacgagaccggagtagtacggagaagcacgattgggacccccccgatcgcaaagtggacacacgtaagttccgctctgagccgcgatctatcttcgaatacgagcctgggaagtctagtattttgcagcatgagagacccgcctccctgtatcagtcctcaatcgataggtcactcgagcgacctatgtcctccgcctccatggcatcagactttcggaaacgcaggaagtctgagcctgctgtggggcctccacgtggccttggagaccaatcagcgtcccgaacaagtcccggtagggtcgatcttcccggatcctcaactaccctcaccaaatcctttacttccagctcccccagctctccttcgagagcgaagggaggcgatgattccaaaatatgtcccagtctctgctcttatagcgggcttaacggaaacccctcctccgagttggactactgctcaacttataggcagcaccttgacgtgcctagggattcccctcgggcaatctctttcaagaacggctggcaaatggcaagacagaacgcagagatctggtccagtaccgaagaaactgtgtctccgaagattaaaagtcggtcatgtgatgatttgctaaacgatgactgtgactcattccccgacccaaaagtgaagtccgagtctatgggttcgttgctctgcgaagaagatagcaaagagagctgccccatggcatggggtagcccttatgtgcctgaggtccgatcaaacgggcgatctcgtatccggcaccgatccgccagaaacgcccctggcttcctgaaaatgtacaagaaaatgcacaggatcaatcgaaaagatctaatgaatagtgaggttatttgcagtgttaagagtcgcattctccaatacgagagtgagcagcaacacaaagatttgctcagagcatggtcccagtgctctacagaggaggttcctagggatatggttccaacacgaatatccgaatttgagaagttaatccagaaaagtaagtccatgccaaatcttggcgacgatatgctctcccccgtaactttggagccaccgcagaatggcctctgtccaaagaggcgcttttcaatagaatatctgttggaggaggagaaccaaagcggccccccagcccgaggccgcagaggctgtcagtccaatgccttggtgcccatccatatcgaagtgacttccgacgaacagccccgcgctcacgtcgaattttctgattccgatcaagacggagtcgtaagtgaccattctgactatatccatctggaggggtccagtttctgctccgaatccgacttcgatcatttctcctttactagttcagaaagcttttatggctcatctcaccaccaccaccatcaccaccaccaccatcaccggcacctaatctccagttgcaagggtaggtgtcctgcctcctacactagattcaccaccatgcttaaacacgagcgggcacgccatgagaacacggaagagccaagaagacaggagatggacccaggattgtcaaaactggcgttcctggtgagtccagttccatttaggaggaagaaaaatagcgcgccgaaaaaacaaacggagaaggcaaagtgtaaagcttcagtgtttgaggcgctcgatagcgccctgaaagacatctgtgatcagataaaagcggagaaaaagagagggtcactgcctgataattccattctgcataggctgatctcggagttattgcccgacgtgcctgagaggaactcatccctcagggccttgagacggagccccttgcaccaaccactccatccacttccacccgatggagctatccactgcccaccctaccagaacgattgcggacgcatgccaaggtctgcctccttccaggatgtcgacacagctaattcatcttgccatcaccaggaccgtggaggagccctccaggacagggaatctcctcgctcctactcttccactctcaccgacatggggcggagcgcaccacgggagaggagaggaacacctgagaaggaaaaactgcccgctaaagctgtctacgattttaaggcacagactagcaaggaattgagcttcaagaaaggcgacaccgtctacatactgcgaaagattgaccagaactggtacgaaggagaacaccacggcagagtaggcatcttccctatatcttacgtcgagaaactcaccccacctgagaaggctcagcctgcaagaccacctcctccggcacagcccggggaaataggagaggccatagctaagtacaatttcaatgcagatacaaacgtggagctttcccttaggaagggtgaccgggtgatcttgctcaagcgagtcgaccagaactggtatgaaggcaagatccctggtacgaatcgccagggaatctttccggtgagctatgtggaggtggtgaagaagaatacgaaaggcgccgaagactatcccgaccctcccatcccccactcatacagtagtgaccgcattcatagcctctcctccaataaaccacaacgtcccgtctttacccacgaaaacatccagggggggggcgagccctttcaggcattgtataattatactcccagaaacgaggacgaactagagcttagggaatctgatgtaattgacgtcatggaaaaatgcgacgacggctggttcgtggggacaagtcgtaggactaagttttttggcaccttccccggaaactacgttaagcgcctatag

SEQ ID NO: 23152 - DNA, 4389 bp, synthetic construct
  source 1..4389: mol_type = other DNA; note = Synthetic coding sequence
atgttccggggccccaagccccccatcgcccccaagccccggctgactgctcctaacgaatggagagcgtccgtttatctgaatgattcactgaacaaatgttctaacggccggctcccatgtgtggacaggggcctcgatgaggggccaaggtccattcctaaatgttctgagtccgagactgacgaagattatatcgtggtgccgcgcgtccccttgcgcgaagatgaacccaaggacgaaggcagtgtcgggaataaagcgctcgtcagtcccgaatcctccgcagaggaggaggaagaacgagaggaaggcggtgaggcctgcggactggagggcacaggcgctggggaagattctgttgcacctgcggccccaggggcaggcgcactcagtagagagggcgaagaaggcaccgaccttgctctcgaggatgagggtgaaggttgtgccgatgaaccaggaacactggagcaagtatccaggtcagaagaagaagagaaacttgtccagccccatagggagtgttccctggaggacagtgggccttgggccggcgaaggggtgtttcagagcgacttattgctgccacacattcacggagaggaccaggagccgcctgacacccctggagaggccgaagaggatgatgaagagggatgcgccagcactgaccccgctggagccgacgagggctccgggccggaccggcctacggaggatatgggccaggatgccgaagacacctccgaagaacccccagaaaaggaagagctggcgggagtccaggaggccgagacagctacagattgcccagaggtcctggaggagggttgcgaggaggccaccggtgtgacggggggagagcaggtggaccttagcgagccacccgaccacgaaaaaaaaactaatcaggaagtcgccgccgccactctggaagaccacgcacaagatgagtcagctgaagagtcctgccagattgtgccctttgagaacgactgcatggaggacttcgttacgtccctaaccggttccccgtatgaatttttcccaacggagagtacctccttctgcagcgagtcttgctcccccttgagtgagtctgctaagggtttggaatcagaacaagctccaaagttgggactccgtgccgaggaaaatccaatggtcggcgccctgtgtggacagtgcgggagtttgcagggaggcgcagcggaaggaccagccgccccagatgttgtggtcgttctggaagaagaagcactggacgatgccctcgccaatccatatgtcatgggcgtcggactgccgggtcaggcagcccctggcgagggtggccaggccgccagcgacgccctgggaggttatggttcaaaagaggagctgaattgtgaagccgagggcggcttagtgccagcagaccggaagaacacatctacacgcgtgaggccgcactcaggaaaagttgcaggctacgtccccgaaaccgtgcccgaggagaccggacccgaggctgggagctccgccccaggcatcgggggtgctgctgaggaagtgggcaagacactgctttctcttgagggtaagcccctcgaggcatcccgcgcattgcccgctaagccgcgggccttcaccttatatccccggtcattctccgtggaggggcgggagattcccgtcagcgtttaccaggagcctgaagggtctggtctcgacgatcaccggattaaacgcaaggaggacaacctgtccttgtcctgtgtgatagggtctagcggatctttttctcagaggaatcacttacccagcagcggaactagcacaccaagcagtatggtggatatccccccgccattcgacttagcttgtattactaagaaaccaataaccaaaagttctccctcgctgttgatcgagagcgacagccctgataagtacaaaaaaaagaagagttcatttaagcggttcttagcactgacgtttaagaaaaagaccgagaataagttgcatgtcgacgtgaacgtgtcgtccagccgatctagctccgaatcaagctatcacggcccgagccggatcctggaagttgaccggcgttcactaagtaattcacctcaattgaagtccaggaccggtaagctgcgggcttccgagtctccctcttcccttatattctaccgggacggtaagagaaaaggggtcccgttttcccggaccgtgagtcgcgtcgaatccttcgaggacaggtcccgacctccattcctcccattaccacttactaagccccgctccattagctttcctagtgctgacactagtgactatgaaaatatccccgcgatgaactcagattacgaaaacattcagattccaccccgaagaccggcacgagccggagcatttaccaagttattcgaggatcaatcccgtgcgctctcaacggccaacgagaacgatggctacgtggatatgtcttcttttaatgcgttcgaatctaagcagcagtctgctgatcaggatgcagagtccgcctatactgaaccatacaaagtatgtcctataagtagtgccgcgccaaaggaagacctgacctctgacgaggagcaaagatcatccgaagaggaagactcggccagccgggatcccagcgttacccacaaagtggaaggccaaagcagagctttggtcatcgctcaagagctgctgagctctgaaaaggcttacgtggagatgctgcagcacttgaatcttgatttccacggtgccgtgatgcgcgctctggacgatatggatcatgagggtagagataccctggcccgcgaggaacttagacagggtctgagtgagctccctgccatccacgatctccatcaggggattctagaagaattagaggaaagactgagtaactgggaatcgcaacagaaggtggccgatgtgttcctcgctcgcgagcagggctttgaccaccacgccactcatattctccagtttgatcggtacctggggttgctatcagagaattgtctgcactcgccccgcctggccgccgccgtgcgcgagttcgagcaaagcgtgcagggtgggagccagactgctaaacacaggctattgcgggtggtgcagcgactgttccaataccaggtgcttctgacggattatcttaacaacctgtgccctgacagtgcagaatacgataatactcagggagcgctcagtttgatctcgaaggtgactgatagagctaatgatagcatggaacaaggggagaatctacagaaactggtacatattgaacatagtgtccgcggccagggcgacctcctgcaacctgggagagaattccttaaggaaggtacactgatgaaagtaacaggaaaaaacagaaggccacgccacctgttcttgatgaacgacgtgcttctatatacctacccccagaaggacgggaaatacagactgaagaatacgctggcagtcgccaatatgaaggttagcaggccagttatggagaaagtcccatatgccctgaagattgaaaccagcgagtcctgcttaatgttgtcggcctctagctgtgcagagagagatgaatggtatgggtgcttgtctcgcgctctacccgaggattataaggcgcaggctcttgcagcttttcaccactctgtcgagatccgggagcggttgggggtgtctctgggagagcgtcctcctacattagtacctgtcacacacgtgatgatgtgcatgaactgcgggtgtgattttagcctcaccttaaggaggcatcactgccacgcttgtgggaaaatcgtctgtcgcaattgttcaagaaataagtacccactcaagtatcttaaagatcggatggccaaagtctgtgatggatgtttcggtgagttgaaaaaacggggaagggctgtccccggactgatgcgcgagagaccagtgtcgatgagctttcccctctcctccccgcgattctcaggctcagccttctcctcggtattccagtccataaaccctagcactttcaagaagcagaaaaaagtccctagcgccctcactgaggtggcagcaagcggggagggcagcgctattagcggctacctcagtcggtgtaaacgagggaagaggcattggaagaagctttggttcgtcatcaagggtaaggtgctttatacttacatggctagcgaggacaaagtggccctggagtcaatgcccctcctaggttttaccatcgctcccgaaaaagaggagggatcttcagaagtggggcctatctttcacctgtaccacaaaaagactttattctacagtttcaaggcggaggataccaatagcgcccagcggtggatcgaagccatggaggatgcctctgtgctgtag

SEQ ID NO: 23153 - DNA, 768 bp, synthetic construct
  source 1..768: mol_type = other DNA; note = Synthetic coding sequence
atggccagcagcgacctggagcagctgtgcagccacgtgaacgagaagatcggaaacattaagaagactctgagcctgagaaactgcggtcaagagcctaccttgaagacagtgctcaacaaaattggtgacgagattatcgtaatcaacgagctactgaacaagcttgagctggagatacagtaccaggaacaaaccaataactcactcaaagagctgtgtgagagcctagaagaagattacaaggacatagagcatctgaaagagaacgtaccctcccacctgccacaggtgaccgtgactcaatcttgtgttaaggggtcagacctcgatccagaagagccgataaaagtggaagagcctgaaccggtcaagaaaccacccaaagaacaaagatctattaaggaaatgccattcattacctgcgacgagttcaacggtgtacctagctatatgaagtcgagacttacctataaccagataaacgacgtcattaaggagattaacaaagccgtgatcagcaaatataagatcctgcatcagccaaaaaagagtatgaactctgtgacccgcaacctgtatcacaggttcatcgacgaggagaccaaagacaccaaaggccgctacttcatcgtggaagcggacattaaagagtttacgactctcaaggccgacaaaaagtttcacgtactcctgaatatcctgcgccattgcaggcgactgtctgaagtacgcggtggaggcctgactagatatgtgataacgtag

SEQ ID NO: 23154 - DNA, 627 bp, synthetic construct
  source 1..627: mol_type = other DNA; note = Synthetic coding sequence
atgagcgccggcggcgacttcggcaaccccctgcggaagttcaagttggtcttccttggcgagcagtctgtcggaaaaacctccctgataacccgcttcatgtatgactctttcgacaatacataccaagcaaccattggtatcgactttctatccaagaccatgtaccttgaagatcgcaccgttaggctgcagctgtgggacaccgctggccaggagagattcaggtctctgattcccagttatatacgggacagtaccgttgctgttgtggtgtacgacatcacaaacctgaacagctttcagcagactagcaaatggatcgacgacgtgcgaactgagcgtggctccgacgtgatcattatgttggtgggcaacaagactgatctcgctgacaagagacaaattaccattgaagaaggagaacaacgcgcaaaagaactgtctgtgatgttcatcgaaacctccgctaagactgggtataacgtgaagcagctatttcgaagggtggcctccgctctgcctggcatggagaacgtccaggagaaatccaaggaaggaatgatcgatataaagcttgacaaaccccaagagccacctgcctccgaagggggctgctcctgttag

SEQ ID NO: 23155 - DNA, 3168 bp, synthetic construct
  source 1..3168: mol_type = other DNA; note = Synthetic coding sequence
atgaccgtggagcagaacgtgctgcagcagagcgccgcccagaagcaccaacagaccttcctgaaccagttacgcgaaatcactggaattaatgacacacaaatactccaacaagctctcaaagactccaatggcaatttggaattggccgtggccttcctaacagcgaaaaatgctaaaactccccaacaggaggaaacaacgtattaccagaccgctttgcctgggaatgaccggtacattagcgtgggttcccaggccgatacaaatgtcattgatttgaccggagacgataaagatgacctgcaacgagcaattgctctgtccctagcggagtcgaacagagcctttagagagacaggaattaccgatgaggaacaggcaatttccagagtccttgaagcaagcatcgccgaaaataaagcttgcctgaagaggactcctacggaagtgtggagggattcccggaatccttatgatcgcaagcggcaggacaaggcgccagtaggactgaagaacgtggggaacacttgctggttctccgccgtcatacaaagcttgttcaacttgctcgagtttcggagactcgtgctcaattataaaccgccaagcaatgcgcaggacctcccccgaaatcaaaaggagcaccgtaaccttcccttcatgcgggagctccgatatctcttcgctctgttggtgggcacaaaacgtaagtatgtcgatccatcccgtgcagtggagattttgaaggatgcattcaagtccaatgatagccagcaacaggatgtaagcgaatttacacataaacttctggactggttagaagacgcctttcagatgaaggctgaggaggagacggacgaagagaagcctaaaaacccgatggttgaactgttctacggccggtttctggccgtgggcgtgctggaagggaagaaatttgaaaatacagaaatgttcggtcagtatccactgcaggtcaacgggttcaaggatctccacgagtgtctggaggcggctatgatcgagggagaaatagaatctctgcactccgaaaacagtgggaagtccggccaggagcattggttcacagagctgcctccggtgttgaccttcgagttgtcccgatttgaatttaatcaggccttggggcgacctgagaagatccataacaagcttgagttcccccaggtgctgtatttggatcggtacatgcataggaatcgcgagatcacccggataaaaagagaggagattaagcgtctgaaagactacctgaccgtgctgcaacaaagactggaaagatatctaagctatgggtctggacctaaaagatttcctttggtggatgtcctgcaatacgcactggagttcgcttcgtctaaacccgtgtgtacatcacccgtcgatgacatcgacgcaagttcccccccatccggatctattccctctcagacactgccctccactactgagcagcaaggcgcactctcttcagagctgcccagcacatcacccagcagtgtggccgctatctctagcaggtcagtaattcataaaccattcactcagagtagaatcccgcccgatttacctatgcaccctgctcctagacacatcaccgaagaggagttgtcagtcctggaaagttgcctccaccggtggcgtacagagattgaaaatgacacacgagacctccaggagtccatcagtagaattcatcggacaattgagctgatgtattctgataagagcatgatccaagtcccgtacagacttcacgccgtgctggtccacgaaggccaagcgaatgccgggcactactgggcgtatattttcgatcaccgggaatcacgatggatgaaatataatgacatcgccgtaactaaaagttcatgggaagaactcgtgagggattccttcggtggctacaggaatgcgtctgcctattgtttaatgtacatcaatgacaaggcccagtttctgattcaggaggagtttaacaaggagactggacagccactggttgggatcgaaaccctcccccctgatctgagggacttcgtggaggaggataatcagaggttcgagaaggagctcgaagagtgggacgctcagctggctcagaaagccctccaggagaagctgctagcaagtcagaagctgagggagagtgagacctccgttaccaccgcgcaggcagcgggggatcctgaatatctggagcagccttctagaagtgacttctcaaaacatcttaaagaggagaccatccaaataattactaaggcttcccacgagcacgaggacaagagtccagagacggtcctgcagagcgcaataaagctggagtacgcccgtctggtgaagctggcccaggaggacaccccccccgaaaccgactatagattgcaccatgtcgtggtgtactttatccaaaatcaagctcccaagaagataatcgagaaaacactacttgagcagttcggggatagaaacttgtcattcgatgagcgttgtcataacattatgaaggtcgcccaggccaaactggaaatgattaagcccgaggaggtgaatttggaagagtacgaagaatggcaccaggattacagaaagttccgggaaacaacgatgtacctcatcattggccttgagaatttccagagagagtcgtatatcgactcactactgttcctaatctgcgcctatcagaataacaaggaacttctgtctaaaggcttgtatcgggggcacgacgaagaactgatatcgcactaccgccgcgaatgcctgttaaagctgaatgagcaggctgctgagctcttcgagtctggggaggacagggaggttaataacggcctgatcattatgaatgaatttattgtgccgttcctgcccctgctgctcgtggatgagatggaggaaaaggacatcctggccgtggaggacatgcgcaaccgttggtgcagttacctgggccaagagatggagccccacctccaagagaaactcaccgattttttgccgaaacttttagattgtagcatggagatcaagtcgttccatgaaccaccaaaattaccttcttacagcactcacgaactgtgcgaacggtttgcacgaattatgctgtccctgtcgcggacaccagcagatggaagatag

SEQ ID NO: 23156 - DNA, 3264 bp, synthetic construct
  source 1..3264: mol_type = other DNA; note = Synthetic coding sequence
atgaccgtggagcagaacgtgctgcagcagagcgccgcccagaagcaccaacagactttcctgaatcagttgagggagataacaggaattaatgatactcagatcctgcagcaggccctgaaagactcaaatgggaatctagagttagctgtggctttcctaacagcgaagaatgcgaagaccccccagcaggaggaaaccacatactaccagactgcgttgccagggaacgatcgctacatatctgtggggagccaggctgacacaaatgtgatagatcttacaggggacgacaaagatgacttgcagcgggcgatcgcattatctttggctgagtccaacagggccttcagagaaaccggtatcacagacgaagagcaagccatcagtagagtactggaggccagtatcgccgaaaataaagcctgtttgaagaggacaccaacagaggtttggcgggattctagaaatccctacgatcggaaacggcaagataaggctccagtcgggcttaaaaacgtgggaaatacttgctggttttcggctgttatccagtccttattcaatctcctggagttcagacgcctcgtgctgaactataaacccccttcaaatgctcaagatcttcctaggaatcagaaggaacatcgcaacctgccatttatgcgcgagttacgctacttattcgcactgttggttggcaccaaacggaaatacgtggacccaagccgcgctgtggagatcttgaaggatgcattcaagagcaacgatagccagcagcaggatgtgagtgagttcactcacaaactgcttgactggctcgaagacgcctttcagatgaaagctgaagaggagacagatgaagaaaaacctaaaaatcctatggtggagctcttctacggccggtttcttgccgtgggggtgctggaaggtaaaaaatttgagaacacagagatgtttggccagtaccccctccaggtgaacgggtttaaagatctgcacgaatgtcttgaggcggcaatgatcgagggagagatcgaatctctgcattcggaaaacagcggcaaatccggccaggaacattggtttactgagctacctccagtgttaacattcgagctgtcaagattcgaattcaaccaggccctgggcaggccagagaaaatccataacaaactggaattcccccaagtgctgtatctggacagatatatgcaccgaaatagagaaattacacgaattaagcgggaggagatcaagagattgaaggactacctgacagtactgcaacaaaggctggaacgttacctcagctatggctcgggccctaaacggttccccctggttgatgtactgcagtatgctcttgagttcgccagttccaaaccagtctgtacctctcctgtggacgatattgacgcctcctcccctccttcaggctcaattcctagccaaactctcccatctaccactgaacagcaaggtgctctctcctctgagctgccaagtacaagccctagctccgtagccgccatttccagccgttcggttatacataagccctttacccagagccgcattcctccagacctgcccatgcatcccgctccccgccacatcaccgaagaggagttgagcgtgctcgaatcttgtctgcaccggtggcgtaccgagattgaaaatgacactcgggatctgcaggaatctatcagtagaatccatagaaccatcgagctgatgtatagcgacaagagcatgattcaggtcccttaccgcctgcacgcagtactcgtgcacgaagggcaagccaacgctgggcactattgggcttacatcttcgaccaccgggagtccagatggatgaaatataacgacatcgccgtcaccaagagctcctgggaggaactggttagggatagcttcggaggctaccggaacgcatctgcctattgcctgatgtacatcaacgacaaagcgcagtttctcatacaggaagaattcaacaaggagactggtcaacccttggtgggcatcgagaccttgccgcccgatttacgggacttcgtggaggaggataaccagaggttcgaaaaggaacttgaggagtgggacgcacagttggcccaaaaagccctccaagagaagttgctcgccagtcaaaagttgcgtgaatctgaaaccagtgttacgaccgcccaggctgccggcgacccggagtatctcgagcaaccgtccaggtctgacttcagcaagcatcttaaagaggaaactattcagatcataaccaaagcatcccacgagcatgaagataaaagtcctgagacagtgctgcaatccatcatgatgacgccaaatatgcagggaatcataatggccattgggaaatctcggtccgtgtacgatcgatgcggaccggaagccgggttttttaaggctataaagctagagtatgctaggctcgtcaaactggctcaggaggataccccccctgagacagactacaggctgcatcacgtagtcgtgtatttcatccagaaccaggcgccaaagaagattattgagaaaaccctgctggagcagtttggggatcgcaatctctcctttgatgagcgctgtcataacatcatgaaggtcgcccaggctaaattggaaatgatcaagcctgaagaagtcaatttggaggaatacgaagagtggcaccaggactaccgcaaatttcgtgaaaccactatgtacctgattatcggcttagagaattttcagagagagagttacatcgactccctgctttttctcatatgtgcttaccaaaacaacaaggaacttctgagcaaggggttatatcgcggccatgatgaagaactgatttcccattaccgacgagaatgcctgctgaaactgaatgagcaagctgcagagctgtttgaatctggagaggatagggaagtgaataacggactaatcataatgaatgagttcatcgtgccgttcctgccactgctcctcgtcgacgaaatggaggaaaaagatatcctggccgttgaagatatgagaaacagatggtgttcatacctcggacaggagatggagccccacctccaggaaaagctgactgatttcttgcccaaactgctggactgctcaatggagatcaagtctttccacgaacctccaaaactgccctcatactccacacacgagctgtgtgaacgtttcgcaagaataatgctcagcctgtctaggacaccagctgatggaaggtag

SEQ ID NO: 23157 - DNA, 2559 bp, synthetic construct
  source 1..2559: mol_type = other DNA; note = Synthetic coding sequence
atgagcagcgtgagccccatccagatccccagccggctgcccctgttattgacgcatgagggggtgctactcccgggtagtactatgaggacctccgtggacagtgctcgcaatctccaactggtccgctcccggctgttaaaggggacttcccttcagtccacaatcctcggagtaattcccaatacaccagacccggcgagtgatgcacaggatctaccacctctccaccggataggaacagctgctctggctgtgcaggtggttggaagcaactggccgaagccgcattatactctactgattaccggcctgtgcagattccaaatcgtgcaagtcctgaaggaaaaaccctatcctattgcagaggtggagcaactggatcgtttagaagaattcccaaatacctgcaagatgcgagaagagctaggcgaactgtctgagcaattttacaagtacgccgtccagctcgtagagatgttagatatgagcgtccctgccgttgccaagctcagaaggttgctggactcattaccccgggaggcactacccgatattctcacatcaatcatacgaaccagtaacaaagaaaagctgcaaattctggatgccgtgagcctggaggaaaggtttaagatgaccatccctctgctcgtccgacagattgaaggcctgaagctcttacagaagacgcgaaagcctaagcaagacgacgacaagcgagtgatagccattcgcccgattaggcgcatcacccatatctcaggaacactcgaggatgaggacgaggacgaagataacgacgacatcgtgatgcttgaaaaaaaaattcggacctcgagtatgccagagcaggcgcataaggtgtgcgtcaaggagattaagcgccttaagaagatgccccaaagcatgccagagtatgccctcacccgtaattatctggaattgatggttgaactcccttggaataagagcactactgacagactggacattcgagctgctcgcatcttgctcgacaatgaccattacgccatggagaagctaaaaaagcgagtactcgaatacctggctgtcagacaactaaagaacaaccttaaaggccccatcttatgcttcgtggggcccccaggggtgggcaaaacaagtgttgggaggtcagtcgccaaaactctcggccgagagtttcacagaattgctctcggcggagtgtgcgaccaatcagacattcggggacatcgcaggacatatgtgggaagcatgcctggacgaatcattaatggcctgaagacagtcggggtaaacaacccggtgttcctcttggatgaggtcgacaagctcggcaagagcctccagggggatcccgccgccgctctcctcgaagtgctggatccagagcagaaccacaatttcacggaccattatctaaacgtggccttcgatctctcacaggttctcttcattgctaccgcgaacacgaccgccacaatccctgcggccttactggatcgaatggaaatcatccaggtgccgggatacacccaggaagaaaagattgagattgcacatcgacatcttattccgaagcagcttgagcaacatggacttaccccgcagcagattcagattccccaggttaccaccctcgacattattaccaggtacacacgcgaggctggagtgcggagcctggatcgcaaattgggagccatttgccgggccgttgccgtcaaggttgcagaaggccagcacaaagaggccaagttggacaggtctgatgtaactgaacgcgaaggctgtcgggaacacattctggaagacgagaagcctgaatccatttccgataccaccgacctggcacttccgccggagatgcctattctcattgattttcatgccctgaaggatatattgggccctcccatgtacgaaatggaggtatcccagaggctctcccagcctggcgtcgcaatcggtctggcgtggactcccctggggggggaaataatgtttgtagaagcgtcgcgcatggacggtgaaggacaactaacgctgactgggcaactgggagacgtaatgaaggaatctgcacaccttgccatttcatggctacgttctaacgcaaagaagtaccaattaactaatgcattcggcagttttgatcttctggataataccgatatccacctgcacttccctgcgggggctgttacaaaggatggaccatccgccggtgtgaccattgtgacctgtcttgcttccctcttcagcggacggctcgttaggtctgatgttgcgatgaccggcgagatcacactacgagggctagttctgcctgtgggcgggattaaagataaagtcctcgccgcacatcgcgccgggttgaaacaggtgatcattccacgtaggaacgagaaggatctggaggggattccgggaaacgttagacaggatctgagctttgtgactgcgtcctgcttggatgaagtcttgaatgcagccttcgacgggggctttacagtgaaaacaagaccgggactcctgaattcaaaattatag

SEQ ID NO: 23158 - DNA, 390 bp, synthetic construct
  source 1..390: mol_type = other DNA; note = Synthetic coding sequence
atggccgacggcggcggcggcggcggcaccggcgccgtgggcggcggtggtaccagtcaggcatcggcgggcgctgctactggtgctactggcgcctccggcgggggaggtccaattaaccccgcttctttgccgccaggcgacccacagctgatcgccctgattgtggaacagctcaaaagccgaggattgtttgatagttttagaagggattgccttgctgacgttgatacaaaaccagcttaccaaaatttgcggcagaaagtcgataactttgtgtcaactcacctggacaagcaggagtggaaccctaccatgaacaaaaaccagctgcgtaatggcttgcgccagtcagttgtccagattcgccaaacgcccttcgagagttag

SEQ ID NO: 23159 - DNA, 1425 bp, synthetic construct
  source 1..1425: mol_type = other DNA; note = Synthetic coding sequence
atggacgaggccggcagcagcgccagcggcggcggcttccggcccggggtggattccttggatgaaccccctaactctagaatcttcttagtgatatcaaagtacacccctgaaagtgtacttcgcgaacggttcagtcctttcggtgatatccaagatatctgggtggtgagagacaagcatactaaggagagcaagggcattgcttttgtgaagtttgcccgctcttcccaggcttgccgcgccatggaagagatgcatggtcagtgccttggccctaatgacaccaaacctatcaaggtctttattgcacagtctcggagctctggttctcatcgagatgtagaagatgaagagctgaccaggatctttgtgatgatccccaaatcatataccgaggaggacctgcgggaaaaatttaaagtttacggcgacatcgagtactgctccattatcaagaataaagtgaccggcgagagcaagggcttaggctacgtcaggtaccttaaacccagccaggcggcccaggcaatcgaaaactgcgatcgatcgttcagagccatcctggcagagcccaaaaataaagccagcgaatctagcgagcaagattactactctaatatgcggcaagaagctctgggacacgagccacgcgttaatatgttcccgtttgagcaacagtctgagttttcttcttttgacaaaaacgactcccgtggccaagaggctatctccaagcgattatctgttgtttctcgtgtacccttcaccgaggagcagcttttttctatttttgatatcgtgcccggcctcgaatactgcgaggtacagcgagatccttactcaaactatggccacggcgtggtgcagtattttaacgttgcaagcgctatctacgctaagtacaaattacatggctttcagtaccctcccggcaatcggataggcgttagcttcatcgacgacggaagcaatgccaccgatcttctccgaaaaatggcaacccagatggtcgccgcgcaattagcaagcatggtctggaataatccatcccagcagcaatttatgcaattcggcggttcatccgggagccagttacctcagatacagacagatgttgtgctgccttcctgtaagaagaaagcgccggccgaaacgccagtgaaagagaggctattcatcgtcttcaacccacatccgctgccgctggacgtactagaagacatcttctgccgattcggtaatctcatcgaagtgtacttagtgtcagggaaaaacgtgggttacgctaaatatgctgaccgcatctcagccaacgacgccatagcaaccttgcatggcaagatattgaacggagtcaggctgaaagtcatgttggccgactcacctcgggaggaatcaaacaaaaggcagaggacttactag

SEQ ID NO: 23160 - DNA, 1938 bp, synthetic construct
  source 1..1938: mol_type = other DNA; note = Synthetic coding sequence
atgcggccccggaaggccttcctgctgctgctgctgctgggcctggttcagctgctggccgttgccggagctgagggcccggatgaggattcatctaaccgtgaaaatgccatagaggatgaggaagaggaggaagaggaagacgacgacgaggaagaagatgacctagaggttaaggaagaaaacggtgtgctagtcctcaacgacgcaaattttgataactttgtggcggacaaggacacagtgctgctcgagttttacgccccctggtgcggccactgcaaacagtttgcccccgagtacgaaaaaatagcgaacattctgaaggacaaggaccctcctatacccgtagctaagatcgatgccacctcggcatctgtgctagccagcagatttgacgtgtctggctacccaactattaagatcctgaaaaaggggcaggccgttgactacgaaggatcaaggactcaggaggagattgtggccaaggtccgcgaggtttcgcaacccgattggactccgccccctgaggtgacgctggtacttacaaaggagaactttgatgaagtcgtgaacgatgccgatattattctggtcgaattctatgctccatggtgcggccattgcaaaaaactggcacctgaatacgagaaggctgcgaaagagttaagtaagagatcccctcctattcccttggcaaaggtagacgctacagcagagactgatctcgccaaacgtttcgacgtcagtgggtacccgaccctgaagatatttcgaaaaggaagaccttatgactacaacggcccacgcgagaagtatggcatcgtagactacatgatcgagcagtccggaccgcccagcaaggagatcctgacactcaaacaggtacaggagttcttaaaggatggcgatgacgtgataattattggcgtgtttaagggcgaatctgatcccgcttatcaacagtaccaggatgccgctaacaatctgcgtgaagactacaagttccaccataccttcagtaccgaaattgcaaagttcctgaaggtcagtcagggccagctggtcgtaatgcaaccagagaaattccagtcgaagtacgaaccaagatcccatatgatggacgtccagggaagcactcaggactccgcaatcaaggattttgtcctgaaatatgctctgccactggtggggcaccggaaggtgtccaacgacgctaaacggtacacccgccggccactcgtcgtggtctactacagcgtggacttcagtttcgattatcgtgccgcaacacagttctggaggtccaaggtgctagaggtcgccaaggacttcccggaatatacgttcgctatagcagacgaggaagattacgccggggaggtcaaagacttgggccttagcgaatccggagaggacgtaaacgctgccattcttgatgaaagtggtaagaaattcgcaatggagccagaagagttcgactcagatacactccgggagttcgtgactgcctttaagaaaggcaagctaaaacctgtcattaaatctcagcccgtgcccaagaataacaagggccccgtcaaggtggtggtgggcaagacgttcgattctattgtcatggaccctaagaaggatgtgttaatcgaattttatgccccctggtgtggccactgcaagcagttagagcctgtgtataacagtttggccaagaagtacaagggccagaaggggttagtaatcgcgaaaatggatgccacagccaacgacgtgccctctgaccgatacaaggtggagggcttccccaccatatactttgcccccagcggggataagaaaaatccagtaaagtttgaaggaggtgatagggatctggagcacttgtccaagttcatcgaggagcacgcgacaaaactctcaaggacgaaagaagagctctag

SEQ ID NO: 23161 - DNA, 1338 bp, synthetic construct
  source 1..1338: mol_type = other DNA; note = Synthetic coding sequence
atgtaccccaaccccctgatctactgcacctgctgggacccctggaacctgggccccaggaagttaattaaaacgccacaactgccccggaagaactcaaccggatctagtaagcttacaccgctcgtgccagcccccaagaaccataactacttgcaaccaacaaagcccgtggtttctccaaaaatgaaaatccactcagccaggcaggaagagacaaacaaaagcttttatgaagttattaatgtctcgcccgggtatcagctagtgagaaatcgtgagcaaatctccgttaccctgggggacgaaatgttcgacaggaagaagcggtgggagtccgaaatccctgataaaggcagattcagtcgaactaacatcatctccgacttggaagagcaaatctcagagctgacagcgatcatcgaacaaatgaatcgggatcaccagtccgcccagaagttgttgtcctccgagatggacttgcggtgcgcggagatgaaacaaaacttcgaaaataagaatcgggaactaaaggaagcacatgaggcagaattaagcgagctcgaaaacaactacaaggcggctcttaaggccgaaaaactggcagcgcaggaaaaactggaagagatgggaaaagagtacaaatatctgaaaaacatgtttcggacctatcaagattcaatctacgatgaaatggaggagaaatggagcaagcagaaagccaagtggaagaaggacgaaaaattcgaacgcgagaacattttactgcagcaaaaaaagaaaatgaccaagaaatttgaaatggagtcaggtgaagaagataaaaagatcaatgagtcttgttcggctgtgttcgaaaatttcatccaggagaaggaggaactgctgaagcagcatcaaagcgatacacttcagcttgaagaactccgcaaaactaaggaagtgccttggcgcagagatcagataaacagacactggcacgacgtcctccagcaactcctgctgatgcaggtcatgcaggaagagctgcatgcgcaggccctcatcctcgagagccttaatacgaatctgtactacacacagttggagttacagaaggagaaagccatcgtgggcaatttggagaagatgctgcagaccaaatttgccgagacggaggaaaaatataagcacactatacagatcctgacagaggagaatatccatctgaaacagaagattatcagcaaaaatgaggagatctgcgaaggctgctcgggcagactggcttctattacagtctccaaggacgactcagacacagtgcaggacgggtccaagaagggccaggaaagctag

SEQ ID NO: 23162 - DNA, 1872 bp, synthetic construct
  source 1..1872: mol_type = other DNA; note = Synthetic coding sequence
atggagcccccccaggagaccaaccggcccttcagcaccctggacaaccgttccggtcaggtccaggtattgtccgccacaccactgttgcagaggaacccttactcttccccggacattatgcacattaaaggatccgaagcaagctctgtgccgtatgctcttaaccaggggacaacggccttgcctaagaataaaaaccaggaaggaaccgggcacagattgctcaacatgttgcggaagactttgaaggaatctgactcagaggagcttgagatcacacaggaaactccgaatttggtgccgtttggcgatgtggtgggttgcctcggaatacacataaaaaattgtcggcacttcatgcctaagatttccctgcagcattatgctaaccttttcatcagaatttctatcaataaggccgttaaatgcactaaaatgtgcagcctcctcagcaagaacgatgagaagaacaccgttattaaattcgatgaggtgaaatatttctccgtgcaagtccctaggcgatacgacgacaagaggaacaacatcctgttggagctgatccagtacgacaatcgcgaaaagcgcgccttcctgctgggatcggtccagattcacctgtatgaggtaattcaaaaaggatgttttatcgaggaggtccaggtgcttcacggaaacatctttgtgtgtcgccttgaggtagagttcatgttttcatacggcaacttcggctatggattctcgcatcaactcaagcccctccagaaaatcaccgagccgagcatgttcatgaatctcgcacctccacctgagagaacagatcccgttaccaaggttatcacacctcagacagtcgaataccccgcctttctaagcccagatttaaatgtgacagtgggtactcctgctgtgcaatccagcaaccaaccatcggtggtgaggttggaaaagctgcaacaacagcctcgcgaaaggctcgaaaagatgaaaaaagaatacaggaacctgaatacatggattgacaaagctaattatctggagagtatcctgatgccaaagctggagcataaggatagtgaggaaaccaatatcgacgaagcttccgagaacacaaagagcaatcatccggaagaagaactggaaaacatagttggtgtggatattcctctggttaacgaggaagctgaaactacagcgaacgagttactggacaatgatagtgaaaaaggcttaaccatccccacactgaatcaatcagaccaggacaacagtaccgccgacgcaagtaaaaatgatgagagcacgcccagtcccacagaggtgcacagcctgtgcacaattagtaaccaggaaaccatcaaggcggggcgcataccccccttgggtgagcggcagtctgagtccatgcccgaccgaaaaatgaaaaatgtgtttttccctcttgaggtcaagttgaaagataactacccatccatactgaaagccgattcatcgctttcggaggtagcctttagtcctaaagagtacaattctccttctttcaggcccgaatatatagaattcaagcccaaattccaggattgctctgataaatttgaggatctgcacgacatgactagttttacacaccttaaaaaagtcaaaagccgatcccgtctgctcggcaagtcaagcgatgatatccacaatcacgcccgccactctgcccgcccttatactgcaccagaggttaataagcagagagaatcctacagtggcaagttcactagccgcaggatggtgtcctccggactggttcacataaacgataaaacctctgattacgaaatgcataaaatgaggcccaaaaaaatcaaaaggggttactag

SEQ ID NO: 23163 - DNA, 3594 bp, synthetic construct
  source 1..3594: mol_type = other DNA; note = Synthetic coding sequence
atgcacatcaagagcatcatcctggagggcttcaagagctacgcccagcggacagaggttaacggttttgaccctctctttaatgctatcacaggactcaatggatctggtaaatcaaacatcctagattctatctgtttccttcttggcatcagtaacttgtcccaggtgcgagcatccaatctgcaggatctcgtttacaagaatggccaggcaggaatcactaaagcctctgtctccatcaccttcgacaactccgacaagaagcaaagtccactggggttcgaagtgcacgacgaaatcactgttaccagacaagtcgtgatcgggggccgcaacaagtatctgatcaacggcgtgaacgccaacaatacacgagtccaggatttgttttgtagcgtcggcttaaatgttaataacccccattttctgattatgcaggggcgtattaccaaggtcttgaacatgaaaccgccggaaattttatccatgattgaggaggcagctggtaccaggatgtacgaatacaagaagattgccgcacagaaaactatagaaaaaaaggaggctaagttgaaggagatcaagactattctggaagaagagataacacctactattcagaagctgaaagaagagcgtagtagctacctggagtatcagaaagttatgagggagatcgagcatcttagtcgcctatatatcgcctatcaattcctgttggctgaggacaccaaagtgagaagtgccgaggagctcaaggaaatgcaggataaagtgatcaagttacaggaggaactttcagagaatgacaagaaaatcaaggctcttaaccacgagatagaagaactggagaagcgtaaggataaggaaactggcggaattctgaggagccttgaagacgctttggccgaggcccaacgggtcaacacaaaatcccagagcgcatttgacctgaagaaaaagaatctggcctgtgaagaatcaaaaaggaaagagctggagaagaatatggttgaagacagcaagactcttgccgctaaagaaaaggaagtgaaaaagatcacggatggactgcacgcactgcaggaagcaagcaacaaggacgctgaagcactcgcagccgctcagcagcattttaatgccgtaagcgccggactgagcagcaacgaggatggcgcagaggcaactctcgctggtcagatgatggcttgcaaaaatgatatttccaaagcgcagacagaagccaaacaggctcaaatgaagcttaagcatgctcaacaagagctgaaaaacaagcaggccgaagtgaaaaaaatggattccggatatcggaaggatcaggaagcattggaagccgtgaaacgcctcaaagagaaactcgaggctgagatgaagaaactgaattatgaggaaaacaaggaggagtcactgctagaaaagaggagacagttgtctagagacatcggtcggctcaaggaaacttacgaggcgctactggcccggttcccgaacctcaggtttgcgtacaaggacccagaaaaaaattggaacagaaactgtgtgaaaggcttggtggcatctctaatctcagtcaaagatacatcggcgaccaccgcactggaacttgtggccggagagcggctgtacaacgtcgtggtagatactgaagtgacgggaaagaagctgttagagcggggtgagctgaaacgacgatatactattatcccacttaataagattagcgctcgctgcatcgcccccgaaaccctgcgcgtcgctcagaacctagtcggcccagataacgtgcacgttgctctgagtttggtcgaatacaaaccagaactccagaaggccatggaattcgtgtttggcactaccttcgtctgtgataatatggataacgccaagaaggtggccttcgataaacggataatgacccgcaccgtgactctggggggggatgttttcgatccacatggaacgttgtctgggggtgcaaggagtcaggcagcctcaattctcaccaaattccaggagctaaaggatgtgcaagatgaactgagaataaaagaaaatgaattaagggccctcgaagaggagcttgcgggactcaaaaacacagctgagaagtatcgccaactcaaacagcagtgggagatgaaaacagaggaagcggacttgctgcagacaaaactacagcagtcttcataccacaagcagcaggaggagttggacgccttgaagaaaactatagaagagagtgaagagacccttaagaatacaaaggaaatccaaaggaaggccgaagaaaagtatgaagtcctcgaaaacaaaatgaagaatgccgaggcagagagagagcgggagctcaaggacgcgcagaagaaattagactgcgccaaaaccaaggccgatgcatcatccaaaaaaatgaaggagaaacagcaggaggtggaagcgattacactggaactggaagagctgaagcgagaacacacttcttataagcaacaactggaagcagtcaatgaagccattaagagttacgaatcacagattgaggtcatggccgcggaagtcgccaagaacaaagaatctgtgaacaaggcgcaggaggaagtgacgaagcagaaggaagtgatcaccgctcaagataccgtaatcaaggccaagtacgccgaggtggcgaagcacaaggaacagaacaacgatagtcagctgaagataaaagaactggatcacaatatcagcaagcataaacgtgaagccgaggatggcgctgctaaggttagcaaaatgcttaaagattatgactggattaatgcggaaagacacctctttggacagccgaattcagcctacgattttaagacaaacaatcctaaggaagctgggcagcgcctgcaaaagcttcaggagatgaaagaaaaacttggccgtaatgtaaatatgagggcaatgaacgttcttacagaggctgaagaaagatacaacgatctaatgaagaagaagaggattgttgaaaacgataaaagcaaaattttgacaaccattgaagatctggaccaaaagaagaatcaggctctcaacatcgcttggcagaaggtgaacaaggatttcgggagcatctttagcactctgttgcctggcgccaatgctatgctcgctcctcctgagggacagacagttttagacggacttgagtttaaagttgctcttggaaatacttggaaagagaacttgacagagctttctggcgggcaacggtcgcttgttgctctatctctgatcctcagtatgctactgttcaagcccgctcccatttacatcctcgacgaagtcgatgcagccctcgacctcagtcacacccaaaacatcggccagatgttgagaacacatttcacccactctcaatttattgtggtgtccctcaaggaagggatgttcaataacgctaatgtgctgttcaaaaccaaattcgtagacggggtgtccacggtggccaggtttacccagtgccaaaacggtaaaatcagtaaggaggccaaaagcaaggccaaaccccctaagggtgctcacgtcgaagtgtag

SEQ ID NO: 23164 - DNA, 1080 bp, synthetic construct
  source 1..1080: mol_type = other DNA; note = Synthetic coding sequence
atgcggaccgccgaccgggaggcccggcccggcctgcccagcctgctgcttttacttttggcaggtgccggcctcagcgccgccagccctcccgccgcccccagattcaacgtttcccttgactctgtaccagagctcagatggcttccagtcctaaggcattacgatctcgatctggtgagagcggctatggctcaagtcattggtgatagggtgcctaaatgggtccatgtcctgataggaaaggttgttctggagttggagcgctttctgcctcagcccttcactggggagattagagggatgtgcgacttcatgaacctgagtcttgctgattgtttgctcgtcaaccttgcctacgagtcatcggttttttgtaccagtattgttgcccaagattcccgcggacacatctatcatggacgtaatctggattacccctttggaaacgtgctgaggaaacttacagtggatgtacagttcctgaagaatggacagatcgcattcaccggcaccacttttattggctatgttggactttggactggccagtcccctcacaagtttacagtgtccggtgatgagagggacaaaggatggtggtgggagaatgccatcgctgccctttttcgacgacacatcccggtcagttggctgataagagctaccttatcagagagcgagaactttgaggccgccgtcggaaaactagctaagacccccctgattgccgacgtttattacattgtcggaggtacaagcccacgggagggagtcgtgatcacgagaaatagggacgggccggctgatatctggcccctggatcccctaaacggggcctggtttcgagtggagacaaactatgaccactggaagcccgcaccaaaagaagatgaccgcaggaccagcgcgattaaagcactgaacgcaaccggccaggccaacctgtccctggaagccctttttcagatcttgtccgtcgtgccagtatataataatttcaccatctatactaccgtaatgtctgcaggctccccagataaatatatgacaagaatccgcaatccatcgcgaaaatag

SEQ ID NO: 23165 - DNA, 1647 bp, synthetic construct
  source 1..1647: mol_type = other DNA; note = Synthetic coding sequence
atggccctgcacgtgcccaaggcccccggcttcgcccagatgctgaaagagggtgcaaagcacttctcagggctggaggaggcggtgtatcggaacattcaggcatgtaaggagcttgctcagaccaccaggacggcctacggcccaaacggaatgaacaagatggtgataaaccacctggaaaagctctttgtaaccaatgacgcagcgactatacttcgggagcttgaggtacagcatccagccgccaaaatgatcgtgatggcctcccacatgcaagagcaggaagttggcgacggaacgaacttcgttttagttttcgccggcgcactgcttgaactggctgaggaattactcagaatcgggctctccgtctctgaggtaatcgagggctatgagattgcttgcagaaaagcacatgaaatcctccccaatctggtgtgctgctccgcgaagaatctccgagacatcgatgaagtgagctcacttctccgcaccagtattatgtcaaagcaatacggaaatgaagtctttctggccaaacttatcgcccaggcctgcgttagcattttcccagactctggccactttaatgttgacaatataagagtttgcaagatcttggggtcaggcatctcgagtagctctgttttacacggcatggtgtttaagaaagagactgagggtgacgtcacatccgtgaaggacgccaaaatcgccgtttacagctgtccgttcgatggtatgatcactgagacaaaaggtacagtgctcataaagactgcggaagagctcatgaatttttctaaaggagaggagaatttgatggacgcccaagtaaaggccatagcggacaccggcgctaacgtcgtggtcacaggagggaaggtggcagacatggctctccactatgcgaataaatataacatcatgctcgttagacttaacagtaaatgggacctaaggcgactctgtaagacagtcggcgctaccgcgcttccacgattgacccccccggttctggaggagatgggccactgtgacagtgtctacctgtcagaagtgggcgatactcaagtggtggtgttcaagcacgaaaaggaagatggtgccatctcaacaatcgtcttgcgagggtctactgacaacttgatggatgatatcgaacgtgccgtggacgacggtgtcaacacgtttaaagtgctgacacgggacaagaggctggtacctggggggggagcgactgagatagagttagctaagcaaataaccagttatggtgaaacatgtcccggcctcgagcaatacgctattaaaaagtttgccgaggcgttcgaggccatcccccgtgccctggcagaaaattctggggttaaagccaacgaagtcatttctaagctgtacgcggtgcaccaggagggcaacaaaaacgttgggctcgacattgaggccgaggtgcccgccgttaaggatatgctggaggccggtatactggacacatacctgggcaaatattgggccatcaaacttgcgactaatgcagccgtcactgtcctcagggtagatcaaattatcatggcaaaaccagccggcgggccgaagccaccaagtgggaaaaaagattgggatgatgaccagaatgactag

SEQ ID NO: 23166 - DNA, 690 bp, synthetic construct
  source 1..690: mol_type = other DNA; note = Synthetic coding sequence
atgaacatccggaacgcccagcccgacgacctgatgaacatgcagcattgtaaccttctgtgcctgccagaaaattaccagatgaaatattacctttaccacggactatcttggccacagctgagctatatagcagaggatgaagacgggaagatcgtggggtatgtacttgccaagatggaggaggaaccggacgatgttccgcacggccatatcacctccttggcagtaaagcgaagtcaccggcgccttgggcttgctcagaaacttatggatcaggcatcgagggcaatgatcgaaaactttaatgctaaatatgtctctttacacgttaggaagagcaatcgacctgctttgcatttatattctaacactcttaactttcaaatctctgaggttgaacccaagtactacgcggacggcgaggacgcatatgcaatgaagagggatctttcacaaatggccgatgagctccgccgccagatggacctaaaaaaaggtggctatgtggttttggggagtcgagagaaccaggaaacccagggcagcacactgtcggacagtgaggaggcctgccagcagaaaaaccctgcaactgaggagagcggttcggacagtaaggagcccaaggaaagcgtcgagtcaacgaatgttcaggactcctctgaatcaagcgactcaacctcctag

SEQ ID NO: 23167 - DNA, 1374 bp, synthetic construct
  source 1..1374: mol_type = other DNA; note = Synthetic coding sequence
atgagcgccctgcggcggagcggctacggccccagcgacggcccctcttacgggaggtattacggccccggcggtggtgatgtaccggtgcacccccctcctccattgtaccccctgcgaccagaaccaccccagccgccgatctcctggagagtcaggggtggaggtcccgctgaaacaacctggctgggggagggaggcggaggagacggttattacccctcgggtggagcttggcccgagccgggcagagccggcggctctcatcaggaacagcccccttacccatcttacaatagcaactattggaattctactgcaaggagccgcgctccctatccctcaacgtacccagtccgaccagaactgcaaggccagagtctgaactcctacacgaatggggcgtatggacccacctaccccccaggaccaggcgcaaatactgccagctatagcggagcttattacgcacctggatacacccagacctcctattctactgaagtgccttctacgtatagatcatcgggaaacagtcccaccccggtttccagatggatctatccccagcaggactgccaaacagaggcgccacccctgcgcggacaggtgcctgggtatcctccctcccagaaccccgggatgaccctgccacactacccctatggagacgggaaccggtccgtgccccagagtggaccgacagtgagaccacaggaagatgcttgggcgtcaccaggtgcatatgggatgggaggaaggtatccatggccttcaagcgcaccctcagctcctccagggaacctatacatgaccgagtctacctccccttggccctcttctggctcacctcagagcccaccttctccacccgtgcagcaaccaaaagattcaagttacccctactcccagagcgaccaatccatgaatcgacataacttcccttgttcggttcaccaatatgaatcttcagggaccgttaacaacgacgactcagatcttctggattcgcaggtgcagtacagtgccgagccgcaactctacgggaacgccacttcagaccaccctaataatcaggatcagtcgagctccctgcccgaggagtgtgtaccatccgatgaaagtaccccacctagcatcaagaagattatccatgtactggaaaaggtccagtatctggagcaggaggttgaggagtttgtggggaaaaaaaccgataaggcatattggttgctcgaggagatgctcacaaaagagctgctagaattggatagcgttgagacaggcggacaggatagcgtgcgtcaggctcgcaaagaggctgtgtgcaagatccaggctattctggaaaaacttgagaagaaggggctatag

SEQ ID NO: 23168 - DNA, 3201 bp, synthetic construct
  source 1..3201: mol_type = other DNA; note = Synthetic coding sequence
atgcagagcaccgacctgggcaacaaggagagcggcaagatctggcatagaaaacccagtcccgcgactagagatgggatcatagtgaacattatccacaacacctcggattaccaccccaaagttctccgctttctcaacgtcgcatttgacggcaccggtgactgcttgattgcaggtgaccatcagggaaacatctacgtgttcgatctccatggcaatcgattcaacctggtgcagagaacagctcaagcctgcaccgctcttgcatttaatcttagaaggaagagcgagtttctggtggctctggcagattacagcattaagtgtttcgatacagttaccaaagaacttgtctcctggatgcgcgggcacgaatcatccgtattctctatttctgtgcacgccagcggaaaatatgcgataaccacgagtagtgacacagcccagctctgggaccttgataccttccagcgtaagcggaagctgaatataaggcagagcgttggtattcagaaagtattcttcctgccgttgagtaatacaatcctctcatgtttcaaggacaactcgatctttgcatgggaatgtgacacactgttttgtaaataccagctgccagctcctcccgaaagcagctccatcctatacaaggtgttcgccgtcacaagggacggtcgcatcctggccgcaggcgggaagtcgaatcacctgcacctttggtgtcttgaggcaaggcaattattccgcattatccagatgcctaccaaagtgcgggcaatccggcacttagaatttcttccggacagtttcgacgcgggatcaaatcaggtgcttggagtgcttagccaggacgggatcatgagatttattaacatgcagacttgtaagctgttgtttgaaatcggaagcctcgatgagggcatctcaagttccgccatcagcccacatggccggtacattgcgagcatcatggagaatggctcattgaatatctacagtgtgcaggctttgacccaggagataaataagccccccccccctctggtcaaagtcatagaagacctgcccaagaataagctttccagttctgatttaaagatgaaagtgacctccggccgggtgcagcaaccggctaagagcagggagtccaaaatgcagaccaggatcctgaagcaggatcttactggtgattttgagtctaagaaaaacgagctgcctgatggccttaataaaaagaggttacagatcttgcttaagggttacggggaatatcccacgaaataccggatgttcatatggaggtctcttctccagctgcctgagaaccacaccgcatttagcacactcattgacaaaggaacccacgtcgcctttctcaacttgcagaagaagtatcctattaaaagcagaaagctgctgcgcgtactgcagaggactctctctgcattggcccattggtccgtgattttctcagacaccccatacctcccactgctggcttttccctttgttaagctctttcagaacaaccagttgatttgcttcgaagtaatcgctacattgattatcaactggtgtcagcattggttcgagtattttccgaacccgcctattaatatcctgtcgatgatcgagaatgtcttggccttccatgacaaggaacttctgcagcatttcatagaccacgacatcacgtcccagttgtacgcctggccccttctcgagacggtgttttccgaggttcttacaagagaggagtggctgaagttattcgacaatattttctctaaccaccccagttttcttctcatgaccgtcgtcgcttataacatatgttcccgcacacctcttctctcctgtaatttaaaagacgatttcgaattcttcttccatcatcggaataaccttgatattaacgttgttattcgacaagtgtaccacctgatggagaccaccccaacagacatccatcccgatagcatgcttaatgtgtttgtcgcgctaacaaaaggccagtatcccgtgtttaaccaatatccaaagtttatcgttgactatcagactcaggaacgcgagcgtatccgaaacgatgagctagattatctcagagagaggcaaacggtcgaagacatgcaagctaaagtcgaccagcagcgcgttgaagacgaggcctggtaccagaaacaggagttacttcgcaaggctgaagagacaagacgtgaaatgctgcttcaggaggaggaaaagatgatccaacagcggcagcggctggcagctgtgaaaagagagttaaaagtcaaggaaatgcatctacaggatgccgcaagaagacgttttctcaagctgcagcaggatcaacaagagatggaactccgacggctcgatgatgagattggaaggaaggtctatatgagggaccgagagatagcagccaccgctagggacctcgagatgcgccaactggagttggagagtcagaagcgactgtacgaaaagaatttaactgagaaccaggaggcccttgccaaggagatgcgtgccgacgccgatgcctaccgtaggaaagtggacctggaggagcatatgttccacaaacttatcgaggctggcgaaactcaaagtcagaagactcagaaagtgatcaaggaaaacctggccaaggccgaacaggcttgcctgaacacagactggcagattcaaagcctgcataaacaaaagtgcgatgacctccaacgcaataagtgttaccaagaagtggctaaactgctaagagaaaatcgtcgcaaggaaattgaaattataaacgcgatggtggaggaagaagctaaaaaatggaaggaggctgagggaaaagaatttaggctcagatcagctaagaaagcaagcgctctgtctgacgccagcaggaagtggttccttaaacaggaaattaatgccgctgttgagcacgcagaaaatccgtgtcataaggaggaacctagatttcaaaatgagcaggatagctcttgtttgccaagaacttcccagctgaatgactcctcggaaatggacccatcgacccagatcagtctgaaccgacgtgctgtggagtgggataccacagggcagaatttaataaagaaggttcggaacctacgccaacgcttgaccgccagggccagacacagatgtcagactccccacctcttggccgcttag

SEQ ID NO: 23169 - DNA, 618 bp, synthetic construct
  source 1..618: mol_type = other DNA; note = Synthetic coding sequence
atggagggcaacggccccgccgccgtgcactaccagcccgccagccctccaagggatgcatgcgtgtactctagctgttactgcgaagaaaacatctggaagctatgcgagtatatcaagaatcacgaccaatacccgctggaggagtgctatgcagtgttcatttccaacgaaaggaaaatgatccccatctggaaacaacaggctcggcccggggacggccctgttatctgggattaccacgtggtcctcctccacgtgtcctcaggggggcagaacttcatatatgatctggatacagtgttgcccttcccctgtctcttcgacacttacgtggaggacgcattcaaaagcgatgacgacattcacccacagttcaggcgtaagttcagggttatacgggccgattcatacctcaaaaacttcgcttctgaccggtcccacatgaaggatagttccgggaattggcgcgaaccgccacccccttacccctgtatcgagaccggggactccaagatgaatctaaacgatttcatctctatggatcccaaggtgggatggggcgcggtgtacacccttagtgagttcacgcaccgctttgggtctaagaattgttag

SEQ ID NO: 23170 - DNA, 1974 bp, synthetic construct
  source 1..1974: mol_type = other DNA; note = Synthetic coding sequence
atgagccaggtgctgttccaccagctggtgcccctgcaggtgaagtgcaaagattgcgaggagcggcgtgtctccattagaatgagtatcgagcttcagtcggtctctaaccctgttcaccgcaaggatctggtaatccggcttacagacgacacggatccatttttcttatataatctggtgatctcagaggaagattttcagagtctgaagttccagcaaggtctgctggtcgacttcttggctttcccacaaaagttcatagatctgctgcaacagtgcacccaggaacacgccaaggaaatccctagattccttttgcagctggtatctcccgccgctatcctcgacaattctccagcatttctgaatgtcgtggagaccaatccctttaagcacttgactcacctgtctctcaagctgctgcctgggaacgacgtcgagattaagaagttcctggctggatgtctcaaatgctcaaaggaggaaaaactgagcctgatgcagtctttagatgacgccaccaaacagctcgatttcacccggaagacgctagccgagaagaagcaggagttggataaacttaggaacgagtgggcgagtcacacggcagcactgactaacaaacacagtcaggagctgaccaatgagaaagagaaggccctgcaggcccaggtgcagtaccagcaacagcacgagcagcaaaagaaagaccttgagattctgcatcaacaaaacatccaccagctacagaatcgcctgtccgaattagaggccgccaataaagacctaaccgaacgtaaatacaagggagactccacaatcagagagcttaaggctaagttgagcggagttgaggaggagctgcagcgcaccaaacaagaggtgctgtcccttaggcgcgaaaacagtacattggatgtggagtgtcatgagaaagagaaacacgttaatcagttgcagaccaaagtggctgtcctggaacaggaaatcaaagacaaggatcagttggtgctgcgcactaaagaggcatttgacacaatacaggagcagaaagtagtcttggaggagaacggcgagaagaatcaggtacagcttgggaaattggaggctactataaagagcctgtctgccgaattgctgaaagcaaatgaaatcataaagaagctgcaaggggacttgaagactcttatgggtaagctgaagctgaagaataccgttactatacaacaagaaaagctgcttgctgaaaaggaagagaaattgcagaaggaacagaaggaactacaggatgtgggacagagcttacgtatcaaagaacaggaggtttgcaagctccaagagcagttggaggctaccgtgaagaagctcgaggaatccaaacagcttctgaaaaataacgaaaaattgataacctggttgaacaaagagctgaatgagaaccagctggtaagaaaacaggacgtactgggaccttcaactactccacccgcccattccagtagtaacaccatccggtcaggcattagtcccaacctgaacgttgtcgatggaagactgacttaccctacttgcggcatcggataccctgtctcctctgcctttgcctttcaaaatacgtttccccatagtattagtgctaagaatacgagccaccctgggtcagggactaaggtccagtttaacctccagttcaccaaacctaacgcttcgctgggcgatgtgcaatctggagcgactatctctatgccatgctcaaccgataaggagaatggcgagaatgttggacttgagagcaaatacctcaaaaagagagaagattccatacccctcagaggcctgagccaaaatttgttctctaacagcgatcaccagcgcgacggtaccctgggagcccttcacaccagttcaaagccaaccgccctcccttcagcatcctctgcgtatttcccaggacaattgcctaatagctag

SEQ ID NO: 23171 - DNA, 237 bp, synthetic construct
  source 1..237: mol_type = other DNA; note = Synthetic coding sequence
atgcggttcatgatgatgcgggccgagaacttcttcatcctgcggcgcaagcccgtggaaggttacgatatctccttcctcattacaaatttccatactgagcagatgtataaacataaattggtggatttcgtgattcatttcatggaggagattgacaaggagattagtgaaatgaagctttccgtaaacgcccgcgccagaatcgttgcggaggagttcctgaagaacttttag

SEQ ID NO: 23172 - DNA, 933 bp, synthetic construct
  source 1..933: mol_type = other DNA; note = Synthetic coding sequence
atgcccctgctggtggagggccggcgggtgcggctgccccagagcgccggtgacctggtacgggcccacccaccgttagaagaacgcgccaggttgcttagaggccagtccgttcagcaggtcgggcctcaaggcctgttgtacgtgcaacagagggagctcgccgtgacatccccgaaagacggatctatttcaatcctgggaagcgatgacgccactacctgtcacattgttgtgctcaggcacacaggaaatggtgccacttgccttacacattgtgacggaactgataccaaggccgaggtccccctcataatgaactccatcaaaagcttttcagatcatgcccaatgcggtagactcgaggttcacttggtgggcggcttcagcgatgaccggcagttatcccagaagttgacccatcagctgctgtccgaatttgatcgccaggaagacgatatccatctcgttacactctgcgtaactgaactaaacgaccgcgaagagaacgagaaccattttcctgtcatatacggaattgccgtgaacatcaaaacggccgagatctatcgcgcaagtttccaagatagaggacctgaggagcaactgcgggctgcccggactctcgcgggcggtcccatgattagtatctatgatgctgaaacagaacagctcaggatcggtccttacagctggactccctttccccatgtggatttttggcttcatcaagacgacaagcagattctggaaaacctgtccacatccccgctggcagaacccccacacttcgtcgaacacatacggagcacgctcatgttcctaaagaaacatccctcgccagctcacacgcttttttccgggaataaggcactgctctacaaaaaaaacgaagatggattatgggagaaaatcagttcacccggatcatag

SEQ ID NO: 23173 - DNA, 924 bp, synthetic construct
  source 1..924: mol_type = other DNA; note = Synthetic coding sequence
atgaccgagaccaccaagacccacgtgatcctgctggcctgcggcagttttaatcctattactaaagggcacatccagatgtttgagcgggcaagagactacttgcacaagacagggagattcatcgtgatcgggggcattgtgtccccagtgcacgactcatatgggaagcaggggctcgtctccagcaggcatcggctgataatgtgccagttagcagtacagaatagtgattggattagggtcgacccatgggagtgctaccaggatacttggcaaactacatgttctgtgttagaacatcaccgcgacctgatgaaaagagtgacaggatgtatcctcagcaatgtgaatactccttccatgactcccgtcatcgggcaacctcagaacgagaccccacagcccatctatcagaattccaatgtggctacaaagcccaccgcagccaaaattctgggaaaggtgggcgagtccctgtctcggatttgctgcgtcagacctcctgtagagcggttcacttttgttgatgagaacgccaacctcgggacggtgatgaggtacgaggagatcgagctcaggattttattgctgtgtggatcggacctgctagaaagtttctgtattcccgggctgtggaatgaggccgacatggaggtgatagttggggatttcggcatcgtggtggtacctagggacgctgcagataccgatcgaatcatgaatcattcttccattctcaggaaatataagaataacataatggtcgtcaaagacgacatcaatcatccgatgagcgtcgtcagctctaccaagagccggcttgcgctgcagcatggcgacgggcacgtggtggattacctgtctcaacccgtgatagactatattctgaaatcccaactttacatcaatgcatcagggtag

SEQ ID NO: 23174 - DNA, 1476 bp, synthetic construct
  source 1..1476: mol_type = other DNA; note = Synthetic coding sequence
atggaggagggcaagatggacgagaacgagtggggctaccacggcgagggtaataaaagtctagtggttgcccacgcccagaggtgtgtagttctgagattcctgaagtttccccccaatcggaagaaaacaagtgaagagatcttccagcacctccagaatattgtggatttcgggaaaaatgtaatgaaagagttcctcggcgagaactacgttcattacggagaggtcgtccagctgcccctagaatttgttaaacagctttgtctaaaaatccagtcagagcgcccagagtcaagatgtgacaaagatctggacacactctccggatacgcaatgtgtcttcctaatctgacccgactgcagacttatagattcgcggagcatagacccattctgtgcgtcgaaatcaaacccaagtgcgggttcattcctttcagctctgatgtgactcacgaaatgaaacacaaagtctgccggtattgcatgcaccagcacttaaaggtggccaccggcaaatggaaacaaattagcaaatactgtcctctagacttgtactcagggaataaacagcgcatgcattttgccctcaaaagtttgcttcaggaagcccagaacaatcttaagatttttaaaaatggagagctcatttatggatgcaaggatgcacgatcccctgttgcagactggagcgagctggcccaccacctaaaacctttctttttcccatccaatggattggctagcgggccacactgtacccgcgctgtcatcagagagctcgttcatgtcatcacccgtgtcttgttgagcggttccgataagggcagggccggaacactgtcgcctggactcggaccgcaggggcctagagtctgtgaagcaagccctttttctaggagcctgagatgccagggaaaaaatacacccgaacgctcagggttgcccaaggggtgtctcctttataaaacattacaggtacaaatgttggatttactggatattgaaggactgtaccctctatacaatagagtcgagagatacctcgaagagttcccggaagagagaaaaacccttcagatcgatggaccatacgacgaggccttctatcagaagctcctggacctatctactgaagacgatggtacagttgccttcgccctgaccaaagtgcagcagtacagggtggctatgaccgccaaagactgttctataatgattgccctctccccttgtctgcaagacgcctcctccgaccagcgtcctgtggtccctagtagtcgcagtcgcttcgctttttccgtgtccgtcctggacctggacctgaaaccctacgagagtatcccccaccaatacaaactggacggaaaaatcgtgaattactacagcaaaacagtccgggctaaggacaatgcggtgatgagcacccgcttcaaagaatctgaggattgcacactggtccttcacaaggtgtag

SEQ ID NO: 23175 - DNA, 2640 bp, synthetic construct
  source 1..2640: mol_type = other DNA; note = Synthetic coding sequence
atgatgttctaccggctgctgagcatcgtgggccggcagcgggcctcacctggctggcagaactggtcatccgcccggaacagtacttccgctgccgaagcccggagtatggccttgccaacccaggctcaggttgtgatttgtggcggggggatcaccgggaccagcgtagcatatcacctgagtaagatgggttggaaagacatcgttttactcgaacagggtcgcctggctgctgggagtacaagattctgcgcggggatccttagtacggctcgacacctcaccattgaacagaagatggccgactactccaataagttgtattaccaattggaacaggagacgggtattcaaactggatacacgagaaccggctccatttttctggcccagactcaggaccggctaatctctctaaagcgcattaatgccggactgaacgtgatcggaataccttccgaaatcattagtcctaagaaagtggccgagctgcaccatctcttgaacgtgcatgacctggtcggggccatgcatgtcccagaggatgctgtggtgagtagtgctgatgtggccttagcactcgccagcgcagcttcccaaaatggtgtgcaaatatacgaccgaacaagtgtgttacatgttatggtgaagaaagggcaggtcaccggcgttgagactgacaagggacagatcgaatgtcagtattttgtgaattgcgcaggccaatgggcgtatgagctcggcctctctaacgaggagcccgtgtcaatccccctccacgcatgtgagcacttttacttgctgacgaggccacttgaaactcccttgcaatcctccacaccaactattgtcgatgctgacgggcgaatctatattcggaattggcagggggggatcttatctggcgggttcgagaagaaccccaagccaatttttacagaaggtaaaaaccaattggagattcaaaatctgcaggaggattgggaccatttcgagcctttgctatcctcacttctgagacgtatgcctgagctagagaccctggaaattatgaagctagtgaactgccctgagacatttactccagacatgagatgtattatgggggaatctcctgcagttcaaggatacttcgtgctggcaggcatgaattccgctgggttatccttcggtggcggcgctggcaaatacctggccgaatggatggttcacggctaccctagcgaaaatgtctgggagctggatcttaaaagattcggagctctgcagagttcacgtacgttccttcgccatagagttatggaggtcatgcccctgatgtatgacctgaaggttcctagatgggactttcagaccgggaggcagctcaggaccagccctctgtatgaccgcctggacgcacagggagcaagatggatggaaaagcatggatttgagcgtcccaaatacttcgtgcccccggataaagatctgctggccctggagcagagcaagaccttttacaaacccgactggtttgacattgtcgagtctgaggttaagtgctgcaaagaagcagtttgtgtgatcgatatgagcagttttacgaagtttgaaatcacaagcaccggcgaccaagcgctcgaagtgttacagtatctattcagcaacgacctggatgtccctgtgggccacatcgtgcataccggaatgttgaacgagggaggcgggtatgagaacgattgctcaattgctaggctgaacaaacggtcctttttcatgatctcacctacggatcagcaggtgcactgttgggcttggctgaaaaaacacatgcccaaagactcaaacttgcttctcgaagatgttacttggaagtacacagccctgaatttgatcggaccccgtgcagtagatgtcttgagcgaactaagctatgccccgatgacccccgatcacttcccctcgttattttgtaaggaaatgtccgtcgggtatgctaacggcatcagggtgatgtcgatgacacatactggggagccgggatttatgctttacatcccaatcgagtatgccctacacgtttataacgaggtgatgtctgtgggacagaaatacggcatcagaaatgccgggtactacgccctccgttcactcaggatcgagaagtttttcgcattctggggccaggacattaacaacctgaccacacccctggagtgtggacgagaaagtagagtaaaacttgaaaagggtatggactttatcggcagggacgccttacttcaacagaaacagaatggagtttacaagcggttaaccatgttcattctcgacgatcacgacagtgatctggacctgtggccctggtggggagagcccatttacaggaatggtcagtacgtgggcaagactacaagctccgcttattcttactctttggagcgacatgtgtgccttggtttcgtgcacaacttctctgaagacactggggaggagcaagtagtgactgccgactttatcaaccgcggcgagtatgagatcgatatcgctgggtaccgcttccaggccaaggcaaagttatacccggtggcatcactttttacccagaagcgcaggaaagatgacatggagctgtcagatttgcacgggaagtag

SEQ ID NO: 23176 - DNA, 1440 bp, synthetic construct
  source 1..1440: mol_type = other DNA; note = Synthetic coding sequence
atggccaccgacagctgggccctggccgtggacgagcaggaggccgccgctgaatctctcagtaaccttcatctgaaggaagaaaagatcaagcctgatactaatggggcagtcgtgaaaaccaacgccaatgctgaaaagaccgatgaagaagaaaaggaagatagagctgcacaaagcctgttaaataagttgatcagaagcaacctggtggataacactaatcaggtggaggtgctgcaacgggaccctaactctccactgtacagcgtgaaatcgttcgaagaactgagacttaagcctcagctgctgcaaggagtatatgcaatggggttcaataggccatccaaaattcaggagaacgcattgcctctcatgctcgcggaacccccccagaacctcattgcccagtcgcagtctggcaccggaaagaccgcagccttcgtactcgctatgctgagtcaagtggaacccgcaaataaataccctcagtgcctgtgccttagccccacttatgagttagcacttcagacaggtaaggtgattgagcaaatgggcaagttttatcccgagcttaaactggcgtacgcggtgagaggtaacaaacttgagagggggcagaagatcagcgaacagatcgtgatagggacaccaggaactgtgctcgactggtgtagtaaacttaaattcatcgacccgaagaagataaaagtatttgtcctggacgaagcagatgtaatgatcgccactcaggggcatcaagatcagagtatcaggatccagagaatgcttcccagaaattgccagatgttgctcttcagcgcgactttcgaagactcagtatggaagttcgcccagaaggtagttcccgaccctaatgtgatcaaactaaaaagagaagaggagacactggatacaattaagcaatactacgttctgtgttccagtcgcgatgaaaagttccaggcactctgtaacctgtatggcgccatcactatcgctcaggccatgatattctgtcacactcggaaaacagccagctggctggcagctgagctgtctaaagagggccatcaggtggctctgctgtccggcgagatgatggttgagcagagagccgcagtaatcgaacggtttcgagagggcaaggaaaaggtgcttgtcacaacgaatgtgtgtgctcgcggaattgatgtagaacaggtttctgtagtaataaatttcgatctgccagtggacaaggacggcaatccggacaatgagacctacctgcataggatcggccggacagggaggtttggaaaacgtggtctggcagtcaatatggtggattcaaagcatagcatgaacatcctaaataggattcaggagcactttaataagaagattgaacgtttagacacagatgatctagatgagattgaaaagatcgccaactag

SEQ ID NO: 23177 - DNA, 3255 bp, synthetic construct
  source 1..3255: mol_type = other DNA; note = Synthetic coding sequence
atggagcagcccaagggcgtggactggaccgtgatcatcctgacctgtcaatataaggatagcgtccaggtgttccagcgcgaactggaggtgcggcagaaacgtgagcaaatccctgctgggacgttgctgttagccgtcgaggatcctgaaaaaagagtgggcagcggcggagctaccctcaatgccctgctagtggccgccgagcacctgtccgcaagggcagggtttactgtggtcacatcagacgtgctccacagcgcttggatcctcatcctgcacatggggcgcgactttccatttgatgactgtgggcgggcgtttacttgcctgcccgtggaaaaccctgaagcgcctgtggaagcattggtgtgcaacctcgattgtctgctggacataatgacctaccggctcggccctggttcgccccctggggtgtgggtttgttctacggatatgctcctgagcgtcccagctaatccaggcatctcgtgggattcgttcagaggtgcgagggttatcgcactacctggaagccccgcgtacgcccagaatcacggggtgtacctgaccgacccgcagggcctggtgctcgacatatactaccagggaaccgaggccgagattcagcggtgtgtgcgcccggacggacgggttccccttgtgagtggagttgtgtttttttctgtggagactgcagaaagactcctggcaacacatgtctctcccccactggatgcttgcacctatctgggtttggatagtggagctagacctgtgcagctaagtctcttcttcgacattctccattgcatggcagaaaatgtcacccgggaggattttctggtgggtcgaccgcctgagttggggcagggcgatgcagatgtagccggctatctgcagtcggctcgagctcagttgtggcgagagttgagagatcagccactgaccatggcctatgtgtctagtggatcatattcttatatgaccagcagcgccagcgagttcctgttatccctaacactgccgggcgcccctggcgcacagatcgtgcacagccaggtggaggaacaacagctcttagctgcggggtcctccgtcgtctcttgtttactggaaggaccagtgcaactgggaccgggctcagtgctgcagcattgtcacctccaaggacccatccatatcggagccggatgtcttgtcacaggactggacaccgcccacagcaaggcactgcatggaagagaactgcgggacctcgtccttcagggacaccatactcgcctgcatggctcccctggacatgcttttactctggtgggcagactggacagctgggaaagacaaggtgcaggcacatatcttaatgtcccttggtccgagttctttaaacgaaccggcgtgcgagcttgggacctctgggaccctgaaacgttaccagctgagtattgcctgccctcagcgaggctgttccctgtgctgcacccatccagggaactggggccacaggatttactgtggatgttagaccaccaagaggacggcggtgaggccctgagagcctggcgcgctagctggcgactcagttgggagcagttgcagccctgtctcgatagggcagccaccctggcgtccaggagggatctgttctttaggcaggccctgcacaaagcacgtcacgtgctggaggctagacaagaccttagcctgagaccgctgatttgggctgcagtgcgggaaggttgcccagggcccctcctcgcgacccttgaccaagttgctgccggcgccggagatccaggggttgctgcccgcgctctggcctgtgtcgccgacgttctggggtgcatggctgagggacgcggaggtctgcggtcaggacctgccgccaatccagagtggatgcgaccctttagttatttagagtgcggagatcttgccgcaggagttgaagctctggctcaggagagagataagtggctgagccgcccagctctcctggttagagcagcccgtcattacgagggggcgggtcaaattctgatcagacaggcagtaatgtctgctcagcattttgtatcaacagagcaggttgagctccccggacctgggcagtgggtggtcgcagagtgtcccgcccgagtcgatttttcaggcgggtggagtgacacccctcctctcgcatacgagttaggtggcgccgtacttggcctggcagttagagtcgacgggcgcagacctataggggcccgcgccaggaggattcctgaacctgaactctggctcgctgtgggccccagacaagatgaaatgacagtcaagattgtgtgtagatgtctggccgacctcagggattattgccagccccatgccccgggagcactactaaaggcagccttcatatgtgcaggcattgtacatgttcacagcgagctgcagctctcagaacagcttctcagaacgtttggcggggggtttgagttgcatacttggagtgaattgccccatggtagcgggctggggacctcatcaattttggctgggaccgccctggccgccctacagagagctgccggaagggtagtcggcaccgaagcgctgatacacgccgtacttcacctggaacaggtcctaacaacaggggggggatggcaggatcaggtgggcgggcttatgcctggcattaaagtcggtcgttcccgcgcgcaactgcctttgaaggtggaggtggaggaggtgaccgtccctgaaggcttcgtgcagaagcttaacgaccacttgttgctcgtgtacacagggaaaacccgcctcgctcgcaatctgctgcaggatgttttgcgctcatggtacgccagactccccgcggtcgtacagaacgctcactcattggtacgccagaccgaagaatgcgcagagggattcagacagggcagtctacctcttctcggacagtgcctgacatcatactgggaacagaagaagctcatggccccaggttgtgagcccctcaccgtgcggaggatgatggatgtattggcgccccatgtgcacggccagtctctggcaggcgcaggggggggcggctttctgtatctcctcaccaaggagcctcagcagaaagaggccttggaggccgtgctggcaaagacagaggggctgggtaactattccatccacttggtcgaagtggatacccaagggctctccctgaagctcctaggcacagaagcatcaacatgctgtcccttcccttag

SEQ ID NO: 23178 - DNA, 2139 bp, synthetic construct
  source 1..2139: mol_type = other DNA; note = Synthetic coding sequence
atgcagcccggcagcgcccccccccccggccggatggaccccagcgccccccagcctcgtgccgagacctctggcaaggatatttggcaccccggggaacgatgcctggcaccctcccctgacaacggtaagctgtgcgaggctagcatcaaatccataactgtcgatgagaatgggaagagcttcgcagtggtgctgtatgctgactttcaggagcgcaaaatccccctaaagcagttacaggaggttaaatttgtgaaggattgtccaagaaacctgatttttgatgatgaggaccttgaaaagccatactttccaaacagaaagttccccagcagttccgttgccttcaagctgagtgataatggtgatagcattccctataccattaacaggtatctgcgtgactaccagagagaggggactaggttcctttatggtcattacatccacgggggtgggtgcatcctgggggatgatatgggcctcgggaagacagtacaagttatctcttttctggctgctgtgctgcataagaagggtacgagggaggatattgaaaataacatgccagaattcctgctgcgatctatgaagaaggagccactgtcttctacagcgaagaagatgttcctgatcgtagcgcccctgtctgttttatataattggaaggacgagttagatacctggggctattttcgggtgacggtgctgcatgggaaccggaaggacaacgagcttattcgggtgaagcagagaaagtgcgagatcgcgctcaccacttacgaaaccctccggttgtgtttggatgaactgaattccttggagtggagtgcagttattgtagacgaagcacaccgcattaaaaaccccaaggctagggtgactgaggtgatgaaagcgttaaaatgcaatgtgcggattgggcttacaggaacaatactgcagaataacatgaaggaactgtggtgtgtgatggactgggctgttcccggtctcctgggctccggtacatactttaagaagcagttctctgaccctgtggagcatggccagaggcacaccgctacaaaaagagagctcgccaccggaaggaaggcaatgcaaaggctcgccaagaaaatgagcgggtggtttctacgcaggacaaagacccttattaaagaccaactaccaaagaaggaggaccggatggtatactgctccctcaccgatttccagaaggccgtgtaccagacggtgttggaaacggaggacgttacactgatcctacagtcatctgagccttgcacgtgccgtagtggccagaaacggaggaattgctgctacaagacaaactcgcacggtgagactgtgaagacactatatctcagctatctaactgtgctacagaaggtcgcaaatcacgtggcactcctgcaggccgctagcactagcaaacagcaggaaacgttaattaaacggatttgtgatcaggttttcagccggttcccagactttgtacagaagtccaaagacgcagccttcgagacgctgtcagaccctaaatatagcggcaaaatgaaggtacttcagcagctgttaaatcactgccgtaagaacagagataaagtgctcctgttctcattcagtacaaagctgctcgatgtactgcaacaatattgcatggcctcaggactggactatagaaggttggacggctctacaaaatctgaagagcggcttaaaatcgtgaaagagttcaactccactcaggacgtgaacatctgcctggtgtctactatggctggtggcctcggcctaaattttgtgggcgccaacgtggtagtcctcttcgaccctacttggaaccctgcaaacgatttgcaggccatagatagagcataccgtattgggcagtgtcgagacgtcaaagtgctgcgcctgatttctttggggaccgtagaggagattatgtacttgaggcagatttacaaacagcaactccattgcgtagtagtggggagcgaaaacgccaagaggtactttgaggcggtccaggggtctaaggagcaccaaggggaactgttcggcatccataacttgttcaaatttagatctcaaggaagttgcctgacaaaggatatcctggaggtgtag

SEQ ID NO: 23179 - DNA, 1212 bp, synthetic construct
  source 1..1212: mol_type = other DNA; note = Synthetic coding sequence
atgaagcagcggaagggccagggcagcggcggcagccggggccggaagaaaagagggctgtccgatatttccccaagcacatctcttcctcctctcgtggagggccaacttcgctgtttcctcaagctgactgtgaaccgcgtgatttggaaaatcgcaaagccgccaacttgcgtactcgtccgtgtgcgctggtggggtgagactagcgatggaacacttttttgccctagagacgcgcttcagacggagcctaaagcagtacggactaccaccaggtatgcaatcagatgcggtcctaagcaattcactagctatctgactgatatggccgtgctagtgctggaggtaattactaagctcgacgggctgcctatcgggcgggtccaaatcaacggtctagcgcagctaagccccacccaccagatcaatggatttttcaccattgtgtctagcacctccaagaagttgggagaacttcaggtctcgctagctttagagccgctttctgaaacttacgactcctaccaccccctgccgacaacagacatgacagagaacgtgttgctcagcaagcaagggttccgggagaatacagagccctctagcacccagtttcaggtgccaagccgcccaagggacattcacactattaagatcgacgggaaggaattggccgcaaactcatctaggtccaccaccccacgggggaaagaccacgtatgcttcgctgagaatcccgacacaatcaaggacagttccttcgggctccaacacagccttaatagtggacaatcactagaaagtgtgaccctgaaaggcagagcaccaaggaaacaaatgagccttttaaattctagcgagtttcagcctcagatccgaacggtcgctaagtcccatagtgactcttgcatcctctcttctaacaaccttccaacaaaagatttgctcagcgctctgctggaacagggaaataagcttagaaatgctatggtgatctctgccatgaaatcatcccctgaaacttctatgctgctcgaccaggtgcatcctctcctcatgaaaattctgctggaacatcagcatcggagtgagcccttcctcgggatcggcctaaaaacaaccttgaagatcacaagcagcctgcaactcagaatccactttggtgacatgactcagaaattaatccccgaactgtatagttgctactag

SEQ ID NO: 23180 - DNA, 3663 bp, synthetic construct
  source 1..3663: mol_type = other DNA; note = Synthetic coding sequence
atgggcaagaagcagaagaacaagagcgaggacagcaccaaggacgacattgacctggacgcactcgcagccgagatcgagggagccggagccgccaaagaacaggagcctcagaagagtaagggaaagaaaaagaaagaaaaaaaaaagcaggattttgacgaggatgacatactgaaagaacttgaggagttaagtttggaagcacagggaataaaggctgatcgggagacagtagccgttaagcctacggaaaataatgaggaggagtttacatccaaagataaaaaaaagaagggccagaaaggaaaaaagcagagtttcgatgacaacgacagtgaagaattagaagataaagactcaaaatctaagaagaccgccaaacccaaagtagaaatgtatagtggatcagacgatgacgatgacttcaacaagttacctaagaaggctaaggggaaggcccagaagtcaaacaagaagtgggacggaagtgaggaggacgaggataactccaaaaagattaaggaaaggagccgcataaatagttctggcgagtccggggatgagtctgatgagtttctacagtccaggaagggtcaaaagaagaatcaaaaaaataagccgggtcctaatattgaatccggcaatgaagatgatgatgccagctttaagattaagaccgtcgcacaaaaaaaggctgagaagaaggagcgagaaagaaaaaagagggatgaagaaaaggccaagctgcgaaaacttaaggagaaggaggagctcgagactgggaagaaggaccagagcaaacagaaggagtcacagcgcaaatttgaagaagaaaccgtaaaaagcaaagttacagttgacaccggagtgatcccagcttcagaggagaaggctgaaaccccaactgcagccgaggatgacaacgagggtgacaaaaaaaagaaagataagaagaaaaaaaagggggaaaaggaagaaaaagagaaggaaaaaaagaagggcccatccaaagctacggtgaaggctatgcaggaggctctggccaagctgaaggaggaagaggagaggcagaagcgggaagaagaggagaggatcaagcggctggaggaactcgaagctaagcgtaaagaggaagagcgccttgagcaggagaagcgcgaaaggaagaaacagaaagaaaaagaacgtaaggagcggctgaagaaagagggtaagctgttaacgaagtctcaacgcgaggccagagctagggctgaagcgacgcttaaattgctgcaggcacagggcgtggaagtgccttctaaagatagcctgccaaaaaaacgtcctatttacgaggacaagaagcggaaaaagattccacagcagctcgagtctaaggaggtatctgaatcaatggagctgtgtgctgccgtcgaggtgatggagcaaggagtacccgagaaggaggagaccccccctccagtagagcccgaagaggaggaggatactgaagacgcggggctggacgattgggaggccatggcttcagacgaagagacagagaaagttgagggtaacaaggttcatatcgaggtcaaagagaatccggaagaagaagaggaggaggaggaagaagaggaagaggatgaggaatcggaagaagaggaggaagaggagggcgagtcagaagggagcgagggagacgaagaggatgagaaagtgagcgacgaaaaagactcagggaagacgctcgataagaaaccctctaaggaaatgagttccgactcagaatatgacagcgacgacgaccgcacaaaggaagaacgtgcctacgacaaggccaagagacgcatcgaaaagcggaggctcgagcacagtaagaatgtgaatactgagaaactgagagcaccaatcatatgcgttctcggccatgtggatacaggaaagaccaagattcttgacaagctgcggcatacacatgttcaggacggagaggcagggggaattacccagcagatcggagccaccaacgtgccgctggaggctatcaatgagcaaacgaagatgatcaagaacttcgaccgggaaaatgttcggatcccaggcatgctgatcatcgacacccctggacatgagtcattctcaaatttgcggaatcgtggctcttctctgtgcgacattgctattctcgttgttgatataatgcacggcctggagccacagacaattgagtccattaacctcctgaagtcaaagaagtgtccctttatagtagctctgaataaaatcgacagactatatgactggaaaaagtctcccgactctgacgtggctgccactctgaaaaaacagaagaaaaatactaaagatgaattcgaagaacgcgctaaagcgattattgtggaattcgctcagcagggcctgaatgccgctctgttttatgagaataaagacccccgaacttttgttagtctggtgccaacaagtgcacacacgggtgacggcatgggatcgctgatctatctgctcgtcgagctgacgcaaactatgctcagtaaaaggctggcacattgcgaagagctacgcgcacaagtcatggaagtgaaggcactgcccggtatgggcacgaccatcgacgtgattcttattaatggccggttaaaggaaggcgacaccataatagtgcctggagttgagggccccatcgtgacgcagatcagaggtctgctgctaccgcctcccatgaaagaacttagagtgaaaaaccaatacgagaagcacaaagaggttgaggcagcccagggggttaaaatcctgggaaaggatctggagaagacgttggccggcctgcccctgctcgtcgcctataaggaagatgaaatccctgtgctgaaagatgaattaatccacgagctcaaacagactctcaacgcaatcaaactggaagagaaaggtgtgtatgtgcaggctagtaccttaggtagcctggaggcattgctggaatttctgaagacatccgaggtgccatatgccgggatcaacattggacctgtgcataagaaagatgtaatgaaggcatcagtgatgctagagcacgatcctcagtatgccgtaatactagcctttgacgttaggatagaaagggacgcacaggagatggccgattcactcggcgtgcgaatcttctctgccgagattatctatcacctgttcgacgctttcaccaagtaccggcaggattataagaaacagaagcaggaagagttcaagcatatcgctgtgtttccctgcaaaatcaagatcctcccgcagtacatctttaatagccgggatcccatcgtgatgggggtaaccgtcgaggccggccaggtaaagcagggtactcctatgtgcgtgccaagtaaaaactttgtggatataggaatcgttacctctatcgaaatcaaccacaaacaggttgacgtagctaagaagggacaggaagtgtgtgtaaaaattgagccgattcccggcgagagccccaagatgttcgggagacacttcgaggccacggacattctggtgtcgaaaatcagcaggcagagtattgatgccctcaaagattggttcagagacgagatgcagaagtctgactggcagttgattgtggagctgaagaaggtgttcgaaatcatttag

SEQ ID NO: 23181 - DNA, 138 bp, synthetic construct
  source 1..138: mol_type = other DNA; note = Synthetic coding sequence
atgagcgacaagcccgacctgagcgaggtggagaagttcgaccggtcgaagctgaaaaagacaaatactgaagaaaaaaatactctgccatctaaagagacaattcaacaggagaaggagtgtgtgcagacttcctag

SEQ ID NO: 23182 - DNA, 1533 bp, synthetic construct
  source 1..1533: mol_type = other DNA; note = Synthetic coding sequence
atgcccggcggcggcgccagcgccgccagcggccggctgctgaccgccgcagaacagcgtgggtcccgcgaggctgccggttccgcttccagaagtggctttggcggcagcggtggaggaagaggtggtgcatcgggcccaggctctgggtccggcggacccggcggaccagccggcagaatgtcactgacaccaaaggagctgtccagcttgcttagcattatttccgaagaggcaggggggggatctactttcgaagggctgtcaaccgcgtttcaccactatttcagcaaggcggatcactttcggctcgggtcagtgctcgtcatgctactgcagcagcccgaccttttaccaagtgccgcccagcgattaaccgccttgtacttgctgtgggagatgtacaggacagagccactggcagcaaaccccttcgctgcaagctttgcccatctcttaaaccccgcccctcccgcccgcggcggccaggagcctgatcggcctcccttatccggctttcttccccccatcaccccccccgaaaagttcttcttatcccagctgatgctcgcccctccaagggagctctttaagaagacaccaagacagatagctctgatggacgtagggaatatgggacagtcagtggacataagcgggctgcagctggctctggccgaacgtcaatcggaactgcccacccagagcaaggcctcctttccttctatcctgtctgatccggacccagatagtagcaattccggttttgactcctccgtagcttcccaaattactgaggctctggtctcggggcccaaacccccaattgaatcccacttcaggcccgaattcatccgtcccccaccaccgttgcacatttgtgaggacgaacttgcatggctgaatccaactgaaccagaccacgcgattcagtgggacaagtcaatgtgtgtgaaaaacagcacgggtgtggagatcaagaggatcatggctaaggcgtttaaatctcctttgagctcaccccaacagacgcagctcctgggggagcttgagaaagatcccaaactggtttaccacatcggcttgaccccagctaaactccccgaccttgtggaaaacaatccactggtagccattgagatgctattaaagctcatgcagagtagccagattacggagtacttcagcgttttagtgaacatggatatgtctttacatagcatggaggtcgtaaatcggctgaccactgcagtggatctcccccccgaattcattcatctctacatctcaaactgtatctccacttgtgaacagataaaagacaaatacatgcagaatcgtctggtaaggttagtctgcgtgttccttcaatcactaattagaaataagatcataaacgtacaggacctgtttatcgaagtccaggccttttgtattgagttcagccgtatccgagaagctgcaggcctgttcagattattaaaaaccctggacacgggcgagactccctccgaaactaaaatgagcaaatag

SEQ ID NO: 23183 - DNA, 2184 bp, synthetic construct
  source 1..2184: mol_type = other DNA; note = Synthetic coding sequence
atgagcggccggaagcggagcttcaccttcggcgcctacggcggcgttgataaaagcttcacttctcgaaggtccgtgtggcgtagtgacggtcaaaatcaacactttccacaggcactcgacctgagtcgcgttaatctagtgccttcatacactccgagcctctatccgaaaaacaccgatcttttcgaaatgatcgaaaaaatgcagggaagccgtatggatgagcaaagatgctcttttcctccacccttgaaaaccgaggaggattatattccttatcccagcgtgcacgaggtacttggtagggagggaccattcccactgatcctattgcctcagttcggcggatattggatcgagggaaccaatcacgagattacatccatccccgagacagaaccactccagtcgccgaccactaaggtgaaactggaatgcaaccccaccgcaagaatatatagaaaacatttcctgggcaaggaacactttaactactatagtctcgacgcagcccttgggcacctcgtgttctctctgaagtacgacgtcattggcgatcaagagcacttacgactcctgctcagaaccaaatgtaggacttatcatgacgtgatcccaatttcatgcctaactgaatttccgaacgtggtacagatggcgaagctcgtgtgtgaagacgtaaacgtcgatcgtttctatccagtcctgtaccccaaagccagcagactgattgtcacgtttgatgagcacgtcatctccaacaactttaagtttggagtcatataccagaagctggggcaaacatcagaggaagaactgttctccacaaatgaggagagccctgcatttgtagagtttctagagttcctgggtcagaaagttaagctgcaagactttaagggttttagaggtggcttagacgttacgcacggacagaccgggactgagtcagtgtactgtaatttccgaaataaggagattatgtttcacgtgtctacgaagcttccgtatacagagggcgatgcccagcagttacaacgcaaacgccatatcgggaacgatattgtggccgtcgtctttcaggatgagaatacacctttcgtacctgacatgatcgcgagcaactttctgcacgcttacgtagtggtacaggccgaaggaggagggcccgacggacctctgtacaaggtctccgtcaccgctagggatgacgtgccttttttcgggccgcctcttcctgaccctgccgtgtttcggaaggggcccgagttccaggaatttctactcacaaaactgataaacgcggagtacgcctgttacaaggccgaaaaatttgccaagttggaagagcggacccgggctgctctgctcgaaaccctttatgaagaactacacatccactcccagtcaatgatggggctggggggagacgaggataaaatggagaacggaagtggcggcggcggattttttgaaagcttcaaaagggtcattcggtcacgctctcagtcgatggatgcaatgggacttagcaataaaaaacccaatacggtttcaacaagccacagcgggagtttcgcaccaaacaacccagacctggcgaaggcggcagggatttcactcatcgtgccgggcaaaagtcctacccggaagaaaagcggacccttcggaagccgacggagcagtgccattggaattgagaacattcaggaggtccaagaaaagcgcgagagtccacccgcagggcaaaagactccagatagcggtcatgtgagccaggagccaaagtccgagaacagttcaactcagtctagccccgagatgcccaccaccaaaaatcgggcagagactgcggcccagagggcagaggccctgaaagacttttctaggagctcctcctctgccagctcttttgcctctgtggtggaagagacagaaggtgtggacggggaggatactggcttggagtctgtctcctccagcggtactccccataagagagattcttttatctactctacctggttagaagactctgtttcaaccacttcggggggatcgtcccctgggccttcacgatctccacacccggacgccgggaaactcggtgatcccgcttgccctgaaattaagatacaactggaagcttctgagcagcatatgccccagctgggctgctag

SEQ ID NO: 23184 - DNA, 873 bp, synthetic construct
  source 1..873: mol_type = other DNA; note = Synthetic coding sequence
atggtgctgctgcacgtgaagcggggcgacgagagccagttcctgctgcaggcccctggctctacggagttggaggaactgaccgtacaggttgcaagagtgtataatgggagattgaaggttcagagactgtgcagcgagatggaggagctggcagaacacggaatatttctgcccccaaacatgcagggtctgacagacgatcagatcgaggagctgaagctcaaggacgagtggggtgagaaatgtgtcccctccggtggcgcagtgtttaaaaaagacgacattggtcgcagaaacggccaggcccctaacgagaagatgaaacaggtcctgaagaaaacaatcgaagaggctaaggcaataattagcaaaaagcaggtggaggctggggtttgcgtcactatggagatggtgaaagatgcgctagatcagctgagaggtgccgtaatgatcgtctatccaatgggactgccaccctacgaccctatccgcatggaattcgagaacaaggaggacctgagcggtacgcaggctggtttgaatgttattaaggaggctgaagcccagctttggtgggctgccaaggaattgaggaggaccaagaagctatctgattacgtgggaaaaaacgaaaagaccaagatcattgccaagattcaacaaagaggacagggagctcccgctagggaaccgattatatcttctgaggaacagaaacaactaatgctttactatcatagacgacaagaggaacttaagagactagaagagaatgacgacgatgcgtacctgaattcgccttgggccgataataccgccctgaagagacatttccacggggtcaaggacattaagtggcgcccgcgttag

SEQ ID NO: 23185 - DNA, 567 bp, synthetic construct
  source 1..567: mol_type = other DNA; note = Synthetic coding sequence
atggagcccccccggggcccccccgccaacggcgccgagcccagcagagccgtaggtacagtgaaggtctatctgccaaataagcagcgcacagtggttacagtacgggacggaatgagcgtatatgactctttggataaggcccttaaagtacgaggactgaatcaagattgctgcgtggtttataggctgattaagggccggaagaccgtaacagcatgggacaccgcaatcgctcccctggacggcgaagagctcatcgttgaggtgctcgaagacgtgccgttgacgatgcacaacttcgtgcgaaaaacctttttcagtctggccttttgcgacttctgcctgaagttcctgtttcacggattcaggtgccagacctgcggctataagttccaccagcactgcagctctaaagttccaaccgtgtgtgttgatatgtcaacgaataggcagcagttctaccattccgttcaagacctgtccgggggcagccggcaacacgaggccccttcaaaccggcctcttaatgagctgctcactccacaagggccatcctgccggtag

SEQ ID NO: 23186 - DNA, 2034 bp, synthetic construct
  source 1..2034: mol_type = other DNA; note = Synthetic coding sequence
atggacgaccccgactgcgacagcacctgggaggaggacgaggaggacgccgaagatgccgaggacgaagactgcgaggatggtgaggcagccggcgcccgagacgctgacgctggagacgaggatgaagaatccgaggaaccccgcgcggctagaccgagctccttccagtccagaatgaccggaagccgcaactggcgtgctacacgagacatgtgccgatataggcataactacccagatctagttgagcgtgattgtaacggggacacacccaacctgtcattttatagaaatgagatcaggttcctgcctaatggctgcttcattgaagatatcctccagaactggacagacaattacgacttgctggaggataaccatagctatattcagtggctcttccctttgagggaacctggcgtgaactggcatgctaagcctctcacattaagagaagtcgaagtattcaagtcctctcaggaaattcaggagaggctggtcagggcctacgagcttatgctgggattttatggcattcgtctagaagataggggcacaggcacagtaggccgagcacagaattatcagaagcggtttcagaatctgaactggcggagccataacaatctccggatcactaggatcctcaaaagtcttggcgaactggggctcgagcacttccaggctccactggtccggttttttcttgaggagactctggttagacgggaactgcctggagttagacagtctgctctggactatttcatgttcgccgtgaggtgtagacaccagaggcggcagctggtgcacttcgcctgggaacatttccgtccccggtgcaagttcgtgtggggaccccaggataaacttaggagatttaagcctagctcattacctcaccctctcgagggttctcgaaaggtggaggaggaaggcagcccaggggacccggatcatgaggccagtacccagggacgtacctgcggaccagagcattcgaaggggggtggcagggttgatgagggaccccagcccaggtctgtggaaccccaggatgctggcccacttgagaggtcccagggggacgaagccgggggacacggcgaggacaggcccgagccattgtctccaaaggaatcaaaaaagcggaagttagaactgtctagacgggagcagcctcctaccgaacccggtcctcagtcagcttcagaagtggagaagatcgcgctcaatttggaaggctgcgctctctctcagggctctttacgaaccggtacacaggaggtcggcggacaggatcccggagaggccgtgcagccatgtagacagcctctgggagcacgggtcgccgataaagtcaggaagcggcggaaggtggatgaaggcgccggagacagtgccgccgttgcttctggaggcgcccaaactctggccctggccggaagtccagctccgagtgggcaccccaaggccggccatagcgagaatggcgtggaggaagataccgaaggacgcactggacctaaggaggggacccccgggtcacctagcgagacaccagggccctcacctgctggcccagcgggcgatgaacctgctgagtccccatctgaaactcctggaccacggcccgccgggcccgccggcgacgaaccagctgaaagtccctcggagacgcctggccccaggccagcaggaccagcaggggatgaaccggcagagtccccatcagagactcccggcccctctccagctggacctactcgggatgagcccgccgaaagcccatcagaaaccccgggcccgcgtcctgccgggcccgccggtgatgagccagcagagtctccgagcgagacacctggccctcggccggccggtcctgcgggtgacgagcccgccgaaagcccttcggaaacacctggccccagtcctgcaggccccacaagagacgagcccgccaaagccggcgaggccgcagagcttcaagacgccgaggttgagagtagtgccaagtctggcaaaccatag

SEQ ID NO: 23187 - DNA, 735 bp, synthetic construct
  source 1..735: mol_type = other DNA; note = Synthetic coding sequence
atgggcctggagctgttcctggacctggtgagccagcccagccgggctgtctatatcttcgcaaagaagaatggcatcccactggagctgagaactgtggacctagtaaaggggcaacacaaatctaaggagtttctgcaaataaacagccttggcaaattacccaccctgaaagacggcgattttattttaacagagagtagtgctatcctgatctatctaagctgcaagtaccaaacccccgaccactggtacccttcggatctacaggccagggcccgcgtccatgagtatctgggatggcatgccgactgtatcaggggcacctttgggataccactctgggttcaggtcctcggccctttgattggggtgcaggtgcccgaggaaaaggtggaacgtaacaggactgccatggatcaggcacttcaatggctcgaagataagttcctgggggatagaccttttctggcaggccagcaagtgacactagccgatttgatggctctagaggagctgatgcagcccgtggccctcggctacgaattatttgaagggcggccaaggcttgccgcctggcggggccgggttgaggcatttctgggcgcagagctttgtcaggaggcccattccattattctgtcaatcctggagcaggccgccaaaaagacactacccaccccttcacctgaagcttaccaagctatgttgctgaggatagccaggattccttag

SEQ ID NO: 23188 - DNA, 531 bp, synthetic construct
  source 1..531: mol_type = other DNA; note = Synthetic coding sequence
atggccgccagcaccgacatggccggcctggaggagagcttccggaagtttgcgatccacggagaccctaaggcgtctggccaagaaatgaatggcaaaaattgggccaaattatgcaaggactgtaaagtggctgatggtaagtcagtgacgggaacagatgtggacatagtgttttccaaggtcaaggggaaaagcgctcgcgtgattaactacgaggagtttaagaaggcgcttgaggagctggccacaaagagattcaagggcaaatccaaggaagaagcattcgatgccatttgtcagctggtggccgggaaagagcctgctaatgtcggtgttaccaaggccaaaacggggggcgctgtggaccgcctgaccgatacttcaaggtatactggaagtcataaggagcggttcgatgagtccggaaagggcaagggtatcgccgggcgtcaagacatcttggatgatagtggttacgtgtcagcttataaaaacgcaggaacctatgatgcgaaggtgaagaaatag

SEQ ID NO: 23189 - DNA, 930 bp, synthetic construct
  source 1..930: mol_type = other DNA; note = Synthetic coding sequence
atgagcgacctgggcagcgaggagctggaggaggagggcgagaacgatattggagagtatgagggggggcggaatgaagccggcgagcgtcacggccgaggccgggctcgactccccaacggggacacttacgaaggcagctacgagtttgggaaacggcatgggcaagggatttataaattcaagaacggagcccgctatatcggagaatatgtgcgcaacaagaagcacggtcaaggcacttttatctacccggatgggtcgcggtatgagggggagtgggccaacgacctgaggcacggccatggtgtctattattacattaataatgacacctacacgggggaatggttcgcccatcagagacatggacaagggacatacctgtatgccgagaccgggtctaaatacgtaggcacttgggtgaatgggcagcaggaaggtacagccgaactgattcatctgaatcaccgttatcagggcaagttcctgaacaaaaaccccgtaggacctggtaagtatgtcttcgacgtcgggtgcgaacagcatggcgaatatcgactgacagacatggaacgcggcgaggaggaggaggaggaagaactggttaccgtagtaccaaaatggaaagccacacagataacggagctggcactctggacacccacgcttcctaagaagcctacatcaactgatggacctggccaggatgctccgggcgctgagtcagctggcgagcccggagaagaggcccaagcacttctcgaaggttttgaaggcgaaatggacatgaggcccggcgacgaggacgcggatgttctccgtgaagaatctcgggaatacgatcaggaagagttccggtacgatatggacgagggcaacattaatagtgaggaggaagaaactaggcagtcagatctgcaagattag

SEQ ID NO: 23190 - DNA, 5943 bp, synthetic construct
  source 1..5943: mol_type = other DNA; note = Synthetic coding sequence
atgaaccccaccaaccccttcagcggccagcagcccagcgccttcagcgcgtcaagctccaacgttggaaccctgccttctaaaccacccttcaggttcggtcagccctcactgttcggacaaaactctacactgtctggcaaaagctcagggttttcgcaagtgagctcctttccagccagtagtggtgtctcacactccagctctgtccagacgcttggatttactcagacatcctcagtgggccctttctccggattagagcacactagcaccttcgtggccacctccggcccaagtagctcatctgtgctgggaaacacagggtttagcttcaaatcccccaccagcgtcggggccttcccatctaccagcgcgtttgggcaggaagccggggagattgttaattcgggattcgggaaaaccgaatttagttttaagcccctggaaaacgccgtcttcaagcctatactgggtgccgagagcgaacctgaaaaaacccaatcccaaattgcaagtggcttttttaccttcagtcaccccattagtagcgccccggggggactcgccccgttctcctttcctcaggtcacctctagttcagccactacatccaatttcactttcagcaagcctgtctcatctaacaattctctgtcagccttcaccccagccctctctaaccagaacgtggaagaggagaaacgtggtcctaagagcatctttggctcatctaataactcattcagctcctttccagtgtcttccgcagtgctgggagagcccttccaagcaagcaaggctggtgtgcggcaagggtgcgaggaagcagtgagtcaagtggagccgttgccatccctaatgaagggcttgaagagaaaggaggatcaggaccgaagtccccgtaggcatggacacgagcccgcagaagatagtgatccgctgagcagaggcgatcaccctcctgacaagcgtcccgtaaggctcaaccggccacgcggtggaactctgtttggacgcaccattcaagacgtcttcaagtccaataaggaagttgggcgcctgggaaacaaggaggctaaaaaggaaactggtttcgtcgagtcagctgagtctgaccacatggcaataccaggggggaatcagtccgttctggctccgtcccggatccctggagtgaacaaagaggaggaaacagaatcccgcgagaagaaagaggactcccttcgaggaactcccgcacggcagtctaatagaagtgagtcaactgattcactgggcgggctgtcaccctccgaagtcacggccattcagtgtaagaatatccccgattatttaaatgaccgtaccattcttgaaaatcacttcgggaaaatagccaaggtacagagaatctttacgagacggagtaagaagctcgccgtggtgcatttctttgaccacgcgtctgctgctctagcacggaaaaaaggaaagagcctccataaggacatggccatattctggcaccggaaaaagatcagtcctaacaagaagcccttctctctcaaagagaaaaagcccggcgacggagaggtctccccgtcgaccgaagatgctcccttccagcatagccccttgggaaaggccgcaggacgcactggagcaagctccctactgaacaaatcgagtccagtgaaaaagcccagcctgctgaaagcccatcagttcgagggtgattcctttgattcagccagcgaggggagtgagggtctaggcccttgcgtgctctcacttagcaccctcattggcacagtggcagagacttctaaggaaaaataccgccttctggaccaacgcgatcgcataatgcgtcaggctcgcgtcaagcgtactgaccttgataaggcccgcacttttgtggggacttgcctggacatgtgccctgagaaggagcgctacatgagagagactagaagtcaattgagcgtgttcgaagtggtgcccgggaccgatcaggtggaccatgctgctgccgtgaaagagtattcgcgctccagcgccgatcaggaagagccactccctcatgaactcaggccccttcctgtgctgagtaggaccatggattaccttgtcacgcagatcatggatcagaaggaaggatctttgcgggattggtatgacttcgtgtggaatcgaactcggggtattcgcaaggacatcactcaacaacatctgtgcgatccactgaccgtttccctgattgagaagtgtactcggttccacatacattgcgctcattttatgtgcgaagaaccaatgtcaagtttcgacgcaaagatcaacaatgaaaacatgacgaagtgcctccagtccttaaaagagatgtaccaggatttgaggaataaaggcgtcttctgcgcatctgaggctgagtttcaggggtataatgtgctgctgagtctcaacaagggggacatccttcgtgaggtgcagcagttccatcccgcggttagaaatagctcagaagtcaaatttgccgtgcaagcgtttgctgccctcaattccaacaacttcgtcaggttctttaagcttgtgcagtccgcttcctacctgaatgcttgtctgcttcactgttatttttcccaaatacggaaagacgcactgagggctcttaattttgcctatactgtgtccacccagagatcaactatttttcctctggatggtgtagtgcgtatgcttctattccgggactgcgaggaagcgactgattttctgacatgccacggacttaccgtttctgacggatgcgtggagctcaatcgctcagcctttctggaaccagagggcctctctaagaccaggaagtccgtctttattaccaggaagctcaccgtgagtgtgggtgaaatcgtgaacgggggcccactgcctccagttcccagacatacccctgtgtgctcatttaattcacagaataagtacatcggggaatccctggcagccgagctccctgtatctactcagagacctggatctgacacagtaggagggggtaggggtgaagaatgcggagttgagccagacgcgcccttgtctagccttccccagtcattacctgcgcctgcccccagccctgtcccgttgcctcccgtgctcgcactgacgccgagcgtggctccatcattatttcaactgtctgttcagccagagcccccacctccggagcccgttccgatgtactctgacgaggacttggcccaggtggtagacgaattgatccaggaagccctgcagcgagactgcgaggaagtcgggtccgcaggggccgcctacgcagccgctgccttgggcgtgagcaacgccgcgatggaggacctgctaaccgctgctacaaccggcatcctcaggcacattgctgccgaggaggtgagcaaagagagagaacgcagagaacaggagcggcagcgtgcggaggaagaacggttgaaacaggagagagaacttgttctttctgaactgtcccagggtctggccgtcgaactgatggagcgggttatgatggagtttgtgcgcgaaacttgttctcaggaactgaagaacgctgtggaaacggatcaaagagtccgggtagctcggtgttgcgaggacgtttgtgctcacctggttgatctgtttctggtagaggagatcttccaaactgccaaagagaccctgcaggaactccagtgtttctgcaaatacctgcaacggtggagagaggccgtgacagctcggaagaagctgcggcggcaaatgcgcgcgttccctgctgccccctgctgtgtggacgtgagcgatcgccttcgcgccctggccccaagcgccgagtgccccattgccgaggaaaacctggcccgtgggctattggatctgggacatgcgggcaggctggggatttcctgcacaaggctgagacgcctgaggaataaaacagctcaccagatgaaggtgcaacatttttaccagcagctgctcagcgatgtcgcatgggcgagcctcgatctgccttctctcgtagcagaacacctgcctgggaggcaggagcacgtgttttggaagttggtgctggtgctcccagatgtagaggaacagagtcccgagtcctgtggtaggattctcgccaattggcttaaggttaaatttatgggagacgagggatccgtggatgacacgagcagtgacgctggcggtatccaaacactgtctttatttaattcattaagtagcaaaggtgaccagatgattagcgttaacgtttgtatcaaggtggcccatggggccctgagcgacggtgcaatcgacgccgtggagacgcagaaggacttgctgggggcttccggactgatgctgctcctgcctcctaagatgaagagtgaggacatggcggaggaagacgtgtactggctgtccgccctgcttcagctgaaacaacttctccaggcgaagcccttccagccagcactccccctagtcgtactggtgccatcacctggaggagatgcggtggagaaagaggtggaagatgggctgatgctgcaggatcttgtcagcgccaagctcatcagcgactacacagttactgaaatccctgatacaattaatgacttgcaaggtagcacaaaagttctgcaggccgtccagtggctggtcagccattgtccccacagcctggacctgtgttgtcagaccctgatacagtatgtcgaagatggaattgggcacgagttttcagggcggtttttccacgacagacgagagcggcggctgggcggcctggcatctcaggagccgggcgcaatcattgagttgttcaacagcgtgctacaattccttgcatccgtggtctcctcagagcagttgtgtgacctcagttggcccgttaccgaattcgctgaggccgggggctcacgactgctcccccatctccattggaatgctcctgagcacctggcttggctgaagcaggccgtgctgggcttccagctccctcagatggacttaccccccctcggagccccctggctgcctgtctgctccatggtggtgcaatacgccagtcagatcccttcctccagacaaacacagcctgttctacagagccaggttgagaatcttcttcatcgtacctactgccggtggaaatcaaaaagcccatcgccagtgcatggcgccggaccatccgtgatggagatcccctgggacgacctcatcgcgttgtgtattaaccacaagctacgggattggacgcctccaagactacctgttacatccgaagccctgtccgaggacggccagatctgcgtctactttttcaagaatgacttaaagaaatatgatgttccactcagctgggagcaggcaaggctccaaactcaaaaagaactccaactgcgggagggaaggctggccataaagccttttcatccctcagccaacaacttccctattccgctattgcacatgcaccgcaattggaagcgttctaccgagtgcgcccaagaagggcgaattcccagcacagaggacctgatgaggggagcgtcggctgaggaattgctggcacagtgtttgtcgagtagcttactgctggaaaaagaggaaaacaagcggttcgaggatcagctgcagcagtggttgtccgaagatagtggggcctttaccgacctcacttcactgcctctgtaccttccccagacgcttgtgagcttgtctcatacaatcgagccggtcatgaaaacctccgtcaccacaagtccgcagtcggatatgatgagggagcagctgcaactttccgaggccactgggacatgcctgggagagcgcctcaaacacctagaacggctcattcggtccagtcgggaggaagaagttgcatcggagctgcacctgtccgccctactcgacatggtcgatatctag

SEQ ID NO: 23191 - DNA, 3147 bp, synthetic construct
  source 1..3147: mol_type = other DNA; note = Synthetic coding sequence
atgagcgacgtgaacccccccagcgacacccccatccccttcagcagcagctctactcactcaagccacattcccccatggacatttagctgctatccgggtagcccctgtgagaacggggttatgctgtacatgcgaaatgtttcccatgaggagctacagagatttaagcaactgcttcttactgagctgtccacaggaacaatgccgatcacatgggaccaggtcgagaccgcctcctgggcggaggtagtgcatctcttgatagagagatttccaggtcggcgagcatgggatgtgacatctaatatattcgccatcatgaactgcgataaaatgtgcgtggtggtgagacgcgagatcaacgccatactccctactctcgaaccagaggacctcaacgtcggcgaaacccaggtcaatctggaggagggtgagtcgggcaaaatcagaagatacaaaagcaacgtgatggaaaagttcttccccatttgggatatcacaacgtggcccgggaatcagcgcgattttttttatcagggcgtacaccgccacgaagagtacctaccatgtttgttgttaccgaaacggcctcagggacgtcaacctaaaaccgttgcaatacaaggcgctcctggcatcggaaaaaccatccttgctaaaaaagttatgttcgaatgggcccggaataagttttacgcccacaagaggtggtgcgcattctattttcactgccaggaagttaaccagactaccgaccagtctttctccgaattgatagagcagaaatggccgggctcccaagacctggtctctaaaattatgtccaaacccgatcaactcctgttgctgctcgatggattcgaagaactgacgagcaccctcatcgatcggctggaggatctgtcagaggattggagacagaaattgccaggaagcgtcctgttgagcagtctgttgtccaagactatgctgcccgaggcaacactgcttattatgatcagatttaccagttggcagacatgcaaacccctccttaagtgccctagtttggtcacgctgcccgggttcaataccatggagaagattaaatatttccaaatgtactttgggcatacagaggagggagatcaggtgctgtcttttgccatggagaacaccattcttttctccatgtgccgtgtgccagttgtgtgctggatggtgtgttctgggctgaagcagcagatggagaggggaaacaacttaacccagagttgcccaaacgccactagcgtgtttgtgcgatatatcagcagtctgtttccgactagagctgagaattttagcagaaagatccatcaagcccagctggaggggctgtgccatctggccgcggactcaatgtggcaccgcaaatgggtgctcggcaaggaagatctagaagaggccaagctggatcagactggcgtgacagcctttctcgggatgagcatcctccgtagaattgccggagaggaggatcactacgtgtttaccctcgtaactttccaggaattcttcgctgcactgttctacgttttgtgtttccctcagcgtctgaaaaacttccacgtgctgagtcacgtaaatatacagcggttaatcgcctccccccggggctccaaaagctatcttagtcacatgggcctcttcctctttggcttcttaaatgaagcctgcgcctctgcagtggagcagtcattccagtgtaaggtatctttcgggaataagcggaaactacttaaggtgattcccctgcttcataagtgtgaccctcccagcccgggatctggtgtgcctcagcttttctattgcttgcacgagattcgcgaggaagcctttgtcagtcaagcgctcaacgattatcataaggtagtgctaagaataggcaataacaaagaggtccaggtttctgccttctgcctgaagcggtgccagtacctccatgaagtggagctcactgtcaccctaaatttcatgaatgtctggaagctgagctcgtcatctcatcctggaagcgaggctccagagtctaacgggttacatcgctggtggcaagatctgtgcagcgtctttgctacgaatgataagctggaggtacttacgatgaccaactctgtgctcggtcctcccttcctgaaggctctcgcagctgcgctgcgtcatccgcagtgcaagctacagaaactccttttgcgtcgcgttaattccaccatgctgaaccaagacctgatcggtgtgttaaccggtaaccaacacctccgatacctcgaaatccagcacgtcgaggtcgagtcgaaagctgtcaaactgctgtgccgggtcctgcgctcgccaaggtgtaggcttcagtgccttagactggaggactgtctcgcaacaccaaggatatggacggacctcggaaataatctgcagggaaacggtcatctgaagacgctaatcctacgcaaaaacagtctggaaaactgtggcgcttattatttatctgtggcgcagcttgagcgtttgtctatcgaaaattgtaacctcacacagctgacttgcgagtctcttgcttcatgtctgaggcagtctaaaatgctgacccacttgtcgttggctgagaacgccctgaaggatgagggtgcaaagcacatatggaatgctcttccccatctcagatgccctctgcaaagactggtccttcggaagtgcgaccttaccttcaattgctgtcaggacatgataagcgctctctgcaaaaacaagacgttaaaaagcctggatctaagcttcaattctttgaaggacgacggggtgatcctgctgtgcgaggctctaaagaatcccgactgtacacttcagatcctggaactcgaaaattgtctgttcactagtatttgttgtcaggccatggcctctatgttacgcaaaaaccaacatctgcgacacttggatcttagcaaaaatgcgattggagtctatggaatccttacgctgtgtgaagcattcagttcacagaagaaacgagaagaagtaattttttgtattccagcctggacacgtattacaagctttagccccacccctcacccgcctgatttcactggtaagtctgattgcctgtctcagataaatccatag

SEQ ID NO: 23192 - DNA, 3792 bp, synthetic construct
  source 1..3792: mol_type = other DNA; note = Synthetic coding sequence
atgcccgcccggatcggctactacgagatcgaccggaccatcggcaaagggaacttcgcggtggtaaagagagccactcacctcgttacaaaggccaaagtcgccataaagataatcgataaaacgcagctcgacgaggaaaacctcaagaagattttccgggaggtccagatcatgaaaatgctatgtcacccacacataattcgattgtaccaagtgatggagacagagaggatgatttatcttgtgacagaatacgcatcaggcggcgagattttcgaccacctggtggcacacggaaggatggcagagaaagaggcacggaggaagttcaaacagatcgtgaccgccgtttacttttgtcactgtaggaatattgttcaccgcgatctgaaagcagagaatctcctcctggacgctaatcttaatataaaaatcgcagactttggttttagcaatttgttcacccctggacagctgcttaaaacttggtgtggatctcccccctatgctgctccagagttatttgaggggaaggaatacgatgggccgaaggttgatatttggagcctcggcgtggtattgtacgtgctggtctgtggggcgctgccatttgacgggagcaccctgcagaatctacgcgctagagtgctgagcggaaaattcaggatcccatttttcatgagtacggagtgcgaacacctgatcagacatatgctggtgcttgacccaaacaaaaggttgagcatggagcagatctgcaagcataagtggatgaaactgggcgacgctgacccgaatttcgataggttgattgcagaatgtcaacaactgaaggaagagaggcaggttgatccactgaatgaggatgtgttactcgcaatggaagatatgggattagataaagaacaaacattacagagtctccgctcagacgcttatgaccactatagcgccatttattcgttgctttgtgatcggcataaacgccataaaactctgcggctaggggcgctccccagtatgccaagggctctcgcttttcaagccccagttaatattcaggccgaacaggcaggcactgcaatgaatatctctgttcctcaggtgcagttgatcaatcccgagaatcaaattgtggagcccgatggaacactcaacctggacagcgacgagggggaggagccatcccccgaagcactcgtccggtatctgtcaatgcggaggcatactgtcggggtcgcggatcctaggaccgaggtaatggaagacctgcagaagctactgccgggctttcccggcgtcaatccccaggcgcctttcttgcaggtggcccccaatgtcaatttcatgcataacctgctccccatgcagaatttacagccaactggacaacttgagtacaaggaacagtccctgctgcaaccgcccacactgcaactgctgaacggcatgggccccctggggaggcgggccagtgacggaggggccaacatacaattacacgcccagcaactgctaaaacgccctagaggtccttcacctctggtgacaatgacacccgccgtgcccgcagtaacccccgtcgatgaggaaagctccgatggggaacccgatcaagaggctgtgcaatcttccacctataaggactctaacaccctccacttgccaaccgaacgcttcagccccgtgaggcggttctccgacggggccgccagtattcaagctttcaaggcgcacctagagaaaatgggaaacaacagctccatcaaacagttgcagcaagagtgcgaacagctccaaaagatgtacggggggcagattgatgagcgtaccctggaaaagacacagcaacagcacatgttgtaccaacaggaacagcatcatcagattctgcaacagcaaatccaggattcaatttgcccaccacagccctcaccacccctgcaggccgcttgtgaaaatcagccagccctgctcacgcaccagctccagcgtttgcgcatacagccatcctctcctcctcccaaccatcccaataatcatctctttagacaaccttccaattcacctcctcccatgtcgagcgccatgatccagccacacggcgcagcaagctcatcacagtttcaggggctgccttcgagatccgcaatttttcaacagcaaccagagaactgctcttccccccccaatgttgccctgacgtgcttggggatgcaacagccggctcagtcacaacaggttaccattcaggtgcaggagcctgtggatatgctgtccaacatgcctggcaccgctgccggttcttctggacgaggcatatccatttccccttccgcaggccaaatgcagatgcagcaccgaacgaacctgatggccaccctttcatacggccaccgccctctgtccaagcagctctcagctgatagcgccgaggcacactcactcaacgttaacagattttctccagcaaactatgaccaggctcacctgcatcctcacctcttttccgatcaatctcgaggtagcccctcgtcgtactctccaagcaccggggtaggcttctctcctacacaggcgctgaaggtgccccccctcgatcaattccctaccttcccgccttccgcccaccagcagcctccccactatactacatctgctctccagcaagcgctgctatctccgacgcctcctgactacacccgccatcagcaggtgccacatattcttcagggtttacttagtccccggcatagcctgaccggacactcagatatcagacttccaccaaccgagttcgcgcagctcatcaaacggcagcagcagcagcggcagcagcagcagcagcagcagcagcagcaggagtatcaggaactgtttaggcacatgaaccagggcgatgcaggcagtctggcgccgagcctgggtggacagtccatgacggagaggcaggctctgtcttatcaaaacgcagactcttatcaccaccatacttcaccacagcatttgctccaaattcgggcccaggagtgcgtgagccaggcctccagccccactccccctcacggttatgcccaccagcccgcgttgatgcattctgagtcaatggaggaagactgcagctgcgagggcgctaaggatggatttcaggattccaagagcagtagtacacttacaaagggctgccatgacagtccattattgctttccactggggggcctggagaccctgagtctctgctgggcactgtcagtcacgcacaggaacttggaatccacccctatggacatcaacccactgccgccttctccaagaacaaagttccctccagagaacccgtgattgggaactgcatggatcgtagcagtcctggacaagcggtcgagcttcctgaccacaatggtctaggctaccccgccagacccagcgtgcatgagcaccaccgcccacgggctctgcaacggcaccacacaatccagaattcagacgatgcgtacgtccagctggataatctgcccgggatgtccctggttgccgggaaagctctgagttctgctcgaatgtcagacgccgtgctgtcccagagttctctgatgggctcacagcagttccaggacggggaaaatgaggaatgcggcgccagcttgggcggacacgagcaccccgacctgtcggatggatctcaacacctgaattctagctgctacccctccacctgtattaccgatatccttttgtcatataaacatcccgaagtttccttctctatggaacaggctggcgtttag

SEQ ID NO: 23193 - DNA, 4395 bp, synthetic construct
  source 1..4395: mol_type = other DNA; note = Synthetic coding sequence
atgtaccagcccgaggacgacaacaacagcgacgtgaccagcgacgacgacatgacccgaaatcgaagggagtcttcccctcctcactctgtgcatagcttcagtggggatagagattgggatcgcagaggccgttccagagatatggaacctcgggaccggtggagccacacacggaaccccagaagtcgtatgccacctcgggatctgtcacttccggtggtggccaagaccagcttcgagatggatcgcgaggatgatagggatagtagagcgtatgagtctcgtagtcaagatgccgagtcgtatcagaacgtcgtcgatttggccgaggacaggaagccccacaacaccattcaggacaatatggagaattatagaaaacttctctccctcggcgtgcagctcgccgaggatgatggacactctcacatgactcagggtcattcaagccgttccaagcgaagcgcatatccctctacgtcccggggattgaaaacaatgcccgaggcgaaaaagagtacccaccgcagggggatatgtgaggacgaaagctcccacggagtgattatggagaagttcattaaggatgtctcacgaagttcaaagtcagggcgggcgcgtgagagctctgaccggtctcagcgtttcccaagaatgagcgacgacaactggaaggatattagcttgaataagcgtgagtctgtcatccagcagcgagtttacgagggcaatgccttccggggtggatttcgtttcaacagtacgctggtcagtaggaaaagagttctggaaagaaagcggcgctatcacttcgatacagacggtaaaggtagcattcacgaccagaaagggtgtccgaggaagaaaccgtttgagtgcggatcagagatgcgaaaagcgatgagtgtctcttccttgtcttccctctcatctcctagcttcactgagagtcagcctattgacttcggcgccatgccatacgtctgtgacgagtgcggcagaagcttttccgtgattagcgagtttgtcgagcatcagatcatgcacacccgggagaatttgtacgaatacggagagtcatttattcacagtgtcgccgtgtccgaggtccagaagagtcaggttgggggaaagcggttcgagtgcaaggattgtggtgaaaccttcaacaaaagcgcagccctcgccgaacaccggaaaatacacgccaggggctacctggtcgagtgcaagaaccaagagtgcgaagaggcatttatgccttccccgacattttctgagctgcaaaaaatctacggcaaagataaattttacgagtgcagggtgtgcaaggagactttcctgcacagctctgcactgattgagcaccagaagatccattttggagatgataaggacaatgaaagagaacatgagcgggagcgagaacgtgagagaggagaaacattccggccttctcccgctctgaacgagttccagaagatgtacggcaaggaaaagatgtacgaatgcaaagtgtgtggcgagaccttcctccactccagcagcctaaaggagcatcagaagattcatacaagaggaaatccttttgagaacaaaggtaaggtctgcgaggaaacctttattcctggccaatcgttgaagaggcgccagaaaacatacaataaagaaaagttgtgcgacttcaccgacggaagggacgcctttatgcagagctccgagttaagtgagcaccaaaagatccattcgcgcaaaaacttgtttgagggacggggctacgaaaaaagtgtgatccacagtggaccgtttactgagtcgcagaaatctcataccattacccgccccctggagagcgacgaggacgaaaaagcgtttaccatttccagcaatccatacgagaatcagaagattcccactaaggaaaatgtgtacgaagcaaagtcatatgagcgcagcgtgatccattcgttggcctccgtagaggcccagaagagccacagtgtggcggggccttccaagcccaaagtcatggctgagagcacaatccagtctttcgatgccataaaccatcagcgggtccgtgccggaggtaatacatcagagggcagggaatacagcaggtctgtaattcactccctcgtggcaagcaaaccaccacggtcccataacggcaatgagttagtggaaagcaatgagaagggggagagctcgatatacatctctgacctgaatgacaagagacaaaagattcccgccagagaaaacccctgcgaaggaggttccaagaatcgcaactatgaggacagcgtgatccaatccgtgtttcgagccaaaccccagaagtctgtacctggcgagggtagtggcgaatttaaaaaggatggtgaattcagcgtcccctcatccaacgtcagggagtatcaaaaagcaagggccaaaaaaaagtacatcgaacaccgcagtaatgagaccagtgtcattcacagtctacctttcggggaacagacttttcggcctcgcggcatgctttacgagtgtcaagaatgcggggagtgttttgcccattctagcgatctgactgagcaccagaagatacatgaccgggaaaaaccgtcaggctcacggaattatgagtggagcgttatacgcagtctcgcccccacagatccacagacgagttacgcacaggagcagtacgcgaaggaacaggcccgcaacaagtgtaaggactttcgccagttttttgcaacatctgaagacctcaatactaaccagaaaatttacgaccaagaaaaatctcatggcgaagagtcccagggtgaaaacacagatggggaggaaacgcattccgaggagacacatggacaggagacaatcgaggacccagtgatccagggctccgacatggaggatccacagaaggacgatccagacgacaaaatttacgagtgtgaagactgtgggcttggattcgtggatctaacagatctgaccgaccaccaaaaggtgcactcacgcaagtgcctggtcgatagccgcgagtacacccactcagtgattcatactcacagtattagtgagtatcaacgggactacacaggggagcaactgtacgagtgcccgaagtgcggcgaatcttttatccattcttcattcctctttgagcaccagaggattcacgaacaggaccagttatactcaatgaagggatgcgacgatggtttcattgccctcttaccgatgaagccacggaggaacagagcagccgaacgaaatccagccttagctggctcagctatcaggtgcctgttatgcggccagggttttatccactcctcagctctgaacgagcacatgcggctgcatcgcgaagacgacttgctggaacagagccagatggctgaagaggcgatcattccaggcttggcactcacagaattccagaggtctcagacagaagaaaggttgttcgaatgcgctgtgtgtggggagtctttcgtcaatccggctgaactggccgaccacgtgaccgtccacaagaacgaaccttatgagtacggctcttcttatacccatacgtcatttctgactgagcccctgaagggggcaatcccattttacgaatgcaaggattgcggcaaaagttttattcacagcacggtgttgaccaagcataaggaactccacctggaggaggaggaagaggatgaggccgcagcagcagctgctgccgcagcacaggaagtggaggccaacgtgcatgtcccccaggtggtgttacgaatacagggactgaacgtggaggctgccgagcccgaagtagaagctgccgaacctgaagttgaggccgccgaaccagaagtggaggcggctgagccgaatggggaggcagaggggcctgatggggaggccgccgaacccatcggagaggccgggcaaccaaacggtgaggccgagcaacccaacggtgacgccgacgaacccgatggggccggcatcgaagaccctgaggaacgtgctgaggaaccagagggcaaggcggaggagcctgaaggcgacgctgatgaacctgacggtgttggcatcgaggacccagaggagggggaagatcaagaaatacaggtggaggagccatactatgattgccacgagtgtaccgagactttcacatcctctacagccttctccgagcacctgaaaactcatgcgagtatgataatctttgaacccgctaacgccttcggagagtgtagtgggtacatcgagagagcttctaccagcaccggtggcgctaatcaggccgacgagaagtacttcaaatgcgacgtgtgcggtcaactgttcaacgaccgactgtcacttgcccgtcatcaaaacacccatacaggatag

SEQ ID NO: 23194 - DNA, 1302 bp, synthetic construct
  source 1..1302: mol_type = other DNA; note = Synthetic coding sequence
atggccgaggcccagagcggcaccggccagctgcaggagcagaagaagggtcttctgattgcagtatccgtttcagtggacaaaatcatcagtcactttggagccgctcgcaatctggtccagaaagcacagcttggcgactcacgcctgtcacctgatgtgggacacctcgtgctgacgacactgtgtcccgctctacatgccttggtagcagacgggctgaaacctttcagaaaagacttgatcactggacaacgccgctctagtccgtggagcgtggtcgaggcctccgttaaacctggaagctcaactaggtctttaggaaccttgtattcgcaggtcagccgcctggcacccctctctagctctaggtctagatttcacgccttcatcttgggacttctgaacactaagcagctggaactctggttttcatccctgcaggaggatgccggactgcttagtctgctgtacctgccaactggatttttcagcctcgctagaggtggctgtccaagcctgtccactgagctgctattgctgcttcaaccactgagcgttttaaccttccacctggacctgcttttcgagcatcaccatcatctgcccctggggccaccacaggcaccggccccccccggcccacctcctgcactgcagcaaacaatgcaagccatgcttcatttcggagggcggctggcccagagtctccgtggtacttcaaaagaggccgcctcagacccaagcgatagtcctaacctgcccaccccaggcagttggtgggagcaactgacccaagctagcagggtgtacgcctccggcggcaccgaaggatttccactgtcacggtgggcccccggtcgacacggcacggcagccgaggaaggcgctcaagaaaggccgttgccaaccgatgaaatggcccctggcaggggtctgtggctgggccgcctgtttggtgttcccggcgggccagccgagaatgagaacggcgctctcaagtcccggagaccaagctcatggctacccccaacagtgagtgtgctggctctagtgaagcgcggggctcctccagagatgcccagtcctcaggaactcgaggcctctgctcccaggatggtccagacccatcgcgcagtgcgggccctgtgtgaccataccgccgcccgacccgaccagctgagctttcgccgaggggaggtgctcagggttatcactactgtagacgaggattggctgcgttgcggacgggacgggatggagggattagtgcccgtaggctatactagcttggtgttgtag

SEQ ID NO: 23195 - DNA, 1584 bp, synthetic construct
  source 1..1584: mol_type = other DNA; note = Synthetic coding sequence
atggcccagaccctgcagatggagatccccaacttcggcaacagcatcctcgagtgtctgaatgagcagcgacttcagggactttactgcgacgtctccgtggtcgtaaagggccatgcgttcaaggcacaccgggccgtgttagcagcctcttcctcttatttcagagatttattcaacaattctcgctctgctgtggtcgaactgccagccgcagttcaaccacaatccttccaacagatactgtcattttgctacactggtcgactgtccatgaatgtcggtgaccagtttctcttgatgtacacggctggcttcctccaaatccaggaaattatggagaaaggcaccgagttcttcctgaaggtgtcttctccctcatgtgactcccagggactccacgcggaagaagcccccagttctgaaccccaatccccagtggcacagacatcaggatggcctgcctgttcaactccactgccattagtatcgagggtgaaaacagaacagcaggaaagcgactccgtgcagtgcatgcccgtggcgaaaaggttatgggattcaggccagaaggaggccggtggtggcggtaacggtagtcgtaaaatggccaagttttccaccccagacctggccgccaaccgaccccatcaacccccaccccctcagcaagcccctgtcgttgccgccgcccagcctgcagtggccgccggagccggacagcccgcagggggtgtagcggccgcgggaggagtggtaagcggcccaagcacaagcgaaagaacgagccccggcacctccagcgcatacacttctgattccccaggcagctatcacaacgaagaagacgaggaggaggatgggggagaagaaggcatggatgaacagtatcggcaaatatgtaatatgtacacaatgtattccatgatgaatgtggggcaaacagctgaaaaggtggaggccttgcctgagcaggtcgccccagagtcccggaaccgcatccgtgtgcggcaggacttagctagcctgccggcagagttgattaaccagattgggaataggtgccatccaaaactgtatgatgagggtgacccctctgaaaagctcgagctcgtgactggaactaatgtgtacattacccgcgcacagttgatgaattgccacgttagcgccgggacccgccataaagtgcttctgaggcgactgttagcgtccttcttcgacagaaatacactggctaattcttgtggcaccggaattcgctcatcaactaacgatcctcgtcgaaaacccctggatagtcgagtgctgcacgctgtgaagtattattgtcagaacttcgcccctaacttcaaagaaagcgaaatgaatgccattgctgccgatatgtgcacgaatgcccggcgcgtggtgcgaaagtcttggatgccaaaggtgaaggtgctgaaggctgaggacgatgcgtacacaacattcatcagcgagaccggtaaaattgaaccagacatgatgggtgtggagcatggctttgagaccgcctcgcacgagggcgaggcaggcccatcggcggaggctctccagtag

SEQ ID NO: 23196 - DNA, 672 bp, synthetic construct
  source 1..672: mol_type = other DNA; note = Synthetic coding sequence
atggaggtgcagaaggaggcccagcggatcatgaccctgagcgtgtggaaaatgtatcactcaaggatgcaacggggggggctgagactgcatcgaagcttacagctgagcctggtgatgagatccgcgcgcgagctctacttatcggccaaagtggaggcgctggagccggaagtgtcactccctgctgctttgccgtcagaccctaggttacatccccctcgggaggccgaaagcactgcagagaccgccacccccgatggagaacacccattcccagaacctatggatactcaggaggctccaacagctgaagagacatccgcatgctgtgccccccgcccagcaaaagtatcccggaaacgtcggtcaagtagtctctctgatgggggagacgccggtcttgtaccatccaagaaagcgcgactggaggagaaggaagaggaggagggcgcttccagcgaagtggcagatcgcctgcaacctccaccagctcaagccgagggcgcgttccctaatttggcaagagtgcttcagcgccgcttcagcggactcttgaattgctcgcccgcagcgcctcctaccgcaccacccgcatgtgaagccaagcctgcctgcagaccagcagactctatgctcaacgtgctggtcagagcagtggtggcgttttag

SEQ ID NO: 23197 - DNA, 1500 bp, synthetic construct
  source 1..1500: mol_type = other DNA; note = Synthetic coding sequence
atgcgggtgctggtgccccccgccgagcggagccaggacacccgggtgggagcacccgcatggcgggaagccgcccaggcaatggctagaacagcccatattctgacggacaggtgtggtcaggaggctgtgactatgtggcagcccaaggattccgtgctggaccctaacgtcgcacaccatcttggccgggctgcttacattcagccttggcgatttagggtagaaatgataaaaggaggcggcacgcttgagaagcctccacccggcgagggcgtgactctgtggaaaggtaagatgaagccccccgcctggtacgccagattacccctgccattgcaccgaaaggcccgggcattgcagaccactgaggtcgtccatgcccacgcacgcggcgctcgcctcacggccgcaagactggggcgggcccaacaccagatcaatggccgcgtcagacagctcttgcggcaacgtgaagtgactgatcacagactctctgaggtacggaaggggctgctcattaaccagcagtccgtcaagcttaggggttaccgccctaaatctgagaaggtgccagataaggcggactctatgctgacctgggagaaagaagaactaaagtctatgaagcggaaaatggagcgcgacatggaaaagtctgaggtgctgttgaaaaccctggcgtcttgccgggatactctcaacttttgctttaaggagaggctccaagctgtggaccttatgaaccagcctctagataaggtgctcgaacaggcccgccgccattcctgggtcaatttgagtagggctcctacccctcggacacaaggacagaagactccaccgccagatcccgtgggcacatacaaccccgcctgtgcactcgcacttaatgaggccaaacgtctgctggtggaaagcaaagacaccctcgtggaaatggccaagaacgaggttgatgtaagagagcagcagcttcaaatatccgatagggtgtgtgcctccctggcccagaaagcatccgaaacacttgaactcaaagagcgcttaaatatgacactgggacttatgcgcggaactattttaaggtgtaccaaatataatcaggagctttatacaacacacggcctgatcaaaggtccactttcgaaggtgcatctggaaacggccgagaagctggacaggccccttgtgcggatgtaccagcgccatgtgggaacacagcttcccgaagctgcgcgcttagcacagggtaccgataagttgcagtgtcatatcacttacctggagaaaaatcttgacgaactgcttgccacgcacaaaaacctgtcatggggcctcaactgtaagaatatcggccacgaagtagacgggaatgtggtgaggctacgactacggcagagacagcctcacgtatgttatgaacaggcccaaagacttgttaaggattgggatcctcggacaccgcctccaagatccaagtccagtgcagacccctag

SEQ ID NO: 23198 - DNA, 1827 bp, synthetic construct
  source 1..1827: mol_type = other DNA; note = Synthetic coding sequence
atggagatggagagcgccgccgccagcacccggttccaccagccccatatggagcggaagatgtctgcaatggcttgtgagatctttaatgaactcaggctggagggtaaactctgcgacgtggtgatcaaggtgaacggcttcgagttttcagcccacaagaatatcctgtgctcttgtagctcctatttcagagcattgttcaccagcggatggaataatactgagaaaaaagtgtataacattccaggaatctctccggatatgatgaagctgataatcgaatacgcctacactcgcacagttcctataacaccggacaatgtcgagaaacttctggcggctgcagatcagttcaatatcatggggattgtccgcggatgttgcgagtttttgaaatccgaactctgcctggacaattgcatcggcatttgcaagttcacggattattactattgcccagagcttagacagaaggcctatatgttcattctacataattttgaggagatggtaaaggtaagcgcagaatttttggaattgagcgtgacagagctcaaggacatcatcgagaaagacgaactgaacgttaagcaagaggatgccgtgttcgaagccatcttaaaatggataagccatgatcctcagaaccggaaacagcatattagcatcctgctgcccaaggtgcgtctggcgttgatgcatgccgagtacttcatgaataatgtaaaaatgaacgactatgttaaggattctgaggaatgtaagcccgtaattataaacgcgcttaaagccatgtacgacttgaacatgaacggaccaagcaactcagatttcaccaacccacttacacgacctcgactaccttacgccatcctgttcgcaatcggaggatggagtgggggctcccccacaaacgccattgaagcatatgacgcgagagctgacaggtgggtgaacgttacatgcgaagaggaatctccgcgagcgtatcacggagcagcctacttaaaggggtatgtttatataattggcgggtttgatagcgtggactacttcaattctgttaagcgatttgaccccgttaagaagacctggcaccaagtggcaccgatgcatagccgcaggtgctacgtgagcgtaactgttttgggtaacttcatttacgcaatggggggcttcgatggttacgttaggcttaacactgctgagagatacgaaccagagacaaatcaatggaccctgatagcccccatgcacgaacagaggtccgacgcctccgccacaactctatacggcaaggtttacatttgcggtgggttcaacggaaacgaatgcttgtttaccgcggaagtatataacaccgagagtaaccagtggacggtcatagctcccatgcgctctaggcgctctggaatcggcgtgatcgcctacggagagcacgtctatgctgtgggggggttcgacggagccaaccggctacggtccgccgaggcctattcccccgtggctaatacctggcggactatccccacgatgttcaaccctcggagtaactttggcattgaagtggttgacgacctcctgttcgtggtgggcggtttcaacggctttactactacattcaatgtggagtgctacgacgagaaaaccgacgagtggtacgatgcacatgacatgtctatataccgaagcgcactgagctgttgcgtcgtaccgggactcgccaacgtggaagaatatgccgctcggagagataatttccccggccttgccctgcgggacgaggtgaagtattcagcaagtacctcaaccctgcccgtgtag

SEQ ID NO: 23199 - DNA, 942 bp, synthetic construct
  source 1..942: mol_type = other DNA; note = Synthetic coding sequence
atggccgccctgaccgacctgagcttcatgtaccggtggttcaagaactgcaacttggtagggaacctgtctgagaaatatgtgttcattactgggtgtgattccggcttcggcaacttgctggccaaacaacttgtggaccggggaatgcaggtactcgcggcatgctttactgaagaggggtcccagaagctgcagcgcgatacctcttacaggctgcaaacaacgcttctggacgtgacaaagtcagagtccattaaggccgcagcccaatgggtcagggacaaagttggcgagcaggggctttgggctcttgtgaacaacgccggggtgggtctcccctcaggtcccaatgagtggcttacgaaagatgacttcgtgaaggtgattaacgtcaaccttgtgggactaatcgaagtgacactacacatgttacccatggtcaagcgcgcccgtggacgcgtcgtgaatatgtcatctagcggggggcgggtggccgtgatagggggcggctactgcgtttcaaagtttggtgttgaggcatttagcgattctattcggcgcgagttgtactacttcggagttaaagtttgcatcattgaacctggcaattatcgtacagcaatcttgggcaaggagaatttggaaagcagaatgcgcaagctttgggagagattgccgcaggagacccgcgatagctacggcgaggattacttcagaatttataccgataagctaaaaaacatcatgcaagtcgccgaacctagggtccgggatgtgataaacagtatggagcatgcaattgtctcaaggtctccccgcatcaggtacaacccaggcctggacgcaaaactgttatatattcctctcgccaagctccctacgcccgtgactgacttcatactatctcggtacctgccccgtcccgcggacagtgtatag

SEQ ID NO: 23200 - DNA, 1461 bp, synthetic construct
  source 1..1461: mol_type = other DNA; note = Synthetic coding sequence
atgacctgcggcagctactgcggcggccgggccttcagctgcatctccgcctgtgggcctcgtcccggacggtgctgcattaccgcggcaccttaccgaggcataagctgctaccgcggtttgactggcggctttgggagccatagtgtgtgcggaggattcagggcaggctcttgcggtaggtctttcgggtataggtctggaggagtgtgtgggcctagtcccccttgcatcactactgtgtctgttaatgaaagtctgctgactcctttgaacctggaaattgaccccaatgcccagtgcgttaagcaggaagagaaggagcagataaagtcactgaatagccggtttgccgcgtttatcgacaaagttcgattcttggaacagcagaacaagcttctcgaaactaaattgcagttctatcaaaaccgggagtgctgtcagtcaaatctcgagccactgttcgagggatacatcgaaacactgagaagggaggctgagtgtgtagaggccgacagtggccgccttgcctccgagttgaatcatgtgcaagaagtgctcgaaggatacaaaaagaagtatgaggaagaggtatccctcagagcaaccgccgaaaacgagttcgtggctctgaaaaaggatgtggactgcgcctatctccgcaaatctgacctggaagcgaacgtcgaagccctgatccaggaaattgactttcttaggagactctacgaagaagagatccgggtgctgcagtcacacatatctgatacaagtgtcgtcgtcaaactggataactcccgggatctgaacatggactgcatcattgccgagatcaaggcccagtacgacgatattgttacccgatctcgggcagaggcagagtcgtggtatagatccaaatgtgaagagatgaaagctacagttattcgccatggggagaccctccggcgaaccaaagaggagataaatgagctgaatagaatgatacagcggttaaccgcggaggtcgaaaatgctaagtgccagaatagtaagcttgaggctgctgtagcacaatccgagcagcagggagaggcagctctctccgatgcccgctgcaaattggcggaactggagggcgcactgcagaaagcgaagcaggatatggcctgccttatacgagaataccaagaggtcatgaactcaaagctaggtctcgacattgagattgcaacataccgtaggctcttagaaggagaagagcagaggctttgcgaaggcgtggggtctgtgaacgtctgcgtgtctagctctcgcggcggagtggtctgtggtgatttgtgtgcctcaactaccgccccagttgtcagcacgagggtatcctcagtgccctccaactcaaacgtcgtggtaggtaccacaaacgcatgcgcccctagcgctagagtgggcgtttgcgggggatcctgcaagagatgctag

SEQ ID NO: 23201 - DNA, 939 bp, synthetic construct
  source 1..939: mol_type = other DNA; note = Synthetic coding sequence
atggccgagctgaccgccctggagagcctgatcgagatgggcttccccagagggcgtgccgaaaaagcccttgcccttacaggaaaccagggtattgaggctgctatggactggctgatggagcatgaagatgacccagatgtcgatgaacccctagagacgcccttgggccacatcctgggccgagagccgacctcgagtgaacaaggtggactcgaaggctcagggagcgccgcaggagagggtaaaccggcactgtctgaggaagagcgccaagagcaaactaaacggatgttggagctggtcgctcagaagcagcgggagcgcgaagagcgcgaggagcgtgaggctcttgaacgggaacgtcaaagacgaaggcagggacaggagctcagtgcagctcgacagcgactccaggaggacgagatgagaagagcagctgaggaaagaaggagagagaaagcagaggaacttgccgccagacagcgtgttcgcgagaaaattgaaagggataaagccgaacgagccaagaagtatggcggctcagttggatcacaacctccccccgtcgcacctgagccaggccccgtgccatcctctccaagccaggagcctccgaccaaacgcgagtatgatcagtgccgcattcaggtcagactaccagatggaacatcactgacccaaactttccgtgctagagaacagctagctgcggtccgcctgtacgttgagctccatagaggagaagagctgggggggggacaggacccagtgcagttgctaagcggctttcccaggcgggcattcagtgaggcggacatggaaagacccctacaggaactcggtatggctgcaagactggagactaggacacggaattggggttcgagggaggcatgtcttgggaaaggaggcatgcaaagagagggtgctctctag

SEQ ID NO: 23202 - DNA, 405 bp, synthetic construct
  source 1..405: mol_type = other DNA; note = Synthetic coding sequence
atgcccgccgacctgagcggcacctggaccctgctgagcagcgacaattttgagggatatatgttggcgttgggaatagactttgctacccgcaaaatcgccaaactgttaaaaccgcagaaagtgattgagcaaaatggtgactcctttactattcatactaactcttcgctgcggaattattttgtgaaattcaaggtcggagaggagttcgacgaggataaccgaggtcttgataacagaaaatgcaagagcctggtgatctgggataacgaccgtctaacatgtatccagaagggtgaaaaaaagaatcggggttggactcactggatcgaaggagacaaactccatctggaaatgttttgcgagggccaggtgtgtaaacagacattccaacgcgcttag

SEQ ID NO: 23203 - DNA, 1383 bp, synthetic construct
  source 1..1383: mol_type = other DNA; note = Synthetic coding sequence
atggccggctacctgagcgagagcgacttcgtgatggtggaggagggattctctaccagggacctgctgaaggagctcaccctaggagcctcacaggctacgaccgacgaggtcgcagctttttttgtggccgaccttggcgccattgtgagaaagcacttttgcttcttgaaatgtctcccgagggtgagaccattctacgccgtgaaatgtaactcctcacccggagtgctgaaggtgcttgcacagttgggactgggtttttcctgcgctaacaaagccgaaatggagctcgtgcagcatatcgggattccggccagcaagatcatctgcgccaatccctgtaagcagatcgcccagatcaagtatgctgccaagcatgggattcaactcctctcctttgacaacgaaatggagctagccaaggttgtgaagtcgcatccctcagccaagatggtgctgtgcatcgccacagatgatagccactcactgtcctgtctctctcttaaattcggcgtcagcttaaaatcgtgtcgccatcttctcgagaacgccaaaaagcatcatgtggaagttgtcggggtgtcatttcatataggaagtggctgcccagacccacaagcctacgcgcagagtattgctgatgccagactggtgtttgagatggggactgaacttgggcataagatgcacgttctggaccttggcggcggttttcctgggactgagggggccaaagtccgtttcgaagagattgctagcgtcataaatagcgctttggacctgtatttccctgagggatgcggtgttgacatcttcgcggaactgggacgatattacgtcaccagtgcttttacagtcgccgtgagtatcatcgccaaaaaggaagtcctgctcgatcagcccggtcgcgaagaggagaatggctccacatcaaagactatagtgtatcacctggacgaaggcgtttacggaatcttcaacagtgtcctgtttgataatatatgccctacgccaattcttcagaaaaaaccgagcaccgagcagccattatactcttcatccttatgggggccagcagtggacggctgcgattgcgtggccgaagggctctggctccctcagttgcacgttggagactggctcgttttcgataatatgggcgcatataccgtgggcatgggaagtccattttggggaacacaggcatgtcacataacctacgcgatgagccgcgtagcctgggaggctcttcggcgtcagctaatggcggccgaacaggaagatgatgtggagggtgtgtgtaagcctttatcctgtggttgggaaataaccgatacgctgtgcgtgggacccgttttcacacccgctagcataatgtag

SEQ ID NO: 23204 - DNA, 1209 bp, synthetic construct
  source 1..1209: mol_type = other DNA; note = Synthetic coding sequence
ggcggcccccggggcagcggcagcgccgccgagaccatgcccgagatccgagtcacccccttaggggctgggcaagatgtaggccggagctgcattctcgtctctatcgctggaaaaaatgtgatgctcgactgcgggatgcatatgggttttaatgacgacaggcggttccctgacttttcatatattacacagaacggtcgactcaccgacttcctggattgtgtgataattagtcacttccatctggatcattgcggggcgctcccctatttttctgagatggtcggttatgatgggccaatctatatgactcaccctacacaagctatttgtcccatcctgttggaggattacagaaagattgccgtggacaagaaaggcgaagcaaacttcttcacctcccagatgatcaaagattgcatgaacctactggaaacgttctgggagcgcatgaacctcaaggtgccgatctatttcagcactgggcttacagagaaggcaaaccactattacaaactatttatcccctggaccaatcaaaaaattcgtaagacttttgtccagagaaacatgtttgagttcaaacacattaaagcatttgaccgggcctttgccgataatcccggccccatggtcgtgttcgccactcccggaatgctgcatgcaggtcagtcactccagattttcagaaagtgggctggcaatgagaagaacatggtcatcatgcccggatattgcgtgcaggggacggttggacataagattctgagtgggcagcgcaagctggagatggagggtcgccaggttctggaggtcaagatgcaggtcgagtacatgtccttcagcgcacacgctgacgccaagggcattatgcagctcgtgtcgagcgaacaggccctgaaagagctgggtctcgcagaacaccagctgaggttcacctgtcgcgtgcatctgcatgatacccggaaggagcaggaaacggcactgcgagtgtactctcatctgaaaagcgttttaaaggaccattgtgtgcagcacctacctgacggcagtgtgactgtggagagcgtgctcctccaggcagccgccccctcggaagacccaggaaccaaggttttgttggtctcctggacctatcaagatgaagagctgggatcattcctcacctctctacttaaaaaaggactgcctcaagctccttcatag

SEQ ID NO: 23205 - DNA, 1863 bp, synthetic construct
  source 1..1863: mol_type = other DNA; note = Synthetic coding sequence
atggagaaggccgtgaacgacggcagccacagcgaggagctgttctgtcaccttaagaccatctccgagaaggaggaccttccgcggtgtacttccgaatcccacttgagctgcctgaaacaggacattctgaacgagaagacggagctcgaagccaccctgaaggaagccgagctggtcacccattcagtagaattgctgttaccattatttaaagatacaattgagaaaatcaatttcgaaaacgccaatctcagcgcgcttaacttgaaaatctccgagcagaaggaaattctgattaaagagttggacaccttcaaatcagttaagctcgctctggagcatctgctgcgcaagcgagactacaagcagaccggagacaatctcagctccatgttactcgaaaatctgacagacaacgaatccgagaacacgaacctcaagaaaaaggtcttcgagaaggaggcacacatacaggagctctcttgtctgtttcaatctgagaaagcgaacacactaaaagctaatcggttctctcagtccgtgaaagtggtgcacgagcggttgcagatccaaatccacaagcgcgaggctgaaaatgataaactgaaagaatacgtgaaatctctggagaccaaaattgcaaaatggaaccttcaatctagaatgaataagaatgaggctatagtgatgaaagaggctagccggcagaagaccgtggcgctaaagaaagcatctaaagtatataagcagcgtctggaccatttcacaggcgcaatcgagaagcttacctcgcaaattcgcgatcaggaagcaaaactgtctgaaaccatttcagcttctaatgcttggaagtcacactatgagaaaattgtaatagagaaaacagagttggaggtgcagatagaaaccatgaagaagcaaatcattaatctactagaagacttaaagaagatggaggatcatgggaaaaattcttgtgaagaaatccttcgaaaggtgcattccattgagtacgagaacgaaactctgaaccttgaaaataccaagttaaaaaccaccctggccgctctgaaggatgaagttgtaagtgtagagaacgaattaagtgagttacaggaagttgagaaaaagcagaagaccctgattgagatgtacaagacccaggtgcagaaactccaagaggctgccgagatcgtaaaaagccgatgcgaaaacttgctccacaagaacaaccagatcacaaagactaaaaacaagaacgtggagaaaatgagaggccagatggaatcgcacttaaaagagctcgagcgggtttgcgattcattgactgccgctgaaagaaggttacatgaatgccaggagtctctccaatgttgtaagggcaaatgcgcagatcaggaacataccatacgggagttgcaaggacaaatactaaaacagtgggaggagtatagcgtgttggcatgggtagacggtaaccataacttgcttactaagctgagcctcgaagaagagaattgccttatacaactcaaatgcgagaatctgcaacaaaaactggagcaaatggatgcggaaaataaagaactggaaaagaagctggcaaaccaggaggagtgccttaaacacagtaatctgaaatttaaggaaaaaagtgccgagtacaccgccctggccagacaactggaagcagctctggaggaagggagacagaaggtggctgaagaaattgagaagatgtcaagccgggaaagcgccttgcagataaaaattctggacttagagactgaactccggaagaaaaatgaggagcagaaccagcttgtgtgcaagatgaactccgatcccgaaaccccatag

SEQ ID NO: 23206 - DNA, 465 bp, synthetic construct
  source 1..465: mol_type = other DNA; note = Synthetic coding sequence
atgagcaagaacaccgtgagcagcgcccggttccggaaggtggacgtcgacgaatatgatgaaaacaagtttgtcgatgaagaggacgggggggatggacaggcaggtcccgatgagggagaggtcgattcgtgtctgcggcactcaataaccggcaacatgacggccgcgctgcaggctgctctgaagaacccacccattaataccaaaagccaggcagtcaaggaccgcgctggcagcatcgtactgaaggttcttataagctttaaagccaatgatatagagaaggccgtccagtcgctagataagaacggtgttgacttgctgatgaagtatatctacaagggattcgagagcccatccgataattcttccgctatgctcttgcagtggcacgaaaaagctctggctgccggaggggtcgggagcatagttagggtcctcacagcacgcaagacggtctag

SEQ ID NO: 23207 - DNA, 2946 bp, synthetic construct
  source 1..2946: mol_type = other DNA; note = Synthetic coding sequence
atgagcgagcaggagcggatccaggagtgcctgcggaaggagatccggtcactgctcatcagcaccaaagacggtctgagcccccaggagctggaaaaggagtatctgctcatggtgggcaatcatttgcctttacgtatacttggctatcgtagcacaatggaactggttctcgacatgcccgacgtagtgcgagtttgccccggagctggggggacagtgatcttgaaggcaatacccgatgagagcacaaagggaattgcctctctggtggccaagcagcgatcatctcataagctgaggaactcgatgcacaaaggtagaccttcgatttactcaggacccaggtcccatagacgggtcccttacaggggacgagtggctccaattctgcccgccgtggtcaaaagcgagctcaaagatctactggctctatcccccgtgttactgtcggatttcgaaaaggcctttgccaaacgctttggccgctcattccagtacatgcagtacggctttttgtccatgttcgaggtgctgaacgcggcaagcgatgtaatttcagtcgagcaaacccgcgccgggagcctactgatgcttaaaaaaagcgtgacggaggaaaagcctcgaggctgccccgcaggcaagatctttacccagccattccgcatgaagcaggggagctattctaccggcttccccgtggcaaagccatgtttctcccaacccacaagcaatatggaaccaccaaagcaaataatgtccatggagaagaccagcaaactcaacgtcgttgagaccagtagattgaatcataccgagaaactgaaccagttagagaacacattcaagagtgtaatcgcgcaaatagggcccggcggaaccatatcaagtgagttaaaacataagatcaaattcgtggtgtccaaattccctgagggccttttcatttctaagcttcttggggagtacgaagtcatatttaaggaacagctatcacccaagaagctgggctttttaaatgtgaccgagcttgtgggagcattgtctgatattctgcacgtggagttccgtaaaggtcatcaggatctgcttgtgttcgatgccgacaagaagcctctgcctcccgttcaatcagacaaaaagatagaagcgaaggcctgcgtctcaagtcctcctcggaactccctttcaaccgccgcggtcaaggagaccgtgtggaattgcccctctaaaaagcagaaggaaccacaacagaagatctgcaagaagcccaacttggtcgtcaagcccttgcagctgcaggttgaaaccaataaaagcgagctgaatctggcaatggccaatcatgatatccctcccgacgcggtaccaaacaagaagctgtgcagactgccaccactcgataccagcagccttatcggggtgttcgtggagtatattatttctccctctcagttttatataaggatttactcccgtgactcaagtgagcttctcgaagatatgatgattgagatgagaaggtgctactcgaatcagctagtgtccgatcggtacgtaatgccagaatgttttattcagccagggcacctgtgctgcgtgcgcatttctgaagacaaatggtggtaccgcgtgataatccaccgtgtcctggaaaagcaggaggtagaggttttttatccagactttggaaacattggtattgtccagaagtcctccctgcgattcctgaagtgctgttacaccaagctgcccgcccaggcaattccatgctcattagcatgggtgagacccgtcgaagagcactggacgagtaaagccatactgcagtttcagaagttgtgtggcttaaaacccctggtgggagttgtagatgagtatgttgacgggattcttaatattttcctttgcgacacctcctccaatgaagatgtctatttccaccacgtactgcgcacagaaggccacgctatcgtttgtcgcgagaatatttcttctaaaggattctccgagctcaatcccctggctctgtacaccacaagttccggaggccctgaagacattgtactgaccgaactcggctacccatcacagcagcattactttaacgaggaccgtaaaatttcaccacaatcaaaggaatccgagctcaggattttggacgagattccgacaggtatgccgtgcctggagtcagtgaccattggcgacgatatatgggatgagaattggctcccattacaggcaaaaatgggcaaaggtggggatgccgcatcccatctattcaccgcatcgctggggggtaaaaatcagtactccagctgtaaggagatgcctcagaaagattggtgtttcagtaccccaaaggatacatgggacgattcctggcagccaagtggcctcgtgaatgggactaaggtcgaggtgcacaagccggaagttcttggagcacaggagaaaaatacaggtactaacagaacacagaaacagcttgatatcaatggttcctccgattcatccactcttcccaaactcgaagaattttgtaccagcctcacccagagcgaacagtcagctgatgggagccagagtgagccaaacaactcccagacacagcccaaacagattcagttatcaacagctgccccctgttctacaaccgctgtggacgacagtgcagaaaagccctctggctctgttgagtcctctcccgagatccttaagaacgaggacttttcttcctcacgagcaataaccctgtataaggacaagcggcaggagagtgtggaccaactcagtttgatcctgtcctacgaatgtcagatatcacaaaagctgtatattcctcgcagtacagccactgccgcgctcggcgcggccgcgcggcttgccacttcaagaagtctcctgcactggtatcctagcgttaagagaatggaggcttag

SEQ ID NO: 23208 - DNA, 909 bp, synthetic construct
  source 1..909: mol_type = other DNA; note = Synthetic coding sequence
atggagatccaggagctggaggagatccaggcctgccagggcctgtgggaggttttcgttactctgtcggaaagggcaagagattacttacataagacagggcgatttattgtgatcggcgggatcgtttctcctgtccatgactcctacggcaaacagggcctcgtttcttcccgacaccgtctcattatgtgccaactcgcggtacagaactctgactggatccgggtcgacccgtgggagtgttatcaggatacctggcaaacgacctgctctgttctggagcaccacagagaccttatgaagagagtaacaggatgcatcctttctaatgtcaacaccccctctatgacccctgtcattggccagccacagaatgaaacccctcaacccatctatcagaatagtaacgtagccactaaacctacagcagcaaagatcctggggaaggtcggagagtccctaagtcggatctgctgtgttcgcccgccggtagaaagatttacattcgttgatgaaaatgccaacctggggaccgtgatgcgttacgaggaaatcgaactgcgcatcctgctgctctgcggtagcgatttgctggagtccttttgcatccccgggctttggaatgaagcagacatggaggtgatagttggcgactttgggatcgtcgtggtaccaagggatgccgccgacacggaccggatcatgaatcatagctcaattctgaggaaatacaagaacaatatcatggtcgtgaaggacgacatcaaccaccctatgtcggtggtctcctctaccaagtcacgcctggccctccagcatggtgacggacatgttgtcgattacctctcgcaacccgtcatcgactacatcctgaagagccaactgtatataaatgcatccgggtag

SEQ ID NO: 23209 - DNA, 861 bp, synthetic construct
  source 1..861: mol_type = other DNA; note = Synthetic coding sequence
atggagcggcggctgggcgtgcgggcctgggtgaaggagaaccggggatctttccaacctccggtgtgcaataaacttatgcatcaggagcaactcaaagtcatgttcatcggcggacctaacacgcgcaaagactatcacatagaggagggcgaagaggttttctatcagctcgaaggtgatatggtgctgagagtgctcgagcagggcaagcatagagatgtcgtgatcaggcagggtgagatctttttgcttccagctagggtgcctcattcgccccagagatttgcgaacaccgtcggactagtggtggaacgtaggcgcctggagaccgaactggatggcctccgctactacgtgggcgatacaatggacgttctcttcgagaaatggttctactgcaaagacctgggcacccaattagcaccaatcattcaggaatttttcagctccgagcagtataggacagggaaacccatccccgaccagttgctcaaagagccaccgttcccactgtctactaggtccattatggagccgatgagtcttgacgcatggcttgattcccaccatcgcgaactgcaggctggcaccccactgtctctgttcggcgacacctatgaaacccaggtgatagcttacgggcagggcagcagcgaagggttgcggcagaacgttgacgtgtggctgtggcagctggagggcagctcagtcgttactatgggcggccggagattgtcccttgctcccgacgacagcctgctcgtcctcgccggcactagctacgcttgggaaaggacccagggcagtgtggcgctgtctgtgacacaggaccctgcatgtaagaaaccgcttggctag

SEQ ID NO: 23210 - DNA, 1545 bp, synthetic construct
  source 1..1545: mol_type = other DNA; note = Synthetic coding sequence
atgcaggagagcggctgccggctggagcaccccagcgccaccaagttcaggaatcacgtcatggaaggcgactgggacaaagcagagaacgacttaaatgaactgaagcccctggttcactctccacacgctatagttgtccggggtgccctggaaatctcgcaaacgctcttagggattattgttagaatgaaatttttgttgctgcaacagaagtatttagaatatctggaggacgggaaggtgttagaggcccttcaggttctgcgctgcgagcttactccgctgaagtataacaccgagagaatccacgtgctgtccggctacctgatgtgtagccacgccgaagacctgagggctaaggccgagtgggaaggcaagggtactgcaagtcgatccaagcttctggacaaactgcagacttatctccctcccagcgtgatgcttccccctagacggctgcaaaccttgcttcgccaagccgtcgagctccagagagaccgttgtctctatcacaatactaagctggataacaatctggactccgtgtctctgctgatagaccatgtctgttcccgtcgccaatttccctgctacacccaacagatccttaccgagcactgtaacgaggtgtggttttgtaagtttagcaacgatggaaccaaactggcaactggaagcaaagatacaacagtgatcatctggcaggtggaccccgacacccatctgctcaagctacttaaaacgctagagggccatgcctacggcgtgtcatacatcgcttggagcccggacgacaattacctggtcgcatgcggccctgatgattgctcagaattgtggctgtggaacgttcagactggcgaactccgcacaaagatgtctcagagccacgaggattctctgacatctgtggcctggaatccggacggcaagaggttcgtgactggagggcagcgaggacaattctatcagtgtgatctcgacgggaaccttttggactcgtgggagggagtgcgcgttcagtgtctgtggtgtttgtccgacgggaaaaccgttctcgcatccgacacccaccaaagaatacggggatataacttcgaggacctgacagataggaacatcgtccaggaagatcatcccattatgtcatttactattagcaaaaatggcaggctggccttactaaacgtggcaacacagggggtgcatctgtgggacctccaagatagggttttggtgagaaagtatcagggagttacacagggtttctacacaatccactcttgcttcggcggacacaacgaggattttattgcatcgggcagcgaggatcacaaggtttacatttggcataaaagatctgagctgcccatcgcagagctgactgggcacacccggaccgtgaattgtgtatcctggaatccacagattccttctatgatggccagtgcaagcgatgatggaactgtgagaatctggggccctgccccttttatcgatcatcagaatattgaggaggagtgttcatccatggacagctag

SEQ ID NO: 23211 - DNA, 540 bp, synthetic construct
  source 1..540: mol_type = other DNA; note = Synthetic coding sequence
atgggcatcctgttcacccggatctggcggctgttcaaccaccaggaacacaaagtcatcatcgtaggccttgacaatgccgggaagacgactatcctctatcagttctcgatgaacgaggtggtacacaccagccctactataggctccaatgtcgaggagattgtgatcaataatacgagattcttgatgtgggatatcggaggccaggagtccctgcggtcgagctggaacacctactataccaataccgaattcgtgatcgttgtggtggactccactgatagggaacgcatctcagtgacccgggaggaactgtataaaatgctggcccatgaagatttacgtaaagcagggttgttgatttttgcgaacaagcaggacgtcaaggagtgtatgaccgttgccgagatatctcagtttctgaagttgactagtatcaaagatcaccaatggcatatccaggcctgttgtgccctgaccggcgaagggctatgccagggcctggagtggatgatgtcacggctcaaaatcagatag

SEQ ID NO: 23212 - DNA, 1428 bp, synthetic construct
  source 1..1428: mol_type = other DNA; note = Synthetic coding sequence
atgcagaagagcaccaacagcgacaccagcgtggagaccctgaactccacccggcagggcaccggcgctgttcagatgcgcataaaaaacgcaaattctcaccacgaccggctgtcgcaatcaaaatccatgattttaactgacgtcgggaaggtaaccgagcctatctctcgccaccggcggaaccactcccaacatattttgaaggatgtgattcccccacttgagcagctgatggtcgaaaaagaagggtacctgcagaaggctaaaatagcggatggaggcaagaaactccgaaaaaattggtcaacaagctggatagtgctctcttctagaaggatcgagttttacaaggaaagcaaacagcaggcgctctccaatatgaaaaccggtcacaaaccagagagtgtcgacttatgcggcgcccatatcgaatgggctaaggaaaagtcatctcggaaaaatgtgttccagattaccaccgtatccggcaacgaattcctcctccagtcagacatagattttatcattctggattggttccatgccatcaagaacgccatagacagactcccaaaggactcatcatgtccttcccgaaatctggaacttttcaagattcagaggtcgtccagtactgagttgctcagccactacgactccgacattaaagagcagaaaccagaacataggaaatccttgatgttccgcctgcatcactcagcttcagatacaagtgataaaaatcgcgtcaagtctagactgaagaagtttatcacacgtcggccaagtcttaagactctccaggaaaaagggctgataaaggatcagatctttggctcccaccttcacaaggtctgtgagagagagaactctactgtaccatggtttgttaagcaatgtattgaggcggtcgagaaaagggggctggacgtagacgggatctaccgcgtttccggcaacctggcaactatccagaagcttcgatttattgtgaatcaggaggaaaagctgaatctcgacgactcccagtgggaggacatccatgtggtcaccggcgcactaaaaatgttcttccgggaattgccagaacccttgttcccatactcattctttgagcagttcgtagaggctattaaaaagcaggacaacaatactagaatcgaagctgtgaagtcccttgttcagaagttaccccctcccaacagagataccatgaaagtgctgttcggccatttaacgaagatagtggctaaggcatctaagaatctgatgtccacacagagcttgggaattgtgtttggcccgacattactgagagccgaaaacgagacaggaaatatggcaatacacatggtttaccagaaccagatagccgagctgatgctatctgagtactccaaaatctttggtagcgaggaagactag

SEQ ID NO: 23213 - DNA, 1308 bp, synthetic construct
  source 1..1308: mol_type = other DNA; note = Synthetic coding sequence
atggcccagaccgtgcccccctgcgagctgccctgcaaggagtacgacgtggctcggaatactggagcttatactagctccggattagcgactgccagctttcggacctctaaatatttactggaagagtggttccaaaactgctatgcccggtaccatcaagcttttgcggatcgggatcaatctgaacgccagcggcatgagagccagcagctggccacagagactcaggcattagcacaacgcacgcagcaggattccacacgaactgttggagagcggctacaggatacacactcctggaaaagtgaactccagcgcgaaatggaggctttggccgccgaaaccaacctgctattggcccaaaagcagaggctcgagcgtgccctggatgctacagaagtcccttttagcataaccaccgataatctccagtgccgagagcgaagggagcaccccaacctcgtgagagatcacgtggaaactgaactgctcaaagaggcagagttaatacgaaacattcaagaacttctcaaacgcaccattatgcaggctgtctcccaaattaggctgaaccgagaacacaaggaaacctgcgagatggactggtccgacaagatggaggcatacaatatcgacgagacgtgcggacgccatcactcccagtcaactgaggtccaggcacacccatactccaccaccttccaggagtccgcatctacacccgaaacgagagcaaaattcacacaggataatctgtgccgggctcagagagagcgcctcgcctctgctaatttgagagtgttagttgactgcatactccgagataccagtgaagatctgaggctccaatgcgacgccgtgaacttggcatttggaaggagatgcgaggagttagaggacgccaggtataaactgcatcatcatttacataagacactgagagaaataacagaccaagaacataacgttgctgccttgaagcaagcgattaaagataaggaggcccctttgcacgtcgctcaaactcggctgtatctgagatcccacagaccgaatatggaactctgcagggacgccgcacagttccgtttgctatctgaggtggaggagctgaacatgtcactgacagccctaagggaaaaattgctcgaagcggaacaatctctccgtaatcttgaggatatccacatgtctctcgagaaagatatagccgcaatgaccaattccctgttcattgacagacagaagtgtatggctcatcgcacacgttatccaactatcttgcaactagcagggtaccaatag

SEQ ID NO: 23214 - DNA, 828 bp, synthetic construct
  source 1..828: mol_type = other DNA; note = Synthetic coding sequence
atgcggaagcggctgagcgcccccgagctgcggctgagcctgaccaaggggcccggcaatgatggggcctcgccaacacagagcgccccctcaagtcccgacggctccagcgatttagagattgacgaactggaaaccccctcagactccgaacagctagactccggacacgagttcgagtgggaggatgagttgcctcgtgccgagggtcttggtacttctgagacggccgagaggctgggcagaggctgtatgtgggacgtgactggggaagacggacaccactggagggtgttccggatgggtccccgggaacagcgggtggatatgacagtgatcgagccatataagaaagtcctcagtcatggaggataccacggtgacggattgaacgccgtgatcctctttgcgtcctgttatttgccacgctcttccataccgaactatacatacgtgatggagcatctgttccggtatatggtgggcacactcgaactgctggtcgctgaaaattacctcctggtgcatctgtccggcggcacttccagagcccaggtgcctccactgagctggattagacagtgttaccgaaccctagatcggcgacttagaaagaatctgcgggcactggtagtggtgcacgcgacatggtacgtgaaggcctttttggccctgcttagaccttttatatcctccaagttcactagaaaaatccggtttctggactctctgggagaactggctcagctgatctcgctggatcaggtacacatacccgaagctgtgcgtcagctggacagagatctgcatggaagcggcggtacatag

SEQ ID NO: 23215 - DNA, 2391 bp, synthetic construct
  source 1..2391: mol_type = other DNA; note = Synthetic coding sequence
atggaggaggaggccagccggagcgccgccgccaccaaccccggcagtcgcctgaccaggtggcctcctcccgacaagcgtgagggctccgcggttgatcccggtaaacggagatcactcgctgcaactccgtcttcctccttgccctgcaccctgattgctcttggacttaggcatgagaaggaggctaatgagctgatggaggatttgtttgagacattccaggacgagatgggatttagcaatatggaggacgacggccccgaagaggaggagagagttgccgaaccacaggcaaactttaacacgcctcaggccctaaggttcgaagagctgctggctaacttgctgaacgaacagcaccaaattgccaaggagctctttgagcaactgaagatgaagaaaccttctgctaagcagcagaaggaggtggagaaggtgaagccccaatgcaaggaagtgcatcagaccctcattcttgacccagcccagcgcaaaagacttcaacagcagatgcagcagcacgtgcagctgttgactcagattcacctcttggcaacctgcaacccaaacttgaatccggaggcttcgtccacacgtatttgtctgaaggagctcggcacttttgcccaaagtagtatcgctctgcaccaccaatataacccaaaatttcagactctgtttcagccttgcaacctgatgggggccatgcagttgattgaggatttttccacccacgtcagcatcgattgttcccctcacaaaaccgttaaaaagaccgccaatgagttcccctgcctgccgaagcaggtggcatggattctggccacctccaaggtgttcatgtatcccgaattgctgccagtgtgttctttaaaggcaaagaatcctcaggacaaaattttgttcaccaaagccgaggataacaaatacctgttgacatgcaagaccgcacggcagttaacggtccgaattaaaaatcttaatatgaatcgagcccctgataatataatcaaattttacaagaaaacaaaacagcttccggtcctaggtaagtgctgcgaggagatacaaccccaccagtggaaacccccgatcgagcgtgaggagcacaggctgcccttctggttaaaggccagccttccttcaattcaagaggaactgcgccacatggccgacggagcacgggaggttggtaacatgacagggacaaccgagatcaatagcgatcagggattggagaaggataactccgagttaggctctgaaacccgttacccactgctgctccctaagggcgtcgtgctgaagttgaagccagtcgcagacagattcccaaaaaaggcctggcgacagaagcgctcctctgttctgaagcccctgttgattcagccctcacctagcctgcagcccagcttcaacccgggaaaaactccggcacagagcacccacagcgaagcacctccatcgaaaatggttctgagaatcccccacccaattcagccagcgacagtcctgcagaccgtccctggcgtgcctcctctgggcgtcagtggcggggaaagcttcgagtcccccgcggcgctcccggccatgcctcctgaggcacgaacaagctttcctttatcggagtctcagacgctgctctcctccgcacctgtgcctaaggtgatgatgccaagccctgctagctccatgtttcggaagccttacgtccggcgccgaccttccaaacgacgaggggcccgcgcattccgctgcattaagcccgccccggtgatacacccagccagcgtcatttttacggtgcccgctacgacagtcaagatcgtgagcctagggggaggctgcaacatgatccagcccgtgaatgccgcagtcgcccaatccccacaaaccattccgatcgccaccctgcttgtgaaccccacctcattcccctgtcccctcaatcagcccttagtggctagctctgtaagccccctcatcgtgtctggaaattctgtcaacctacctattccgagtacgccggaggacaaagcccatatgaatgtcgatattgcctgcgccgtggccgacggggaaaacgcattccagggtctcgagccgaaactagagccccaggaactgagcccactttccgcaacagtgtttcccaaggtagagcacagtcccggcccgcctcctgtggacaagcagtgtcaggagggcctgagcgagaattccgcctacaggtggaccgttgtaaagaccgaggaggggcggcaggccttggagccattgccacagggcatccaggagtctttgaataactcgtcccccggtgatctggaagaggtggtcaaaatggagcccgaggatgcaacagaggaaatatccggattcctttag

SEQ ID NO: 23216 - DNA, 1380 bp, synthetic construct
  source 1..1380: mol_type = other DNA; note = Synthetic coding sequence
atggccgccagcgccagcgccgccgccggcgaggaggactgggtgctcccttctgaagtagaagtcctggagtccatctatctggatgaactgcaggttataaaagggaatggccgcacttccccatgggagatctatatcacccttcatcccgctactgctgaggatcaggatagccagtatgtttgtttcaccctggtcctacaggtcccagccgagtacccccatgaggtaccgcaaataagtatcagaaacccgaggggcctgagcgatgagcagatccacaccatcctgcaagtcctgggtcacgtagccaaggccggtcttgggactgctatgttatacgaattgattgaaaagggtaaggagatcctgacagacaacaacatcccacatgggcagtgtgtgatttgcttatacggattccaggaaaaggaggcatttactaagacaccctgctatcactacttccactgtcactgtctggcacggtatatccagcacatggagcaggagctcaaggcccaaggccaagagcaggagcaagagcgccagcatgccaccacaaagcagaaggccgtgggagttcaatgtcctgtatgccgtgaaccactagtttacgatctcgctagcctgaaagctgctccagaacctcaacagccaatggagctgtaccaaccatcagccgagtctctccgtcagcaggaggaacgaaaacgcctgtatcaacgacagcaggagcgcggcgggatcatcgatttagaagcagaaaggaacaggtacttcatttcactccaacagcccccggcgccagcagagccagaatcagccgtggatgtgtctaagggcagtcagccgccatcgacgctggctgcagaattaagcacttccccggctgtgcagtcgaccctgccaccgcccctgcctgtggcaacacagcacatttgcgaaaaaatccctggtacccggtctaaccaacagagattgggagagacacagaaggccatgctggatccccctaaaccatcaaggggcccatggaggcaacccgaacgaagacatcccaaaggcggagagtgtcacgctccaaaaggaaccagggatacacaggagctgcccccacccgaaggccccctgaaggaaccaatggacctcaagcctgagccacatagccagggagtcgagggtcctccgcaagagaaaggccctggctcgtggcaaggaccgcctccacgcagaacaagggactgcgtgcgatgggaacgatccaagggcagaacacccggaagctcctatcctagactaccgaggggccagggggcttacaggcctgggacccgccgtgagtctctcggactcgagagcaaagatggcagttag

SEQ ID NO: 23217 - DNA, 2079 bp, synthetic construct
  source 1..2079: mol_type = other DNA; note = Synthetic coding sequence
atgggcagcgccgccgacgtgcggttcagcctgggcaccaccacccacgcacctcccggggttcatagacggtacagcgctttgagggaagagtcggcaaaggattgggaaacgagccctctgcctggaatgctggcccctgctgcaggtcctgccttcgacagtgatcctgaaatatcagacgtagatgaagatgagccaggggggctggtcggtagcgctgatgtcgtcagtcccagcgggcacagcgatgcccagacgctggcaatgatgcttcaggaacagttagacgctatcaatgaagagattagaatgattcaggaagagaaagagagcactgaattaagagctgaagagatagaaactcgtgttacgtccggaagtatggaggccctcaatctaaagcaactgaggaagagaggctccattcccaccagcctcacagctctttccctggcaagcgcgagcccacccctctctggtcggtcaacccctaagctaactagtcgctccgctgcccaggacttggatcgtatgggggtgatgaccctcccaagcgatctgcgcaagcacagaagaaaattgctgtcccccgtgagcagggaggagaaccgtgaggacaaggccaccatcaaatgtgagaccagccctccttcatctccaaggaccctgagactggaaaagcttggccaccctgccttaagccaggaagagggcaagtccgcactcgaagatcaagggtcaaatccttcctccagcaatagtagccaggactctctgcacaagggcgctaaacgcaagggtatcaaatcctcaatcggacgtttatttggcaagaaagagaaaggccggctgatccagctctctagagacggagcgactggtcatgtgttattaacagacagcgaattctccatgcaagagcctatggtgcccgcaaaactgggaacccaggccgagaaagacaggcgccttaagaaaaagcatcagttgctggaagacgcccgtcgcaaaggcatgccatttgcccaatgggatggacccacagtagtaagttggttggagctatgggtcgggatgcctgcctggtatgtggctgcatgccgagccaacgtgaagagcggcgctattatgtccgctcttagcgataccgaaattcagcgcgagatcggcatatccaacgccctccaccggctgaagttgcggctcgcaattcaggagatggtcagtctgacttctccctccgctccccctacttctcgcacctcatccgggaacgtgtgggtcacccacgaagaaatggagaccctggagacgtccactaaaaccactctggcctacggggatatgaatcacgagtggatagggaatgaatggctcccaagcctcggcttgccgcaatacaggtcttattttatggagtgccttgtggacgctagaatgctcgaccacctgactaagaaagaccttagagtgcacctgaaaatggtagattcctttcataggacctctttacagtatggaattatgtgtctgaagcggcttaattacgatcggaaggaactcgagaaaaggcgggaggagagccagcacgagatcaaggatgtcctggtgtggacgaatgatcaggtggttcactgggtccagtcgattggtcttagagactatgctggaaatttgcacgaatcaggagtccacggggccctgttagccttggacgagaacttcgatcacaataccctggctctgatcttacagataccaacccagaatactcaggcacgccaggtgatggaacgcgagtttaacaatctgctcgcccttggaacagaccggaagttagatgatggcgatgacaaggtatttagaagggcgcctagttggcgcaaacgcttccgaccccgagaacatcatggccgcggcgggatgctttccgcgagtgccgaaacactgccagctgggtttcgagtgtcaactttaggaactttgcagccaccacccgcacctcccaaaaaaattatgcctgaggcgcacagtcactatctgtatggccatatgctgtccgcgttcagagactag

SEQ ID NO: 23218 - DNA, 369 bp, synthetic construct
  source 1..369: mol_type = other DNA; note = Synthetic coding sequence
atggccccccagaaggaccggaagcccaagcggagcacctggcggtttaacctcgacctaacacacccagttgaagacggcattttcgactcaggcaacttcgagcagttcttaagagaaaaggtgaaggtgaacggaaaaaccggcaacctagggaatgttgttcacattgaacgcttcaagaacaaaattactgtggtgagcgagaagcagttcagtaaaagatatctgaagtacctgacgaaaaagtaccttaagaagaacaatctgcgcgactggcttagagtcgtggccagcgataaggaaacctatgagctgcggtactttcaaatctcacaggatgaggacgagtctgagagcgaggactag

SEQ ID NO: 23219 - DNA, 936 bp, synthetic construct
  source 1..936: mol_type = other DNA; note = Synthetic coding sequence
atgcagtacatcagccacatcttcggcgtgatcaactgcaacggctttacgctgagcgaccagcgcggacttcaggcagtcggagtcgggatcttccccaatttgggtctggtgaatcacgattgctggcccaactgcactgtgatttttaataatgggaagattgagctgcgcgcacttggcaaaatcagcgaaggcgaagagctcacagtgtcttacatcgattttttgaacgtgtctgaggagcggaaacgccagctgaagaagcagtactatttcgactgcacctgtgagcattgtcagaaaaaactgaaagatgacttatttctgggcgtgaaggacaatccaaaaccctcgcaggaggtcgtgaaggagatgatccaattctccaaagacaccctggaaaagatcgataaggctaggtccgagggcctgtaccacgaggtcgtcaagctgtgtcgagaatgcctcgagaagcaggaaccggtatttgcggacaccaacatctatatgctccgaatgctcagcatcgtttctgaagtcctctcatacctgcaggccttcgaggaagcaagcttctatgcccgccggatggtggacggatatatgaagctgtaccatcctaataacgcacagctaggcatggcggtgatgcgggccggactgacaaattggcatgctgggaatatagaggtgggacatggcatgatttgcaaagcttacgccattctgctggtcacccacggtcctagtcatccaatcacaaaggatcttgaagcaatgcgcgtgcagactgagatggaactgcggatgttccgccagaacgagttcatgtactacaaaatgagagaagccgccttaaacaaccagcctatgcaggtcatggcggaacccagcaacgaacctagtcccgccctcttccataaaaagcagtag

SEQ ID NO: 23220 - DNA, 1542 bp, synthetic construct
  source 1..1542: mol_type = other DNA; note = Synthetic coding sequence
atggccgagctgcagatgctgctggaggaggagatccccggcggccgcagggcattgtttgatagctatactaatctggaacgcgtggcagactattgtgagaacaattacatccagtcagccgataaacagcgcgccctcgaagagacaaaggcgtacacgacccagagcctcgcctccgtggcgtacctaatcaatactctggcgaacaatgtcctccagatgttagacatacaggcctcgcagctgcgacgcatggaaagctccattaatcatattagtcagactgtagatatccacaaggaaaaggtggcgaggagggaaattggtattttgacaactaataaaaacacatcgcgcacacacaaaattatagctccagccaacctggagcgaccagttaggtacatccgtaaaccaattgactacacgattttggacgatatcggccacggcgtgaagtggttgcttcgctttaaagtgtcaactcagaatatgaaaatgggcggactgccaagaaccactccacctactcaaaaaccccccagccctcctatgagcggcaagggaacgctcggcaggcactcaccttatagaaccttggaaccagttcgaccgccagtcgtccctaatgactatgtgccctctcctactagaaacatggccccgtctcaacagagccctgttagaaccgcttctgtgaaccagcggaatcggacgtatagctcgtctggaagcagtgggggtagccatcctagctccaggtcctctagcagggaaaactccggctctggcagtgtgggggtgcccatcgcggtgccaacaccgtccccaccttcagtgttccccgctccggcggggagcgccggtacaccaccactgcccgcaacctctgcctctgctcctgcccccctagtgccagccaccgtgccctcctccacggctcccgatgctgccgcaggaggcgcccagactctcgcggatggatttacatcaccgacaccaccagtggtgagttcaacaccccctaccggacatcctgttcagttctacagcatgaaccgaccagcaagccgccacactccaccaaccattggcggtagcttgccttatcgcaggccgccaagtataacatctcaaacaagcctgcagaaccaaatgaacgggggacccttctattcccagaaccccgtcagtgacaccccaccgccacccccacccgttgaggaacctgtcttcgatgaaagcccaccgcctcctccccctcccgaagactacgaggaagaggaggccgccgtggtcgagtacagcgacccgtacgctgaggaagacccgccttgggctccaagaagctaccttgaaaaagtggtagccatctacgactataccaaggataaggaggacgaactgtcttttcaggagggggcaattatctacgtcattaagaagaatgacgatggatggtacgaaggcgtcatgaatggcgtgacaggcctttttcccggcaattacgtggagtccatcatgcactattcagagtag

SEQ ID NO: 23221 - DNA, 1170 bp, synthetic construct
  source 1..1170: mol_type = other DNA; note = Synthetic coding sequence
atgcccctggagaacctggaggaggagggcctgcccaagaaccccgatttgcgtatcgctcagcttcgctttctcttatctttgcctgagcatcgtggggatgctgcagtgagagatgagcttatggccgcagtacgcgataacaacatggccccatactatgaggcattatgtaagtctctggattggcagatcgacgtcgatctgcttaataagatgaagaaagctaatgaggatgaattgaagcgcctagatgaggaactggaagacgccgaaaagaatcttggtgagtcagaaattagggatgccatgatggcaaaggccgagtacctctgtcgcatcggagacaaagagggggcccttaccgcctttagaaagacgtatgataaaacggtcgccttaggccaccggttggatattgtgttctacctgcttcggattggtttattttatatggacaacgatctaataacacgcaatactgagaaggcaaagtccttgattgaggaaggtggggactgggatcgcagaaacagacttaaagtctatcagggactctactgcgtggccattagggacttcaagcaggccgctgagctgtttctggataccgtaagtacctttacgtcctatgagctgatggactacaagacgttcgtgacatacactgtgtacgtgtcaatgatcgctttggagcgccccgatctccgcgagaaggtgattaagggggctgaaatcttagaagtgcttcactcgctgcccgccgtaagacagtacctgttttcactgtatgagtgcagatacagcgtcttcttccaatccctcgccgtcgttgagcaggaaatgaagaaggattggctctttgcgccacactatagatactacgtaagggaaatgcgcattcatgcttatagtcagttgctcgagtcttaccggagcttgaccctggggtacatggcagaagcgttcggggtgggggtagagttcattgaccaggaactgagtcgcttcatcgctgctggtcggctccattgcaaaatcgacaaagttaatgaaatcgttgaaactaaccgtcctgactctaagaattggcagtatcaggagacaatcaaaaaaggggatctgttgctgaaccgagtccaaaaactgtcccgggtcatcaatatgtag

SEQ ID NO: 23222 - DNA, 420 bp, synthetic construct
  source 1..420: mol_type = other DNA; note = Synthetic coding sequence
atggccaacatcgccgtgcagcggatcaagcgggagttcaaggaggtgcttaaatcagaggaaactagtaagaaccagataaaggtggacttggtggacgagaacttcacggagctcagaggcgagattgcaggaccacccgacaccccctacgaaggcggacggtatcagctggagattaagatccccgagacttatccattcaacccacccaaatataaacagaatcccgagatgtttaaacaaacagcccggttgtgggcccatgtgtacgccggagccccagtgtcctctcccgagtacaccaagaagatcgagaacctctgcgcaatggggtttgacaggaatgcggtgatagttgccctcagctcaaaatcttgggatgtggagacagcaactgagctgctgttgtccaattag

SEQ ID NO: 23223 - DNA, 1203 bp, synthetic construct
  source 1..1203: mol_type = other DNA; note = Synthetic coding sequence
atgaacttcaccgtgggcttcaagcccctgctgggcgacgcccacagcatggacaacttggagaagcaactcatatgccccatctgtctagagatgttctctaagcctgtcgtaattcttccctgtcagcataacttgtgtagaaaatgtgcaaatgatgtgttccaagcctccaatccattatggcagtcgaggggatccacaacagtgagtagtggagggaggttccggtgcccctcatgtcggcacgaggttgtgctggataggcacggggtttatgggcttcagcggaatctgctcgtagagaatattattgatatatacaagcaggagtctagtagacctcttcatagtaaggccgaacaacaccttatgtgtgaggaacacgaggaagaaaagatcaacatatattgccttagctgtgaagtgcctacctgctctctatgtaaggtcttcggcgcccataaagactgtgaggtggctcccttgcctacgatctataagcgtcagaagaagcaggaccttaccctgctaccaagactggagtgttctgggactaacaccacctattgtagcctcgacctgccgagctctagtgacccccctatcctcgcctcgcaaaataccaaaatcatcgacagtgagttgtctgacggcatagctatgcttgtagccggtaatgaccgcgtgcaggcggtgattacacagatggaggaagtatgccagacaattgaggataacagccgacgccaaaagcaattgctcaatcaacggttcgaaagcttatgtgcagtgctggaggagagaaaaggtgaactattgcaggccctcgctcgagagcaagaagagaagctgcagcgcgtgagggggctgatccgacagtacggcgaccacctggaggcgtcatctaagctggtcgaatccgcaatccagtccatggaagagcctcagatggccctgtacttgcagcaggccaaagaattgattaataaagttggggctatgagcaaggtggaattggccggcagacccgagcccggctacgaaagtatggaacagtttacagtgcgggtcgaacatgtagctgaaatgctcaggacaattgattttcagcccggcgctagcggcgaggaagaagaggtggcaccagacggcgaggaaggttctgctggccctgaagaggagagacctgacggaccttag

SEQ ID NO: 23224 - DNA, 198 bp, synthetic construct
  source 1..198: mol_type = other DNA; note = Synthetic coding sequence
atgttcctgagcgccgtgttcttcgccaagagcaagagcaagaacatcctcgttagaatggtgtcggaggcagggacaggcttttgcttcaatacaaaaagaaaccgccttcgcgagaagctcaccctgctacactacgatccggtcgtgaagcagagagtgctctttgtggaaaagaagaagattcgcagtctttag

SEQ ID NO: 23225 - DNA, 2919 bp, synthetic construct
  source 1..2919: mol_type = other DNA; note = Synthetic coding sequence
atgcggcccgagggcgccggcatggagctgggcggcggcgaggagcgtctaccagaggaaagcagacgtgagcactggcagttgttaggcaacctgaagacaacagttgaaggactcgtcagcaccaatagcccaaatgtgtggtccaagtatggggggctcgaaagactgtgccgtgatatgcagagcattctctatcacggtttgattcgggatcaggcctgcagaagacaaactgactattggcagttcgttaaagacatccggtggctttcccctcacagcgcactgcacgtcgaaaagttcatctccgtccacgaaaacgaccagagttcagcggatggagcttctgagcgggccgtggccgagctgtggctgcagcattctctgcaataccattgcctgagtgctcagctgagacctcttctcggtgatagacagtatattcggaagttctataccgatgctgcttttcttctgtctgacgcgcacgtgaccgcaatgctacagtgcttagaggccgttgaacagaataatccacgcctgttggcgcagatagacgctagcatgtttgccaggaaacacgagtctccgctgctggtgacaaagtcccagtccctaacggccctgccgtcgagtacctacactcctcctaatagctacgctcaacactcctactttggcagtttctcctcgctccaccagtcagtgccaaacaacggttccgagcggcgctccacaagcttcccgctgagcggccctcccagaaaacctcaggagtcccggggccacgtatctcccgcggaagaccaaaccattcaggcgcctccggtgtcggtgagcgcactcgctcgcgactcccccctgacgcctaatgagatgagttcgtctaccctaaccagcccgatcgaagccagctgggtttccagccagaacgactccccgggcgatgcatcagagggtcctgagtatctggccattggcaaccttgatcctcggggcagaacagcctcatgccagagccactcctccaatgctgaatcttccagctccaatctcttctccagttcgtcttctcaaaaaccagatagcgccgcctcaagtctgggagatcaggagggtggcggggaatcacagctctcttctgtgctgaggagaagctcgttttcggaggggcagacccttacagtgacatctggagcgaagaagtcacacatcagatctcattccgatacgtcaatcgctagcagaggagcaccagaaagctgcaacgacaaggcaaagctaagaggacccctgccttattccgggcagtcatcggaggtatccacaccctcaagcttgtacatggaatatgagggtggtagatacttatgcagtggagagggcatgttccgcagaccgagtgaaggccagtccttgattagctatctttcggagcaggatttcggctcatgcgcggacttagagaaagaaaacgctcacttctccatctccgagtctttaatcgcagccatcgagctgatgaaatgtaacatgatgagtcaatgtctggaagaggaggaggtggaggaggaggactctgatcgggagatccaggagcttaaacagaagattcgtttgaggcgccagcagattcggacgaagaatctgttacctatgtatcaggaagctgagcacgggtcctttagggtgacttcttctagctcccaattttcctcccgagacagtgcgcagctgtcagattctgggagcgcagatgaagtcgacgagtttgaaattcaggatgccgacataagacggaacacagcctctagttcgaagagttttgtatcatctcagagcttttcccactgctttctccatagcaccagcgctgaagctgtggctatggggctgcttaaacagttcgaaggcatgcagctgcccgcagcgagcgaactcgagtggcttgtccctgaacatgatgccccacaaaagctgttacctatccccgattctctgcctataagtcccgacgacggccagcacgcagacatctacaaactccgcatccgcgtgcggggcaaccttgagtgggccccccccaggccacagataatctttaatgtccaccccgcacctacccggaagattgccgttgcgaagcaaaattatcggtgtgccggctgtggaattcgaactgaccccgattatatcaaaaggctaagatactgcgaatacctcggaaagtacttctgccaatgttgccatgaaaacgctcagatggccattcccagccgcgtgctgcgcaagtgggacttctcaaagtattacgtttccaatttttctaaagatctgttaataaagatctggaatgatccactgttcaacgtgcaggatatcaattcggccctgtaccggaaggtcaagctactgaaccaggtgcggctgttgagagtccagctgtgtcacatgaaaaacatgttcaagacttgcaggctcgccaaggagttactcgacagttttgatactgttcccggccacctgacggaggacttacatctttattccctgaacgacctgactgccactagaaaaggagagttaggcccccggctggctgaactgactcgcgcaggcgccactcacgtggagcggtgtatgctctgccaggccaaaggattcatttgtgagttctgccagaacgaggacgatatcattttccctttcgaattacacaaatgtcggacttgcgaggaatgcaaggcgtgctaccacaaggcttgttttaagagcggctcttgcccccggtgtgagagattgcaagccaggcgggaggctttggcgcggcagagtctggaatcctatcttagcgactacgaagaagagcccgctgaggccctggcacttgaggcggcagtgctcgaagccacttag

SEQ ID NO: 23226 - DNA, 1161 bp, synthetic construct
  source 1..1161: mol_type = other DNA; note = Synthetic coding sequence
atggccgccgtggagacccgggtgtgcgagaccgacggctgcagctccgaggccaagttgcaatgcccaacatgcatcaaacttggcattcaagggagctacttttgtagccaagaatgttttaaaggttcctgggccactcataagctgctgcacaaaaaagccaaggatgagaaagcaaaaagggaggtatcatcctggactgtcgagggcgacatcaataccgacccctgggccggttatcgttatacaggtaaactcaggccgcactatccactgatgccaacgaggcctgtgccgagctacatccagcggccggattacgcagatcatccattggggatgtccgaaagtgagcaggcactgaagggcacctcccaaatcaaactgctatccagtgaagacattgagggtatgcggctcgtctgtcgccttgctagagaggttctggacgtggctgcaggaatgataaaaccaggtgtgacaaccgaggaaatcgaccacgccgtacacctagcctgtattgcgcggaattgctatccctcgcccttgaattattacaacttcccgaagtcctgctgtactagcgtgaatgaagttatttgtcacgggatcccggaccgccgaccactgcaagaaggagacatagtgaatgtagacataacattatacaggaacggatatcacggcgacctgaacgagactttttttgtgggtgaggtcgatgacggggctagaaaactggtgcagacgacatatgaatgcctgatgcaggcaatagatgcagtcaagcctggagtgcggtaccgggaactgggtaacattattcaaaagcacgcccaggctaatggcttcagcgttgtgaggtcttactgtggtcatggcatacataagctgttccacacagcacccaacgtgccacactacgctaaaaacaaagccgtgggggtcatgaaaagcggacacgtgtttactattgaacccatgatctgtgaagggggctggcaggacgaaacatggcccgacggatggacagcagtgactcgcgacggaaagagaagcgcccaattcgagcatacacttcttgttacagatacagggtgcgagatactcactcgtcgcctcgattccgccagaccccactttatgtcccagttctag

SEQ ID NO: 23227 - DNA, 738 bp, synthetic construct
  source 1..738: mol_type = other DNA; note = Synthetic coding sequence
atgggccggctggacggcaaggtgatcatcctgaccgccgccgcccagggaatcggccaggctgcagcactggccttcgcccgcgaaggcgccaaggtgattgccaccgacattaacgagagcaagctccaggagttggagaagtatcctggcatccagacacgggttttggacgtgacgaagaagaaacagatcgatcaatttgctaatgaagtcgaacgactggatgtgctcttcaatgtggctggcttcgtgcatcatggaacggttctggactgcgaggagaaggattgggacttttctatgaacctgaacgtcagatccatgtatctcatgatcaaagcatttctccccaagatgctggcccagaaatccggtaatatcataaacatgagttcagtagcatcctctgtcaaaggagttgtgaaccgctgtgtgtattccacaactaaagctgccgtgatcgggctcactaagtccgtggctgcggattttatccagcagggcataaggtgtaactgcgtatgtcccggcaccgtggatactccctccttgcaagagagaatccaagctaggggtaacccggaggaagcaaggaacgacttcctgaagagacagaagacgggcagattcgctacagctgaggaaattgctatgttatgcgtctacctggcatccgacgaatctgcttacgtgaccggcaaccctgtgatcattgacggaggatggagtctgtag

SEQ ID NO: 23228 - DNA, 2520 bp, synthetic construct
  source 1..2520: mol_type = other DNA; note = Synthetic coding sequence
atgagcgtggtgggcatcgacctgggcttcctgaactgctacatcgccgtggctagaagcggcgggatcgagacgattgccaacgaatactccgaccggtgcacacctgcctgtattagtctggggtccaggactagagcaattggtaacgcggcaaaaagtcaaatcgtcaccaacgtaagaaataccatccatgggtttaaaaaactgcacggccgaagctttgatgacccaatcgtccaaacagaacgaatccgcttgccctacgaactgcagaagatgcccaatggatcggcaggagtcaaagtgagatacctggaggaggaaaggccatttgccattgaacaggtaaccggtatgctgctggcaaagctgaaagagactagcgagaatgccctgaaaaagcccgtcgcggactgtgtgataagcattccctccttctttactgatgctgagcgacgttcagtgatggcagccgcccaggttgcaggtctgaattgcctgcgcctgatgaatgaaactacagccgtcgctttggcatatggcatttataaacaggatctgccaccccttgacgaaaaacccagaaatgtcgtgttcattgacatgggtcactcagcttatcaggtcctggtctgtgccttcaataagggtaaactcaaagtactggccactacattcgacccctacctgggcggccggaacttcgatgaggctctcgttgattacttctgcgatgaatttaagacgaaatataagattaacgtgaaggaaaacagtcgggccctgttgcgactgtatcaggagtgtgaaaagctgaagaaactgatgagtgctaacgcgagtgaccttcccctcaatattgaatgtttcatgaacgacctggacgtttcgtcaaagatgaatagagcccaatttgagcagctctgcgcttcgctcctcgcgcgcgtggagccaccactgaaggccgttatggagcaggctaatctccagcgggaagacatttcttctatcgagatcgtcggaggcgccactaggatccctgcagtgaaagaacagataacaaaattcttcttgaaagacatctccacaacgctcaatgctgacgaggccgtggcccgcggttgcgctctgcagtgtgccattctgtcacctgcgtttaaagtgcgagagttcagtatcactgatctcgtgccttactccataacgctgcgctggaagacaagttttgaagatggcagtggagaatgtgaagttttctgtaaaaatcaccccgctccgttttcgaaagtgattacctttcacaagaaggaaccgttcgagttggaagccttctacacaaacctccatgaagtgccctaccctgatgcccggatcggaagcttcactattcaaaatgtgtttccgcagagtgacggcgattcctctaaagtgaaagtgaaggtgagggtaaacatacatggaatcttctcagtcgcctcggcttctgttatagagaaacaaaatctggagggagaccactccgatgcccctatggagacagagacttcttttaagaatgagaacaaagacaatatggacaaaatgcaggtggaccaggaagaagggcatcaaaagtgccatgctgagcatacccctgaggaagaaattgatcacactggagccaaaacaaagagtgccgtatccgacaagcaggaccgactaaatcagaccttgaaaaaaggcaaggtgaagtctatagatctgccaattcagagctccctctgtaggcaactgggacaggacctactgaactcttacatcgagaacgaaggaaagatgatcatgcaggataaattagaaaaggaaagaaacgacgcaaaaaatgcagtggaggaatacgtctacgatttccgggatcgcctgggtaccgtgtacgaaaagtttattactcccgaggacctgtccaagctatctgctgtgctcgaagacactgaaaattggctgtatgaggacggggaggaccagccgaaacaagtttatgttgataaactgcaagagctgaagaagtacggccagcccatccagatgaagtatatggagcacgaagaacggcccaaggctctaaatgatctgggaaaaaagatccagctggtcatgaaggtgatagaggcatatcgaaacaaggacgagcgatacgaccacctcgatcccactgagatggaaaaggttgaaaagtgtatctccgacgcaatgtcatggttaaatagcaaaatgaatgcccagaataaactgtctctaactcaagatccagtggtcaaggtatccgagatcgttgccaagtcgaaagaactagataacttctgtaaccccattatttataagcccaagcctaaagctgaagttccggaagataagccaaaagccaacagcgagcacaatggaccgatggacggccagtccggaacggagacaaagtcagattcaaccaaagactcctcccagcatactaagtcaagcggggagatggaagtggactag

SEQ ID NO: 23229 - DNA, 1224 bp, synthetic construct
  source 1..1224: mol_type = other DNA; note = Synthetic coding sequence
atggccgccccctgcgccgaggaccccagcctggagcggcacttcaagggtcacagggacgcggttacttgtgttgacttctcaataaataccaagcagctagcgagcggatcgatggatagctgtctcatggtttggcacatgaagcctcagtcgcgagcctacagattcaccggtcataaagacgccgtgacatgcgtgaatttctcccccagcggccatttactggctagtggtagtagagataaaaccgtccgaatatgggtccccaatgttaagggcgaatccaccgtattcagagctcacacagctaccgtgagatctgtacacttctgtagtgacggccagtcgtttgttaccgcttcagacgataagaccgtgaaggtatgggccacacatcgccaaaagtttctcttttctctcagtcagcacattaattgggtcagatgtgccaagttttctcctgacggaagattgatcgtttcagcctccgacgacaaaacagttaaactttgggacaaatctagccgcgaatgtgtgcattcctattgcgaacatggggggttcgtgacctacgtcgacttccatccatctggcacctgtatagctgccgccggaatggataataccgttaaggtttgggacgtccgtacacaccggttgttacagcactaccaactgcacagcgcggccgtaaacggattgtcttttcacccttccggcaactaccttatcactgcatcaagcgattccactctcaagatcctggatctcatggagggccggctgctctatacattgcatggacatcagggccccgctacaactgtggccttttctaggactggcgagtactttgcgtccggggggagcgacgaacaggttatggtatggaaaagtaattttgacattgtggaccatggcgaggtaactaaagttcctcgacctcctgccacacttgcatcatctatgggaaatctcccagaggtggattttcccgttcccccaggtcgcggccggagcgtcgaaagcgtgcagagccagccacaggagccagtctccgtgcctcaaaccctgacgagtactctggaacatatcgtcggccaactggatgtcctgacccaaacagtgagtattttagagcaacgcctcacgcttactgaggataagctgaagcagtgcttagaaaatcagcagctgataatgcaacgtgccactccgtag

SEQ ID NO: 23230 - DNA, 1173 bp, synthetic construct
  source 1..1173: mol_type = other DNA; note = Synthetic coding sequence
atggccaccggcgacctgaagcggagcctgcggaacctggagcaggtacttagactgcttaactatccagaggaggtggattgcgtgggcctcataaaaggcgaccctgccgcgtccctgcctattatatcttattcttttacatcctactctccctatgtgactgagctcataatggagtccaacgtggagctcatcgccaagaacgatctgcgctttattgatgcagtgtacaaactcctgagggatcaatttaattacaaaccaattctaacaaagaaacagtttatccaatgcggcttcgccgaatggaagatccaaattgtgtgtgatattctgaactgtgtgatgaagaaacacaaggaactgtcctctctacagaagattccctcacagcagaggaaaaaaatttcctcaggaaaatccgagccaccactcggcaacgaaaagatctcagctgaggccgttggggttgacatcagcggacgctttatgacctctggtaagaagaaggctgtagtcatcagacatctgtacaacgaggataacgtcgatatctcagaggacacgctgagtcctattactgacgtcaatgaggccgtcgatgtgtcagatctcaacgccacagaaattaagatgcctgaggtgaaggtcccagagataaaagccgaacagcaggacgtcaacgttaaccccgagattactgctctacaaacaatgctggccgaatgccaagaaaacctgaaaaagctaacttccatcgagaagcgtttggattgcctcgaacagaaaatgaagggtaaagtgatggtcgacgagaatacttggacgaatctgctgtcaagagtgacactcttagagaccgagatgttactctcaaagaaaaatgacgaatttattgagttcaacgaagtatctgaagattatgcttcatgcagtgacatggacctgttgaatccacatcgtaagagcgaggtcgagaggcccgcatcaattcctttatcctcagggtattcgactgcatctagcgacagcacgcctagagcctccaccgtcaactactgtggtctgaatgaaataagcgaagagacaaccatccagaagatggaacggatgaagaagatgtttgaagaaacagctgaacttctcaaatgcccgaatcattacctctag

SEQ ID NO: 23231 - DNA, 2601 bp, synthetic construct
  source 1..2601: mol_type = other DNA; note = Synthetic coding sequence
atgcccgccgtgagcctgccccccaaggagaacgccctgttcaagcggatccttaggtgttacgagcataagcagtatcgtaatgggttgaagttctgtaaacagatcctaagcaatcctaaattcgctgagcatggagaaacactggccatgaagggactgacattaaattgtctgggcaaaaaggaagaggcatacgagttggtgcgaagaggactccggaacgatctgaaatcacatgtgtgttggcacgtgtacggcttgctgcagcgttctgataagaaatacgatgaggccatcaagtgctaccgaaacgctctgaagtgggataaagataaccttcagattttgagagacctctctctgctccaaatacagatgcgggatctggaaggctatcgcgaaacccgctatcaactgctccagctgcggcctgcgcagcgggcctcttggattggatacgccatcgcctaccatctcctggaagactacgagatggccgccaagatcctagaggaatttcggaaaacacaacaaacatcccccgataaggtggactacgagtactcagaactgctgctctaccagaaccaggtgcttcgcgaagcgggcctgtatcgggaagctcttgaacatctatgtacctatgaaaaacagatatgtgacaagctggcagtggaggagaccaagggggagttactgctacaattgtgtcggttagaggatgctgccgatgtttacagaggcttacaggaacgcaatccagagaactgggcgtattataaaggactggagaaagccctcaagcctgcgaacatgttggagagacttaaaatctatgaagaggcttggacgaaatatccccgaggcctggtaccccggcgactccctctgaacttcctgagcggcgaaaaattcaaggagtgcctagacaagtttctccgaatgaatttctcaaaaggctgccccccggtgtttaacaccttgcggagtctgtacaaggataaagaaaaggttgccatcatcgaggagctggttgtgggttatgaaacgagccttaaaagctgcagactgttcaatcctaacgacgatgggaaggaagagcctccaacgacactgctttgggtccagtattacctagcccagcactatgataagatcggtcaacccagcattgcactggaatatatcaatacggctattgagtcgacccccactctcatcgagctgtttctagtgaaagctaagatctacaagcatgcgggaaatatcaaagaagcagctcgctggatggacgaggctcaagccttagacactgctgatcggtttataaattctaagtgcgccaaatatatgcttaaggccaacctcatcaaggaggccgaagagatgtgctctaaatttacccgtgagggaacatccgccgtggagaatctgaatgagatgcagtgcatgtggtttcagactgagtgcgcacaggcttataaggcaatgaacaaatttggagaggccctgaagaagtgtcacgagatcgaaagacacttcattgagatcacggatgaccagttcgattttcacacgtattgcatgagaaagattacactcaggagctatgtagaccttcttaagctggaagatgtcctacgccagcatccattttacttcaaagccgcccggatcgcgatcgaaatatacttgaagcttcatgacaatcctctgactgacgaaaataaagagcacgaggccgataccgccaatatgtccgacaaagagctgaagaaactccgcaataaacagcgtcgtgcccagaagaaggcccagatcgaagaggagaaaaagaatgccgagaaggaaaaacaacagcgtaatcagaagaaaaaaaaagatgatgacgatgaggagatcggtggacctaaagaggagttgattcccgagaagttagccaaagtggagacccctcttgaagaggcaatcaaatttctgacacccttgaaaaatctggtaaagaataagatcgagacccacttatttgcctttgagatctatttccgaaaggagaagtttctcctcatgctgcagtctgtgaagagagcgttcgctattgatagctctcacccatggctccacgaatgcatgatccgacttttcaacacggccgtgtgcgagtccaaagatctaagcgataccgtacgtaccgtcttgaaacaggagatgaaccgcttattcggagcaactaatcccaagaatttcaacgaaaccttcctgaagcgcaacagcgactctttgcctcaccgcctatcagcagcaaagatggtttactaccttgatccttcttcccagaaacgcgccattgaactggcgaccacactggatgagtcactgactaaccgcaatctccagacctgtatggaagtcctggaggccttatacgatggctctttgggagactgcaaggaggctgctgaaatctaccgggctaactgtcacaaactgttcccctatgccctggcgttcatgccccccggctatgaggaggacatgaaaatcactgttaatggcgactctagcgcggaagctgaggagttagcaaatgagatctag

SEQ ID NO: 23232 - DNA, 1293 bp, synthetic construct
  source 1..1293: mol_type = other DNA; note = Synthetic coding sequence
atggccagcagcgccaagagcgccgagatgcccaccatcagcaagacggtcaatcctacccctgatccccaccaggaatacctcgatccgcgtatcaccatcgccctgttcgagatcgggtcccacagcccgtcaagttggggtagcttgccatttctaaagaactcctctcatcaggtgacggagcagcagacagcacaaaagtttaacaatctactgaaggaaatcaaagatatattgaaaaatatggctggctttgaggaaaaaatcacagaagcaaaggaactgtttgaagaaactaacatcacagaggatgtgtcagcgcataaggagaacatccgcggcctggataaaattaatgagatgttatccacaaatttgcctgtatctcttgctcccgaaaaggaggataatgagaagaagcaggagatgattttagagacgaatatcaccgaggacgtgtccgctcacaaggagaacatcaggggtctagataagattaacgagatgctgagcactaatttaccagtgtctttggcacccgagaaagaggacaacgaaaagaagcagcagatgatcatggagaatcaaaatagcgaaaatacagcccaagtgtttgccagggatttggtgaacagactggaagagaaaaaggtcctcaatgagacccagcagtcccaggagaaagcgaaaaaccggctgaatgtgcaggaggaaacgatgaagatcaggaataacatggagcaactcctgcaagaagctgagcactggagcaagcaacataccgagctcagcaaactaattaagagctaccagaagtctcaaaaagatatatccgagacgctaggaaataatggagtaggttttcagacgcaacctaataacgaagtgtccgcgaaacacgaactggaggagcaggttaagaaactctctcatgatacctacagcctgcaactcatggcggcactgttggaaaacgagtgtcaaatattgcaacagcgcgtggaaattctgaaggagctgcaccaccagaaacaaggaactctgcaggaaaagcccatacagatcaactacaaacaggacaagaagaatcagaagcccagtgaagcaaagaaggttgagatgtataaacagaacaagcaggcgatgaaaggcacattctggaaaaaagatcgtagttgtagatccctggatgtttgcctgaacaaaaaagcgtgtaacacacagttcaatattcatgtggcacgcaaggctcttcgcgggaagatgcgcagcgcttcatcccttagatag

SEQ ID NO: 23233 - DNA, 5199 bp, synthetic construct
  source 1..5199: mol_type = other DNA; note = Synthetic coding sequence
atggccgccatcggccggggccggagcctgaagaacctgcgggtgaggggtagaaatgactccggtgaggaaaatgttcctctggatctgacccgtgaacccagcgacaacctgagggaaatcctgcagaacgtagcccgactccagggtgtgagcaatatgcgcaaactcgggcacttgaacaatttcaccaagctgctgtgtgacatcgggcacagtgaagagaaacttgggtttcattatgaagacataattatttgcctgcgccttgctctcctcaatgaagccaaggaagtgcgggccgcaggactacgggccctgcggtatcttatccaggattctagcatcctgcaaaaagtgctgaagctgaaagtggactatctgatcgcccggtgcattgacattcagcaatccaacgaggttgaaaggactcaagcgctgcgcctcgtaagaaagatgattactgttaacgcctcacttttcccttcctcagtgacgaattccctaatcgccgtgggcaatgacggcctccaggaacgcgaccgcatggtcagggcttgtatcgccatcatttgcgagttagcactccagaatcctgaggtagtggcattaagggggggcctcaataccatccttaagaatgtcatcgattgccagctgagtaggattaacgaagccctaataactacaatcctccatctgctcaaccacccaaagactcggcaatatgtgagagccgatgtggaactcgagagaatcctggctccctacacagactttcactaccggcacagtccagacacggctgaaggacagttgaaggaggatcgcgaggctcgtttcctggcctcaaagatgggaatcattgctacattccgatcttgggcgggcatcattaatctttgtaaacccggcaacagcggcatacaaagcctgatcggcgttctttgcataccaaacatggaaattcgtagaggccttttagaggtcttgtatgacatcttcagactgcccttgcccgtcgttacagaggaattcattgaagcactgctgtctgtagatccaggcagatttcaagattcatggcgcctgtctgacggattcgttgctgcggaagcaaagacaattctgccccatcgcgcccgctctcgacctgatcttatggataactacctggcactaatcctttcagccttcatccgtaatggtctgctcgaggggctggttgaagtgatcacaaatagtgatgatcacataagcgtccgagcaacgatccttctgggtgaacttctacatatggctaacacaatcttgccgcactcccattcccaccacctccattgcctgccaacacttatgaatatggctgccagctttgacataccaaaagagaagcgtcttagggcatctgccgctcttaattgcctcaaacgattccacgaaatgaaaaagcgcggcccgaaaccttacagcctccatttggatcacataatacagaaggccatagctacacaccaaaaaagagatcagtatttgcgggtgcagaaagacatcttcatcctgaaggacactgaagaggcccttctgatcaatctccgggacagccaggtgctgcagcacaaagagaatcttgaatggaactggaatctcatcgggactatcctgaaatggcctaacgtgaacctgaggaactacaaggacgaacaactgcatcgctttgtgcgccgcctgctgtatttttacaagccaagctcgaaactgtatgcaaacctggatttggactttgctaaggcaaagcaactcactgtcgtaggttgtcagttcacagagttcctgctcgaatctgaggaggatggacagggttaccttgaggacttggtgaaagacatcgtccagtggctgaacgccagtagcgggatgaagcccgaacggtcattacagaacaacgggcttttgaccactttaagtcagcattacttcctcttcatcgggactctcagctgccatccccatggggtgaaaatgctggagaagtgttcagtttttcagtgtctcctgaatctatgtagcttgaagaatcaggatcacctgctgaagctgacggtcagcagcctagactactcaagggacggcctggcgcgtgtgatactgtcgaaaattttgacagccgccacggatgcatgcaggctgtacgctacaaaacacctacgagtactattgagggccaatgtggagttcttcaacaactggggtatcgaactcctggtaactcagttgcatgacaagaataaaaccatctcctccgaagcactggatatactggacgaggcctgtgaggacaaagctaaccttcatgcactcattcagatgaagcccgctctatcccatctgggtgacaagggattgcttctgctgctgagatttttgtccattcccaaaggcttcagctatctaaatgagcggggatacgtggcgaagcagctggagaagtggcatcgggaatataactctaagtacgtggacctgattgaagaacagcttaacgaagccttgactacttaccggaagcccgtggatggagataactatgtccggcgtagtaaccagcgtctgcagcgtccacatgtttacctgccgatacatctgtacggtcaactggtacatcacaaaacaggctgtcatctgctcgaggtacagaacatcataacagaactctgccggaatgtcaggaccccagatctcgacaaatgggaggagatcaaaaaactcaaagcatctctatgggccttaggaaatataggttcttctaactggggcctcaatttattgcaagaggagaacgtgattcccgacattttaaaattggccaaacagtgtgaggtcctgtccataaggggaacgtgcgtgtacgtgctcggtctgattgccaaaactaagcagggctgcgacattctgaagtgtcacaactgggatgccgtgcggcacagccggaagcatctatggccagtggtccccgatgatgtggagcagctctgtaacgagctctcctctataccctccacgctcagccttaatagtgagtccacgtcctctcgccacaattccgaaagcgaaagtgtgcctagttccatgtttattctggaagatgacagattcggcagcagctcaacatcaacattctttctggatatcaacgaagacactgagcccacattctacgatcggagcgggccaattaaggataagaatagctttcccttcttcgccagctccaaactggtgaaaaacagaatattgaattccctcacactcccgaacaagaagcacagatctagtagcgatcctaaaggagggaagctgtcgagtgaaagcaagacctctaataggagaatccgtactttaacagagccatcggtggacttcaaccactccgacgactttactcccatctctaccgttcagaagacactgcaacttgaaaccagtttcatgggcaacaaacatattgaggacactggatcgaccccctctataggcgagaacgacctgaaattcactaaaaacttcggaaccgaaaaccaccgtgagaatacttctcgcgaacgtttagtggttgagtcttcaacctcgagtcatatgaaaattcgatcccaatcattcaatactgacaccactacctcgggaatctcaagcatgtctagcagcccctctcgagagaccgtgggagtggatgcgaccaccatggacaccgactgcggatccatgagcaccgtcgtttctacaaagacaataaaaacctctcactatctgactccccagtccaaccacctgtccctgtcaaagtctaacagtgtgtccctggttccgccaggcagctcccacaccttaccgcgtcgtgcacagagcctgaaggctccttccatagccacaatcaagtccctagctgactgtaacttcagctacacctcctccagggacgctttcgggtacgccaccctaaaaagactgcagcagcagagaatgcacccttcactcagccactccgaagcattggctagccccgccaaagatgtgctctttaccgatactattactatgaaggcaaattcttttgagagccgcctcactccatctcgaatcgattttaagaaaaaacacgttggaggtatccgcagcctgcggccaactatcaccaacaatttatttcgttttatgaaggccctcagctacgccagtttggataaggaggatttattatcccccattaatcaaaacaccctgcagagatcttcctccgtccgttctatggttagcagcgcaacttacggaggatctgatgactacattggtttggctctgccagtcgatattaatgacatcttccaagttaaagacatcccatattttcagaccaaaaacatacccccgcacgatgatcgtggtgcgcgagccttcgcgcacgatgccgggggtttaccaagcggcacagggggactggttaagaacagctttcatttactgcggcaacagatgagtttgacagagattatgaattcaattcactcagacgcgagccttttcctcgagtccacagaagacaccggcttgcaggagcataccgatgacaactgtctttattgcgtgtgtatcgagatcctcggctttcagcctagcaatcagctgtcagctatttgtagtcactccgactttcaggacattccttactccgattggtgcgagcaaaccatccacaatcccctagaggtcgtaccatcaaagttttcgggtatatccggatgttctgacggcgtgtcccaggagggaagcgcctcctctactaaatcaacagagcttctacttggagtgaaaaccatcccagatgacactcctatgtgtcggatcttactgcgaaaggaggttctgcgcctagtgatcaatctcagcagttcagtttctacgaaatgtcatgagaccggcctgttaacgattaaggagaagtatccgcagacatttgatgatatttgcctgtattctgaagtttcgcatctgctatcccattgtacttttaggctgccatgccgacggttcattcaggagcttttccaggatgtgcagttcttacaaatgcatgaagaggctgaagccgttcttgcgaccccacccaaacagccaatcgtggatacctcagccgaatcttag

SEQ ID NO: 23234 - DNA, 1761 bp, synthetic construct
  source 1..1761: mol_type = other DNA; note = Synthetic coding sequence
atgagcgccaccgtggtggacgccgtgaacgccgcccccctgagcggctccaaagagatgtctctggaggaacctaaaaagatgactcgcgaagattggcgcaaaaaaaaggagctggaggagcagagaaaactgggcaacgctccggccgaggtagatgaagagggcaaggatattaacccccatatacctcaatacatcagctcagtgccctggtacatagatcctagcaaacggcctaccctcaaacatcagagaccccagccagagaagcagaaacagttttcctcttcaggggagtggtacaagaggggtgttaaagagaatagcatcatcaccaaatacaggaagggtgcttgtgagaattgcggcgccatgacccacaaaaagaaggactgttttgagcgccctcggcgtgtgggagcgaaatttacaggaaccaatattgcaccagacgagcacgtgcagccccagctgatgtttgactacgatggcaaaagagacaggtggaatggctacaatcctgaagagcatatgaaaatagtggaagagtatgctaaggtagacctcgctaaacgaactctaaaagcccaaaaactacaggaagagctcgctagtggtaagcttgtggagcaagcgaactctccaaagcaccagtggggcgaagaagagccgaacagtcaaatggaaaaagatcacaacagtgaagatgaagacgaggacaagtacgctgatgacatcgacatgccgggtcaaaatttcgactccaagcggcgcataacagtcaggaatctgcgcattagggaggatatcgctaaatacctgcggaatctagacccgaattcagcatattatgatccaaagacccgcgcaatgagggagaatccctacgccaacgctggcaaaaacccagatgaagtttcttacgcaggcgacaacttcgtaaggtacactggggacaccatttcaatggctcagactcagttgtttgcatgggaggcatatgataagggctctgaggtccatcttcaggccgacccaaccaagctggaacttctatataagagttttaaggtcaagaaggaggattttaaggagcagcaaaaagaaagcatcttggagaagtatggcggtcaggaacacctagacgccccccccgcggaactactgctagcccagacagaagattatgtcgaatattcaagacacggaactgtaattaaggggcaggagcgtgccgtggcctgttctaagtacgaggaggatgtcaagatccacaatcacacacacatctggggctcttactggaaggaaggcagatggggatataagtgttgccacagcttttttaagtattcctactgcacgggggaggccgggaaagagatcgtaaatagcgaggagtgtattattaatgaaatcacaggggaagagtcagtgaagaagccgcaaactctgatggagcttcaccaggagaagctcaaggaggagaaaaaaaaaaaaaaaaaaaagaagaaaaaacaccgaaaatcaagtagcgactcagacgatgaggaaaagaagcacgagaaactcaaaaaagcactgaatgccgaggaagcccggttgctgcatgtgaaagaaactatgcagatcgatgaacggaagcgaccctacaactccatgtacgaaaccagagagccaacggaagaggagatggaagcttaccgcatgaaacggcagaggccagacgacccaatggcatctttcctgggacagtag

SEQ ID NO: 23235 - DNA, 1185 bp, synthetic construct
  source 1..1185: mol_type = other DNA; note = Synthetic coding sequence
atggccctggaggtgggcgacatggaggacggccagctgagcgactccgactccgacatgacagttgccccttccgatcgacccttacagcttcccaaggtgctgggtggcgatagtgcaatgcgggccttccaaaatactgccacggcctgtgcacccgtcagtcactaccgagctgtcgaaagtgtggactcatcagaagagagctttagtgactcagacgacgatagttgtctgtggaagagaaaacggcagaagtgtttcaacccgcctccaaagcccgagccctttcagttcgggcagtcctcgcagaaacctcctgtggccggtggcaaaaagatcaacaacatctggggggcagtattgcaggaacagaatcaagatgctgtcgccactgaacttggcatactggggatggaggggacaatagacagatctcgtcagtccgaaacctacaattatctgctggccaaaaagctgagaaaggagtcacaggaacacaccaaggatctcgacaaggagcttgacgaatatatgcacggcggaaagaagatgggctcaaaggaagaggagaacggccaaggacatctgaagaggaaaaggcctgtcaaggatagacttggaaatcggcctgaaatgaattacaagggacgctacgagataaccgcggaggactctcaggaaaaagtggcagacgaaatctctttccggctccaagaaccaaaaaaagacctcattgccagggttgtgcggatcatcgggaacaagaaagctatagaactgcttatggagaccgctgaagtggagcaaaacggcggcctcttcatcatgaatggaagcagaaggaggacccccggcggggtatttctgaatctgctcaagaatacaccaagcatctctgaggagcagattaaggacatcttttacatcgagaatcagaaggagtatgaaaataaaaaggcagcaaggaaacgacggacacaagttctgggcaagaagatgaagcaggcaatcaaatcactgaacttccaggaagacgacgacacatcgagggagacattcgcctccgacacgaatgaagccctcgcctctttagacgaaagtcaggaggggcatgcagaggctaagctcgaagccgaagaagctattgaagtggatcatagccacgatcttgacattttctag

SEQ ID NO: 23236 - DNA, 789 bp, synthetic construct
  source 1..789: mol_type = other DNA; note = Synthetic coding sequence
atgttcctgttcagccggaagacccggacccccatcagcacctacagcgacagttaccgagcaccgaccagcattaaagaagtgtacaaggaccccccgctctgcgcgtgggaggcaaataagtttcttaccccgggacttacccacactatggaaaggcacgtggatcccgaagctcttcagaagatggccaagtgcgctgtccaggactacacttatcgaggctcaatttctggccatccctacctgcccgaaaagtactggttaagtcaggaggaggcagataaatgtagccctaattatttaggctctgactggtataacacttggagaatggagccttacaatagcagttgctgtaataaatacactacctacctgccccgactgccaaaggaagctcgcatggagaccgccgtcaggggcatgccactggaatgcccccccaggccggagagactgaacgcttatgaacgtgaggtaatggtaaacatgctgaacagtctaagcagaaatcaacagctcccccgaattacaccccgatgcggctgtgtggacccactaccgggtaggctcccattccacggttacgaatcagcctgtagtggaaggcactactgtctgagaggcatggattactacgcatcgggcgccccatgcacagatagacggctccggccttggtgccgcgagcaaccgacgatgtgcacgtccctgcgcgcccctgcacggaatgctgtgtgttgctacaattcacccgccgtcattctgcctatttcggagccttag

SEQ ID NO: 23237 - DNA, 4206 bp, synthetic construct
  source 1..4206: mol_type = other DNA; note = Synthetic coding sequence
atggaggagatccccgtgaaggtggccgtgcggatccggcccctgctgtgcaaggaggccctccacaaccatcaggtttgtgtgagagttattcctaacagccagcaggtgattatcgggcgggatagggtgttcactttcgatttcgttttcggcaaaaactctacacaggatgaggtttacaatacttgtattaagcccttagtgctctcacttatcgaaggatataacgccaccgtctttgcctacggccagaccggcagcggtaaaacgtacaccattgggggcggacatattgcaagtgtggtagaggggcagaagggcataattccaagggctatccaggaaatcttccaaagcattagcgagcatcccagtatcgattttaatgttaaagtttcttacattgaagtttacaaagaagacctccgggatctcctggagctcgagacctccatgaaggatcttcacattagggaagatgagaagggcaacactgttatcgtgggcgccaaggagtgccatgttgaaagcgcaggcgaggtgatgagcctcctcgagatgggtaatgccgcacgtcatacagggacaacccagatgaatgaacattctagccggagtcacgccattttcactatcagtatttgtcaggtccataagaacatggaggcggccgaggacggctcatggtattccccgcgccatatcgtgagtaaattccattttgtcgatcttgcaggtagtgagcgtgttactaagactggcaatactggggaaagatttaaggaaagcatccagattaatagcggcttgctggcactcggaaacgtcatttccgcccttggggatccacgccgcaagagttctcacatcccctaccgcgatgcaaaaatcacacggctgctcaaggacagcctaggaggaagtgctaagactgtgatgatcacttgtgtgtcccccagcagttccaattttgacgagtctctgaacagtttaaaatacgccaacagggcgagaaacattagaaataagcctacagttaatttttcaccagaaagcgatagaatagacgagatggaatttgagatcaagctcctacgtgaggccctgcagtctcagcaggctggggtgtcacaaacaacacagataaaccgggagggcagccccgacactaatcggatccactccctagaggaacaggtggcccagcttcagggagagtgtctcggatatcagtgttgcgtggaagaggccttcacttttcttgtcgacctgaaggacaccgtcagactgaacgagaagcaacaacataaactgcaggaatggttcaatatgattcaggaggtgaggaaggctgttctaacatctttccgggggattggcggtaccgcctcacttgaggagggccctcagcacgtaacggtgttacagttaaaaagagagctgaagaaatgtcagtgcgtcctcgccgccgatgaggtcgtgtttaaccagaaagaactggaggtgaaggagctgaaaaatcaggtccagatgatggtgcaggaaaataagggacacgccgtgagcctgaaggaggctcaaaaggtgaaccggctccagaacgaaaagataattgagcaacaattgcttgtggaccagctctcagaagagctcaccaaattgaacctctccgtgacaagctcggccaaagagaattgcggtgatgggcctgatgctaggatccctgaacgtcgaccctacacagtaccgttcgacacccatttaggccattacatttatattcccagtcggcaggactcacgaaaggtgcatacttccccacctatgtattccttggatcgtatattcgcaggattccgcacacgctctcaaatgttgctcgggcacatcgaggagcaggacaaggtgctccactgccagttttcagacaattctgatgacgaagaatccgaaggccaggagaagagcgggacacgttgtcgaagcagaagttggatccagaaaccagacagcgtttgcagcctcgtcgaattatcagacacccaggatgagacacagaaatccgatctcgaaaatgaggatttaaaaatcgactgcctgcaggaatcgcaggaactaaatctccagaaattaaaaaacagcgaaaggatcctcaccgaagcgaagcagaagatgcgggagctgaccattaatatcaaaatgaaggaagacctaatcaaagagctcattaaaactggcaatgacgccaagtccgtgtcgaaacagtactccctcaaggttaccaaactggagcacgatgcggagcaggcaaaggttgagctgatagagacgcagaaacaactgcaagaactggagaataaagatctgagcgatgtagctatgaaggttaagcttcagaaggaattccgtaaaaagatggacgctgccaagctgcgcgttcaggttctacaaaagaaacagcaggactccaaaaaacttgcatcattgtcaattcagaatgagaaacgagcaaacgagcttgaacagtctgttgaccatatgaaatatcagaagatccagctacaaaggaagctccgggaggaaaacgagaagagaaaacagctcgatgcggtcattaagcgcgaccagcagaagattaaggaaattcagttgaaaacgggtcaagaagaaggcctgaagcccaaggcagaggatctcgacgcctgcaatttgaaacgacggaagggttcatttggcagtatcgatcatctccagaaactcgacgaacagaaaaaatggttagatgaagaggtcgaaaaggtgcttaaccagaggcaggaacttgaagaactggaggccgacctgaaaaagcgggaagccattgtcagtaagaaagaagcgttactgcaggaaaaaagccacttggaaaacaagaagttgcgtagctcacaggctttaaacaccgattctctgaagattagtacaaggctgaatctcctggagcaggaactgtcggagaaaaacgtgcagctgcaaacttcgaccgccgaagaaaagactaaaatcagtgagcaggtggaagtgctgcagaaagagaaagatcagttacagaaacggagacataacgtagacgaaaagctgaaaaacggtcgcgtcctttcaccagaagaggaacatgtcctgttccagctagaagaaggaatcgaggcccttgaggctgcgattgaatatagaaatgagagcatccagaaccgtcagaagagcctgagggctagctttcacaatctgagcagaggggaggctaacgtgcttgaaaagctggcctgcctgtcgcccgttgagattagaaccattctctttcggtactttaataaggtggttaatctgcgtgaggccgaacggaagcaacagctctacaacgaggagatgaagatgaaggtgctggagcgggacaatatggtgcgcgaactggaatcagccctcgatcacctaaaactccaatgcgaccgccgcttaaccctccagcagaaggaacatgagcaaaaaatgcagttattgcttcaccacttcaaggagcaggacggggaggggatcatggagactttcaagacctacgaggataagatccagcagctggagaaggacctgtatttctataaaaagacctccagggatcataagaagaagctgaaggagcttgtgggggaggctattcgacggcagttggcaccatcagagtaccaggaggcaggtgacggggtgcttaagcccgaaggcgggggcatgcttagtgaggagctgaagtgggcaagtcggccagagtccatgaaactaagcggccgggagcgggagatggattcatctgccagctctctcaggacccagccgaatcctcaaaagttgtgggaagacattccagagctgccccccattcactcgtccttggctcctccctctggccacatgctcggaaatgagaataaaacggaaaccgatgacaatcagttcactaagtcacatagccgcttatccagccagattcaggtggtgggtaatgtcggacgtctgcatggcgtaactccagttaagttatgcaggaaggagttacggcaaatatctgctctcgagctgagcctgagacgcagcagtctcggagtgggcattgggtctatggccgccgactctattgaggtctctcggaagccacgcgatctaaagacttag

SEQ ID NO: 23238 - DNA, 768 bp, synthetic construct
  source 1..768: mol_type = other DNA; note = Synthetic coding sequence
atggtgaagggcgagaagggccccaagggcaagaagatcaccctgaaggttgcaagaaattgtattaagatcactttcgacggcaaaaagcgcctggatctatctaaaatggggataaccacatttcctaaatgtatactcagactgtctgacatggacgagctcgacctgagcaggaacttgattcggaaaatcccggattctatttcaaagtttcagaatctcaggtggctggacctgcactccaattacattgataaactgcccgaatctatcggtcaaatgacatctctgctttatttaaacgtctccaataaccgcttgaccagtaatgggctgccagtggaactgaaacagttgaagaatatcagagccgtgaaccttggtctgaaccacctggactccgtgcctaccaccctcggcgctttaaaagaactccacgaagtgggtctgcacgataatttactgaataatatcccagtctccattagcaagcttccgaaactcaagaagctgaacattaaacgcaatcctttccccaagcccggcgaatctgaaattttcatcgactccatacgacgattggaaaacctttacgtcgtggaagagaaagatttatgcgccgcctgtctgagaaaatgtcagaatgctcgcgacaatctgaatagaataaagaacatggccaccacgacacctcgaaaaaccattttcccaaacctgattagccccaactctatggcgaaagatagttgggaggactggcggtag

SEQ ID NO: 23239 - DNA, 645 bp, synthetic construct
  source 1..645: mol_type = other DNA; note = Synthetic coding sequence
atgggccggcggcccgcccggtgctaccggtactgcaagaacaagccgtatccgaagtcccgcttctgcagaggggtgccagacgcaaaaattcgcatcttcgacttgggccgaaagaaggccaaggtggacgagttcccactgggcgggcacatggttagtgatgaatatgagcagctgagcagtgaggccctggaagctgcccgtatctgtgccaataaatacatggtgaagtcctgtggaagagatgggttccacatgcgagtaagacttcatcctttccacgttatccggattaataagatgctcagctgcgcaggggcagacagactccagactgggatgcgaggcgcctttggcaaacctcaaggtaccgtggctagggttcatattggccaggttatcatgtccattcggacaaagctgcagaatgaggaacacgtgattgaggcactccgcagggcgaagttcaagtttcctggcaggcaaaagatccatataagtaaaaagtggggatttacgaagttcaatgcagacgagttcgaagatatggtcgctaagaaatgcttgattcccgacggctgtggcgtcaagtacgtgccgtctcacggtcccttggacaagtggcgcgtgttgcactcttag

SEQ ID NO: 23240 - DNA, 3231 bp, synthetic construct
  source 1..3231: mol_type = other DNA; note = Synthetic coding sequence
atgaagagccggttcagcaccatcgacctgcgggccgtgctggccgaactgaatgcgtccctactcggcatgagagtaaataatgtatatgatgtggacaataagacttatttgattagactccagaagccagatttcaaagctactctgctactcgagagcggtatcagaatccataccacagagttcgagtggcctaagaacatgatgcctagttctttcgcgatgaagtgccgcaagcatctcaagagccggagactcgtgagcgctaaacagctgggagtggaccggatcgttgactttcagtttgggtctgatgaagccgcctatcacttgattatcgaattatatgacaggggtaacatcgtactgaccgactacgaatacgttatcctcaatatacttcgcttcaggactgatgaggctgatgacgtgaagttcgctgtgcgtgagcgctatccactagaccatgctagggcagccgagccacttctcactttagaacgccttacagagattgtagccagcgctccaaaaggcgagcttctgaaaagggttcttaatccccttcttccctacgggccggcacttatcgagcactgcctgctggaaaatgggtttagcgggaatgtgaaggttgacgaaaagcttgagaccaaagatatagagaaggtcctcgtttccctgcagaaagccgaggattacatgaaaactacttccaatttcagcgggaaaggctatattatccagaagcgagaaatcaaaccttccctggaggccgacaagccagtcgaagatatactcacctacgaggaatttcacccgtttctgttcagccagcattcacagtgcccttacattgagttcgagtccttcgataaagccgtggacgagttctattccaaaatcgagggccaaaagatagacttgaaagccttacagcaggaaaaacaggccctgaagaagctcgacaacgtgcggaaagatcacgaaaatcgcctcgaagctcttcagcaggcacaggagatagataagctgaaaggggagctcatcgagatgaacctccaaattgtcgaccgggccattcaagtggtgcggtccgctttagccaaccagattgattggaccgagattggactcatcgttaaagaagcccaggcccaaggtgaccccgttgccagcgcaatcaaggaattaaaactgcagaccaatcacgtaacgatgctcctgcgcaacccctacctgctttcagaagaggaagatgacgatgtcgacggtgacgtgaacgtcgaaaagaatgaaacggagccaccaaagggaaagaagaagaaacagaagaataagcaactgcaaaagcctcagaagaacaagccgctcctagtcgacgtcgacctgtcgctgagtgcgtatgctaacgcgaagaagtattacgaccataagcgctacgctgccaagaaaactcagaagaccgtagaggccgcagagaaagcttttaaaagcgcagagaaaaagactaagcagacactgaaggaggtccaaacagttactagtattcagaaagccaggaaggtgtactggtttgagaaattcctctggttcatttcttcagagaattacctgattattggaggacgagaccagcaacagaatgaaatcattgtgaaacggtatctcaccccgggcgatatctatgtgcacgccgaccttcacggagccacatcatgcgtgataaagaaccccacgggagaacctattcccccgcggaccttgaccgaggccgggacgatggccctgtgctatagtgccgcatgggacgctagggttattaccagtgcttggtgggtgtatcaccatcaggtaagcaagactgccccaactggggaatatttgactaccggatcattcatgatacgggggaagaagaactttcttcctcctagctatttgatgatgggtttttctttcctgttcaaagtcgacgagtcctgtgtgtggcggcaccagggggagcgcaaggtgagagtgcaggacgaggacatggagacgttggcaagttgtacatccgagctgattagtgaagaaatggagcagctagatggtggtgatacatccagtgacgaagacaaggaggagcacgagactccagtcgaggtcgaacttatgacacaggtggaccaggaggacatcactctgcagtccgggcgcgacgagctcaatgaggagctgattcaggaagaaagttcagaggatgagggcgaatacgaggaagttagaaaggaccaggatagtgttggcgaaatgaaagacgagggcgaagagaccctcaattaccctgacactactatcgatctgagtcacctgcagccccaaagaagcattcaaaagctcgccagcaaggaagagtcttctaattcgagcgacagcaagtcccaaagtagaaggcatctgagtgcaaaggagcggagggagatgaagaaaaagaagctcccatcagactccggagaccttgaggccctcgagggcaaagacaaggagaaagaaagcacagtacacatcgaaacacaccagaatacctctaaaaacgtcgccgccgtacagcccatgaaacggggacagaagagcaaaatgaaaaagatgaaggagaaatataaggatcaagacgaagaggacagggaactcatcatgaaactgctgggcagcgccggctcaaataaagaggagaagggtaaaaagggtaaaaaagggaagaccaaggatgaaccagtcaagaagcagccacagaaaccacgcgggggacaacgcgtgtccgacaacatcaagaaagagactccctttttagaagtgatcacccatgaactccaggacttcgctgtagacgatccgcacgacgacaaggaagagcaggacctggaccaacaggggaacgaggaaaacttgttcgactccctgaccggacaaccacacccagaagacgttctgttattcgccatcccgatatgcgctccgtacactactatgacgaattacaagtacaaagtgaagctcactcccggtgtccagaagaaaggcaaggcggctaaaaccgcactgaactccttcatgcacagcaaggaagctaccgcccgtgagaaggacctgttccggtctgtgaaggacaccgacttgagcaggaatatccctggtaaagtgaaggtgagtgctccaaatcttctcaacgttaaacgaaaatag

SEQ ID NO: 23241 - DNA, 963 bp, synthetic construct
  source 1..963: mol_type = other DNA; note = Synthetic coding sequence
atgggcgacatccccgccgtgggcctgagcagctggaaggccagcccgggtaaggtcaccgaagctgttaaggaggccatcgacgctggttacagacattttgactgcgcctacttttaccataatgagcgggaggtgggtgccggaatccggtgtaagataaaagagggggcagtgcgccgagaggatttgttcatagccacaaaactctggtgtacctgtcacaaaaagagccttgtggagactgcttgtcggaaatcgctgaaggcattgaagctcaattacctggatctttacctgattcattggcccatgggatttaaaccaccacacccagagtggattatgtcttgtagcgagctgagtttttgtctgagccacccgcgcgtgcaagacttgcccctcgacgagtctaacatggtaatcccctctgataccgactttctggacacatgggaagcaatggaagacctagtgatcacaggattagtcaaaaatattggagtgagtaatttcaatcacgaacagctggagcgcctgttgaataagcccggcctccggttcaagcccctcactaatcagatcgaatgccatccatacttgactcagaagaacctgatttccttttgccaatccagagatgtctcggtgactgcttaccgaccattgggaggcagttgcgagggggtggatttaatagataatccagtaatcaagcgtattgctaaggaacacggaaagtcccccgctcagattcttatccgattccagatccagcggaacgtgatcgttatccctggaagtatcacccccagccacatcaaagagaacatccaagttttcgatttcgagctgacccaacacgacatggacaatatcttatccctcaatagaaatctcagactggccatgttccctatcacaaaaaatcataaagattacccatttcatatagagtattag

SEQ ID NO: 23242 - DNA, 1239 bp, synthetic construct
  source 1..1239: mol_type = other DNA; note = Synthetic coding sequence
atgagcggctaccagcggcggcccggcgccacccccctgagccgggctcggtcactggccatccctgacgctcccgctttttatgaacggagatcttgcttgccccaactaaattgcgaaaggccacacggccgggacctggattctccattctttggtatccggcccgccttcatgtgctacgttccatcacctgtgctcgctagtgtgggagatactgacgatcgatttgaggacctggaggaagcaaaccctttctccttccgggaatttttaaaaaccaagaacctgggactgtctaaggaagatccagcgagccgcatctacgcaaaggaagcttctaggcattcgcttgggctcgaccacaatagcccaccctctcagacaggagggtatgggctcgagtatcaacagccattcttcgaggatcccacaggcgccggtgatctacttgacgaggaagaggatgaggacaccggctggagtggggcgtacctgcccagtgcaatcgaacaaacgcaccccgaacgagttcctgctggcacttcaccctgctctacctacttgagttttttcagcacaccttctgagctggccggcccagaaagcttgccctcatgggcgctcagtgatacagactcccgggtgtctcccgcgtctccagcagggtcacccagtgcagactttgccgtccacggcgaatccttaggggaccggcatctcaggacgctccagatcagctacgatgccctgaaagatgagaatagcaagttgcgaagaaagctgaatgaagttcagtctttttctgaagctcagactgaaatggtgcgaactttagagcggaaactggaggctaaaatgatcaaagaagaatctgactaccatgaccttgagtctgttgtgcagcaggtggagcagaatctggaactcatgacaaaacgcgcagtcaaagccgaaaaccacgtggtgaaactcaaacaggagatcagcctgctgcaggcccaggtgtcaaatttccagcgcgagaatgaggcactccggtgcggtcagggcgcaagcctgaccgttgtgaaacagaatgcagatgtggccttgcagaacctgcgcgtggtcatgaatagtgcacaggcctcaatcaagcaacttgtcagcggtgccgagactctgaaccttgtcgccgagattttgaagtcgatcgacagaatcagcgaagtgaaggacgaagaagaagacagttag

SEQ ID NO: 23243 - DNA, 1440 bp, synthetic construct
  source 1..1440: mol_type = other DNA; note = Synthetic coding sequence
atggacgccaccatcgccccccaccggatcccccccgagatgccccaatatggcgaggaaaaccacatattcgaattgatgcagaatatgctagagcagttactgattcatcaaccagaggatcctattccgttcatgatacagcacctgcaccgggacaatgataacgttccccgcattgtcattctgggaccccccgcatcgggaaagacaactatcgcaatgtggctgtgtaaacaccttaacagcagcctactgacccttgagaatctgattctgaatgagttctcctacacggctaccgaggcccggaggctgtatctgcagagaaagacagtgccaagtgcattacttgttcagctgatccaggagcgccttgctgaggaagattgtataaaacagggctggatcttagatggaatccccgagacaagggagcaagcccttaggatccagaccctcgggatcactccgcgccacgttattgtcctgagcgctccagacaccgtgcttattgaacgcaatttgggaaagcggattgaccctcagactggcgaaatatatcataccacctttgattggccccccgagtccgagatccagaaccgcctgatggtccccgaggatatcagcgaactcgagacagcccagaagttgctggaatatcaccggaacatcgtccgagtgattccctcctatccaaagattctgaaagtaatcagtgcagatcagccatgcgttgatgtcttttatcaggctctgacatacgtccaaagcaaccataggaccaatgcaccattcaccccgcgggtccttctgctgggacctgtaggaagcggcaagagtttgcaggcagcgctcctggctcagaaatataggttggtgaacgtctgctgcgggcagctgctgaaagaagcagtggcagaccgaacaaccttcggtgagctcatccagcccttcttcgaaaaggagatggccgttcctgacagtttattgatgaaagtgttatcacaacggctcgatcagcaggattgtattcaaaaaggatgggtcctccacggggtgccgcgcgatctcgaccaagctcacctcctgaaccgcttgggatataacccgaatcgcgttttttttctgaacgttccatttgactccataatggaaaggcttacattacgccgaatagatcctgtgacaggggaacggtaccacctgatgtacaaaccgccccccaccatggagatccaggcgagattactgcagaatccaaaggatgctgaggaacaggtcaagctgaagatggacctcttctaccgaaactcagccgatctggaacagctctacggaagcgccatcacacttaacggggaccaggacccctacacggtgttcgagtacatcgaaagcggcattataaacccattgccaaagaaaataccctag

SEQ ID NO: 23244 - DNA, 432 bp, synthetic construct
  source 1..432: mol_type = other DNA; note = Synthetic coding sequence
atggcccacgagatgatcggcacccagatcgtgaccgagcggctggtcgcactgttagagtcagggacagaaaaagtactactgatcgactctaggcctttcgttgagtacaacacatcacatatcctggaagctatcaatattaactgttccaagctgatgaaaaggcgacttcagcaggataaggtcctgatcaccgagctcatccagcattccgctaagcacaaggtagacatcgactgttcacagaaagtggttgtgtacgatcagtcctctcaagacgtggcttcgttaagctctgactgctttctcacagtcttgttggggaaacttgaaaaatcttttaatagcgtgcacctgctcgccggtgctgacgccgccgaatgggattggctttgcgtgaaatgccagcagtacctgtccaaagcctag

SEQ ID NO: 23245 - DNA, 1191 bp, synthetic construct
  source 1..1191: mol_type = other DNA; note = Synthetic coding sequence
atggccagcctgagccgggccctgcgggtggccgccgcccaccccaggcagagcccaactagaggaatgggcccctgtaatctgtcatctgccgccgggccaaccgcggagaagagtgtgccttaccagcgcaccttgaaggaaggacaggggacatctgtcgtggctcagggtccaagtcgacctttaccatctactgctaacgtggttgtaattgggggaggatcccttggatgtcagacactgtatcatctggcgaagctgggtatgtccggcgctgtcctgttggagcgagagcggctgaccagtggtacaacttggcacacagctgggctgctctggcagctgcgacccagcgatgtcgaagtagaattgctggcgcacacccgccgcgtggtgtctcgcgaactggaagaggagactggtttgcacaccggctggatccagaatgggggtctgttcatcgcatcaaataggcagcggctggacgagtacaagagattgatgtccttaggaaaagcttatggtgtggagagtcatgtcctctcaccggccgagacaaagacactatatcctctgatgaatgttgatgacctgtacggcacactttatgtccctcatgacgggaccatggaccccgcaggaacttgcaccactttggcgagagccgcttccgcgaggggcgctcaggtcattgaaaattgccccgtcacaggcatccgggtgtggacggatgacttcggtgtacgacgggtggctggggtggaaacgcagcatggttcaattcagaccccctgtgtcgttaactgtgccggcgtgtgggcttcagcagtgggcagaatggctggcgtgaaggtgccactggtagccatgcaccatgcatatgtggtaactgagagaattgagggaatccagagcttcaccttgttgccgactctcgagtacagtggcaccgtctcagcccactgtaatcttaggcttccgggttcttcaaactcaagggcttctgcaagtcacgttgcaggcatcaaatgtgctaggcatcacacccgcttaatattcttttgtatattggtggagactgaattccaccacgtcgcaaaggctggactcgagctgctcagttccggcaacccaccaatatcggacttccagtccgcccgaattacaggagtaagtcaccatgcctag

SEQ ID NO: 23246 - DNA, 4416 bp, synthetic construct
  source 1..4416: mol_type = other DNA; note = Synthetic coding sequence
atggagcccgagcccgtggaggactgcgtgcagagcaccctggccgccctatatcctccctttgaagccactgcacccacactgttgggccaggtcttccaggtggtggagcgcacatatcgagaggatgccctgagatacacattggacttcctggtgcccgcaaagcatctgctggctaaggtccagcaggaagcttgcgctcagtactccggctttctgttctttcatgagggttggccattgtgcttgcatgagcaagtcgtggttcagctggccgcacttccatggcagctcctgcgccctggtgatttttatctccaggttgtccctagcgcggcacaagcgccacggcttgcactcaagtgcctggcccccgggggaggccgagtgcaggaggttccagtacccaatgaagcctgtgcatatttattcacacccgaatggctgcagggcattaacaaggatcgcccaacaggtcggctgtctacatgtcttctgagcgccccctctggcatacagcgccttccatgggcagagctcatctgtcccaggttcgtccacaaagaggggctcatggtcggccaccagccttccactctgccccccgagttacctagcgggccgcctggtctgcctagcccacctctgccagaggaggctttgggcacacgctcgcccggtgacggccataacgcaccagtggagggcccagagggagaatatgtagagctgctggaagtgacgctgcccgttaggggctcccctacagatgccgaaggttctcctgggttgtcccgggtacgtaccgtgccaaccaggaagggggctggcggcaagggccgacatcgacgccatcgagcgtggatgcaccagaaggggttagggcctagagggcaggacggtgcacgccctccgggggaaggatcaagtacaggcgccagtcccgagtccccacccggcgccgaagctgtgccagaagcagcagtgctggaagtgagtgagcctccagccgaggccgttggggaggcctcgggatcatgccctcttcggcccggcgagttacggggtggcggcggtggaggccagggagccgaagggccgcctggcactccacgcaggaccgggaagggcaatcgacgtaagaagcgggctgcaggccgaggggctctctcccgggggggggattccgcccccctttcgccaggagacaaagaggacgcaagccatcaggaggcactcggaaacctaccgagtccatctgagcataaacttccagaatgtcacctggtgaaagaggaatatgaagggagtggcaaacccgaatctgagccaaaggagctcaaaacagcaggcgagaaagagcctcaactcagcgaggcctgcgggccgacagaggagggggcaggggagcgggagttagaaggccctggtctactttgcatggccggacacactggtcctgaaggaccccttagtgatacccccacccctcctctggagacagtacaggaagggaaaggcgacaatatcccagaagaggccctggcagtttctgtatcggaccacccagacgtggcctgggatctcatggcaagcggatttctaatcctcaccgggggcgttgaccaatctggaagggcattgctgacgattacaccgccatgtcctcccgaggagccccctccttctcgggatacacttaataccacccttcattacttgcactctctgttgcgacctgatttgcagaccttgggattgagcgtgttgctagatcttcggcaggccccgcctctcccaccagcactaattcccgcactctcccagttacaagactcaggagacccccctctggttcagagactactcatcctgatccatgacgacctccctaccgagctgtgcggcttccaaggggccgaggtgctgagtgaaaatgatctcaagcgggtggcaaagccagaggagctccagtgggagctcggcggtcatcgtgatccatcaccctctcactgggtagagatacaccaagaggtggtgagactgtgtcgcctctgccagggcgtgctggggtcagtgcgacaggccatcgaagaactggagggggccgccgaacctgaggaggaggaggctgtcgggatgcccaagccactgcagaaggtattggccgaccctcggctcaccgccctgcaaagggacggcggcgctatccttatgagactgcggtctacaccctcctctaagttggaaggtcaaggacctgccacgctgtaccaagaagtggacgaagcgatacaccagctggtgcgcctttctaatctgcatgtacaacagcaggagcagcgccagtgtctgcggcgcctgcagcaagtcctgcagtggctctcgggcccaggtgaggagcaactggcttcattcgccatgcctggagacaccctcagcgcattgcaggagaccgagctgcgctttagagcgttcagcgcagaagtgcaggagcggctggcccaggctagagaggcactggctttagaagagaatgccaccagccagaaagtgttagatatattcgagcaaaggcttgaacaagtcgaatccggcctgcatagagccctgcggcttcaacggttttttcagcaggcccatgagtgggtcgatgagggcttcgcccggctggctggggctggacccggacgcgaggctgtgctagcagccctcgcattgcggcgtgctccagaaccttccgcagggacctttcaagaaatgagagccctggcactggacctgggcagtccagctgcacttcgcgagtggggtagatgtcaggcccggtgtcaggaactcgagcgccgcattcagcagcatgtgggcgaagaggcatctcccagaggttatcgcagacgtcgcgccgacggcgcatcgtcgggaggagcccagtgggggcctcggtctccatccccaagcctctcctccctgctcctcccctctagtcctgggccacgtcccgctccttcccactgcagccttgccccgtgtggagaggattacgaagaggagggccctgaactagctcccgaggcagagggaaggccacccagggctgtactgatccgggggctcgaggtcacgagcaccgaggtggtggacaggacctgcagcccccgcgagcacgttctgctgggacgtgcaaggggtcccgatggcccttggggtgtaggaacgccaaggatggaaaggaaacgtagtatcagcgctcagcaacgattggtgtcagagcttatagcctgcgaacaagattacgtcgccaccctgagtgagcccgtgccgccaccaggccctgaattaacccccgaacttagaggaacttgggctgcggccttaagcgccagagagcggctcaggtctttccatcggacgcatttcctacgagaactacaggggtgcgctacccaccctctgcgtattggcgcttgcttcctgcgccatggggatcagttttcgctgtacgcccagtatgtcaaacatcggcacaagctcgagaacggtctcgctgccctatcacccctcagcaagggctcaatggaagccggcccgtatcttccgcgagcgctgcagcaaccactggagcaactgaccagatacggtcgactgcttgaggagctgctccgcgaagccggcccagaactgagctctgagtgccgagccctcggtgccgctgtgcagctactgcgagagcaggaggccaggggccgggatctccttgccgttgaagcagtgcggggatgcgaaattgaccttaaggagcagggtcagctgttacaccgtgaccccttcactgtgatctgcgggaggaagaagtgtttgcggcatgtcttcctctttgaacatctacttttattctccaaattgaaaggcccagagggcggatctgaaatgtttgtgtacaagcaggcgtttaaaacggctgacatgggcctgaccgagaacattggcgactcgggtctgtgcttcgagttatggttcagacggcggcgcgcccgggaagcctatacattgcaagccaccagccccgaaatcaaactcaagtggacatcaagtatagctcagttgctctggcgtcaggctgcccacaacaaggagttaagggtgcagcagatggtctctatgggtatagggaataaaccttttctggatatcaaggctctcggtgagcggacactgtccgcgctgctcactgggagagcccctgagacattggattcaagtggcgatgtgagccccggcccacgaaatagtcccagcctacagcccccccatccagggtccagcactcctacattagcctcccggggtattttaggcctgagccgccagtcgcacgcacgagccctgagtgaccctactacacctctctag

SEQ ID NO: 23247 - DNA, 4560 bp, synthetic construct
  source 1..4560: mol_type = other DNA; note = Synthetic coding sequence
atggagcccgagcccgtggaggactgcgtgcagagcaccctggccgccctgtaccccccgttcgaggctaccgcacctacattgctgggccaagtgttccaagtcgtggagcggacatatcgagaggatgctttaagatatacactggattttcttgtccccgctaaacatctgttggcaaaggtgcagcaagaagcctgtgcccagtactccggcttcttgttctttcacgagggctggccactgtgcctgcatgaacaggtggtcgttcagcttgccgcgctcccatggcagctgctgcgaccgggagatttctacctgcaagtggtcccttccgcagcacaggcgccacgcctcgcgctgaagtgtcttgcacctggagggggaagagtgcaggaagtgcctgtgccaaatgaggcctgtgcctatctttttacccccgagtggctccaggggatcaacaaagaccgccctacagggaggttgtccacatgcctcctttcagccccgtccggcatccaaaggttaccgtgggctgaactgatttgcccccggtttgtacacaaagagggcctaatggtcggccatcagccaagcacgttgccgccggagctgccctccggccccccgggtctgccttcacccccacttcccgaggaagccctggggacaagatctccgggcgacggacacaatgcaccagtggaggggcctgagggcgagtatgtggagctgctggaggtgaccctacccgttcgggggagcccaactgatgctgaagggtctcccggactctctagggttcggacagtacccacccgaaaaggcgccggtggcaaaggcaggcatcgtcggcatagggcctggatgcaccagaaaggactcgggcctaggggtcaagatggcgctcgaccacccggggagggcagttctacaggggcttcccccgagtcccctcctggagcggaggcagttcccgaagccgccgtgctggaggtgtccgaaccacccgccgaagccgtgggggaggcttcgggaagttgcccattgcgccccggagagttgagggggggtgggggaggcggtcagggagcagaagggcctccagggacaccaaggagaacgggaaagggaaacagaaggaagaaaagggcagctggcagaggcgccctgagtagagggggcgactccgctcccttaagccccggagataaggaagacgcctcacaccaggaggccctgggaaacctcccttccccatctgaacataaacttcccgaatgccacctggttaaagaagaatatgagggctcaggcaaaccggaatccgaacccaaggaactcaaaactgcaggagaaaaagagccacagctgtccgaagcctgcggtcctacagaagaaggggccggtgagcgggagctggagggacccggattactctgtatggcaggccataccggccccgaggggcctctctcagatacccctacccccccgctcgagacagtacaggaaggcaagggcgataatattccggaggaagcactcgccgtatcggttagcgatcaccccgatgtggcttgggacttgatggcctctgggtttttgatcctaactggaggggtagaccagagcgggcgggccctgctcaccattacccccccatgtcctccagaggaaccaccacccagccgggatactctaaatacaactttacactacttgcacagccttcttcgccccgatctgcagactctgggcctcagtgtcctgctggacttgcggcaggccccacctttaccgcctgcattaattcccgccctgagccagcttcaagacagcggggacccaccattagtgcaaaggctactcatactgatacacgacgatctccccaccgagctttgtggattccaaggggctgaggtgttgtcggagaacgatctgaagcgcgtggccaagcccgaagaactgcagtgggaactgggagggcatcgggaccctagcccctcccactgggtagaaattcaccaggaggtggtgcggctctgccgcttgtgtcagggcgtgctgggtagcgtgcggcaggcaatagaggaattagagggagctgctgaacccgaggaagaagaggctgtgggcatgccaaagccgctgcagaaagtattggccgacccacgcttgactgccttgcaacgagatggcggggcgatacttatgcggctccgatccacaccatcttcaaagttagagggccagggccctgctactctctatcaggaggtggacgaagccatccatcaactggtccggctctccaacctgcacgtgcaacagcaggagcagaggcagtgtttaaggcgcctacagcaagtactccagtggctctccggccccggggaggagcagctagctagtttcgcaatgcctggagacacgctgagcgcactgcaggaaacggagctgagattccgggcatttagtgctgaagttcaggagcgccttgcccaggcccgggaggccttggcattggaggagaatgcaacttctcagaaagttctagatattttcgagcagagactcgagcaagtcgaatctggcttgcacagagcgttgcgccttcagcggtttttccaacaagcccacgaatgggtggacgaggggttcgcacgactggccggcgcggggcctgggcgcgaagctgtgctcgccgccctggcactccgccgggcccctgagcccagcgctggtactttccaagagatgagggctttagctctggacctgggtagtcctgccgctcttcgtgaatgggggcgttgccaagctagatgccaggagctcgaacgacgcattcaacagcacgtgggcgaagaagcatccccccgtggctaccggcgccgacgggcggatggagcctccagtggcggggcccagtggggtccacgctcacccagtccgtctctcagctctctgcttctgccaagctcaccgggaccccgcccagctccaagtcactgctccctggcaccatgcggggaagactacgaggaagaaggtccagagctggcccctgaagccgaaggcaggcccccgagggcagtgttgatcagagggctagaagtcacaagcaccgaagtcgtcgaccgaacatgctcgccacgcgaacacgtgctgctggggcgcgccagaggaccagatggaccatggggcgtcgggacaccaaggatggaacgcaaaaggagcatttcagcacagcaaaggctagtgagcgagctgattgcatgtgaacaggactatgttgctacactgtctgagcccgtacccccaccgggtccagaactcacgcctgaactcaggggaacctgggctgccgccctctccgcccgggaacggctgcgctcctttcatagaactcatttccttcgtgaactgcagggatgcgcaactcacccgttgaggataggagcctgttttctgaggcacggggatcaattcagtctttacgcacagtatgtcaaacaccgccataagctggaaaacggtttggccgccttatcccctctaagtaagggctctatggaagctggtccctatcttccgagggcccttcagcagccacttgagcagctcacaaggtacgggcgcctactggaggaactgctccgggaggccggtcccgagctgtcctccgaatgtcgcgcccttggagctgctgtgcagctacttcgcgaacaagaggcacgtggtcgcgacctgttagcagtagaggctgtcaggggctgcgaaatagacctgaaagagcaaggccagctgttgcacagagacccgtttaccgtgatctgcgggcgcaagaaatgcctcaggcacgttttcttgtttgaacatctcctgctgttttcaaaactgaagggaccagagggtggctctgagatgtttgtctacaaacaggcatttaagacagccgacatggggctgaccgagaacattggagacagcggcctctgcttcgagctctggttcaggaggagaagggctcgagaagcgtacacactgcaggccacttcccccgagattaaactgaagtggactagcagcatcgcacagctcctttggcgccaagccgctcacaataaggagttgcgagttcaacaaatggtgtccatgggcatcgggaacaagccgttcctcgacatcaaagcgctgggcgagcgcacactgagtgccctcctgacaggaagagccgccagaacacgtgcatccgtggcggttagtagcttcgagcacgcaggcccgtctctgccaggattgtcccctggcgcctgttcgctgcctgctcgcgttgaagaggaggcttgggaccttgatgtgaaacaaatttcactagctcccgagaccctcgattcttcgggggacgtttcaccaggaccccgcaatagccccagtctgcagcctccccacccagggtcctcgacaccaaccctagcatcaagggggatcctgggtctatcccgccagagccacgctcgggcactctccgatcctacgacccccctgtag

SEQ ID NO: 23248 - DNA, 2709 bp, synthetic construct
  source 1..2709: mol_type = other DNA; note = Synthetic coding sequence
atgttccccgccctggagacccacctgaagcagaccatccccgacccctacgaagattttatgtatagacacctccagtactacggatacttcaaagcccagcgcggctctctacccaacagcgccactcatcagcatgtgagaaagaataatcctcagtgtctacttaacgggagtcttggtgaaaaagatgatcttattccggacactcttcagaaggaaaagcttctgtggccgatctcactcagttctgccgtccaccgacagatcgaggccattaacagggatttccactcctgtttgggatggatgcagtggagaggactgagtagcttgcagcctccaccgcccaggttcaaggatagtccggcatcagcgtttcgggtcgctggtatcacggactcgcatatgctgtcactgcctcacctgcgatcgaggcaactcctgtacgacgagttggatgaagtaaatcccagacttcgggaacctcaggaactttttagcattttaagcacaaagaggcccctgcaggctcccaggtggccgattgagtgcgaagtcatcaaagaaaacatccaccatatcgagtgggcacccccccagcccgagtacttttaccaaccaaaaggcaacgagaaagtaccagaaatcgtcggcgagaaaaagggaacagtagtgtaccagctcgattctgtgcccatcgagggaagctattttaccagctctcgagtcggcggaaagcgcggaatcgttaaggaactggctgtcaccctccaggggcctgaagacaatacactgctcttcgagtctcgcttcgaaagcggcaaccttcagaaggctgtccgcgtggatacttacgagtacgagttgacacttaggactgacctatatacgaacaagcatacccagtggttctacttcagagtacaaaatactcgaaaggacgctacgtatcgattcaccatcgttaatcttctaaagcccaagtccctgtacacagtgggcatgaagcccctgttgtatagtcagttagacgcaaatacaagaaatatcgggtggagacgcgagggcaatgaaatcaaatattataaaaacaatactgacgacggacagcaaccattctactgtctcacttggacgatccaattcccctatgaccaggacacatgcttcttcgctcatttttacccctacacatacacagacctccagtgttatttactgagcgtggctaataatccgattcagtcccagttttgcaagctgcagactctctgtcgttccctggccggtaatactgtctacctgttgaccataactaatccctctcagaccccccaggaagcggccgctaaaaaggcagtggtcctgtccgcacgggttcaccccggagagagcaacggctcatgggtgatgaaggggtttctcgactttattctatccaatagtcctgatgcacagctactcagagacatttttgtgtttaaggttctccctatgctaaatcctgatggggtgatagttggtaattaccgatgctcccttgctggtcgtgacctgaaccgacactataaaacaatcctgaaagaaagctttccttgtatctggtacacccggaacatgataaaaaggctcctcgaagagagggaggtcctcttatactgcgactttcatgggcatagccgcaaaaataatatattcctttatggctgcaacaataacaatcgcaaatactggctccatgagcgtgtttttcctcttatgctatgcaaaaatgccccggacaagttctcctttcatagttgtaatttcaaagtacaaaaatgtaaagaagggactggccgtgtcgtaatgtggaggatgggaatcctgaactcctacactatggagagtactttcgggggttcaactctgggtaacaaacgggatactcatttcactattgaagacttaaaatccctcgggtaccacgtttgtgacacgctactagatttctgtgaccccgatcagatgaaatttacccaatgcttggccgagctgaaggaactgctgagacaggaaatacataaaaaatttcacgaacttgggcaggacgtcgatttagagggctcctggtctgacatcagcctgtctgacatcgagtcttccacgagcggcagtgactcctcgcttagtgacggactgcccgttcacttggctaatatcgcggacgaactgacacagaaaaagaagatgttcaagaaaaaaaaaaaaaagtccctgcagacaaggaagcagagaaacgagcagtaccagaagaaaaacttgatgcagaagctcaagctaaccgaagatacttcagagaaggccggctttgcctccacactgcaaaagcagcccactttctttaaaaactccgagaactccagctttctgcctatgaagaacgaaaatccccgcctgaacgagacaaacttaaataggcgtgacaaggacactcctctggacccatccatggcaactctcattctgccaaagaataaaggccgcatgcagaacaagaagcctggctttacagtgtcttgcagtccaaagaggaccattaattcctcccaggagccagcccccggaatgaagcctaactggccaaggtcacgatatcccgctacaaaacgcggatgcgctgcaatggccgcatatccatcactgcacatctacacatacccttag

SEQ ID NO: 23249 - DNA, 3234 bp, synthetic construct
  source 1..3234: mol_type = other DNA; note = Synthetic coding sequence
atggaggtgcaggtgagccaggccagcctgggcttcgagctgacctcagtggaaaagagcctacgagagtggtcaaggcttagccgcgaggtgattgcatggctttgtccatcttctccgaatttcatcctgaacttcccacctcccccatctgccagctcggtcagcatggtgcagctgttctcaagcccgttcggctaccagtctccatcaggacactcagaagaggaaagggagggcaatatgaaaagtgcaaaaccacaggtcaaccactcccagcatggggagtctcagcgggccctgtccccactccagtctaccctctcctcagctgctagccccagccaggcctatgagacctacattgagaatgggctgatatgtttgaaacacaaaataagaaatatcgagaagaagaagctgaagctagaggattataaggaccggcttaagagcggggaacacttgaacccagaccagctcgaagctgttgaaaaatatgaagaggtgcttcataacctcgagttcgcgaaggaactccagaaaacattttcagggctgtctctcgacctgttaaaggctcagaagaaggcgcagcgtagggagcatatgctcaaacttgaggcagaaaaaaaaaaattaaggacgatcttgcaggtgcagtatgtgctacagaatctaacacaggaacatgtgcagaaagattttaaaggcggcctgaacggagccgtgtacctccctagcaaggaattggattatctgattaagttctccaagttaacttgtccagagcggaatgagagtcttagcgtggaggatcaaatggaacaatcatcactgtatttttgggacctgttagagggatccgagaaagcggtggtggggacgacgtacaagcacttgaaggatttgctttcaaagttgctcaatagcggatattttgagagcatcccagtacccaagaacgctaaggagaaggaggtcccattggaggaagagatgctgatacaatctgagaagaaaactcagcttagcaagacggagagtgtaaaggaatccgagagcctgatggaatttgcacagccggaaattcagcctcaggaatttctcaacaggcgttacatgacagaagtggattacagcaacaagcagggcgaggaacaaccatgggaggcagattatgcgcgaaagcccaacctccccaaaaggtgggatatgctgacggagccggatggccaggagaaaaagcaagagtccttcaagtcctgggaagcgtctggaaagcaccaggaagtatctaagcctgcagtgtctctcgaacagagaaaacaggatacatctaagctacggtcgacactccccgaagaacagaaaaagcaagaaatctcgaaatccaaaccgtcacctagccagtggaagcaggataccccaaagagcaaggccgggtacgttcaggaagaacagaaaaaacaggaaacaccgaagctttggcctgtccagttgcagaaggagcaagacccaaagaagcagaccccaaagagttggaccccgtctatgcagtcagagcagaataccacaaagagttggaccactcctatgtgcgaagaacaggatagtaaacagccagaaactcctaagtcttgggaaaataatgtggaatcccaaaagcatagtctcacaagtcaatcgcagatctctcccaagtcttggggtgtcgcaacagccagcctgattccaaacgatcagctgttaccccgcaaacttaatactgagcctaaagatgttcccaaacccgtgcaccaacccgtaggttcttcaagcacccttcccaaggatcccgttttgcgaaaggagaagctccaggacctaatgactcaaattcagggaacgtgcaattttatgcaagagtccgtgctggacttcgacaagccttctagcgcgatccctacaagccagccaccatcagcgactccagggtcgcctgtcgcatcaaaggaacagaatctctctagccagtccgatttcctacaagagcctctccaggccacctcttctccagtgacctgctcctctaatgcatgcctggtgaccacggatcaggccagcagtggcagcgagacagagtttatgacttcagaaacaccagaagtcttcaacgtgaacgcgcctttgcccccaaggaaggagcaggagatcaaggagtccccctactcccccgggtacaatcagtccttcactaccgcatcgacccagacaccaccccagtgtcaacttccgagcatccacgtggaacagacggtccatagccaagagaccgcaaactatcacccagatggcaccattcaggtaagcaatggcagtctcgctttttaccccgcccagaccaacgtctttccaaggcccacccaaccttttgtgaacagccggggctctgtgcgcggctgcacccgtggtggacgtttgatcacgaattcctaccggagcccaggcgggtataaggggttcgatacataccgcggactaccctcaatcagtaacgggaattacagtcaactgcagtttcaggccagggagtattctggcgcgccttattcccagcgtgacaactttcagcagtgctataaaagggggggaacctctggaggccctagagccaatagtagagctggttggtcagattcctcgcaagtcagctctcctgagcgcgacaacgaaacctttaattcgggtgactcgggccagggggactcccgctcaatgaccccggtagatgtgcccgtgactaacccggctgcaaccattcttcctgtgcacgtgtacccgctgcctcagcagatgagggtggctttcagcgcggcgcgaacaagcaaccttgctcccggtacccttgaccagcctatcgtcttcgaccttctcctgaacaacctgggagagaccttcgatctgcagctgggccggttcaactgtccggtcaacggcacttacgtgtttatattccacatgcttaagctggcagtgaatgtgccattgtacgtcaacctgatgaagaacgaggaggttctggtgtccgcctacgctaatgacggagcccctgatcacgaaaccgcctccaaccacgccatactgcagctcttccagggcgatcagatatggctacggctccatcggggggcaatctacgggagcagctggaagtactcaactttctccgggtatctcctgtaccaggactag

SEQ ID NO: 23250 - DNA, 1056 bp, synthetic construct
  source 1..1056: mol_type = other DNA; note = Synthetic coding sequence
atgaccctgcggctgctggaggactggtgccggggcatggacatgaacccgcgtaaggctcttttaatcgctggaataagccagagctgtagtgtcgccgagattgaagaagcccttcaagctggcctggcaccactgggagagtaccgcctcctcggtaggatgttccgaagggacgagaaccggaaagtagcacttgtcggcttgacagctgaaacctcacacgcccttgtccccaaggaaatccctggaaaaggtggcatatggagggtaatattcaagcctcccgaccccgataatacttttctcagtcgactgaatgagttccttgcgggtgagggaatgacagtaggggaactctcccgggccctggggcacgagaatggctcattggatccagaacaaggtatgatacctgagatgtgggctccaatgctcgctcaggctctcgaggcactccaaccagccctgcagtgcctgaaatataagaagctgcgggttttctctggccgggaatcccccgaaccaggtgaggaagaatttggccgatggatgttccataccacacagatgataaaagcttggcaggtgccggacgtcgagaaaaggcgccggttgctggagagtttgaggggtcccgccctggacgtgatccgggtcttaaaaattaataacccgcttattactgtcgacgagtgtttgcaggcactggaggaagtattcggcgtgactgacaacccgcgggaattgcaggtgaaatatctgacaacgtaccagaaggatgaggagaaactatccgcgtacgtgcttcgactagaaccattgctgcagaaactggtccagcggggagcgattgagcgagatgctgtgaaccaggctcgcctcgatcaggtgattgcaggtgccgtgcacaagaccataaggcgcgagctcaacctcccagaggatgggcctgcgccaggctttcttcaactgctggtcctgatcaaggactacgaggccgcggaggaagaagaggcactcctccaggcgatcctggagggaaacttcacttag

SEQ ID NO: 23251 - DNA, 2559 bp, synthetic construct
  source 1..2559: mol_type = other DNA; note = Synthetic coding sequence
atgagcggccgggcccgggtgaaggcccggggcatcgcccggagcccaagtgccacagaggttgggcgtattcaggccagccctttaccaagatctgtcgacctgtctaacaacgaggctagttcttctaatggtttccttggcacgtctcgcatcagtacaaatgataagtacgggatcagcagcggtgacgctggctcaacgtttatggagaggggcgtcaagaacaagcaggacttcatggatctgtcaatttgtacccgcgaaaaactggctcacgtaaggaattgtaaaactgggagttctgggattcctgtgaaactcgtcactaacctgttcaatttggacttcccacaagactggcaactgtaccagtaccatgtaacttatattccagacttagcctcccgccgcctccgaattgcacttctttactcccactccgaactatctaataaggctaaagctttcgacggcgcaattctcttcctcagccaaaagcttgaggagaaagtgacagaactgtcttcagaaactcagcggggcgagacaataaaaatgacaatcaccctgaagagggaactgccatccagcagtcccgtttgtatccaagtctttaacattatctttcgcaaaatcttgaagaagctgtcgatgtatcagataggaaggaacttttataatccctccgaaccaatggaaattcctcagcacaagttaagcctctggccaggcttcgcaatttccgtgagttattttgaaaggaagctattgttcagcgcagatgttagttacaaggtgttgagaaacgagaccgttctagaatttatgaccgcactgtgccagaggacgggccttagctgttttacacaaacgtgcgaaaagcagctaatcgggctcattgtcttgaccaggtataataatcggacttattccatcgacgacatagactggagcgtgaaaccaactcatacattccagaaaagagatggcaccgagattacatacgtggactattacaagcagcagtatgatatcactgtctccgacctaaatcagccaatgctggtctccctacttaaaaaaaaacgtaacgacaatagtgaggcgcaattggctcacctcatccccgagctgtgtttcctaacaggcctgactgatcaggccacttccgatttccagctgatgaaagctgtggccgaaaaaacacggctgtccccatctggcagacaacagcggttagctaggctggtagacaacatccagcggaacacaaatgcccgtttcgagcttgagacttggggtcttcactttggatcacagatttccctgacgggccgcatcgtgccaagtgaaaagattcttatgcaggaccacatctgccaacccgtttccgctgcagactggtccaaagacattaggacctgtaaaatcctcaacgcccagtcattgaatacttggctgatactttgctccgaccgaaccgaatacgtcgccgaatcgttccttaactgtttgagaagggtggcagggtcaatgggcttcaacgtcgattacccaaaaatcattaaagtgcaagaaaacccagccgctttcgtgagggcgatacaacagtacgtagaccccgacgtgcagctcgtcatgtgcattctcccgagtaatcagaaaacttactatgactctataaaaaagtatctttcttccgattgtccagtaccaagtcaatgcgtcctcgctcgcacgttaaataagcagggcatgatgatgtctatagctacgaaaatagctatgcaaatgacatgtaaacttggaggcgagctctgggcggtagaaattccgctcaaaagcctgatggttgtcggcattgacgtgtgcaaagacgcactcagcaaggacgtgatggtggtgggatgtgtcgctagcgtcaatcctcgcatcacacgatggttttcccggtgtatcctacagagaactatgaccgacgtggcagactgcttgaaagtgtttatgactggggcactcaataaatggtacaaatataatcacgatctgcccgccaggatcatcgtgtaccgggccggcgtaggggatggacaactcaagacgctgattgaatatgaggtgccccagctgctcagttctgttgcagaatcctccagcaatacgagttccagactttccgtgattgtggtgcggaaaaagtgcatgcctaggttcttcacagaaatgaatcgaaccgttcagaatccccccctcggcaccgtggtcgactccgaagccacgcgcaatgaatggtacgatttctacctgatcagtcaagttgcttgccgagggactgtgtcccctacctattataacgtaatttacgacgataatgggttgaagcccgatcacatgcagagactcacttttaaactctgtcacctctattataactggccaggcattgtttcagtaccggctccatgtcagtacgcgcacaaactgacttttctggtggcgcagagtatccataaggagccaagcctggagttggctaatcacctcttttacttgtag

SEQ ID NO: 23252 - DNA, 2163 bp, synthetic construct
  source 1..2163: mol_type = other DNA; note = Synthetic coding sequence
atgtacggcagcgcccggagcgtgggcaaggtggagcccagcagccagagccctggaaggagtccccgactgccccgaagccctcgccttgggcataggcgaacgaactctaccggagggtcttccggttcttccgttggaggcgggtcaggtaaaaccctgagcatggagaatattcaatcactcaacgccgcctacgctacctctggccctatgtacctttccgatcatgaaaacgtgggatcagaaactcctaagagcaccatgacattggggaggtctggaggtcgactaccatatggcgttaggatgacagccatgggcagctcgcccaatattgctagctctggagtggcctccgacactatagcttttggagagcaccacctcccgcctgtgagcatggcctccacagtgcctcactcgctgcggcaggcccgggataacacaattatggatctccaaacacagttgaaggaggtgctccgggagaatgatcttcttagaaaggatgtggaagtcaaagagagtaaactcagctcttcaatgaatagtatcaagaccttttggtcaccagagttaaagaaggagagggccctgagaaaggacgaggccagcaagatcaccatctggaaggagcagtatcgcgtggtccaagaggagaatcaggtagatgccttgcggctcagacttgaggagaaagagaccatgttgaataagaaaacaaaacagatccaggatatggcggaagagaaaggtacccaagctggtgagattcatgatctcaaagacatgcttgatgtgaaggaaaggaaggttaacgtgctgcaaaaaaaaatagagaatctccaggaacagctgagagacaaggagaaacagatgtcgtctctgaaggagcgcgtcaaaagcttgcaggccgatactaccaataccgacaccgcactgaccactttggaggaagccttagctgagaaagaacgaacgatcgagcggctcaaagaacagagagacagggacgagcgggaaaaacaggaggaaatcgacaattacaagaaggatctcaaggatttgaaggaaaaagtgtcactgttgcagggggatctctccgaaaaagaggccagtctgctggacctgaaagagcatgctagtagtctcgcgtctagcgggttgaagaaagactctcggctgaaaacgctcgagattgctctcgaacaaaaaaaggaagagtgcttgaagatggagtcccaactgaaaaaggcacacgaggccgccttggaagcccgggcaagtccagagatgagtgatcgcatccagcacctcgagagggagatcactagatataaagatgagagctctaaggcccaggcagaagtggatcggctgctggaaatcttgaaggaggtcgaaaacgaaaagaacgacaaggataaaaagatcgccgaattagagtcattgttctcgaggcaggttaaggaccaaaataagaaagtggctaacctgaagcacaaggagcaggtggagaaaaagaaaagtgcccaaatgctggaggaagctcgtaggcgagaagataatctcaacgactccagccagcagctacaggattctctgcggaagaaagacgaccgcatcgaagaactggaggaggcactgagggagtctgtccagataaccgcagaacgagaaatggtgctcgctcaagaggagtcggcccggaccaacgcggaaaagcaggtggaagagctgctcatggccatggaaaaggttaagcaagaattagaaagcatgaaggccaagttatcctccacccagcaatctcttgctgagaaagaaacacatctgacgaaccttcgggccgagaggcggaagcatctggaagaggtcctagagatgaagcaagaagctctgctggctgcgatcagtgaaaaggacgctaatattgccttgctggagctcagttcctccaagaagaagacgcaggaagaagtcgcagcattgaagagggagaaggatcgactggtgcagcagctcaaacaacagacccagaaccgcatgaaacttatggccgataactacgaggatgatcatttcaagagttcccactccaatcaaacaaaccacaagccttcaccagaccaggatgaagaagaaggcatttgggcttag

SEQ ID NO: 23253 - DNA, 1344 bp, synthetic construct
  source 1..1344: mol_type = other DNA; note = Synthetic coding sequence
atggacatgggcaaccagcaccccagcatcagccggctgcaggagatccaaaaggaggtgaaatcagtggaacagcaggtcatcggcttcagcggcctgtcagatgataagaactataaaaaactggaacgcatcttaactaagcaattatttgaaatcgacagtgttgacaccgaaggcaagggtgacattcaacaggctagaaagagggccgctcaggagacagagcgccttttgaaggaacttgagcagaatgccaatcaccctcaccggattgagatacagaatatattcgaagaagcccaatccctggtcagagagaagatcgtcccgttctacaacggggggaattgcgtaactgacgagttcgaggaggggattcaggacataattctgcgtctgacgcacgttaagacaggcggcaagatcagcctccgcaaggctcgataccatactctcactaagatatgcgctgtgcaggagatcattgaggactgtatgaagaaacagcccagcctgcccctatcagaggacgcccaccccagcgtggccaagatcaacttcgtgatgtgcgaggtaaacaaagctagaggggttctcatcgccctgttgatgggtgttaataataacgaaacatgcaggcacctaagctgcgtgctgagcgggctgatcgcggacctcgacgccctcgatgtgtgtggaaggacagagattagaaattaccgcagagaggtcgtggaggacattaacaagttactaaagtacctggatctggaggaggaggcagacacaacaaaggcctttgacctgagacagaaccactcgatccttaaaatcgagaaagtactaaagcgcatgagggagatcaaaaatgaacttcttcaagctcagaatccttctgaactgtatctgtcaagcaaaacggaactgcagggtttaattgggcagctggacgaggtgtctctggagaagaacccgtgcatcagggaggccagacgccgtgccgtgatcgaggttcagactctaatcacctatatcgacctgaaagaggcactcgagaagcgaaagctgtttgcctgcgaagaacatccatcccacaaagccgtgtggaatgtccttggaaacctgtctgagatacagggcgaagtcttgtcttttgacggcaatcggaccgacaaaaattacataagactggaggaacttttgactaagcaactgcttgcccttgatgccgtcgacccccagggagaagagaagtgtaaggcggcgcgaaaacaggccgttaggttagctcagaatattttatcctatctagatctgaagtcggacgaatgggagtactag

SEQ ID NO: 23254 - DNA, 1476 bp, synthetic construct
  source 1..1476: mol_type = other DNA; note = Synthetic coding sequence
atggcccagagcggcggcgaggcccggcccggccccaagaccgccgtccagattcgagtggcgatacaggaagccgaagacgttgatgagctggaagatgaggaggaaggcgccgaaacgagaggggccggggatcccgccaggtacctgagtcccggctggggttcggcgagcgaggaggagcccagtcgggggcatagcggaacaactgccagtggtggggaaaatgaaagagaggatctcgagcaggagtggaaaccccccgacgaggagttgatcaaaaaactcgtagatcaaattgagttttacttctcagatgagaatctcgagaaggacgctttcctcctgaaacatgtgcgacggaacaagctgggatacgtgtctgtcaaactgctgacttcatttaaaaaggtcaaacacttaacgcgagactggcggaccaccgctcacgctttgaagtactcggtggtgctagaactgaatgaggaccaccggaaggtgaggcgcactactcccgtgcctctctttccgaatgagaacctccccagcaaaatgcttttggtgtatgacttgtatctttcaccgaagctttgggcattggctacccctcaaaagaacggtagagttcaggagaaggttatggagcacttgctgaaactgttcggcaccttcggtgtgatttcatcagtccggatcctgaagccgggccgcgagcttccccccgatatccgaagaatttcctcacgatactcccaagtcggcacccaggaatgcgctattgttgagttcgaagaagtcgaagccgccatcaaagctcatgagtttatgatcacggagtcacaagggaaggaaaacatgaaggcggttctcatcggaatgaagcctccaaagaagaagcctgccaaagacaagaatcatgatgaggagcccacggctagtatccatttaaacaagagcctgaataagagggtagaggagctccagtatatgggagatgagagtagcgcaaatagcagcagtgatccagagtccaaccctacaagccctatggctggcagacgacatgctgctactaacaagctgtcgccctctggacaccagaacttatttctcagccccaatgccagcccatgcacctctccatggtcttctcctctcgcacaaagaaagggcgtcagtcgtaagagtccactcgctgaagagggcaggctcaactgctccacaagtcccgagattttccggaagtgcatggattactcatctgattcgtctgtcaccccatcaggatccccctgggtaaggcgccggagacaggctgagatgggtacgcaggaaaaatcccccggcacctccccccttctttctaggaaaatgcaaaccgctgatgggttgcctgtgggcgtgcttcggctaccccgaggccctgacaatactagggggttccatggacatgagcgttcccgcgcctgcgtgtag

SEQ ID NO: 23255 - DNA, 315 bp, synthetic construct
  source 1..315: mol_type = other DNA; note = Synthetic coding sequence
atggccggcaaggcccaccggctgagcgccgaggagcgggaccagcttctgccgaatctgcgagcagtaggctggaatgagctcgagggtcgagatgcaatctttaaacagtttcatttcaaagactttaatagggcattcgggttcatgactagagtagctctgcaggcggagaagctagaccaccacccagaatggttcaatgtgtacaataaggtgcacatcacccttagcactcacgagtgcgccggactctccgaacgggacatcaatctggcctcctttatcgaacaggtggccgtcagtatgacctag

SEQ ID NO: 23256 - DNA, 738 bp, synthetic construct
  source 1..738: mol_type = other DNA; note = Synthetic coding sequence
atgatcggcgtgagcttcgaggaggccaagagcatcatcaccggcgcgaagctcagcacgaggcttgaatcggcctgggaaattgcattcatccggcagaaatctgataacatacagccagagaacttgagttgcacttctctaatcgaggctagtggggaatatggacctcaggcaagtacgctctcactgtttagctccccaccagagatcctgattccaaaaactagtagcaccccgaagaccaacaatgacatcctgagttcttgtgagatcaaaacaggatacaacaagacagtgcaaataccaatcacctccgaaaatagcaccgttggcctgagcaacactgatgttgcttcagcctggactgaaaattacgggctccaggagaagatctctcttaatccatcagtgcgttttaaggcagagaagctggagatggccctgaactacctaggcatccagcccactaaggaacaacatcaggcccttcggcagcaggtgcaggccgatagcaagggtacggtgtcttttggggactttgtccaggttgcacgcaacctgttctgtctccagttggacgaggtcaacgttggagcacatgaaatatccaatatcctggactcccagctcttgccttgtgattccagtgaagcggacgagatggagcgcctaaagtgcgaacgcgatgacgccctaaaggaagtcaatacgctgaaatggccaggccagaactag

SEQ ID NO: 23257 - DNA, 849 bp, synthetic construct
  source 1..849: mol_type = other DNA; note = Synthetic coding sequence
atgggcggcgccgtgagcgccggcgaggacaacgacgagctgatcgacaatctgaaggaggcccagtatatccgaacagagcttgtggagcaggcctttagggccattgatagggcagattactaccttgaggagttcaaggaaaatgcatataaagacttggcgtggaaacacgggaatatccacctttcagccccctgcatttactcggaggtcatggaggccctggacctgcagcccggtctttctttcttgaaccttggcagcgggactggctacctttcttcaatggtgggacttatcctggggcctttcggggttaatcacggggtggaactccatagcgatgtaatcgaatacgcgaaacagaagttggacttctttattaggaccagtgatagctttgataagtttgacttttgtgaaccctcctttgttacaggaaattgcctcgagatcagtcctgactgttcccagtatgatcgggtctactgtggtgccggagtacagaaggagcacgaagagtacatgaagaacctgctcaaggtgggggggatactcgtgatgcctctggaagagaagttaaccaagataaccagaaccggcccttccgcttgggagacaaaaaaaattctcgccgtaagttttgcaccgctaattcagccctgccatagcgaaagcgggaagtcacggttggtgcagttaagatccccgtcattcgtccagggatggtctgttgtggttctaagccagctgactgccgcctccaccttccaggccgaggcaatattacctagccagagcccgacttggcttacactgcaggtccttgcaaccatgcccaattag

SEQ ID NO: 23258 - DNA, 612 bp, synthetic construct
  source 1..612: mol_type = other DNA; note = Synthetic coding sequence
atggcccggccccggccccgggagtacaaggccggcgacctggtgttcgcgaaaatgaaaggttatccacattggccagctcggatcgatgagctccccgaaggagcagtcaaacctccggccaacaagtacccaattttctttttcggtacccatgaaactgcatttctggggcccaaagacttgttcccttataaggagtataaagataagtttggtaagtcaaataaacgaaaggggtttaatgaaggcctgtgggagatagaaaataaccctggggtgaagttcacagggtaccaagcgattcagcagcagtccagttccgaaacggagggtgagggggggaacactgccgacgcttcctctgaagaggagggagatcgggtggaggaggatggcaagggaaaaagaaaaaatgaaaaggcaggctcaaagcgaaagaaaagttacacatccaagaagagttctaagcagtccagaaaatcaccgggggacgaagacgacaaggactgcaaggaagaagagaacaagtcgtcatccgaagggggagacgccggcaatgacaccagaaacaccacctcagaccttcagaagactagcgaaggcacgtag

SEQ ID NO: 23259 - DNA, 540 bp, synthetic construct
  source 1..540: mol_type = other DNA; note = Synthetic coding sequence
atgaagacccccgtggagctggccgtgagcggcatgcagaccctggggttacaacacaggtgtcgaggggggtaccgggtgaaagcgaggacatcctatgtcgatgaaacactattcgggagccccgccggaactagaccaacaccgcctgattttgatcctccatgggtcgaaaaagccaatcgcacccggggtgtggggaaagaggcatccaaggcactgggggcgaagggatcttgtgagaccaccccttcccgtggaagcaccccgaccttgactcctagaaagaagaacaagtatagacctatctcgcacacaccttcctactgcgacgagtccttatttggatcgaggtcagagggcgctagctttggggcccctaggatggccaaaggagatgccgctaagctaagagctcttctgtggacccccccccccaccccgagaggctctcatagccccaggccgagagaggccccaccccctgttccccccacacagatggggcttcgaatttccggcctgccacggcaggggtag

SEQ ID NO: 23260 - DNA, 1104 bp, synthetic construct
  source 1..1104: mol_type = other DNA; note = Synthetic coding sequence
atggacggcgaggacatccccgacttcagcagcctgaaggaggagacagcttattggaaagagctttcccttaaatacaaacaatcgttccaggaggctagagatgaattagttgagtttcaggaagggagtagagaactcgaagccgagcttgaggcccagctggttcaagctgagcagcggaatcgtgatttacaagccgacaaccagcggcttaagtatgaagtggaggccctgaaggagaagctggagcaccaatacgcccagagttacaaacaggtcagcgtgcttgaggacgatctcagccagacgcgagctattaaagagcagctccacaagtatgtccgcgaactagaacaggctaatgatgacctggaacgtgccaaaagggctaccattgtaagtttagaggacttcgaacagcgactgaaccaggccatcgagagaaacgcgtttcttgaatcagaactggacgaaaaggagtcgctcctggtcagtgtacagcgattaaaggatgaggcacgcgacctgcgacaggaactggccgtccgggagaggcagcaagaagtgactcggaaatctgctccctcttcaccaaccctcgattgcgaaaaaatggacagtgctgtacaagcctctctcagcctgcccgccactccggtcgggaagggtaccgaaaatacatttccatccccaaaggctattccaaatgggttcggcacgtcacccctcacaccttcagctcggatcagcgccctgaacatcgtcggtgatttgctacggaaggtgggcgccctggaatctaaattggcagcttgcagaaactttgcaaaagaccaagcctctagaaagagttatattagcggcaacgtaaactgcggggtactcaatggaaacggaaccaagttcagccgttctgggcacacctccttttttgataaagggtctagctctagttgcgcgatccgcgcatccagacgccgattttcgtcgtcctctgctgatctggcagggagaggggggggtgacggctcgatcccggcgcaacatagcaccggggcatctggtaaggcccccccccctactctgctactggaaacctag

SEQ ID NO: 23261 - DNA, 591 bp, synthetic construct
  source 1..591: mol_type = other DNA; note = Synthetic coding sequence
atgggcagccggagcagccacgccgccgtgatccccgacggcgactcaatccgtagagagaccgggttcagccaggcgagcctcctgcgactgcatcaccgctttcgagctctcgatagaaacaagaagggttacctgagccgcatggaccttcaacagatcggtgcactggcagtgaaccctttgggggataggataatagagagctttttcccggacgggtctcaaagggtggacttccccgggttcgttagggttttagcccatttcaggcccgtggaggacgaagataccgagacacaagacccaaaaaagcccgaacccctgaactcacgacgaaacaaactacattatgccttccagctgtacgacttggatagggacggtaaaatcagccggcacgagatgctgcaggtgcttcgcctgatggttggagtccaagtgaccgaagagcaactggagaatatagccgaccgaactgtacaggaggcagacgaggatggagatggtgccgtgtcctttgtcgagtttaccaaatcgctggagaaaatggatgtggaacagaaaatgtccattagaatcttgaagtag

SEQ ID NO: 23262 - DNA, 2313 bp, synthetic construct
  source 1..2313: mol_type = other DNA; note = Synthetic coding sequence
atgttccggtacgagagcctggaggactgccccctggacgaggacgaagacgctttccagggacttggcgaggaagatgaggaaattgaccagttcaatgatgacacctttggtagcggagccgtggacgacgattggcaggaggcacacgagcggctggcggagctggaggagaagctgccggttgcagttaacgagcagacgggaaatggagagcgagatgaaatggatctgctcggagaccatgaagagaacctggctgagcgcttgtccaagatggtcatcgaaaatgaattggaggaccctgcaattatgagggccgtccaaacgagacctgtcctccagccacagcccggaagcctgaattcctcaatatgggatggctccgaagtgctcaggcggattaggggccccttgctggcacaggagatgcccacagttagcgtcctcgagtatgctctgccacagcggccaccacagggtccagaagacgaccgtgatctgagtgagcgtgctctgcctcggcgttcaacttcacccattattggatctccacccgtccgtgcagttccaatcggcacaccccctaagcagatggcggtgccatcattcactcaacagatcctgtgccccaaaccggttcacgtgcggccgcccatgccaccacggtacccagctccgtacggggaacggatgtcccctaatcaactctgcagcgtgcccaactcatctctgttaggacacccttttcccccaagtgtccctcccgtactttcaccacttcaacgagctcagcttttgggcggcgcccaattacagccaggaagaatgtcgccctcccagttcgccagagtgcccggttttgtggggtctccactggcggcaatgaaccctaagctgctccaaggccgcgtcggccaaatgctgccgcccgcaccgggcttccgggcttttttctccgcccccccatccgcgaccccccctccccagcagcaccctccaggaccagggccacatttacagaatttgaggagtcaggctcccatgtttagacctgacactactcacctgcatccgcaacatcggagactgcttcaccagcgacagcaacagaatcgatcccagcataggaaccttaacggtgccggggaccgggggtctcacaggtcaagtcatcaggatcaccttcggaaggacccctatgcaaacttaatgctgcagagggagaaggactgggtgtccaagattcagatgatgcagctgcagagcactgatccgtatttggacgacttttattaccagaattacttcgagaagctggaaaaactctcagcggccgaggagatccagggtgacggtcctaagaaggaacgaaccaagttaatcactccacaggtggcaaaacttgagcatgcatacaagccggttcagttcgaagggagcttgggcaaactgaccgtgtcctcagtgaataacccccggaaaatgattgatgctgtagtgacaagtagaagtgaggatgacgagacaaaggaaaagcaagtaagagacaagcgccggaaaactctagtcataatcgaaaagacatattcattattgctcgacgtggaggactatgagcggcgctatctgttatccctcgaggaagaacgcccagctctcatggatgatcgaaagcacaaaatttgcagtatgtatgataatctgcggggcaaattgcctgggcaagagcgcccatcagatgaccactttgtacagatcatgtgcattcggaagggcaagcggatggtcgccagaatcttgccattcctgagcaccgagcaggctgcagatatcttaatgacaactgctaggaacctcccgttcctgatcaaaaaggacgctcaggatgaggtactgccctgcctgcttagtccgttctctcttttattatatcacctgccttcggtgtctataacttccctgctccggcagttaatgaatctcccgcaaagtgctgccacaccagctttgtctaatcctcacctgactgccgttctacagaacaagtttgggctgtctctactactaatacttctctccaggggggaggacctccaaagttcagaccccgctactgagtctactcagaacaaccagtggactgaagtgatgtttatggccacccgggagctgctgcggatcccacaggccgccctggcaaagcctatatcaatccctacaaacttggtttctctattttcgagatacgttgaccgccaaaaactgaatctgctggagactaaattgcagttggtgcagggaattaggtag

SEQ ID NO: 23263 - DNA, 1518 bp, synthetic construct
  source 1..1518: mol_type = other DNA; note = Synthetic coding sequence
atgcggctgcggcggctggccctgttccccggcgtggccctgctgctcgccgcggctcggttggctgctgcttccgacgttctggagctaacggacgataactttgagtcacgcatctccgatactgggtctgcaggactcatgctggtggagttcttcgccccatggtgcgggcattgcaaaagactcgcacccgagtacgaagcggcagctaccaggttgaagggaatcgttcccttggcaaaagtggactgcaccgctaacaccaatacttgcaacaaatacggagtttccggttaccctaccctgaagatattccgtgacggcgaggaagcaggggcctatgacggtcctcgaaccgccgatggaatagttagccatctaaagaagcaggccggtcctgcttcggtgccactcagaacggaggaggaatttaagaagttcatatctgacaaagacgcctctattgtgggattttttgatgattccttttctgaagcacacagcgagtttctaaaagccgcctccaacttgagagacaactataggtttgcccacacgaacgtggagtctttagtgaatgagtatgacgataacggcgaaggtatcatcctgttccgcccgtctcacctaacaaataaatttgaggacaagacggtggcatataccgagcaaaagatgacgagtggtaagataaagaagtttattcaggagaacatcttcggaatctgcccacacatgacggaggacaataaagatctcattcaggggaaggatctgctgattgcttactacgacgtggattatgagaaaaatgccaagggatctaactactggagaaacagggtcatgatggtcgccaaaaaatttctggacgccggtcacaagctgaactttgcagtggctagcaggaagaccttttcccacgagctatctgatttcgggcttgagtctaccgcaggggagatcccagtggttgccattcgcacagctaaaggcgagaaattcgtgatgcaagaagaatttagcagggacgggaaggcactcgagaggttcttgcaagactactttgacggcaaccttaaacggtacctgaaaagtgaaccgatccccgaatccaacgatggtcctgttaaagtggttgtggccgagaattttgacgaaatcgtcaacaacgagaacaaggacgtgctgatagaattctatgccccttggtgcgggcattgtaaaaaccttgaaccaaaatacaaagaactaggggaaaagctatctaaggaccccaacatcgtgatcgccaaaatggacgccaccgctaatgacgtgccttctccctacgaggttaggggctttcctacgatctacttcagcccggcaaacaaaaaactgaatccgaagaagtacgaaggcgggcgagaactgagcgatttcatttcatatctccagcgagaggctactaaccccccggtgatccaggaagaaaagcctaaaaagaagaagaaagctcaggaggatctgtag

SEQ ID NO: 23264 - DNA, 684 bp, synthetic construct
  source 1..684: mol_type = other DNA; note = Synthetic coding sequence
atgagcgtggtgccccccaaccggagccagaccggctggccccggggagtgactcagttcggaaacaaatatattcagcagactaagccactgacattggagcgaactattaacttgtatcctcttaccaattatacttttggtaccaaagagcctctatacgaaaaagattcatcagtggcggctcgctttcagcgaatgcgagaggagttcgacaagattggcatgaggagaaccgtagaaggagttctgattgtccatgagcaccggttaccccacgtgctcctcttgcaacttgggaccactttctttaagctgccaggaggagaactcaaccccggtgaggacgaggtggaagggctaaaacggctgatgacagagattctagggaggcaggacggcgtcctccaggactgggtgattgacgattgcatcggtaactggtggaggccaaatttcgagcctccccaatacccctatattcctgctcatatcacgaaaccgaaagaacataaaaaactgttccttgtacagttgcaggagaaggccctcttcgctgtcccaaagaattacaaactggtagccgctccgctcttcgaactttacgataacgcccccggttacggccccattatctcgagcctcccacagcttctctcccggtttaatttcatatacaactag

SEQ ID NO: 23265 - DNA, 2244 bp, synthetic construct
  source 1..2244: mol_type = other DNA; note = Synthetic coding sequence
atgagccaggtgaagagcagctacagctacgacgcccccagcgacttcatcaacttctcctccttggatgatgaaggagacacgcagaatatcgattcctggtttgaggaaaaagctaacctagaaaataagcttctgggcaaaaatggaaccggcgggttgttccagggcaaaacacccttgcgcaaggccaacctgcagcaggccatcgtgaccccattaaaaccggtggataatacatactataaggaggctgagaaggagaatctggtggaacaatcgataccctccaatgcttgttcctcactggaggtagaggccgccattagccgaaagacgcctgctcagccacaacggaggagtctccggttgtcggcacagaaagacctggagcagaaggagaagcatcacgtgaagatgaaagccaagcggtgtgccactcccgtgatcatcgatgaaatcctcccaagcaagaagatgaaggtctcaaataacaaaaaaaagcctgaggaggaaggcagcgcccaccaggacacagcagagaaaaacgcatctagccctgaaaaggccaaaggacggcataccgtgccatgcatgccgcccgctaagcaaaaattcctcaagtctactgaagagcaagaactggaaaagtcgatgaagatgcagcaggaggtggttgaaatgcggaaaaaaaacgaggagtttaagaagctggctctggccggtatcggccagcctgtcaagaaatccgtgtcccaagtcacaaagagcgtggattttcacttccgcacagacgaacgcatcaagcaacaccctaaaaatcaggaagagtacaaagaggtgaattttacaagtgaactccgaaaacacccaagctcacccgctcgagtgacgaaaggatgcaccattgtcaagcccttcaatctttcccaaggtaaaaagagaacctttgatgagactgtgtccacctacgttccgctcgcgcagcaggtagaggatttccacaagaggacaccgaataggtatcatcttcgttcaaagaaagatgacatcaatttacttccatccaaaagcagtgtaactaagatatgcagggatccccaaacccctgtactgcagaccaagcaccgtgctcgcgctgttacctgcaagtcaacagctgagctcgaagcagaggaacttgaaaagttgcagcagtacaaattcaaagctcgggagctggatccaagaatactagagggcggaccgatcctccctaaaaaacctcctgtgaagcccccaacagaacccatcggttttgatctcgagatagagaagaggatccaggagcgggaaagcaagaagaaaaccgaggatgagcacttcgaattccacagccgtccttgcccaacgaagatcctggaagatgtagtcggggtccccgagaagaaggttctgcccatcaccgtcccgaagagcccagcattcgcacttaaaaatagaatccgaatgccgacaaaagaggatgaagaggaggatgagccagtggtcattaaagcgcaacccgtgccacattatggagtccctttcaaaccccagatccctgaggcaaggacagtagagatttgcccttttagcttcgactcccgagataaggaacgccagctgcagaaggaaaagaagataaaggagctgcagaaaggagaggtgcctaaatttaaggccctgcctctgcctcattttgacactattaatttgccagaaaagaaggtaaaaaacgtgacacagatcgagcccttttgcttagagaccgacaggaggggtgctctgaaggcccagacctggaaacaccaactggaggaagagctgcggcaacagaaggaagctgcatgcttcaaagccagaccaaacaccgtgatatctcaggaaccgttcgttcccaaaaaggagaagaagtctgttgctgagggactgtctggctcactggtgcaggaacccttccaattggcaacagagaaaagagcaaaggagcggcaggaactagagaagagaatggcggaggtcgaggcccagaaagctcagcagctggaagaggctagactgcaggaagaagagcagaagaaggaggaattggctaggctccgtcgcgagctggtacacaaggctaaccccatcaggaagtatcagggtctggaaattaaatcctctgaccagcccttgactgttcctgtgtctccaaagtttagtacccgattccactgttag

SEQ ID NO: 23266 - DNA, 360 bp, synthetic construct
  source 1..360: mol_type = other DNA; note = Synthetic coding sequence
atgaagctggtgcggttcctgatgaagctgagccacgagaccgtgactatcgaattgaagaatgggactcaagtacacggcacgattaccggggtggacgtctcgatgaatacacacttaaaggctgtgaaaatgacactgaaaaaccgcgagcctgtacagttggaaaccctcagcataagagggaacaacatacgctattttatactgcccgattccctccctcttgacacactcctagtagatgtggaaccaaaggttaagagtaagaagcgggaagcagtggccgggcgcgggcgagggagagggcgggggcgcgggcgcggcaggggacgaggacgtggaggcccccgcaggtag

SEQ ID NO: 23267 - DNA, 555 bp, synthetic construct
  source 1..555: mol_type = other DNA; note = Synthetic coding sequence
atgatgggcgccagcaccctgcaggagcccgccctgagccccggcaggtgtccccgccagcctctgaggtcaaaatttggccatcaaggctctaccgtccagaggaaatgctcgaagacaaatgccctcaacgtctcacaaaaaatgatagagatgtttgtcaggacaaaacacaagatcgataaaagtcatgagtttgcactcgtcgtagttaacgacgacactgcatggctcagcgggctgacttccgaccctcgggagttatgctcctgcctatacgatttggagactgcatcctgctccacattcaacatctcgggggccagcccggcacggcaacaaaagaccgagttgcctgttactgagaacgtgcagactatacctcctccatatgtggtcaggaccatcttagtctatagcaggccaccctgtcagccccaattcagtttgacagaacccatgaaaaaaatgtttcaatgtccctatttcttctttgatgtggtgtatattcataacggtacagaggagaaggaggaagaaatgtcctggaaatag

SEQ ID NO: 23268 - DNA, 1203 bp, synthetic construct
  source 1..1203: mol_type = other DNA; note = Synthetic coding sequence
atggccagcgagaagcccctggccgccgtgacctgcaccgcccccgtgaacatcgctgttataaagtattggggtaagcgggacgaggagttggttctcccgatcaactcatcccttagcgtgacactccatcaggaccagctgaagacaacaacgaccgccgtcataagcaaagattttaccgaggacagaatctggctcaatgggcgcgaagaggacgtgggacagccccgattacaggcatgcctacgggaaattcgctgtctcgcacgaaagcgtaggaattcccgggacggggatccactcccatcatcgctgagctgtaaagtgcacgtcgcgtctgtcaataacttccccacagcagctggcttagcgagctccgctgcagggtatgcatgtcttgcatatactctcgcgagggtgtatggcgtagagtcagatttgagcgaggtggcaaggaggggttctggaagtgcctgcagaagcctgtacgggggcttcgtggagtggcagatgggagagcaagcggatgggaaggactccattgcgcgccaggtagcacccgagagccactggcctgaactccgcgtcctgatcctcgtggtgagcgccgagaaaaaactcaccggctcgactgtcggcatgagggccagcgtggagacctctcctcttctaaggtttagggcagagagcgttgtacctgctagaatggccgagatggcgcgttgtatccgagagcgtgattttccttcctttgctcagctgacaatgaaagattctaaccaattccatgctacctgtctggacacgtttccacctatctcctacttgaacgctatcagctggaggattatccatctggtgcaccggttcaacgcccatcacggcgatactaaagtggcctatacatttgatgccggcccgaacgccgtgatcttcactcttgatgacactgttgcagagtttgtagctgctgtgtggcacggcttcccaccaggcagtaacggagataccttcctgaaagggctccaggtgaggccggccccgttgtctgcagagctgcaagccgccctggcaatggagcctacaccaggcggagtgaaatacataattgttacacaggtcgggcccgggcctcagatcctagatgacccatgcgcccacctgctgggacctgacgggctgcctaagccagccgcctag

SEQ ID NO: 23269 - DNA, 1350 bp, synthetic construct
  source 1..1350: mol_type = other DNA; note = Synthetic coding sequence
atgcgggagtgcatcagcatccacgtgggccaggccggcgtgcagattggaaacgcctgttgggagctctactgtctagaacatgggatccaacccgatggtcagatgccatcagacaaaactatcggcggcggtgacgactccttcaatactttctttagcgaaacaggcgctgggaaacacgtgccccgcgccgtgttcgtggatttggagcctacagttattgatgaggtgcggaccgggacttaccgccaactctttcacccagagcagttaatcacaggcaaagaagatgcagcgaacaattacgcaagaggtcactatacaattgggaaggaaatcatcgacctggtgctcgacaggattcggaagctggccgatcagtgcacaggcctccaggggttcctggtgttccactcattcggtggcgggacaggttctggatttacatctctcctgatggaaagacttagcgtggactacggtaaaaagagcaaactggaattcagtatctatccagccccccaagtgagtacagccgtggttgaaccctacaattctatcttgactactcatactactctggaacactcggattgtgccttcatggtagacaacgaagcgatttatgatatctgcagacggaatctggatatcgagcgccccacctataccaatcttaatcggttgatttcacaaatagttagctcgataaccgctagcctgcgattcgacggtgcgctaaatgtggatctcaccgaattccagacaaatcttgttccttatccaaggattcacttccctcttgccacctacgctccggtgatctcagcagaaaaagcgtatcatgagcagctaaccgttgcagagatcactaacgcttgttttgagccagcaaatcagatggtcaaatgcgacccgcgtcacggaaagtatatggcttgctgcttgctctatagaggagatgtggtacccaaagacgtgaacgccgcaatagccacaataaagacgaaacggaccattcagtttgttgattggtgccccactggcttcaaagtcggaatcaattaccagccgcccactgtcgtgcctgggggagatcttgccaaagtccaacgggccgtttgcatgctgagcaacaccacagccgtggcggaggcatgggctagactcgatcacaaattcgatctgatgtatgcaaaaagggcctttgtgcattggtatgtcggcgagggaatggaggagggtgaattttcagaggcccgggaggacatggccgcccttgaaaaggattacgaagaggttggagccgatagcgcggatggtgaggatgagggcgaagagtactag

SEQ ID NO: 23270 - DNA, 1365 bp, synthetic construct
  source 1..1365: mol_type = other DNA; note = Synthetic coding sequence
atgagcaccttccggcaggaggacgtggaggaccactacgagatgggcgaggagctgggcagtgggcaatttgcaatcgtgagaaaatgtagacaaaagggaactggaaaggagtatgcagccaaatttatcaaaaagcggcggctgtcatccagccgtcgcggtgtgagcagggaggagatagagagagaggtgaatatcttaagggagatccgacaccccaatataatcacactccacgacatcttcgaaaacaagaccgacgttgtactcatcctcgagctcgtatcgggaggtgagctgttcgactttcttgctgagaaggaatccctgactgaggacgaggccacacagttcctgaagcagatcttagacggggttcactacctccacagcaagcggatcgctcactttgacttaaagcccgagaatatcatgctcttggataagaatgtccccaatccacggataaagctcatcgactttggtattgcccacaaaatcgaggctggcaatgagttcaagaatatcttcgggacccctgagttcgtggccccagagatcgttaattatgagccattgggactggaggccgacatgtggagcatcggcgtgatcacttacattctgctgagtggagccagtccctttctgggggagactaaacaggaaaccctgaccaatatctctgccgtgaactatgacttcgacgaggagtacttcagcaatacttcagaactggctaaagactttatccggcgtttgctggtgaaggacccaaagagaaggatgactattgcccagagccttgagcacagttggataaaagctattagaagacgaaacgtacgaggcgaagacagcggaagaaagcccgaaaggcgcaggctcaaaacaactcgcctgaaggagtatactataaagagtcattctagcttgccacctaataacagctacgccgatttcgagcggtttagcaaagtgctcgaggaggccgccgccgctgaagaaggtctgagagaactgcagaggagccgccgtctgtgtcatgaggatgtagaggcactcgccgctatttatgaggagaaagaggcgtggtaccgcgaggagagtgactcgctggggcaagatctccgaagattgcgccaggaactgctgaagaccgaggctctgaaaaggcaggcccaggaggaggccaaaggcgccctgctgggcacatctggcctgaagcggaggttctcacgcttagagaatcgttatgaggccctggccaagcaggtggcgtccgaaatgagatttgtgcaggatcttgtacgggctcttgagcaggagaaactgcagggcgtagagtgtggcctcaggtag

SEQ ID NO: 23271 - DNA, 1326 bp, synthetic construct
  source 1..1326: mol_type = other DNA; note = Synthetic coding sequence
atgaagaagttcttccaggagttcaaggccgacatcaagttcaagagcgcagggcctggacaaaagctaaaagagtctgtgggtgagaaggcccataaagagaagccgaaccagcccgctcctagacccccaaggcagggtcctaccaacgaagcacaaatggcagccgcagccgcactggctcggttagaacagaaacagtcacgcgcttggggacccacctctcaagatacaattagaaaccaggtgagaaaagaattgcaggcagaggcaacagtgagcggaagtcctgaagccccaggcaccaacgttgtttcagagccacgcgaagaaggctctgcccatctggctgtgccaggagtctatttcacctgcccactcacaggggccacccttagaaaggaccagagggacgcctgcatcaaagaggccattcttctccacttcagcactgatccagtcgccgcgagcatcatgaagatatacacgttcaacaaagaccaagaccgggtcaagctgggtgtcgacaccatagcgaaatacctcgataacatccacctgcaccctgaggaagaaaaataccggaaaatcaaactgcagaacaaagtttttcaagagcgaatcaactgtctggaaggaacgcatgagtttttcgaagccataggctttcagaaagtcctcctgcccgctcaggaccaggaggaccctgaggagttttacgtcttgtctgaaaccacgttggcccagcctcagagtctggaacggcataaggaacagctgctggcagcggaacctgtgagggcgaaacttgacaggcaacgacgggtcttccagccatcaccgctggcaagtcaattcgagctccctggtgatttttttaatctcacggcagaggaaatcaaaagagagcaacggctccgatccgaagcagtggagcgcttgtcggtcttgcggactaaggcgatgagggagaaggaggagcagcggggtttgaggaaatacaactatacactgctcagagtccgtctgcctgacgggtgtctcttgcagggcacattctatgctagggagcgacttggagcagtgtatggatttgttcgcgaggcccttcagagcgactggctaccctttgaactgctagccagcggagggcagaaactgtccgaagacgagaacctggccctcaacgagtgtggcctcgtaccctcagctctcctcactttctcttgggacatggcagtgctcgaagacattaaggctgctggggctgaacccgactcgattctgaagccggagcttctgtcggctattgaaaagctgctctag

SEQ ID NO: 23272 - DNA, 900 bp, synthetic construct
  source 1..900: mol_type = other DNA; note = Synthetic coding sequence
atgcgggacctgctgctgcactggggccccggcccccccatccgggccccacaggaggaagccgaagcactgctggaactgcagggccgcctgcaagaggcacaggacaccacagaggcacttcgcgcgcagctaggtgtgcaggaggtacagctccaaggactgcagggcgccctgcaacagttacaacaggagaccgaacagaactgcagacgcgagctgcagcagatgcacggccagctcgccgggctgcgcgctagaatggccagcctacgccaggggtgcggagacttgaggggtcttgtcagcaccttcacgcagtcttgccaggggtctctgtcagaggcccggggccaggtcagctgggccctgggcgctctctcttcggggggtccaggcacacagttgccagagggccagcagggtccgcctgcgggctgccctggacgcctcccggagctcaaaggaaatattagagtgctgtgtcggttgaggcccggcacaagctcgagcctggtaagtgttgaaccggggcctggcggcacagttactacctgttatcgcgggaggcatcgaaggtttcgcctcgactgggtgtttcccccggatgccagtcaggaggaagttttcagagaactggaacccgcggtgctgagctgtcttcggggatattctgtttgcatttttacctacggccaaacaggaaccggaaagacctacagcatggaaggcccacctgaagatcccgggattgtaccaagagcgctgcagagcttgtttagagaaatgggggccggccgccaacaccgaaggtaccacggacgctgcctgtcaccagctgagtcacctgaacacccaagacccgggttgcccccttgcagagcaagatctccactgtag

SEQ ID NO: 23273 - DNA, 2517 bp, synthetic construct
  source 1..2517: mol_type = other DNA; note = Synthetic coding sequence
atgtacgccttctacagcctgctgatctacatcttctacagcctgtttcgcagagacggaggggctgctgccgctgccgaaccaggcgatcctgcccagcgcgccaggaagcctcgcgggcgcaggcggccggatttgcctgcacccgagctgtggaccgagcttaccgggctcgctgctagctccgagcccgaggacgggtccgaaggcgcggccgaaggcagagctgcagccgtgtcattggaagaggccctgttaaggctcgccgaattcttatcagtgcaactaggggcagaggaaagctgtggggggcccgctgacctgggccagtcaggcgaagtgccaagtttgctgacggtgacaagccagctgctggcactgctcgcttggcttcgatcacccaggggccgccaagctctcttacagggcactcagccggcacccagagtgcgcccgcccagtcctgacgggtccacaagtcaggaggaaagcccttctcactttactgccgttccgggcgaacccctaggagacgagactcaaggccagcaaccgctgcagctcgaagaagaccaaagagcatggcagagactcgagcaactcatcctggggcagttagaagaactaaaacagcagctagagcagcaggaggaggaattgggcagattgcgcctcggagttggagcaaccgactcggagaagagagtgcagcacttgacgcttgagaatgaggcccttaagcagtctttaagtctgatgagggacctactgcttcattggggcccaggccccccgattcgtgcgccccaggaggaagctgaagctctcctcgagctgcagggacgattgcaggaagctcaggatacaacagaagcattaagggcccagttgggagtccaggaggtgcagctgcaaggcctgcagggtgcactgcaacagctgcaacaagagactgagcagaactgccgcagagaactgcagcaaatgcatggacaacttgcggggctaagggcacgaatggcttccctccgccaagggtgcggggatcttcgcggcttagtgagcactttcacacaatcctgccaaggctctctgagtgaggctagaggccaggtgagttgggctctcggcgccctgtcttccgggggccccgggacccagctgcctgaagggcaacaagggccgcccgcagggtgtcctggacggctgcctgagctgaaaggtaacatcagggtgctgtgccggctgcggcccgggacctccagttctctagtttccgttgagcctgggccaggtggcaccgtgacgacctgttaccggggacggcatcggagatttcggctggattgggtgtttcctccagatgctagccaggaggaggtattcagagagttggagcccgccgtactgagttgtctgcggggttacagtgtatgtatctttacctacggtcagactggaacagggaagacgtactccatggagggccctcctgaagaccctggcattgtccctcgagccctacagagcttgtttcgcgagatgggtgcgggacggcagcacagagtcaccctttccatggtggaaatttacaatgaggcagtgagggatctccttgccccggggccccctgaacggctggcagtgcggcagggcccagaaggccagggcggcattcaggtggccgggctgactcactgggacgtgcctaatcttgagacgctccaccagatgctaaaactgggtagaagcaatagagcaactgctgctacagctatgaaccagagaagcagtcgatcgcacgctctggtgacactgactctaagagccgcatctcccccgcgggctcctggcacagccggcacactgcacctggtggatctggcaggcagcgagagagcccgtaaggcgggcgcagccggacctcctcgaggggatccagatggggctcgaagattgagagaggcccagactatcaatagaagcctcctggccctcgggggtgttatggctgctttgcgagcccatcgcccacatgttccttttcgtgactctcagctgacgagactgctccagcctgcactgggaccagggaccacagctgtactcctattacaggttggagctggggcagggcaggtgtgtgcttgccgaagtcccccaactcgcgcaagaccacccgcccccctcgcgaggcgttccccacgcgggcgtcgaatttccggccggcagagtgcgcccagtagcagcccaaccgagtgggtaaagtggtcttggggccagccaggcgctgccgggtccagggccccaccaggaagactgctcccaagcgcacctactctgcggagccccggcccacctgcccctctccgccgcccactcgctgtgctgcatgctccagtacctacaacggccagggccaggctgtctcggccacaaagagcttgtccaagttcgcccggcagccgaccctgcccctgggggctcaggcctgggttatgttggcaacggcggtag

SEQ ID NO: 23274 - DNA, 597 bp, synthetic construct
  source 1..597: mol_type = other DNA; note = Synthetic coding sequence
atggccagcggcaacgcccggatcggcaagcccgcccccgacttcaaagcaacagctgtggtagatggcgcctttaaagaagttaaattgtctgactacaaagggaagtatgttgtgctgttcttctacccccttgacttcactttcgtctgcccgaccgagatcatcgctttctctaatagagccgaggatttccgtaagctgggttgcgaggtcctgggtgtgagcgtcgatagccagtttacccacttggcatggattaacacaccacggaaagaaggcgggctaggacctttgaacatcccacttctggcagacgtcacacgccggctctcggaggactacggcgtcctgaagactgacgagggcattgcttatcgaggactgttcattatcgatggcaaaggcgtgttgcgccaaataacagtgaatgatctcccagtggggaggtctgtcgacgaagccctccgcctggtccaagccttccagtatactgatgaacatggcgaggtctgtccagccgggtggaagccaggttccgatactattaaacccaatgtcgacgatagcaaggaatacttcagcaagcacaactag

SEQ ID NO: 23275 - DNA, 1380 bp, synthetic construct
  source 1..1380: mol_type = other DNA; note = Synthetic coding sequence
atgagcgtgcggttcagcagcaccagccggcggctgggcagctgcggcggcactggtagcgtgcgcttgagttcagggggagcaggtttcggcgctggaaacacctgcggcgtgcccggcatcgggtctggattctcgtgcgccttcgggggttcttcatcagccggcgggtacgggggcggccttggcggtggatcagccagttgcgccgcattcacgggcaatgaacacggcctgctgtcaggcaatgaaaaagtcaccatgcagaacctgaacgatcgtctggcaagctaccttgagaatgttcgtgccctggaggaggccaatgcagacctcgagcagaaaatcaaagggtggtatgaaaagttcgggccgggttcctgtaggggcctggaccatgactatagtcggtattttcctatcattgatgaactgaaaaatcagataatcagtgccaccacaagcaatgcccacgtcgtgctgcagaatgacaatgccaggttgacagctgacgacttcaggttgaagttcgagaatgagctggctctgcaccagtcagtcgaagcagatatcaacggactgagaagagtgctggatgagttgacgctctgtcggaccgacctggagatccagctggagaccctttccgaggaactggcatatctcaagaaaaatcacgaagaagagatgaaagcattgcagtgtgctgccggtgggaacgtgaacgttgaaatgaatgcagcccctggagttgaccttactgtgctgctcaacaacatgcgggcagaatatgaggcattggccgagcagaatcgcagagacgccgaggcatggtttaacgagaagtcagcctctctccaacaacagatctccgatgatgcaggtgctacaacatctgcgagaaacgagctaattgagatgaaaaggaccctgcagacgctggagattgagttgcagagtctcctggcgactaaacactccctggagtgttccttgacagaaactgaatctaactactgtgcccagctggcgcagattcaggctcagataggcgctctggaagaacagctgcaccaggtaagaacagaaaccgaaggacagaaacttgagtatgagcagctgctggatattaaggttcaccttgagaaagaaatcgaaacatattgtctgctgatcgatggcgaagacgggtcatgctccaagtccaagggttacgggggcccagggaaccagacaaaggactccagcaagacaaccatcgtcaagaccgttgttgaggagatcgacccgcgcgggaaggtcctgtcgtctcgggtccataccgttgaggagaagagcaccaaggtcaataataaaaatgaacaaagggtaagctcttag

SEQ ID NO: 23276 - DNA, 834 bp, synthetic construct
  source 1..834: mol_type = other DNA; note = Synthetic coding sequence
atgcccagcgtgagcaaggccgccgccgccgccctgagcggcagcccacctcagaccgaaaagcctacccattataggtatttgaaggagttcagaacagaacagtgccccctcttttcacaacacaaatgcgcccagcataggcccttcacatgctttcactggcacttcctcaaccagcggcgcaggcgacctctacgtcgccgcgatggtacatttaattattcacctgatgtctactgttctaaatataacgaagccacgggtgtgtgcccagacggggacgaatgcccgtaccttcatagaaccaccggggatacagaacggaaatatcaccttcgctattacaagactggaacatgtatccacgaaaccgacgcccgcggccactgcgtgaaaaacggacttcactgtgctttcgcccatggacccctggatctacgccctccagtttgcgatgtaagagagctccaggcccaagaggcccttcaaaatggacaactgggcggaggcgagggtgtacccgacttgcagcctggagttctggccagccaagctatgatagagaaaatattatccgaggacccgcggtggcaggacgccaattttgtgttaggaagctacaaaaccgaacaatgtccgaaaccccccaggctttgtaggcagggatacgcttgcccgcattatcacaacagccgtgaccgccgcaggaacccaagacggttccagtactcatggcagctcgggaggcgggtactgcgcctgtcacccagggccaataatccccgtgtcgctctccctagggttcacacaggaccctcgtcgacagcttag

SEQ ID NO: 23277 - DNA, 918 bp, synthetic construct
  source 1..918: mol_type = other DNA; note = Synthetic coding sequence
atggacctgagcggcgtgaagaagaagagcctgctgggcgtgaaggaaaacaataagaaatctagcacccgagcacctagcccaaccaagaggaaagacaggtccgacgaaaagtccaaggaccgctccaaggacaagggcgccacaaaagagtcctctgagaaggacagaggacgagataagacaagaaaacgaagatccgctagcagcggtagttcgagtacccgcagccggagttcttccacttcatcatctgggagctcaacttcaactggaagctccagcggctcctcaagctcttccgcttcctcccgctccgggtctagtagtacctccagaagcagttctagcagtagtagcagtggcagcccaagtcctagtcggagaagacacgacaatagaaggcgttcccggagcaaatcgaaaccaccgaagagagatgaaaaagaaaggaaacggaggtctccctccccgaagcctactaaagtgcacataggccggctgacccggaatgtgaccaaggatcatataatggaaatcttctccacctatggcaagattaagatgatcgatatgcctgtcgaaagaatgcatccccatctgagcaagggctacgcctatgtcgagttcgaaaaccctgatgaggcggaaaaggccctgaagcatatggacggcggacagatcgacggtcaggagattactgctacagcagtactggctccatggcctcgtcccccgccccgtcggttttcgcctccaaggcgcatgctgccccctcctcctatgtggaggcgcagccccccgcgtatgagaagaaggtcgagatcacctcgacgtaggtctcctgtaagacgcagatctaggtcacctggtcgcagaagacataggtccagaagctccagcaattcttcccgctag

SEQ ID NO: 23278 - DNA, 3198 bp, synthetic construct
  source 1..3198: mol_type = other DNA; note = Synthetic coding sequence
atgcggaagcaggaggtgcggaccggccgggaggccggccagggccatggaaccggaagccctgccgaacaggtaaaggccctaatggacctgttggcaggaaaagggtcacagggctcacaggccccacaagcactggatagaacgccagacgcgcctctcggcccgtgtagtaatgactccagaattcaacgacaccggaaggctttgttgtctaaggtgggagggggccctgaactgggaggtccttggcaccggctagcctccttgctgctggtagaagggctcactgatttacagctgagagagcacgattttacccaggtcgaagctaccagaggcggtggacacccagcccgcaccgtggccctggacaggctcttccttcctctaagcagagtctctgtgccacccagagtgagtatcaccattggggtggctgggatgggtaaaacgaccctggtccgccatttcgtacgactgtgggcccacggtcaggtgggaaaagattttagtctcgtcctaccgttgacttttagagatctgaatacccatgagaagctatgcgcagatcgtctgatctgctctgtcttcccacacgtgggagagcccagcctggccgtggcagtgcccgcccgcgctttgctcatccttgatggcttggacgagtgtaggacaccgctcgatttcagtaacactgtcgcctgtactgaccccaagaaggaaattcccgttgaccaccttatcacgaatataatccggggcaatctgtttccggaggtgagcatatggatcaccagtaggccttccgccagcggtcagattccagggggcctcgtggaccgcatgacagaaatccggggctttaatgaagaagaaattaaggtttgcctagagcagatgttcccggaagaccaggcactcttagggtggatgctctcacaagttcaggcggatagagccctttatctcatgtgtactgtgcctgccttctgtcgactgaccggaatggccctcggccacttatggcgcagcaggactggccctcaggacgcagagctgtggccgccaaggacgctctgtgagctctattcatggtacttcaggatggctctgagtggggaggggcaagagaagggcaaggcgagcccccggatagaacaggtggcacacggtggaaggaaaatggttggcaccttgggacgtcttgctttccacggactgctgaaaaagaagtacgtattttacgagcaggacatgaaagcctttggagtcgacctggccctcctccaaggagctccctgtagctgctttttacagcgggaggagacactggcatcctccgttgcgtattgcttcacccaccttagtctgcaggaattcgtggccgctgcatactattacggagcatctcggcgggctatcttcgacctgtttacggaatccggagtgagttggccaagactgggatttttgacacatttccgcagtgcagcccagcgagctatgcaggctgaggacggaagattagacgtgttcctcaggtttttaagcggtttattgtctccgcgggtgaatgccttattagcaggtagtcttttggcccagggagaacaccaagcctaccgtacccaagttgccgaactgctacaggggtgtttgcgaccggacgcagcggtatgcgcacgggcaattaacgtcctgcactgcctgcacgaacttcagcatactgagctggcaaggtccgttgaggaggccatggaatctggagccctggctaggttgaccggccccgctcaccgtgcggcattggcctatttactccaggttagcgatgcttgtgcccaggaggcaaacctctcattgagtttatcacagggcgtactccagtctctgctacctcaacttctgtactgccggaagctccgattggataccaaccaattccaggacccggtgatggagcttctcgggtccgttctctcaggcaaagactgcaggattcagaagatttctttagctgagaaccagatctcaaataaaggggccaaggctcttgctaggtcccttttggtaaatcgcagcctaactagcctggatttgagaggaaattccatcggcccccaaggtgcaaaggcactggcagacgcactgaagattaatcggactttgacaagtttaagtttgcaggggaacaccgtgagagatgatggagctcggtctatggcggaagctctggcaagcaatcggacgttaagtatgctgcacttgcagaaaaatagcataggccctatgggagcccaacgaatggctgacgcccttaaacagaatcgatctcttaaggagttaatgttctctagtaattcaattggcgatggcggggccaaggccctagcggaggcccttaaagtcaatcagggactagaatcattagaccttcaatccaatagtatttctgacgcaggagtagctgctctcatgggcgccctgtgtacgaaccagacactgttatctctgtccctgagggagaattctatctctcccgaaggcgcccaggcaatagctcacgcattgtgcgctaatagcaccctcaagaatctagaccttactgctaatctgttgcacgatcagggggctagggcaattgccgtggcagtacgggaaaatcggactctgactagcctgcacttacaatggaactttatacaagccggtgccgcccaggctctgggtcaggcccttcaactgaacagatccctgacttccctggaccttcaggagaatgctattggagatgatggggcttgtgccgtggcacgcgcactgaaggtgaataccgccttgaccgccctgtacctgcaggtggcgtctattggggctagtggcgctcaggttctgggtgaagcactcgcagtcaatcggaccctggaaatcctagacctaagaggaaacgccattggggttgctggagccaaagcattagccaacgcattgaaagtcaacagcagtttgcgacgcttaaatctgcaggagaatagcttaggaatggacggggccatttgcatcgccaccgccctgagcggaaaccacaggctgcaacatataaacctccagggcaaccatatcggagacagcggggcccgtatgatctccgaagctatcaagactaatgcacctacgtgtacagtggagatgtag

SEQ ID NO: 23279 - DNA, 927 bp, synthetic construct
  source 1..927: mol_type = other DNA; note = Synthetic coding sequence
atgaaccccatcgtggtggtgcacggcggcggcgccggccccatctcgaaagacaggaaagaacgtgtgcaccaaggaatggtgcgggctgctacagttggctatggtattctcagggaaggggggtcagctgtggacgccgtagagggcgcagtggtggccctcgaggacgaccccgagttcaatgctggatgtggctccgtgcttaacacgaacggcgaggtagagatggatgcatcaatcatggacgggaaggatctctcagctggtgcagtcagcgcagtgcagtgtattgcaaatcccatcaaattggctagactcgtcatggagaaaacaccacattgttttctaacggatcagggcgccgcgcagtttgcagcagctatgggtgttcctgagattccgggcgagaagcttgtgacagaacgaaataagaaaagattggagaaagagaaacacgaaaagggcgcgcagaagacagactgccagaagaatctggggacagttggcgcagtagccctggactgcaagggaaacgtggcctatgcgacgtcaacaggcgggatcgtgaacaagatggtcggccgcgtgggggatagtccttgcctgggcgccggaggttacgctgacaatgatattggtgccgtgtctacaaccggccacggagagtcaatcctcaaagtgaacctagccagacttaccctgttccacatagagcaagggaagaccgtggaggaggcggctgacctgtcactggggtacatgaagagtcgggtcaaaggcctgggaggcctgattgtggtgtctaagaccggagactgggtcgccaagtggaccagcacaagcatgccctgggctgccgctaaggatggtaaactgcacttcggaatagatcccgatgacaccacaattacagaccttccctag

SEQ ID NO: 23280 - DNA, 1212 bp, synthetic construct
  source 1..1212: mol_type = other DNA; note = Synthetic coding sequence
atggccggccggcgggcccagaccggcagcgcccccccccggcccgcagctccacacccccctgccagtagggcctttccccagcattgtcgccctcgtgacgcagagaggcctccttctcctagatcgccattaatgcccggttgcgagctaccagtgggaacctgtcctgacatgtgccccgccgcggagagagcccagcgggaacgggagcatagattacataggctggaggtggtgcccggttgcaggcaggatcccccacgcgcagatcctcaacgtgctgtgaaggagtatagtaggccagctgcaggcaagccccgcccacctccaagccaactcaggccaccctccgtcttgctcgcaacagtacgatatctcgccggtgaggtcgcggagagcgcagacattgctagggctgaggtcgcctcttttgtcgcagacagattgcgagctgtgctccttgatctggctctgcagggagcaggggacgccgaggctgctgtggtgctggaagcagcactggctaccctcctcacagtcgttgcaagactgggacccgacgcggccagaggccccgccgatccagtgctcctccaagcccaggtgcaggaggggttcggtagtctcaggagatgttacgcccggggtgcgggaccgcacccacggcaacctgcttttcagggtctctttcttctgtacaatttagggtccgtggaagcgttgcatgaggtgctccagctaccagctgctttacgcgcttgcccgccacttcgcaaggccttggcagtggacgctgccttccgcgaaggcaatgccgcaaggctcttccgcctgctgcaaacactcccttaccttccgagctgcgccgtccaatgtcacgtcggccatgcacgccgcgaggcactagcccggttcgccagagcgttctccacacctaaaggacagactcttcctctgggtttcatggtgaatttgctcgcgctcgacgggctgagagaggcacgcgatctgtgtcaggctcatggccttcccttggatggtgaggaacgggttgtgtttctgcgaggcagatacgtcgaagagggcctgccacctgcatcaacatgcaaggtgttagtggagagtaaacttcggggaagaaccctggaagaggttgtaatggccgaggaggaagacgagggcaccgaccggcccggaagcccggcctag

SEQ ID NO: 23281 - DNA, 894 bp, synthetic construct
  source 1..894: mol_type = other DNA; note = Synthetic coding sequence
atggccgagctgaccgccctggagagcctgatcgagatgggcttccctcgtggtcgagctgagaaagctctggccttgacaggcaaccagggcatcgaggccgcaatggactggctcatggagcacgaggatgatcccgatgtagacgaacccctggagaccccactggggcacatattggggagagaaccaacatcctccgagcagggaggattggagggcagcggcagtgcagcaggagagggtaaacctgccctgtccgaagaggaacgacaggaacagaccaagaggatgctggaactcgtcgcccagaagcagcgggagagagaggaaagggaggagcgggaggccttagagcgcgaacgacagagacggcgacagggacaagaactcagtgcagcaaggcagagactccaggaggatgagatgagaagggccgccgaagagcgcaggcgagagaaagccgaagagctggccgcccggcagagagttagagaaaagatcgaaagagacaaagccgaacgggccaaaaaatatggtggctctgtaggttcacagcccccacccgtggcccccgagcccggcccagtgccttccagtccaagtcaagagcctccaacaaaaagggaatatgatcagtgccgaattcaagttaggttgccggacggcacttcgctcacccagactttccgggcaagggaacagctcgctgctgtgaggctatacgtggagttgcacaggggcgaggaacttggaggcggccaagatcctgttcagctgttatcaggtttcccacgcagagccttctcagaagccgacatggagaggcctctccaagaattgggccttgtgccatccgcggtccttatcgtcgctaaaaaatgtccatcctag

SEQ ID NO: 23282 - DNA, 570 bp, synthetic construct
  source 1..570: mol_type = other DNA; note = Synthetic coding sequence
atgcggctgagcctgcccctgctgctgctgctgctgggcgcctgggccattccaggtggtctcggggacagagcccctctgacggctacagcccctcaacttgacgatgaagaaatgtacagcgcccacatgccagcacatctccgctgtgacgcatgtagagccgtggcttaccagatgtggcaaaatttggccaaggccgagaccaagctgcacacttccaattcagggggacggcgggagctttctgagctcgtctacactgacgtgttggatcgatcctgcagtagaaactggcaggattacggcgttagagaggtagaccaggtcaagcggctgacaggaccaggattgagtgagggccctgagccttccattagcgtgatggtgactgggggcccatggccaaccagactgagccgcacatgcctccattatttgggtgaattcggggaggaccagatttacgaggcccatcagcagggcaggggggcactcgaggcactgttgtgcggtgggccccagggtgcctgtagcgaaaaggtgagtgccacgcgggaggagctttag

SEQ ID NO: 23283 - DNA, 3129 bp, synthetic construct
  source 1..3129: mol_type = other DNA; note = Synthetic coding sequence
atggccaacgacagccccgccaagagcctggtggacatcgacctgtcctctctgcgtgatcccgctggtatctttgagctcgtggaggtagttggcaatgggacctatggccaggtttacaaaggaagacatgtgaagactggccagctggctgcaatcaaagttatggacgttacagaggacgaagaggaggagatcaaactggaaatcaatatgctgaagaaatactcacatcatcgaaatattgcgacctattatggcgcttttatcaaaaagtcaccaccaggccacgacgaccaactctggctggtgatggagttttgcggtgcgggttctatcacagatctagtcaaaaacacaaagggcaataccctgaaagaagattggattgcctatatttccagggaaattttgaggggactggcccatttacatattcatcatgtgattcaccgcgacatcaaggggcaaaatgtgttgctgaccgagaacgcagaagttaagctcgacgaaacagaatatgagtactccggctcagaagaggaggaggaggaagtgcctgagcaagaaggagaaccgagcagtattgtcaacgtcccgggtgagagcactttgcgcagggactttctgagacttcagcaggagaacaaggagcggagcgaagcgctgaggagacagcaacttctgcaggaacagcaactcagagagcaggaagaatataagagacaactgttagcagagcgacagaagaggattgaacaacagaaggagcagcgccggaggttggaggagcaacagaggcgagaaagagaggctcgcagacaacaggaaagggagcagaggaggagagaacaggaagagaagcgccgtctcgaggaattggaacgacggcgaaaggaagaagaagagagaaggcgggcagaggaggagaaaagaagagtcgagagagaacaggagtacatccgtcgccagttggaagaggagcagcgccatctagaggtgttgcaacagcagctcctgcaggagcaagctatgcttctggaatgtcggtggagagagatggaggaacaccgccaggctgaacgcctccagcgacagctacagcaggagcaggcatatttgctgagcctgcaacatgaccataggagaccccacccacagcacagccagcagcccccgccaccccagcaggagagatctaagccctcatttcatgcccccgaacctaaggcccactatgaacctgctgatcgggctcgggaggtgccagtgcgcacgactagccgctctcccgttctgagtcggcgggattccccactgcagggttccgggcagcagaactctcaggctggacaaagaaactctacatcttccattgaacctcggctgctttgggaaagggtcgagaagctagtgcccagacccgggtcgggctcaagtagcggctcaagcaactctggctcacagcccggatcccaccccgggagccagtccggctccggtgaacggttccgggttaggtcatcctctaaaagtgaagggagcccttcccaaaggctggagaacgccgtaaagaaaccagaagacaaaaaagaagttttccggcccttgaagcccgccgttcgtatagaccttaccgcgctggcaaaagaactgcgggctgtggaagacgttagacccccacataaagtgacagactactcctcatcttctgaagagtctggtaccactgatgaggaagacgatgacgtggaacaggagggagctgacgagtcaaccagcgggccagaggacactagggctgcttcatctctcaacttaagtaacggggaaactgagagcgttaagaccatgatcgtgcatgacgacgtagagagtgagcctgcaatgaccccatccaaagaaggtacattgatcgtgcgccagacacagtctgcatcttccaccctgcagaagcacaagagcagttcaagtttcactccctttattgatcccagattgctgcaaatttctcctagcagtggcacaacggtgacatccgtggtcggatttagctgcgacggcatgaggccagaagcaattagacaggacccaacacgcaaggggagcgtggtgaacgtgaacccaactaacactagaccccaatcggataccccagaaatcagaaagtataaaaaaaggttcaattcagaaatcctgtgtgccgccttgtggggggtgaatctgctcgttggaacagaatccggactgatgctcctcgatcgttccgggcagggaaaagtctatccgctgatcaatagacggaggttccagcagatggatgtgctggaggggctcaacgtgctggtgacgatctccggtaaaaaagacaagctgagagtgtattatctctcttggctgcggaacaaaatacttcataatgacccggaggtagaaaagaagcaagggtggaccactgttggtgatctcgagggttgtgtccactacaaggtagtgaaatatgaacgcattaaatttctggtaatcgccttaaaatcttcagtggaggtgtacgcatgggcacccaaaccttatcacaaatttatggctttcaaaagctttggcgagctggtgcacaagccattgctagttgatctgactgtggaggagggacaaaggctgaaggtcatttacggcagttgcgccgggttccatgccgtggacgtagatagtgggagtgtttatgacatttatttgcctacacatatacagtgcagcattaagccccacgcaatcatcatcttacccaacacggatggaatggagcttctcgtctgctacgaggacgaaggtgtttacgtgaacacttacggtcggattacaaaggacgtagtactgcaatggggcgaaatgcccacctctgtcgcttatatccgctctaatcagactatgggatggggggagaaggccattgagattcggagtgtagagaccggacacctagacggggtttttatgcataaaagggcacagcggttaaagttcctgtgtgagcgaaacgacaaagtgttttttgcatccgtgcgctccggaggcagctcccaggtgtatttcatgactcttggtaggacatcattgttgagctggtag

SEQ ID NO: 23284 - DNA, 1113 bp, synthetic construct
  source 1..1113: mol_type = other DNA; note = Synthetic coding sequence
atgggcttcaaccggcccagcaagatccaggagaacgccctgcccatgatgttagccgagcctccccagaacctcatcgcccagagccagagtggcacgggcaagactgccgctttcgtgttggccatgttatctcgcgtggagccatcagatagatacccccagtgcctttgtctctcacccacctacgaattggcacttcaaaccggcaaagtgattgaacagatggggaagttctaccctgaattaaagctggcgtacgcagttcgtggaaacaagctggagcgggggcaaaaaattagtgaacagattgtcatcggtaccccagggaccgtcctcgattggtgctcgaaattgaagttcattgaccctaaaaaaatcaaggtgtttgtactcgatgaagctgatgtgatgattgccacgcagggacaccaggatcagtctattaggatacagaggatgctgcctcgcaattgccagatgctactcttctcggcaacatttgaagatagtgtgtggaaattcgcccagaaggtcgtgccagatcctaacgtgattaaattaaaacgtgaagaagagaccctcgacaccataaaacaatactacgtgctgtgctcttcccgagacgaaaaattccaggcgctctgcaacttgtatggcgcaatcacaattgctcaagccatgatcttttgtcacacccgaaagaccgcgtcctggcttgcagccgagctttcaaaagaggggcaccaggtcgcccttctgagcggagaaatgatggtcgaacagagggccgccgtaattgaacgctttagggaaggaaaagagaaagtgctggtgactaccaatgtgtgtgctcgggggattgatgtagagcaagtttccgtcgtgatcaactttgacctaccggtcgacaaggatggaaaccctgacaacgagacgtacctccacaggatcgggaggactggccgttttgggaagcgaggtctggcagtgaacatggtcgattcaaaacatagtatgaacatcctcaaccgtattcaagagcatttcaataagaaaatagaacgcctagacactgatgatctggatgaaatcgagaaaattgcaaattag

SEQ ID NO: 23285 - DNA, 1437 bp, synthetic construct
  source 1..1437: mol_type = other DNA; note = Synthetic coding sequence
atggccaccgacagctgggccctggccgtggacgagcaggaggccgcagtcaagtccatgactaatctgcagattaaggaggagaaagtgaaagctgacactaacggcatcattaaaacatctaccacagccgagaaaaccgatgaggaagagaaggaggaccgggccgcccagtccttgctaaataaactaattaggagcaacctggttgataacaccaatcaggtggaggtgcttcagagagatccaaattctccactatatagtgtgaaaagtttcgaagagcttaggctgaaacctcagctgcttcagggggtctacgctatgggtttcaatcgcccttccaaaattcaggagaacgctttacctatgatgctcgccgaaccaccacagaacctgatcgctcaaagccagtcaggcacgggcaaaacagctgcattcgtgctggccatgctctcacgggtggagccctcagataggtaccctcagtgcctatgcttgagtcctacctacgagttggctctccaaacaggcaaggtgatagaacagatgggcaaattctacccagagcttaaactggcttatgctgtgagggggaacaagttagagagagggcaaaagatatcagagcagatcgtgatcggaactcccggcacagtgctggactggtgcagcaaattgaagtttattgaccccaagaaaattaaagtgttcgtgctggatgaggcagatgttatgattgcaacacagggtcatcaggaccagagcatccgcatacagcgcatgcttcctagaaactgccagatgctgctcttttctgcaacctttgaagatagcgtctggaagttcgctcagaaagtggtcccagaccccaacgtgatcaaactcaaacgcgaggaggaaaccctggatacgatcaagcaatactacgtcctatgctcgagccgcgacgaaaagttccaggcgctctgcaatctctatggtgccatcacaattgcccaggcaatgattttctgccacactaggaagacagcatcttggctcgctgctgaactctccaaggaaggacaccaggtcgcactcctttcgggggaaatgatggtagagcagcgggcagccgttatcgagcggttccgcgaaggaaaggaaaaggtactggtgaccaccaacgtgtgtgcacggggaatcgacgtagagcaggtttccgtggtcattaatttcgacctgcccgtggataaagacggtaatccagacaatgagacctaccttcacaggatagggcggacagggcgtttcgggaaaaggggcctggctgtgaacatggtcgattccaagcatagcatgaatatcttgaaccggattcaggagcatttcaacaagaaaatcgagcgtctcgatactgacgatctggatgagattgaaaagattgccaattag

SEQ ID NO: 23286 - DNA, 2238 bp, synthetic construct
  source 1..2238: mol_type = other DNA; note = Synthetic coding sequence
atggtgggccccggccccaccgccgccgccgccgtggaggagcggcagagaaaattacaggagtatctggcggctaaggggaaacttaagagtcaaaacaccaaaccatacctcaaaagcaaaaacaactgtcagaaccagccaccgagcaagagcaccatcagaccgaagaatgatgtgacaaaccacgtcgtgctccctgtgaaacccaagagatccatcagcattaagctccagccaagacctcccaacactgctggctctcagaagcctaaactggagcctcctaaactcctggggaaacggctcacttccgagtgtgtcagctctaacccctacagtaaacctagtagcaagagcttccagcaatgtgaagccggtagcagtacgaccggcgaactgagccgtaagcccgttggctcactcaatattgagcagctcaagaccaccaagcagcagctgactgaccagggcaatggcaagtgcatcgacttcatgaacaacatccacgtggaaaacgaatcactggataacttccttaaggaaactaacaaggagaatctgcttgacatcttaacagagccagaaaggaagcccgaccctaagctgtacacacgttccaagcctaagactgactcttacaatcaaactaagaactctctggttccaaagcaggcactgggcaagtcttccgtgaactctgcagtactgaaggatagagtcaataaacagttcgtgggtgaaacacagtccaggacatttccggttaaatcccaacagctgagccggggcgcagatctggctcgcccgggcgtgaaaccttcgagaaccgtgccttctcacttcatccggaccctcagcaaggtgcaatccagtaagaagcctgtggtgaagaacattaaggacattaaggtgaaccgatctcagtatgaacgcccaaatgagaccaagatacgctcatatcctgtcacagaacagagggtgaaacacaccaaaccccgtacgtaccctagcctgctgcagggagaatacaacaatagacatccaaatatcaaacaagaccaaaaaagttcacaagtctgtattccccagacaagctgcgtgctgcagaagagcaaagccatatctcagcgccctaacctgaccgttggtaggtttaacagcgctattcctagcactccttcaatccgcccgaacggaacaagcggtaacaagcacaataataacgggttccaacagaaagctcagacactagattccaaactgaagaaggctgtgcctcagaaccatttcttgaacaagaccgcccctaaaacacaggcggatgtcaccactgtgaatgggacccagaccaatccgaatattaagaaaaaggctactgccgaggaccgtaggaaacagttggaggaatggcaaaaaagtaaaggtaaaacttataagcgacctcccatggagctcaagactaagagaaaagtcatcaaggaaatgaacattagcttctggaaatcgattgagaaggaagaggaagaaaaaaaagcacagttggagctttcttcaaagattaataacacattaactgagtgcctgaacctgatagaaggaggcgtcccctccaatgaaatcctcaatattctgagtagcatcccagaggctgagaagttcgctaaattctggatttgcaaagcgaaactcctcgctagtaagggtacctttgatgtcattgggttgtacgaagaggcgatcaaaaacggggcaactccaattcaggagctcaggaaggttgtcttgaacatccttcaggacagcaacagaaccacagaaggtatcacatctgatagccttgtagccgagacctcaatcacctcagtggaagagctcgcaaagaagatggagtctgttaagagttgcctgtcacctaaggaacgggagcaggtgaccgcaacacctagaattgccaaggcagaacagcacaactatcccgggattaagctccagattggacccatacctagaatcaacgggatgcctgaggtgcaggatatgaagtttattacaccagttagacgcagcagccgcatcgagcgagcggtgtcacggtatcccgaaatgctccaagaacacgatctggtggtcgctagcctggatgaattgctggaggtggaggaaaccaaatgtttcatttttcgccgtaatgaagctctgccagtaactcttggcttccagacccccgagagttag

SEQ ID NO: 23287 - DNA, 378 bp, synthetic construct
  source 1..378: mol_type = other DNA; note = Synthetic coding sequence
atgagcagcaccctgggcaagctgagcaaccaggtggaggagaccttgcctcttctgaaaaaggtgcctgctaactacttccacatctgttcagcaatcctgatgggattttcgctctctaaatcggccacacaggtgagtgcaatccacatggattccaaggtggacgaccatttaatccggggtactgagaagagccgcctggagccagctacacagctgttccaaaataccaaaaagatacggctcgaagacaccaaccaggagaattttacccgaatcgaagggactggcactggttccctcagcgggaaagccctgggtagtgtggtttatgtgaaagagtctgacggccttgagatgactgacgtggaatag

SEQ ID NO: 23288 - DNA, 4284 bp, synthetic construct
  source 1..4284: mol_type = other DNA; note = Synthetic coding sequence
atgagcatgctgaagcccagcggcctgaaggcccccaccaagatcttgaaaccgggcagcactgccctgaagactcctacagcggttgtcgccccagtcgaaaaaacaatcagcagtgaaaaagcatcatcaacgccgtcctcggagacacaggaggagttcgtggacgacttccgcgtaggcgaacgcgtctgggtgaacggcaacaagccaggtttcattcagtttctgggcgagacacagtttgcccctggacagtgggccggcattgtgttagacgagccgattgggaaaaatgacggatcagtagccggagttaggtatttccagtgtgaaccgctcaaggggatctttacccgcccatcaaaactcacccggaaagtccaggcagaagacgaagctaatggcctacagacaactcctgcctctcgggccaccagtcccctctgcacaagcaccgcttccatggtaagctcttccccaagtacaccaagcaacattcctcaaaagccctctcaaccagctgctaaagagccatctgcaactcctcccatctctaacttgacaaagacagcttcggaatccatctccaacctgagcgaagccgggagcatcaagaaaggtgaacgagaacttaaaattggggatcgggttctggtcgggggaacaaaggcaggggtcgtacgctttttaggagagacagatttcgctaaaggtgaatggtgtggagtggagctagatgaacctttgggaaaaaacgacggagctgtggcaggaaccagatatttccagtgccaacctaagtacggtctgttcgctcctgtgcataaagtgaccaagatcgggttccccagcacaactcctgctaaggcaaaggccaatgcagtacggagggtgatggccacaacttcagcatccctgaagcgtagccccagtgcttcgtccctgagcagcatgtcttccgttgctagtagcgtgagctcaagaccctccaggacaggcctgctaaccgaaacctcctctcgatacgcccgcaagataagcggtacaacggctcttcaagaggcactcaaagaaaagcaacagcacatcgagcagttactggccgaacgcgacctggagcgagctgaagtagcaaaggccacctcccacgtcggggagatcgagcaggagctcgcactcgcacgtgatggccacgaccagcacgtgctcgaactcgaggcaaagatggaccaattacggactatggtggaggctgccgatagggagaaagtggagcttctgaaccaactggaggaggagaagagaaaggtggaagatcttcaattccgcgtagaagaggaaagtattaccaaaggggacctggagacccagacgaagctggaacatgctagaatcaaagagctcgagcaaagccttttatttgagaagacaaaggccgacaagctgcagcgtgagttagaagatactcgcgtggccactgtgtctgaaaaatctagaattatggagctggaaaaggacctggcactgcgggtccaagaagtggctgagctccggagaagactcgaaagtaacaaaccagcaggcgatgtggacatgtcattaagtcttctgcaggagattagctccttgcaggaaaagcttgaagtgaccagaacagatcatcaaagagagatcactagcctgaaggaacatttcggggctagagaggagacacaccagaaggagatcaaagctttgtacaccgcgacagaaaaactgtctaaggagaatgagagtctgaagtctaagctcgaacatgccaataaggaaaactctgatgtgattgctctctggaagtcaaagctggagaccgctatcgcctctcaccagcaggcaatggaggaactaaaggtgtccttcagtaagggcctggggaccgaaacagccgagttcgcagagctgaaaacacaaatcgaaaagatgcggctggattaccagcacgagatcgaaaacttgcagaatcaacaggacagcgaacgggctgctcacgcgaaagagatggaggctttaagggctaaactcatgaaggtgatcaaagagaaggagaactcccttgaggcaattcgttctaaactcgacaaagcggaagatcaacacctggtagagatggaagacacattgaataaattgcaggaggcggagataaaagtgaaagagctggaagtactgcaggcaaagtgcaatgagcaaacaaaggtaattgataacttcacttcacagttgaaggcaaccgaagagaaattgctggatctggacgccctgcgaaaagcttcctcagagggaaaatcagagatgaagaagctccgacagcagctcgaggccgccgaaaaacagatcaagcatcttgagatagagaaaaatgcggaatcatcaaaagcgtcttcaatcaccagagaattgcagggccgggaactcaaattgacaaacctgcaagagaacttatcagaggtatcccaggtcaaagagaccctggagaaagaactgcagattttgaaggaaaaattcgctgaagcatctgaggaggccgtgtccgtacaaagaagtatgcaggagactgttaacaagcttcaccaaaaggaagagcagttcaacatgctgtccagcgatctagagaagttgcgggaaaatctcgcagacatggaggcaaaattccgcgaaaaggacgagagagaggagcagctcatcaaagccaaggaaaaactagagaatgatatcgcagagattatgaaaatgtccggagacaactcctcccagcttactaagatgaatgatgagttgcgcctgaaagaaagagacgtggaggaactccaactgaaactcactaaggctaatgagaatgcttcctttcttcagaagagcatagaggatatgacagttaaagcggagcagtcgcagcaggaggccgcaaagaagcatgaagaggaaaagaaagaacttgagagaaaactgtctgacctggagaagaaaatggaaacaagccacaatcagtgccaggaacttaaagcacgctacgagagggctacatctgagactaaaaccaagcacgaggaaattctgcagaatttacagaagaccctgctggacaccgaggacaaattgaaaggcgctcgtgaagagaattccggcctgctgcaggagctcgaagagctgcgaaagcaagctgacaaggcaaaggctgcccagacggctgaggatgccatgcaaattatggagcagatgactaaagaaaagacagagactcttgcaagcctagaggatacgaagcagacaaacgcgaagttgcagaacgagctcgatacacttaaggagaataacctgaagaatgtggaagagttgaacaaaagcaaagaactgctcaccgtggagaatcaaaagatggaggagttccgcaaggaaatcgaaacccttaagcaggctgccgcacagaagtcacagcaactgtctgctctccaggaggagaatgttaagctggcagaggagctcgggcgctctagagacgaggtgacgagtcatcaaaaacttgaggaagaacgctcagtgttgaacaaccaactattggagatgaagaagagggagtcaaaatttatcaaggatgctgacgaggagaaagcgagtctgcagaaatctatatctattacctccgccctgctgaccgagaaagacgcagagctggaaaagctgcggaacgaggtaaccgttttgaggggtgaaaatgcaagcgctaaaagcttgcactcagtggtccagaccctcgaaagtgataaagtgaaactcgagctgaaggtgaaaaacctcgaactgcagttgaaagaaaataagcgccagctcagctctagcagcggcaataccgacacgcaagctgatgaagatgaacgggcacaggagtcacagattgattttctgaatagtgtgattgtcgacttacaacgcaaaaaccaggatctcaagatgaaagtcgagatgatgtccgaggccgccttgaacggaaatggcgacgatttgaacaactacgatagcgatgaccaagagaagcagtcaaagaagaaaccacgcctgttctgtgatatctgcgattgctttgaccttcacgacactgaggattgtccaacccaagcccaaatgtccgaagatcctccacactcaacacaccacggctctcgaggtgaggagcgcccctactgtgagatctgtgagatgttcggacattgggcaacaaactgcaacgatgacgagacattctag

SEQ ID NO: 23289 - DNA, 975 bp, synthetic construct
  source 1..975: mol_type = other DNA; note = Synthetic coding sequence
atggccagcagcaacaccgtgctgatgcggctggtggccagcgcctatagcatcgcccagaaggcagggatgattgtgaggcgcgtgatcgccgaaggcgacctcggtattgttgagaaaacatgtgccaccgatctccaaactaaggccgaccggcttgcccagatgtcgatctgctcttccctggcgcgaaagttcccgaagttaacaatcataggggaggaggatctacccagtgaagaagtggatcaggagctgatcgaagattcccaatgggaggagatcctgaaacaaccctgtccatcgcagtacagcgccatcaaagaagaggatctcgtggtctgggtggaccctctagatggaactaaggagtataccgagggactgctggacaatgtaacagtcctgattggtatagcctatgaaggcaaggccatcgctggggtcattaaccagccttattacaattacgaagctggtccagatgctgttctcggaagaaccatttggggggtgctcgggctaggggcatttggtttccagttgaaagaggtgccagcagggaagcatataatcacaaccacaagatcccatagcaacaagcttgtcaccgattgcgtggccgctatgaaccctgacgccgtcctcagagtcggaggtgcaggcaataaaattattcagctgattgaaggtaaagctagcgcttacgtgtttgctagcccaggctgcaagaagtgggatacctgcgcccccgaagtcatactacacgccgtcggtgggaagttgaccgatatccacggcaacgtcctccagtaccacaagggggtgtcgcatcgaacatggccaaaaccagactttttccgagctcagttcttcctggaatcgcattcatgctttagcaactttaagaacgtttcaacacctataaaaaatatctatgatgtcatcatttacgcctacgaaacagacctatag

SEQ ID NO: 23290 - DNA, 270 bp, synthetic construct
  source 1..270: mol_type = other DNA; note = Synthetic coding sequence
atgggcaccaagcgggaggccatcctgaaggtgctggagaacctgaccccagaagagcttaagaagttcaagatgaaactcggtacagtcccattaagggagggattcgagcgaatcccgagaggagcgctgggacagctggatatcgtggacctcaccgacaagctagtggcatcttattatgaagactatgctgccgaacttgtggtggccgtgctaagggacatgcggatgttggaggaagccgccaggctgcagcgcgccgcctag

SEQ ID NO: 23291 - DNA, 867 bp, synthetic construct
  source 1..867: mol_type = other DNA; note = Synthetic coding sequence
atgaccgtgggcaagagcagcaagatgctgcagcacatcgactaccgcatgagatgcattctccaggacggtcgtattttcatcgggacgttcaaagcattcgacaaacatatgaatctcattctgtgcgattgtgatgaatttagaaaaatcaagcctaagaacagcaaacaggccgaacgggaagagaaacgagtgctgggtcttgtgttgctcaggggtgaaaacctggtctctatgacagtggaagggcccccacctaaagacaccggtatcgcaagggtgcccctggcgggcgccgccggaggacccgggatcgggcgggccgccgggaggggaattcctgcaggggtccctatgccccaggccccagcagggctggcaggccctgtccgcggggtaggcgggccttcacaacaggtgatgaccccacaggggaggggaacagtcgccgccgcggctgccgctgcaacagcctcgatcgctggcgcccctacgcagtatcctccaggtcgggggggcccccccccccctatggggcgcggcgctcctccccctgggatgatgggacccccacccggaatgcgacccccaatgggcccccccatggggatcccccccgggcgcggcacccctatggggatgccccccccaggcatgcgcccaccacctcctggatgcgaagccttcttcgatccatggccacagtctatggaggtcgcaccacagcgacgcgggttggattcttcagggcctaggtaccaccgcccagtctgctttctctgctgctgctcttggtcacttatgggactgagtggatttctcacaggcccccctccacccggaatgaggccgccaagaccttag

SEQ ID NO: 23292 - DNA, 3300 bp, synthetic construct
  source 1..3300: mol_type = other DNA; note = Synthetic coding sequence
atgcacatcaagagcatcatcctggagggcttcaagagctacgcccagcggactgaggtgaacggttttgaccctctttttaatgccataacgggactgaatgggtctggtaagtcaaatatcctggacagtatttgctttctcctggggatcagcaatctttctcaggtccgggcctcaaatctgcaggacttggtgtataagaacggtcaagcgggaatcacaaaggcgtccgtgtcaatcaccttcgataactccgataaaaagcagtctcctcttgggttcgaagtgcatgatgaaatcactgttaccagacaggtggtcattggtggccgaaataaatacctcataaatggcgtcaacgccaacaacacccgggtccaggacttgttttgcagtgtgggcctgaacgtgaacaacccccattttctcattatgcagggaaggattacaaaggtcctcaatatgaaaccacccgagatcttgtccatgatcgaggaagccgccggcactagaatgtacgagtacaagaaaattgcagcccagaaaaccatcgaaaaaaaagaagccaagctgaaagaaatcaaaactattttagaggaagaaattactccaacgattcaaaaactgaaggaagaaaggtcctcctatcttgagtaccagaaagtgatgcgcgagattgaacatcttagtagattgtacatcgcctatcagtttctactggccgaagacactaaggtgcgatcagcggaagaactcaaagaaatgcaggacaaagttatcaaactacaggaggaactgtctgaaaacgacaagaaaataaaagcactgaaccacgaaattgaggagcttgagaagaggaaagataaggagaccggtggcatcctcaggtctctggaagacgctttggccgaggcccagagagtgaatacgaagagtcaaagcgcctttgatctgaaaaagaaaaatctagcatgcgaagaatcaaagagaaaggaactcgaaaaaaacatggttgaagactcaaagacccttgcagctaaggagaaggaggtgaaaaagattacggacggcctgcacgccctccaagaagcttcaaataaggatgcagaagctctcgccgccgcacaacagcatttcaacgcggtttcggccgggctctcctctaatgaagacggtgccgaagcgacgttagcagggcagatgatggcctgtaaaaatgatatcagtaaggcccaaactgaggctaaacaggctcagatgaaactgaagcacgcccagcaggagcttaagaacaagcaggcagaggtgaaaaagatggattccgggtaccgaaaggatcaggaggctctggaggctgtgaagagactcaaagaaaagctcgaggctgagatgaagaagctaaactacgaggagaacaaagaagaaagtcttctcgaaaagcgcaggcagctgtctcgagacattggaagattgaaggagacatacgaagctttgctcgcacggttccctaaccttcgctttgcgtacaaagaccctgagaaaaactggaatcgcaactgcgttaaaggcctggtggccagccttatcagcgtaaaggacacatcagccaccactgccctggaactcgtggcaggggagcggctgtacaatgttgtggtcgataccgaagtaaccggcaagaaactactggaaaggggtgagctcaagcgaaggtacacaataatacccttaaataagatcagtgcccggtgtatcgcacctgaaacccttagagtcgcccagaatctcgtagggcccgataatgtgcacgtggctctgtccctcgttgaatacaagcctgagctgcagaaagcaatggagtttgttttcgggacgacatttgtgtgcgacaacatggataatgccaaaaaggtggcgttcgataagcggatcatgacacgcactgtgaccttgggtggcgatgtctttgacccccatggcactctttcagggggggcccgctcccaagctgcgagcattctaacaaaattccaggaactcaaggacgtgcaagacgagctgaggatcaaggaaaacgagctgagagctcttgaggaagagctggcaggacttaaaaacaccgccgagaagtaccggcagctgaaacagcagtgggagatgaagacagaggaagcagacctcctacaaacaaagcttcagcagtcttcataccataagcagcaggaagaactggatgccctgaagaagactattgaggagtccgaggagaccctaaagaacaccaaggaaatccagaggaaggccgaggagaagtacgaggtgttagaaaataaaatgaagaacgctgaggcagagcgagaacgagagcttaaggatgcacagaagaagctggattgtgccaaaacaaaggccgacgcctcgtctaaaaaaatgaaggagaaacagcaagaggttgaagctattaccctggagctggaagaattgaagcgggaacataccagttacaaacagcagctcgaggctgttaacgaagctattaaaagctacgagtcccaaattgaggtgatggccgccgaggtggctaagaataaggaaagcgtgaacaaggctcaggaagaggtgactaaacaaaaagaggtgattaccgcccaagacacggttattaaggccaaatatgccgaggtggccaaacacaaggagcaaaataacgattcccagctgaaaatcaaagaactcgaccataatatttcaaagcacaagagagaagccgaagatggggccgcaaaggtgtctaagatgctaaaggactacgactggatcaatgcagaacgtcacttgttcgggcagcccaattctgcttacgactttaagactaacaacccgaaggaggcaggccagaggttacaaaaactgcaggagatgaaggaaaaactaggccggaatgtgaatatgcgagcaatgaatgtgcttactgaggcggaggagaggtacaatgacctgatgaaaaagaaacggatagtcgagaatgacaaatctaaaatcctgaccaccatcgaagaccttgatcagaagaaaaaccaggctcttaacatcgcttggcagaaggtgaacaaagactttgggtctattttctctaccttgctgcctggggcaaatgcaatgcttgccccccctgaagggcaaaccgttctcgacgggcttgagtttaaggtagcactcggcaacacttggaaagaaaatctcaccgaactctcaggcgggcaaagacagaagcagcaaaatcacaccaccggttag

SEQ ID NO: 23293 - DNA, 381 bp, synthetic construct
  source 1..381: mol_type = other DNA; note = Synthetic coding sequence
atgttccagaaggacgagtactgcatcctgatcctgggcctggacaacgcgggaaaaacgactttcttagagcagtctaaaacccgctttaacaagaattataaggggatgtccctttctaaaattactacaaccgtgggcctcaatatcgggaccgtggacgttggcaaagcccgattgatgttttgggacttgggcggacaggaagagctgcaatccctctgggataaggataaaacgaagtgtggagatctgggaactttgcactccagtaaggtgagcgcctcattccggctaagagatctggctgcggaccatcaccgaacacagaagtggcagaggccggatgtcggaactgccgggtggcttcccttgccatag

SEQ ID NO: 23294 - DNA, 1119 bp, synthetic construct
  source 1..1119: mol_type = other DNA; note = Synthetic coding sequence
atgaccttccagttcaacttcaccatcgaggaccacctggagaacgagctgactcccatccgtgatggagccctgactctggactcatctaaagaactgtcagtctccgagtcccagaagggagaggagcgggatcggaaatgcagtgccgaacagttcgatctaccacaggatcacctgtgggagcataagagcatggaaaacgcagcacccagccaggataccgactctcccctttcggctgcttctagctcacgcaacctcgagccccatggaaagcagccgagtttaagagctgctaaagaacacgcgatgccaaaggacctgaaaaagatgctcgagaataaagtgattgagaccctgcctggattccagcacgttaagcttagtgttgtgaaaacaatcttattgaaggaaaacttcccaggtgaaaacattgtatccaagagcttctcatctcactcggacctgatcaccggggtgtacgaaggggggctaaaaatttgggaatgcaccttcgaccttctggcctattttactaaggcgaaggtgaagttcgccggaaagaaggtccttgacttaggctgtggaagcggactcctaggcattacggctttcaagggcggctccaaggagatccactttcaggattacaattctatggtgatcgacgaagtcaccctgcctaatgtggttgcaaattcaacactggaggatgaggagaacgacgttaacgagccagacgtgaaacgttgtcgcaagccaaaagtgacccaattgtacaagtgccgattcttttctggagagtggtcagagttctgtaagctagttctctcaagcgagaagctgtttgtgaaatacgatctgatcttaacctcggaaacgatctataatcccgattactactcaaaccttcatcagacattcctgagactgttgtcaaaaaacggtcgcgttcttttagcaagcaaagctcattatttcggcgtgggaggaggggtacacctattccagaagtttgtggaagagcgcgacgtgtttaagacccgcatcctgaagattattgatgaagggttgaaacggttcattatcgagataacctttaagttcccagggtag

SEQ ID NO: 23295 - DNA, 1635 bp, synthetic construct
  source 1..1635: mol_type = other DNA; note = Synthetic coding sequence
atgaagtgccactacgaggccctgggcgtgcggcgggacgccagcgaagaagaactgaaaaaggcctacagaaaattggccctgaagtggcacccagacaagaatctggacaacgccgctgaggccgccgagcagttcaagctaattcaggctgcatatgatgttctgtccgacccacaggagcgcgcgtggtacgacaatcacagggaggccctccttaaaggggggtttgacggagagtaccaagacgattccctggatctactcaggtatttcaccgtcacatgctacagtggctacggcgacgacgagaaaggattctatacagtctaccggaatgtctttgaaatgatcgctaaggaagaactggaaagtgtgcttgaggaggaggttgatgactttcctacctttggagactcgcagagcgactacgacaccgtagtacacccattttatgcatattggcagtctttctgtactcagaaaaacttcgcgtggaaagaagagtatgacactcgacaagcctctaacagatgggaaaaaagagctatggaaaaggagaacaagaaaattagggataaggcccgaaaagagaagaatgagctggtgcgccagctggtcgccttcattaggaagcgagataaaagggtgcaggcccaccggaagttagtagaagagcagaacgcagagaaagcccggaaagctgaagaaatgcgcagacagcagaagttgaagcaagccaaactcgtcgaacagtatagagagcaatcctggatgaccatggctaatctggaaaaggaacttcaggagatggaggctcgctacgagaaggaattcggggatggcagcgacgagaatgagatggaggagcacgaacttaaggatgaagaggatggtaaagacagcgatgaggctgaagacgctgaactctatgatgacttgtactgtcccgcttgcgataaatcctttaagaccgaaaaggcaatgaagaatcatgagaagagcaagaagcatcgggagatggtggctctcctcaagcagcagttggaggaagaggaggaaaacttttccagaccacaaatcgacgagaatcccctagacgataatagcgaggaggagatggaagatgcaccgaagcaaaaagtgaaatatctgacctttcggtttatcttcgccctacgcctaagtaaaaaacaaaaaaagaagaaacagaaaccagctcagaactacgacgataactttaatgtgaacggcccgggcgagggcgtaaaggtggatcccgaagatacaaacttgaaccaggattccgcaaaggaactggaggatagccctcaggagaacgtatctgtcacagaaattatcaagccttgcgacgatcccaagtccgaagccaagtcagttccaaaaccaaaagggaagaagaccaaggatatgaagaagcccgtgcgcgtgcctgccgaacctcagacaatgtccgtgctaatcagctgcacgacatgtcattctgagtttcctagtcggaacaagttgtttgatcatctgaaagcgacgggtcatgccagagccccctcctcgagttctcttaacagcgccaccagtagtcagtctaaaaaggaaaagcgcaaaaatcggtag

SEQ ID NO: 23296 - DNA, 945 bp, synthetic construct
  source 1..945: mol_type = other DNA; note = Synthetic coding sequence
atgcccggcttcacctgctgcgtgcccggctgctacaacaacagccaccgggataaggccctccacttttatacgttccccaaagatgcagaactgaggcggctgtggttgaagaacgtgagcagggccggcgtgtctggctgtttttctacctttcagcctacgactgggcaccggctgtgttctgtgcacttccagggagggcgcaagacatacactgtgcgagtgccaaccatcttccctctgaggggagtcaatgagagaaaggtagctcgacgccccgctggcgctgccgctgcaagacgccgtcagcaacagcagcagcagcagcagcaacagcagcagcaacagcaacagcaacagcagcagcagcagcagcaacaacagcaacagcagtcttctcccagtgcctctaccgcccaaactgcacagttgcaacccaacttggtgtctgcctcagcagccgtactactgaccctccaagccaccgtggactcaagccaggcccccggatccgtacagccggcacccatcacaccaactggggaggatgtgaagcctatcgacttaactgtccaggtagaattcgctgccgccgagggagctgctgctgccgctgctgcatctgagcttcaggctgccacagccgggctagaagcagctgaatgcccaatgggccctcagctcgtggtggtgggcgaggaaggatttcccgatactggttcagatcacagctacagtctgagttcagggacgacagaggaggaactgctcaggaagttgaatgagcagcgcgatattctggccctgatggaggtaaagatgaaggagatgaagggctccatcagacatctccgtctgaccgaggccaaactacgggaggagttacgagagaaggatcggctgctagcaatggctgttataagaaaaaagcacggaatgtag

SEQ ID NO: 23297 - DNA, 645 bp, synthetic construct
  source 1..645: mol_type = other DNA; note = Synthetic coding sequence
atggccggcgagaacttcgccacccccttccacggccacgtgggcagaggtgccttctccgatgtgtacgaacccgctgaggacacgtttctactcctgaacgccctcgaagccgctgcggctgagctagcaggagtggagatatgcctggaagtaggttctggttcgggggtggtgagcgcgttcctggccagcatgattgggcctcaggccctctatatgtgcacggatataaaccccgaggccgcggcctgcaccctagagactgcaaggtgtaataaggtacacatccagcccgtgattaccgacctggtgaagggattactgccacgcctgactgagaaggtagacctactggttttcaatcccccttatgtggttactcctccgcaggaagttggcagtcacggcattgaggcagcctgggcggggggcaagaacggaagagaggtcatggataggttcttcccacttgtgcccgatctcctgtccccaaagggattgttttatctcgtcaccattaaagaaaacaatcctgaggagatacttaagattatgaagactaaaggactgcaggggacaaccgctctctccagacaggcgggccaggaaacactgtctgtgctaaaatttaccaagtcctag

SEQ ID NO: 23298 - DNA, 1536 bp, synthetic construct
  source 1..1536: mol_type = other DNA; note = Synthetic coding sequence
atgagcggcggcttcgagctgcagccccgggacggcggcccccgggtcgcccttgccccaggcgaaaccgtgattggacgcggacctttactcggaatcactgacaagcgtgtctctcggcgccacgcgatcctcgaggtggccggcggccagctgcgcattaagcccattcatactaatccctgcttctaccaatcatcggagaagtcacagcttcttccactgaagcccaatctgtggtgctatctgaatcctggagactccttcagcttgttggtggataagtacatttttagaatcttgtccataccatcagaagttgagatgcagtgcacactccgcaattctcaggtgctggatgaggacaacattctgaatgaaacccccaagagccccgtgattaacttgcctcatgaaacaacaggcgctagccaattggagggaagtaccgagatcgccaagacacaaatgacaccaacaaattctgtctcttttttaggggagaacagagactgcaataagcagcagcccatcttggctgaacgcaaacgcatcctgcctacatggatgctggccgagcatctgagcgaccagaatttaagcgtaccagccatttctggaggtaacgtgatacagggcagtggtaaggaagagatctgcaaggataaaagtcagctgaatactacacaacagggtcggagacaactgatctcaagtgggtccagcgaaaacacgtccgccgagcaggacactggcgaagagtgtaagaacactgatcaagaggaatccactataagttccaaagagatgcctcagtctttctccgctattaccctgtcaaatacagagatgaataacatcaaaactaacgcccagaggaacaaattgcctatcgaagagctggggaaggtgagcaagcacaaaatcgctaccaagaggactccacacaaggaggacgaagcaatgtcctgcagcgagaattgtagcagcgcgcagggagactccctacaggacgagagtcagggcagccacagcgaatcttcatccaatccgtctaatccagagaccttgcatgctaaagcgaccgacagcgtcctgcagggatcagagggcaacaaagttaaacgcacatcttgcatgtatggcgctaattgttatcgcaaaaatcccgtgcatttccagcatttttcccaccccggagatagcgattacggaggggtgcagatcgtgggccaggatgagacagatgaccgccccgagtgcccctacggacctagttgttaccgcaaaaatccccagcacaagatcgaatacaggcataacacgctgccagtgaggaatgtcttagatgaggataacgacaacgtagggcagcccaatgaatacgatcttaacgactccttccttgatgacgaagaggaggactacgagccgactgacgaggacagcgattgggagcccggcaaggaagatgaagagaaggaggacgtggaggaactgctaaaagaggcaaaacggtttatgaaacgcaagtag

SEQ ID NO: 23299 - DNA, 984 bp, synthetic construct
  source 1..984: mol_type = other DNA; note = Synthetic coding sequence
atggccgccgccgccgccgccgccgccgccaccaacggcaccggcggatctagcggcatggaggttgacgccgctgtggttccgtctgtcatggcctgtggcgttacaggctcggtgtcagtggcactccaccccctagtcatactgaacatctccgatcactggattaggatgcgctcccaggagggacggcctgtccaggtgatcggtgccctgatcggtaaacaagaaggacggaacatagaggttatgaacagttttgagctcttaagccacactgtcgaagaaaaaataatcatcgacaaggaatactattacaccaaggaggagcagtttaagcaagtctttaaagagctggagttcctgggatggtacaccacggggggcccgcctgaccctagcgacattcacgtccacaagcaggtctgcgaaatcatcgaatcccctctctttctgaagctgaatcccatgactaagcacaccgatctaccagtgagcgtgtttgaaagcgtgatagacataattaacggtgaggcaaccatgttgttcgccgagctgacctatactctagccacagaggaagccgaaaggataggggttgaccatgtggcccgaatgaccgcaacaggttctggggagaacagcaccgtggccgaacacctcattgctcagcacagtgctatcaagatgttgcattccagggttaaactgatcctcgagtacgtcaaagcatcagaggccggcgaggtaccattcaatcatgaaattctgcgggaagcatatgctttgtgccactgtctacctgtcctgtcaacagataaatttaagaccgacttttacgaccagtgtaatgacgtaggactcatggcttatctgggtacaatcacaaagacctgtaacacaatgaaccagttcgtgaacaagttcaacgtcctgtacgatcggcaagggatcggacgacggatgaggggccttttcttttag

SEQ ID NO: 23300 - DNA, 2574 bp, synthetic construct
  source 1..2574: mol_type = other DNA; note = Synthetic coding sequence
atgaactaccagcagcagctggccaacagcgccgccatccgggccgaaatccagcgctttgaaagcgttcatccgaacatttactccatttatgaattacttgagagggtggaggaacctgtacttcaaaaccagatcagagaacacgtgatcgctatcgaggatgcctttgtaaacagtcaagagtggaccctgtctcgctcagtaccggagctgaaagttggaattgtaggaaatctggcctcaggaaagtcggccttagtgcaccggtacctgaccggaacctatgtgcaggaggagtccccagagggggggcgtttcaaaaaagagatagtggtcgatggacagagctatctgctcttgattagggacgagggaggtcctccggaagcacagtttgccatgtgggtagacgccgtaatcttcgttttttccctggaagatgaaatctcttttcagacagtgtatcattactattctcgcatggcaaactatcgcaacacaagcgaaatcccactcgtgctcgtgggcacccaggatgccatcagtagcgcaaaccccagggtcattgatgacgcgcgagccaggaaactatctaacgatctaaagcgctgcacttattacgagacttgcgcgacctatgggttaaatgttgaaagggtatttcaggacgttgcccagaaaatcgtcgccacacgcaaaaagcagcagctgagtatcgggccctgtaagtcgctgcccaacagcccttcgcactcctccgtgtgcagtgcccaggtatccgcagtacatatttcccagaccagcaacggcggtggctcattgagcgactactcctcatccgtgcctagtaccccttccacttctcaaaaagagctgcgaattgatgtgccccctaccgccaatacacctacccccgtaagaaagcagtccaaacgaagatccaacttgtttacctcacggaaaggctctgaccccgataaagaaaaaaaagggcttgagtcccgcgctgactctatcggcagtggccgggccatccctatcaagcaggggatgctcctcaagcgcagcggcaagtccctgaacaaggagtggaaaaagaaatacgtgactctgtgtgataacggggtgttgacttaccacccatctctgcacgactacatgcaaaacgtgcatggtaaagaaattgatctgctccggactaccgtgaaagtgcctggaaaaagaccccctcgggcaacctcagcctgcgcccctattagtagtcctaaaacaaacggcttatctaaagatatgagtagcctacacatatcaccgaactcagggaatgtgacctcggcctcaggcagccaaatggcttcaggcatcagcttggtttcctttaactctcgcccggacgggatgcaccagagatcttattcggtcagctccgctgaccagtggagcgaagctaccgtgattgctaactctgcaatctcttccgacaccgggctgggggattcggtctgctcctctccctctatttcgtccacaaccagcccgaagttggatccacctccatctccacacgctaacagaaaaaagcacagacggaagaagtcaacatccaatttcaaagcagatggattaagcgggaccgcagaggagcaagaggaaaatttcgaattcattattgtctcgctaacaggccaaacttggcactttgaagcgacaacctacgaggagagggacgcttgggtccaagctatcgagtcacaaattttggccagcctccagtcctgcgagtcgagtaagaacaagtccagactcacatcccagtccgaagccatggcgctgcagtccatccggaacatgcggggcaacagccattgtgtggattgcgaaacgcagaaccctaattgggcaagcctcaacctcggagcactcatgtgcattgagtgcagtggcattcaccgcaacctgggcacacatctatcacgagtaaggtctttggacttagacgactggccagtggaattgatcaaggtgatgtccagcatagggaatgagttggcaaactccgtttgggaagaaagctcacaaggtcgaacgaaaccgtctgtcgattcaacccgtgaagaaaaagagagatggataagagccaagtatgagcaaaaactgtttctggcccctctgccatgcaccgaactgtcattgggtcagcaccttctgagagcgactgctgatgaagatctccggaccgccatcctcctcctggctcacggctcccgggacgaggttaatgagacatgcggagagggagatgggcgaaccgctctgcacttggcatgccgaaagggcaacgtggtgctcgcgcagttactgatctggtatggtgtcgatgttacagccagagacgcgcacggaaacaccgcgctcgcctatgctaggcaggcatcaagtcaggagtgcattgatgtgctgctgcagtatggatgcccggacgaacggttcgtactaatggcaacccctaatctgagccgcagaaataacaataggaacaattcttcagggcgcgtacccactataatctag

SEQ ID NO: 23301 - DNA, 1653 bp, synthetic construct
  source 1..1653: mol_type = other DNA; note = Synthetic coding sequence
atgagccagaccagcctgaagcagaagaagaacgagcccggcatgagatcttccaaagagtccttagaggccgagaaacggaaagagtccgacaaaactggagtaagactttccaaccaaggctcacaggaatcatcactgcgcaagacagattcacgtggctacctggtaagaagccagtggtcccgcataagtcgctcacctagtacaaaagctccatctattgacgagcccaggtctcggaatacgtcggcaaagttaccatcatcctctactagcagtagaaccccaagtacatcaccaagtttgcatgattcctctccaccccctctctctggacagccctccttacagcccccagcgagtccccagctgccccggagtctggactcaaggccgcccaccccccccgagccagacccaggctctaggaggtccactaagatgcaggagaaccctgaggcttgggcccaggggatcgtccgagagattaggcagactagggactcccagcccttggaatattctagaacatcccccacagaatggaagagctcttcacagcgtcggggtatctatcccgcatccactcagctcgaccggaactctttgagtgagcagcagcaacagcagagagaagacgaagatgactatgaagctgcttattgggcctcaatgcggtcattttatgaaaaaaatccctcttgcagccgcccgtggccccccaaacccaagaacgccataaccattgccctgtcatcctgcgctctgttcaacatggtggatggcagaaaaatctatgagcaggaagggctggaaaaatatatggaataccaattaactaacgagaatgtgattctgacgccaggaccagcctttcgctttgtgaaggccctgcaatatgtgaacgccagattaagagacttataccccgacgaacaggatctcttcgatatcgtcctgatgactaataaccacgcccaggttggagtgcggctgataaatagcgtcaaccactatggtcttcttattgatagattttgtctgaccggagggaaggaccctattggctatctgaaggcctaccttacgaatctttatatcgccgcagattccgagaaagtgcaggaagcaatccaggaggggattgctagcgctaccatgttcgatggggccaaagatatggcgtactgtgacactcaactgagggttgctttcgatggagacgccgtacttttctccgacgaatccgagcatttcacgaaggaacatggactggacaagttctttcagtacgacactctgtgcgaaagtaaaccattggcacaagggcccctgaaaggtttcctagaggatctgggaaggctgcaaaaaaagttctacgcaaagaacgaaagactgctttgtcccattcgtacatatctggttacagccagatctgctgcctccagcggagcgcgggttctgaaaacattgcgacgctgggggcttgaaatcgatgaggctctttttctggcaggtgctccaaaaagtccaatcctggtcaagattagacctcatatttttttcgatgaccacatgtttcacattgaaggagctcagaggctggggtccatcgctgcgtacggcttcaacaagaaattctcgtcttag

SEQ ID NO: 23302 - DNA, 888 bp, synthetic construct
  source 1..888: mol_type = other DNA; note = Synthetic coding sequence
atgcccgtgcacaccctgagccccggcgcccccagcgcccccgccttgccttgtcggcttcgtaccagagtaccagggtatctacttagggggccagccgatggcggagcacgaaagccatccgccgtggaaaggctcgaagccgataaagcgaaatacgtcaagtccctgcacgtcgcaaatacccggcaagagcctgtccagccactgctgtctaagcaaccactgttctcacccgagacacgcaggaccgtgctcacaccttctaggagagcactcccgggcccatgccgacgtccacagcttgacctggacattctgagctcgttgatcgatctgtgcgactctccagtctccccggccgaagcatcgcgtacgcctggaagggccgaaggggccggccgacccccccctgccacccccccaaggcccccaccctctacctccgctgtgcggcgggtcgatgtgagacccctcccggcttctcccgcccggccctgtccttcgcctgggcccgcggccgcctcatctcctgctcgcccccctgggctgcaaagatctaagtcggatttgtctgaacgatttagccgggccgccgcagatttggaaaggttttttaatttttgtggcctggatccggaggaagcacgggggctgggcgtggcccacttggctcgggcctcttcagacatcgtcagtctagcggggccatccgccgggcctggtagttccgaaggcggctgtagcagaaggagctccgtcaccgtcgaggagcgcgcgagggaaagagtgccttacggggtctctgtcgtagagagaaacgccagggttatcaagtggctgtatggactgaggcaggctagagaaagcccggctgccgaagggtag

SEQ ID NO: 23303 - DNA, 549 bp, synthetic construct
  source 1..549: mol_type = other DNA; note = Synthetic coding sequence
atgagcggccggagcgtgccccacgcccaccccgccaccgccgagtatgagtttgcaaacccgtcaagactcggtgagcagcgcttcggcgaaggtctcttgccagaagagattcttaccccaaccctgtatcatggttattacgttcgcccgcgggctgccccggccggcgagggctcacgtgccggcgcctccgagctccgtttgtctgaagggaagttccaggcattcttggatgtgtcccactttacaccagacgaggtgaccgtgcgaacagttgataacctgctggaagtctctgccaggcacccccaaaggctggataggcatgggttcgtgagtagagagttctgccggacctacgtgctgcctgccgatgtggacccctggcgggtgagagctgcgctcagccacgatgggatccttaacttagaagcccctcggggagggagacacctcgataccgaggtaaacgaggtgtatatctcattgctccctgcaccacccgatcccgaagaagaagaagaggccgctatagtggaaccctag

SEQ ID NO: 23304 - DNA, 636 bp, synthetic construct
  source 1..636: mol_type = other DNA; note = Synthetic coding sequence
atgagcaccgccgccgtgcccgagctgaagcagatcagccgggtggaagccatgcggctgggcccaggttggtcgcatagttgtcacgccatgctgtacgcggctaatcccggacagctgttcgggcggatcccaatgcgattttcagtgctcatgcagatgcggttcgatggccttctgggcttcccaggcggtttcgtggatcgcagattttggagtcttgaggatggccttaatagagtgctagggctgggactcggctgtctgaggctgaccgaagcggactacctttcatcacatcttacggaaggcccccatcgagtcgttgcgcatctgtacgccaggcagttaaccttggaacagttgcatgccgtcgaaattagcgctgttcactctagggatcatgggcttgaggtgttgggtcttgtgcgcgtgcccctgtatacccagaaggacagagtcggggggtttcctaattttctgtcaaacgcattcgtcagcacagccaagtgtcagcttctatttgccctaaaagtgctcaatatgatgcccgaggagaagctcgtggaagctctggccgcggctactgagaagcaaaaaaaagccttggaaaaactcttacctgcctcctcctag

SEQ ID NO: 23305 - DNA, 2622 bp, synthetic construct
  source 1..2622: mol_type = other DNA; note = Synthetic coding sequence
atgcacccccccccccccgccgccgccatggacttcagccagaactcgctcttcgggtacatggaggatttgcaggaactgacaatcatcgagcggcctgtacgtcgaagcctaaaaactccggaggagatcgagcgactgacagttgatgaggatttaagcgatattgagagagcagtgtacttactctcagccggacaggacgtacagggtacttccgtcatcgcaaatctccctttcctgatgcgccagaatccaacagaaacgctaagacgcgtgttgcctaaggtgagagaggccctgcacgtcgccggagttgagatgcaactcacggcagcaatgtcgttcctgactatcctacaggatgaatctgtatcgatccacgcatatacacactctttcctgcaagtgattcttcttcatctcgagcatcgcgacaccggagtgtcgaatgcctggctggaaactctccttagcgttattgaggtgctacccaaggaaacgctcagacacgagattctaaacccactggtgtctaaagcccagctctctcaaactgtccagagtcgcctggtgtcttgtaagatactcggtaagctgaccaacaaatttgatgcccatacaattaagcgcgagatcctgcccctggtgaaatctctctgccaagacgtggaatacgaggttcgttcctgtatgtgcagacagttggagaatatcgcccaaggcatcggcactgaactgacaaagagcgtggtacttccggagctgatcgagctttctagagacgaaggctccagcgtgaggctggcggccttcgagacgctggtgaatttactggacatcttcgataccgacgatcgaagtcagaccatcttacccctggtgaaatccttctgtgagaaatccttcaaagctgacgaatccatcttgatttctctttcctttcacctgggaaaactttgccacggcctctatggcatcttcactccagaccagcatctgcgatttctggaattttacaaaaaactgtgtactctgggcctgcagcaggaaaacggccacaatgaaaaccagattccacctcagatcctggaacaggagaaaaagtacatcagcgtgcggaagaactgcgcttataacttcccagccatgatcgtgtttgtggaccctaagaatttccacatggagctctatagtaccttcttctgtctgtgtcacgatcccgaggttccagttagatataccattgccatttgcttttatgaggtctctaagctgctaaacagtggcgtgtatttgatccacaaagaactcattaccctgctgcaggacgaatctttggaagtgctcgacgccttgattgaccacctccccgagatcctggaactcatgagtaccggaggagagtcctccgtacaagagaataaactgtcttctctccccgacctgatccccgccctgaccgccgccgaacagcgcgccgccgctagtttgaagtggcggactcacgaaaagttgttgcagaagtacgcttgtctgccccacgtcataagtagcgaccagatctattacaggttcttacagagaatgttcacaataatgatgactaataacgtgctgccagtacagaaggctgctagtaggacactttgcattttcttgcgctataaccggaagcaggaacagcggcatgaggtgatacagaaactcattgagcagctgggccaaggcaagagctactggaaccggcttcgctttctggacacttgcgagtttatcatagagatttttagcaagtcctttttttgcaagtatttctttctgcccgcgatcgagctgacccatgatccagttgctaatgtgcggatgaagctgtgttacctattgcccaaggtaaagagcacactcaagattccagcagacaaacatctgctccaacagctcgagatgtgtgtgcggaagctgctgtgccaggagaaggataaagatgtgctggccattgttaaacgcactgtattagaactggatcggatggaaatgagcatggatgcatttcaaaaaaaattttacgagaaagacctcctggatcaggaaaaggagcgggaggagttactccttcttgagatggagcagctggagaaggagaagcagcagaacgacggcagaccaatgagcgataagatgtttgagaaaaagaggcgcgacaccaaaactcccactcaaagcctacctaaaaacatccctatcagtgtccccggcccctcctcagtgactccctccacttcaaaggagattaagaaaagcaaacttatcaggagccagagcttcaataatcaggcatttcacgcaaaatacggcaacctggagaagtgcgcatccaagtccagcaccactggctacactaccagcgtctccgggttagggaagacgtccgtcctgtctctagctgatgactcctttagaaccaggaacgcatcctctgtacccagctccttctcacccaatacacctctgccttccacttctagggggaccggcaactctgttgatcccaagagttccggaagcaaagatacccaacctagaaaagcaaccctcaaatcgagaaaatccaatccatag

SEQ ID NO: 23306 - DNA, 951 bp, synthetic construct
  source 1..951: mol_type = other DNA; note = Synthetic coding sequence
atgcggcagcccctgagctggggccggtggcgggccatgctggcccggacttacggtccgggtccgagcgccggatacagatgggcatccggtgcgcagggttatgtgagaaatcctccggtaggtgcctgcgatctgcagggcgaattggatcgattcggcgggatcagcgttcgccttgctagactggatgctctcgaccgtttggacgcagcagcctttcagaagggtctgcaagcagccgtgcagcagtggaggtccgagggccggactgctgtgtggctccatatacccatcttacaatcacgctttatcgcccccgcggcgtccctggggttttgcttccaccatgcagaatcagacagcagtacactgactctctggctgagggagggccctagtaggctgcctggttacgcgagccaccaggttggagtcgctggggcggtgttcgacgaatccacacgcaagatattagtcgtgcaggatagaaataaactgaaaaatatgtggaaattccctggcggtcttagcgaaccagaggaagatatcggggacacagctgtgagagaggtgtttgaggaaactggcatcaagtcagaattccggagcgtgctcagcatacgacagcagcatactaatcccggagccttcggcaaatctgacatgtacatcatctgcagactcaagccgtacagtttcaccatcaatttttgtcaggaagaatgcctccgctgtgagtggatggatctgaatgacctggcaaagacagagaatactaccccaatcaccagcagggtcgcccgcctgctcttgtacggctatagagaaggtttcgacaagattgatctcactgtagaagaactgcctgccgtctacactgggttgttttataagctgtaccacaaggaattgcccgagaattacaaaacgatgaagggaatcgactag

SEQ ID NO: 23307 - DNA, 537 bp, synthetic construct
  source 1..537: mol_type = other DNA; note = Synthetic coding sequence
atgggcgagacctggaagaacatctgcagcaccgtgcggcacggctggtggctgcgcgatcatcgcatggccggtctgccgatcccaccggagatagtgaaagaggccgaagtgcctcaggcggccttgggagtccccgctcaggggaccggcgacaacgggcatacccctgtagaggaggaggtgggaggtatccctgttccagccccaggcctgctgcaagtgacagaacgacgccaaccattgtctagtgtttcttcactggaagttcactttgacctgctagatctaacagaactgactgacatgtccgaccaagaactcgcagaggtattcgccgactctgacgacgagaacttgaacaccgagtccccagccggcctccacccattaccccgggctggatacctccggtccccaagctggactaggaccagggccgagcaaagccatgagaaacagccactgggggatcctgagagacaggctactgtactcgacacgtttctcacagttgaaaggcctcaggaagactag

SEQ ID NO: 23308 - DNA, 741 bp, synthetic construct
  source 1..741: mol_type = other DNA; note = Synthetic coding sequence
atggccgagcaggagcagcggaagatccccctggtgcccgagaacctgctgaagaagcgtaaggcctatcaggctctgaaagcgacacaggccaagcaggcactcctcgccaaaaaagagcagaagaaaggaaagggactccggttcaagaggcttgagtcctttttacacgatagttggcgtcagaaacgggacaaggtcagacttcggcggctcgaggtgaagccccatgccctggaactgcccgacaaacactctttggcttttgtggtgcggattgaaagaatcgacggcgtaagcctgctggtgcaaagaacaattgcaaggctgcggctgaaaaagattttctccggagtgtttgttaaggtgacacctcagaacttgaaaatgctacgcatagtggagccttacgtgacctggggtttccccaacctgaagtcagtgagggaactcatcttgaaaaggggacaggctaaggtgaagaataagacaattccacttaccgacaatactgtgattgaggagcatctggggaaattcggtgtgatttgcttagaagacctgattcacgaaatcgcattccccggaaagcactttcaggagattagctggtttctgtgcccattccaccttagcgtagccagacatgccaccaagaatcgagtaggcttcctcaaagagatgggcaccccaggatatcgaggagaacgcatcaaccagctgatccgccagctgaactag

SEQ ID NO: 23309 - DNA, 2442 bp, synthetic construct
  source 1..2442: mol_type = other DNA; note = Synthetic coding sequence
atggcctggccctgcatcacccgggcctgctgcatcgcccggttctggaatcagctggataaagctgatatcgctgtcccactggttttcaccaagtactccgaggctacagaacatccaggcgcccctccacaacctccacccccccagcagcaggctcagccggccctggcaccccccagtgctcgagcggtggcaatcgaaacccagcccgcccagggcgagcttgacgccgttgcacgcgcgaccggaccagcacccggcccaacaggagaaagagagcccgcggccggtcctgggagatccggtccaggacctgggctgggaagtggctccaccagcgggcctgcggacagcgtcatgagacaggattatagagcatggaaggttcagaggcccgagccgtcctgcaggcctcggagcgagtaccagccaagcgacgcccccttcgagcgagagactcagtaccagaaagacttcagagcgtggccgctgccccgcagaggtgatcacccttggatccctaagcccgtgcagataagtgctgcgtcccaagcttctgctcctatactgggggcacctaaacgccggccccaatctcaagagaggtggcctgttcaggctgctgcagaggcccgagaacaggaagcagctccgggtggggccggaggcttggcagctggcaaggcttctggcgctgatgagcgtgatacccgcaggaaggcggggcccgcttggatagtgcgcagggcagaaggtctgggacacgaacagacacctcttcctgctgcacaagcccaggttcaggctacaggccccgaggctggccgcggccgagccgccgctgatgccctgaataggcagattcgtgaggaagtggccagcgctgtgagctctagttacagaaacgagttccgagcgtggacagacataaaacctgtgaagcccatcaaggcgaagccacagtataaacccccagacgacaagatggttcacgagacaagttatagcgcacagttcaaaggcgaggcgagcaagccaacaacagctgataacaaggtcatcgatcgtcgccggatcaggtcactgtattccgagccattcaaggagcctcctaaggtcgaaaagcccagtgttcagtctagcaaaccaaagaagacatcggcaagccacaaacccacgcgaaaggcaaaagataaacaagccgtctcaggccaggccgccaaaaagaaatcagccgaggggccaagcacaaccaaaccagacgataaagagcagtccaaagagatgaacaataagttggcagaagctaaggagtcactcgcgcagcccgtctcagatagctccaaaacgcaggggccggtggctaccgaacccgataaagatcaaggttcagtcgtccccggcctgttaaaaggccagggcccgatggtacaggagccgctgaagaagcaaggttctgttgttccaggcccccccaaggacctgggcccaatgattcctctacccgttaaagatcaggatcacaccgttccagaaccccttaagaatgaatctccagtgatatctgctcccgtcaaagatcaggggccatccgtaccagtccccccaaaaaatcaatctcctatggtccctgcaaaggtcaaggaccaaggctctgttgtgcctgagtcactcaaggaccaggggccaaggatccctgagccagtgaaaaaccaagctccaatggtcccagctccggttaaggacgaggggccaatggtgtctgcctctgtgaaggatcagggtccaatggttagcgctcccgtgaaggatcaaggtcctatcgtgcccgccccagttaaaggcgaagggccaattgtgcccgcacccgtaaaggatgagggcccaatggtgagtgcccccattaaagaccaggatccaatggttccagaacatcccaaagatgagagcgctatggccactgcgcccatcaagaaccaggggtctatggtgagcgagcccgtgaagaaccaggggctggtggtttccgggccagtgaaggatcaggacgtggtagttcctgaacatgctaaagtccatgatagcgccgtggtggccccggtgaaaaaccaggggcccgtggtgccggagtccgtcaaaaatcaggaccctatactcccggtcctggtcaaagaccagggccctacagttctgcagccccccaagaaccagggcagaatcgttcccgaacctctaaagaaccaggtcccaattgtacctgtgccactgaaggatcaggatcctctcgtgcccgtcccagcgaaagaccaggggcccgcggtgcccgagcctctcaaaacccaaggccccagagacccccaactccctaccgtcagccccctcccgagggtaatgatccctaccgcaccacatactgaatacattgagagctccccctag

SEQ ID NO: 23310 - DNA, 261 bp, synthetic construct
  source 1..261: mol_type = other DNA; note = Synthetic coding sequence
atgccccagtaccagacctgggaggagttcagccgggccgccgagaaattgtatcttgctgaccctatgaaagcacgggtggtactcaagtatcgacacagcgacgggaatctgtgtgtaaaggtcaccgacgatctggtgtgcctcgtatacaagaccgatcaggcacaggatgtgaaaaaaattgaaaagtttcactcccaactgatgcggctgatggtcgcgaaggaggctagaaacgttactatggagaccgaatag

SEQ ID NO: 23311 - DNA, 1206 bp, synthetic construct
  source 1..1206: mol_type = other DNA; note = Synthetic coding sequence
atggcccacgtgagcagcgagacccaggacgtgagccccaaggacgagctcacagccagtgaggcttctacccggagccccctttgtgaacacacatttcctggtgatagcgatctgcgcagcatgatcgaggagcatgcttttcaggtgctctcacaggggtccctcctcgaatctccaagctatacggtttgtgtttcagaacccgacaaagatgacgatttcctgtccctgaacttcccacgcaagctatggaagatcgttgaatcagatcaattcaagagtatctcctgggacgagaatgggacatgcatcgtgattaacgaagagctgttcaagaaggaaattctggagaccaaggccccctacaggatctttcaaacagatgccatcaagagcttcgttcggcaactaaacctctacgggttttcaaagatccagcagaacttccagcggtctgcatttcttgctacttttctctcggaagagaaagaaagctctgtcctctctaagctcaagttctactacaatcccaattttaagcgaggttaccctcaattgctggttcgggtgaagcgcagaattggggtcaagaatgcaagccccatttccactctgtttaatgaggacttcaataaaaaacatttcagggctggggccaacatggagaaccataatagcgcactcgccgcagaggccagtgaagagtctttgtttagcgcaagtaaaaacctgaatatgcctcttacaagagagtcttcagtcaggcaaataatcgccaattccagtgtgccgatacgttctgggttccccccccctagcccttcgacatccgtggggcccagcgagcaaatcgcaacagaccaacacgcaatcctgaaccagctgaccacaattcacatgcacagtcacagcacatatatgcaggccagaggacacattgtgaactttatcacaactaccacgtcacagtatcacatcatctcccccctacaaaacggctactttgggctgactgtggagccatccgctgtgccaacaagataccccctggtgtcagtgaatgaagccccttaccgcaatatgttacccgccgggaacccatggctccagatgcctaccattgcggacagaagtgcagccccacattctcgcttggctctgcagccctcgcccttggacaaataccaccccaactacaattag

SEQ ID NO: 23312 - DNA, 4302 bp, synthetic construct
  source 1..4302: mol_type = other DNA; note = Synthetic coding sequence
atgtggagcctgaccgccagcgagggcgagagcaccaccgcccactttttcctcggcgctggtgacgagggcctcggaactcgcggcattggaatgcggcccgaagaatctgacagtgagctcctagaagatgaggaggatgaagtgcccccagagccacagataatcgtgggtatctgtgccatgacgaaaaagagcaagagcaagccaatgacacaaatacttgagcgcttatgccggtttgactacctgaccgtggttattttgggtgaagacgttatcctcaacgagcccgtcgagaactggcctagctgccactgccttatctcgtttcactcaaagggctttccactggacaaggccgtggcatacagtaaactgcgcaatccatttctgataaacgacctggccatgcagtattacattcaagataggcgggaggtgtaccgaatccttcaggaggagggaattgacctgccgaggtatgcggtcctcaacagggacccagccaggcccgaagagtgtaatctgatcgaaggagaagatcaggtcgaagttaacggcgcggtattcccaaagcccttcgtagaaaaaccagttagtgcggaagaccataatgtctatatttattacccaagctcagccggtggcggctctcagagactctttagaaagataggaagtagatcttcagtatacagtccagaatcaagcgtacggaaaacggggtcatacatttacgaggagttcatgccaaccgacggcactgacgtgaaggtatatacagtgggacccgactacgcacatgctgaagctcggaagtctcctgcactcgatggtaaagtagagagagatagcgaaggtaaggagatccgctatccagttatgttgaccgctatggaaaagctggtggcgcggaaggtgtgcgtggcctttaagcagacggtgtgcgggtttgatctgctgcgggcaaatggccattcttttgtgtgcgatgttaacgggttcagcttcgtcaagaatagcatgaaatactacgatgactgcgctaagattctgggcaatacaatcatgagagagctggcaccacagtttcagataccctggagcatccctacggaagctgaggacattccaatcgtgccaacgacttcagggacaatgatggaattgcggtgtgtaatcgcgatcattcgtcacggagatagaaccccaaaacaaaagatgaagatggaggtgaaacaccccaggttctttgccctgtttgagaagcatggtggatataaaaccggaaagctgaagttgaagcggcccgaacagttacaagaggtgttagatatcaccagactgcttctggctgaactcgaaaaagagcctgggggtgagattgaggaaaagactggaaagctggagcagctcaagagtgtcctagaaatgtacggtcactttagtgggatcaacaggaaagtccagctaacctactacccccacggcgtgaaggcaagtaacgaggggcaggaccctcagagggaaacgctcgctccctcgctgttgctcgtgctcaagtggggcggcgagttgaccccagctggcagggtccaagctgaggaacttggtagggcttttaggtgcatgtaccccggcgggcagggcgattacgccggatttcccgggtgcggcttactgcgcttacactccacattccgtcacgacctgaaaatctatgccagcgatgagggaagagtccagatgactgctgccgccttcgcgaaggggctgctggctcttgaaggcgaactaacgccaatcctggttcaaatggttaaaagcgctaacatgaatggcctactggattccgatggtgactccctgtcctcatgtcaacacagagtgaaggcacggttgcatcatatactccaacaagacgctccttttgggccggaggattatgaccagctggcaccaacacggtctacaagtttgctcaacagtatgaccattatccagaatccagttaaagtctgtgatcaggtctttgcactaatagagaaccttacccaccagattagagagagaatgcaggatcccaggtccgttgacctgcagctgtaccactccgagacattggaattgatgctgcagcgttggagcaagctcgaaagagatttcagacagaaaagtgggaggtacgatatttccaagatccccgacatctatgattgtgtgaaatatgacgtgcaacacaacggttcactcggcttgcagggcaccgctgaacttttaaggctcagcaaggctctggcggacgtggtgatccctcaagagtatggtatttcacgggaggagaagctggagatcgccgtcggcttctgtctgcccctgcttagaaagatcctgcttgatctgcagagaacacacgaggacgagagtgtgaataaactgcatcctttatgttacttaagatactcaagaggcgtgctctctcccggacggcacgtacgcactcgcctttatttcaccagcgaaagccacgtgcactccctgctctccgttttccggtatggcggtcttcttgacgaaacccaggacgcacagtggcagagggcactggattacctgagtgccatatccgagctgaattacatgacgcagattgtaatcatgctctacgaagataatacacaggacccgctgagtgaggaaagattccacgtcgagctgcacttcagtcctggtgtgaaaggagttgaagaggaagggtcagctcctgccggctgtggcttccggcctgcttcttccgaaaacgaagagatgaagactaatcaggggtcgatggagaacctctgtcccggaaaggcttcagacgagcccgacagagccctacaaacaagtccacagcctcccgaggggcccgggctgcctaggagatcacctctaatccgtaatcgtaaggctggatctatggaggtgctgtccgagacttccagctcccgacctggtggttaccggctgttttcttcaagtcggcctcctaccgagatgaagcaaagtgggctaggcagtcagtgcaccggcctatttagcaccacggtgctgggcgggtccagctctgcgcccaacttgcaggattacgccaggagccacggaaaaaaattacctcctgcatctctgaagcacagggacgagctcctgttcgttccggccgtgaagcgattctccgtttcattcgcgaaacatccgaccaacgggttcgagggatgtagtatggtgccaacaatataccccctcgagactttacacaatgccctaagcctacggcaagtcagcgaattcctgtctagagtgtgtcagcgccacactgacgcacaggcccaggcttcagcggccctcttcgatagcatgcactcctcccaggcatcagacaacccatttagccctccccggaccttgcacagtcctcccctccaactgcagcagagaagtgagaagcctccctggtattcgtcaggcccatcctcaacggttagctccgctggaccgagcagcccaactactgtcgatggaaacagccagttcggctttagcgaccagccgagtttgaactcacatgtggctgaggagcaccaagggctgggattgctgcaagagacgccaggcagtggggcccaagaactctccatagagggggaacaggaattgttcgagcctaaccagtctcctcaggtccctccgatggaaacctcccagccttatgaggaagtatcccaaccatgtcaagaagtgcctgacatctcccagccatgccaggatattagtgaagccctctcgcaaccctgtcagaaggtgcccgatatttcacagcaatgtcaggagaatcacgataacggcaatcatacctgccaggaggtaccccacattagccagccctgtcagaagagcagccaactttgtcaaaaggtgtctgaagaagtctgtcaactgtgcttggaaaattctgaggaggtgtcccaaccttgtcagggtgtgtctgtggaggttgggaaactggtccacaagtttcatgtcggggtgggaagccttgtgcaggaaactttagtggaagttgggtcacccgctgaagaaataccagaggaggttatccagccatatcaggagttcagcgttgaggtgggccggctcgcgcaagagacctccgccattaacctgctcagccaggggatcccggagattgataagccatcccaggagtttcccgaagaaatagacctgcaagcgcaggaagttcccgaggagattaactag

SEQ ID NO: 23313 - DNA, 1137 bp, synthetic construct
  source 1..1137: mol_type = other DNA; note = Synthetic coding sequence
atggacagcgtgcggagcggcgccttcggccacctgttccggcccgataattttattttcggtcaaagcggagctggcaataactgggccaagggacattacacagaaggagccgagctggtcgactcagtccttgatgtggtgcgaaaggagtgcgagaactgtgattgtctccaagggttccaattgacacactctctgggtggaggaacgggctcaggtatgggcaccctcttaatctcaaaagttagggaggagtatccagatcgaataatgaacacgttctcagtcgtccccagtcctaaagtttctgatactgttgtagagccttataatgctacactgagcatccaccagctcgtggagaataccgacgaaacttactgtatcgataatgaggcactgtacgatatttgtttccgcacgcttaaactggcaactcccacctatggcgacctgaatcatttagtgagcgctaccatgagtggcgtcaccactagccttcgatttccaggccagctgaatgcggacctgcggaagttagccgtgaacatggtgcctttcccacgcttgcacttttttatgccaggctttgccccgctcaccgcaagaggaagtcagcagtatcgcgccctcacagtgcctgagctgacccagcagatgttcgatgccaaaaacatgatggccgcttgtgatcctagacatggaagatatctcacagtggctactgtgttcaggggtcggatgtctatgaaggaggtcgatgaacagatgcttgcaatccagtcaaaaaattcaagctacttcgtggagtggattcccaataatgtgaaggtcgctgtgtgtgatattccacctaggggtcttaagatgtcttcaacattcatagggaatagcacagcaatccaggagttgttcaaaaggatttccgaacagtttacagccatgttccgtcggaaggccttcctgcactggtatacaggcgaaggaatggatgaaatggagttcacggaagccgagagcaatatgaacgatctggtgagcgagtatcagcagtaccaggatgccactgccgaggaggaaggggagatgtatgaggacgatgaggaagagtccgaggcccagggacccaagtag

SEQ ID NO: 23314 - DNA, 1161 bp, synthetic construct
  source 1..1161: mol_type = other DNA; note = Synthetic coding sequence
atgtgcgagcgggccgcccggctgtgccgggccggcgcccaccggcttttacgcgaacccccgcagcaaggtcgcgctctgggcggcctgctaaggtgggtgggtgcacgcatgggcgaaccacgcgagtcattagcccccgctgcccccgccgatccaggcccagcctcccctcggggggggactgcggtgattctcgacatttttaggcgcgcagataagaatgatgacggcaaactttcgttggaggagtttcaattgttttttgcagacggagtgctcaatgaaaaagagttagaagatctctttcacaccatcgattccgacaatactaaccacgtggacaccaaagagctgtgcgactactttgtcgaccacatgggcgattatgaggacgttctcgcttctctggaaactcttaatcactcagtgctcaaagcaatggggtacaccaaaaaggtgtatgaaggaggcagtaacgtggatcagtttgtgacgagatttctccttaaagaaaccgcaaaccagattcagtctcttctgtcctctgtggagtccgctgttgaggcaattgaagaacagacatcacagttacggcagaaccatatcaaacccagccattctgcagcgcaaacttggtgtgggtccccaacaccagcctccgctcctaaccacaagttgatggctatggagcaggggaaaacactaccctccgctacagaggatgcaaaggaggaagggcttgaggctcagattagccgactggccgagctcatcggccggcttgagtctaaggccctgtggtttgaccttcaacagcgactctcagatgaggacggcacgaatatgcaccttcaattagtcaggcaggaaatggccgtttgcccggagcagttgagcgagtttcttgattcccttcgacagtatctgcgcgggaccacaggggttcggaactgcttccatataactgcagttaggttgtcggatgggttcacgttcgtgatttatgagttttgggaaacagaggaggcttggaaacgccatttgcagagtccactgtgtaaggctttccggcacgttaaggtggatactctgagccagccagaggctctttcacggattctggtgcccgctgcctggtgcacggtcggacgggattag

SEQ ID NO: 23315 - DNA, 1482 bp, synthetic construct
  source 1..1482: mol_type = other DNA; note = Synthetic coding sequence
atggagcggagccccgacgtgagccccggccccagccggagcttcaaggaggagctgctgtgcgcggtttgttacgatccctttagagatgctgtcacattacggtgtggccataacttctgtaggggctgcgtgtcacggtgttgggaggtacaggtttcgccaacatgccctgtgtgcaaagatagggcttccccagcggacctgaggacaaaccacacactcaataacctcgtggaaaaactcctgcgagaagaggcagagggcgccaggtggacctcctataggttcagccgagtgtgccggctgcacagaggccagttgtccctcttctgcttagaggacaaagaattgttgtgctgttcctgccaggctgatccacggcaccagggtcatagagtacagcccgttaaggataccgcacacgattttcgcgcaaaatgccgcaatatggaacacgctctcagagaaaaggcaaaggcgttttgggccatgagaaggtcttatgaggcaatagccaagcacaaccaggtggaagccgcatggctggagggacgcattcgccaggagtttgataaactccgcgagtttctcagggtggaggaacaagccatcctggatgcaatggctgaggaaactcggcagaaacaactgctggcagatgagaaaatgaagcagctcacagaagaaacggaggttctcgcacacgagattgagcggctccagatggaaatgaaggaggacgatgtgagttttctcatgaaacacaagtcccgcaaacgcagactcttctgtactatggagccagagcctgtacagcccggcatgctaattgacgtctgcaagtacttagggtccctacagtacagagtgtggaaaaagatgctggcctcggttgagtctgttcccttttcatttgatcccaacaccgctgcgggatggctttcggtgtccgatgacctgacctcagtgaccaaccatggatatagggtccaggtggaaaatcctgagaggttttctagcgcaccttgcctcctgggttccagagtgtttagccaggggtcacatgcctgggaagtcgcactgggaggactgcagtcctggcgcgttggagtcgtgcgtgtgcggcaggactcaggagcagaaggccactctcacagttgttaccatgatacccgctcgggcttttggtatgtgtgcaggacacagggggtggagggagaccactgcgtaacaagcgaccctgcgactagccctttggttctcgccattccccgacgcttgcgcgtggaacttgaatgtgaagaaggagagctgtccttctacgacgctgagcgacattgccacctgtatacattccacgccagattcggcgaagtgaggccgtatttttacctgggtggggcccggggtgccggtcctcccgagcccctgcgcatttgtccccttcacatcagcgtgaaggaagagctagatggttag

SEQ ID NO: 23316 - DNA, 2262 bp, synthetic construct
  source 1..2262: mol_type = other DNA; note = Synthetic coding sequence
atggcccccgacagcgaccccttccccgagggccccctgctgaagctgctcccgcttgacgctcgggaccgaggaacacagagatgcagactgggacccgccgcccttcacgcgctaggcgccagactgggctccgccgtcaagatcagcttacccgatgggggttcatgcctttgcaccgcatggcctaggcgagacggtgccgacggctttgtgcagctcgacccactgtgtgcctcgcccggtgccgccgtcggagccagcagatctcgacgatctctgagtctgaatagacttctgctcgtgccctgtccccctctgcgacgggtggccgtgtggcccgttctcagggagcgggccggtgcccccggtgcccggaacacagcagccgtccttgaggcggcccaagagctgctgaggaatcgtcccatctctcttggacatgtggtcgtggcacccccaggggctcccggactagtagccgcactccatatagtcggcggcacgccttccccagaccctgctggtctcgtcacccctcgcaccagagtgagcctgggcggtgagcctccctccgaggcacagccacagcccgaagtgcccctcggcggcctttccgaagcagccgatagtctgagagaattactgagattgcccctcagatatccgcgagccctgacagcattgggcttggccgttcctcggggggtcctgctcgcggggccacctggtgtcggtaaaacacagctagtccgggcagtggcacgggaagcaggagcagagctcctggctgtctcggcccctgcacttcaggggtctagacctggcgaaaccgaggaaaacgttaggagagtcttccagagagccagggaattggcgtcacgtgggccttctctcttgttcctcgacgaaatggacgcactgtgccctcagaggggtagcagagcccccgagagcagagttgtagcccaagtgcttactctgcttgatggtgcctctggcgatcgggaagtggtggtggtgggcgccacaaaccgccccgatgctctcgatcctgccctgcgtcgtcccggacgcttcgatagggaagttgtaatcggaactccgaccctgaaacagcggaaggaaatactgcaggtcatcacgagtaaaatgccaatctcttctcacgttgatctcgggcttctggctgaaatgacagtcgggtatgtaggcgctgatttgactgccctttgtcgggaggccgccatgcacgctttgttgcactcggaaaaaaaccaggacaatcctgttatcgacgaaatcgattttctggaagcattcaaaaacattcagccctcctcttttaggagcgtgataggtctgatggacatcaagccagtggactgggaagaaataggaggactcgaagatgtgaaacttaagcttaaacaaagtatcgagtggcccctcaaattcccatgggaattcgtgagaatgggccttacccaaccaaagggggttttactgtacggcccacccgggtgcgccaaaaccaccttagtgagggctttggccacgagctgtcattgtagtttcgtgtctgtttccggcgcagatttgttctctccatttgtcggagactctgagaaggtcctcagccagatcttccgccaagccagagcgagtactcctgccatactgttcctagatgaaatagacagcatactgggagcccggtccgcaagcaagaccggctgcgacgtgcaggaacgggttctcagcgtgttgcttaacgaactggatggcgtgggtttgaaaacaatcgagcgcagaggctctaagtcttcacagcaggagttccaagaggtttttaacaggtctgtgatgattatcgcggcgacaaaccgccctgacgtgctggatactgccctactgcgtccaggacggctagacaagattatttacattccgcctccagaccataaggggaggcttagcattctgaaggtttgtacgaaaaccatgcctatcgggcccgacgtgagtctagaaaatctggccgccgaaacttgtttcttctccggagccgatctccggaatctgtgtactgaggcagctctcctggccctgcaggagaacggccttgacgcgaccacggtgaagcaagaacactttctcaagtcattaaagaccgtaaaaccctccttgtcgtgcaaagacctagccttatatgaaaacctctttaagaaagagggattctcaaatgtcgagggcatctag

SEQ ID NO: 23317 - DNA, 1026 bp, synthetic construct
  source 1..1026: mol_type = other DNA; note = Synthetic coding sequence
atgcccaagcggaaggtgaccttccagggcgtgggcgacgaggaggacgaagacgaaataattgtgccgaaaaaaaaactcgtggatcctgtggccggctccgggggtcccggatccagattcaaggggaagcactcactggatagtgacgaagaagaagacgacgatgacggtggttcatctaaatacgacattctggcctcagaagacgttgagggccaagaagctgccacactgccttctgagggcggcgtacggattacccccttcaatcttcaagaggagatggaagaaggccactttgatgctgacggaaactacttcctcaatcgggatgcacagatccgcgacagttggctggacaatatcgattgggtcaagatcagggagaggccccctggtcagcggcaagccagcgacagcgaagaggaagatagtctgggccagacctcgatgtccgctcaggccctgctggaggggctgctcgaacttctgttgccacgggagacagtagccggagccctacgtaggctgggagcccgcggagggggtaagggcagaaaaggccctgggcagccttcatccccccagagattggataggctgagcggattggccgatcagatggtcgcacgagggaacctgggtgtgtatcaggaaaccagagagcgtttagccatgcgactaaaaggccttggctgccagacacttggtccccacaaccctactcccccgccatccctcgacatgttcgctgaagaactcgccgaggaagagctggagacccccactccaactcagaggggggaggcagagagtcgaggagacgggctggtggatgtcatgtgggagtataagtgggaaaatacaggcgatgccgagctatacggaccttttaccagcgctcagatgcagacatgggtgagtgaaggctacttccccgacggagtctactgtaggaagcttgatccccccggggggcaattttacaacagtaaacgaatcgacttcgatctgtatacatag

SEQ ID NO: 23318 - DNA, 690 bp, synthetic construct
  source 1..690: mol_type = other DNA; note = Synthetic coding sequence
atggccgaggagatggagagcagcctggaggccagcttcagcagcagtggagccgtgtcgggggccagtggctttctgccgcccgcacggagccggattttcaagatcattgtgattggcgactccaacgtcggtaagacctgtcttacgtaccggttttgcgcaggtcggtttcccgacagaaccgaagcaaccatcggagtggattttcgcgagcgggcggtcgagattgacggcgaaaggattaaaattcaactgtgggatacagcaggacaggagcgattcaggaaaagcatggtgcagcactactatcgcaacgtacacgctgtagtattcgtctatgatatgactaacatggctagtttccatagcctacccagctggatagaagagtgcaagcaacatcttcttgccaatgatatcccgaggattctggtgggaaacaagtgtgatttgcggtctgcaatacaggttccaaccgacctggcacaaaagttcgcagatacacacagtatgcccttgttcgaaacttccgctaagaacccgaatgataacgatcacgtggaagcaatttttatgactctagcacacaagctgaagtcccataagccactgatgctttcccaacccccggacaatggaatcatattgaaacccgagcctaagcctgcgatgacatgttggtgttag

SEQ ID NO: 23319 - DNA, 2352 bp, synthetic construct
  source 1..2352: mol_type = other DNA; note = Synthetic coding sequence
atgctgctgggcttccggcggggccggcggagccacttcaagcacatcattcatgggttactccctgctgcctctgtggcccccaaagccgccgtcccccgcacccctcctcctcgctcgcctaacccatcacccgaacgccctcgatcagcccttgctgcggccatccttgctaccaccctgacaggaaggactgtcgccattccccaaccacgccagaggagcaggtctgagtctgatgtttcctctgttgaacaggattcgttcatagaaccttatgctactactagccagctgcggcctaggcccaattggcagtcagagatgggacggcgatcatcccttccgtctttcgaaactcttgactatggggatgaagaagatattgagacccaactgagtagcagtgggaaagaactcggggacgtcagtgcccgggaagacagaggcgggcactctgatgatctctatgccgtccctcacaggaaccaggtgcctctattacacgaggtgaattccgaggatgacgagaatataagccatcaggatgggttccctggatcaccgcccgccccacaaagaacccagcagaaagacgggaagcaccccgtgcttaacctaaaggatgaaaagccacccttgtgcgagaagccccctccttctcccgacatcacagggcgagcccgacaaaggtatactgagatcacacgcgagaaattcgaggcactgaaggaagaaaacatggacctgaataacatgaaccaatcattaacccttgagctgaatacaatgaagcaggcgatgaaggagctgcagctgaagctgaaaggaatggagaaggagaagagaaagctgaaagaggccgagaaagcctccagccaggaggtagcagcccccgaattactttacttacgcaagcaggcccaggagctcgtagacgaaaatgacggcctgaagatgaccgtgcatagactcaacgtggaactcagtcggtaccaaactaagttccgccacctttctaaagaagagagtctaaacatcgaggggctcccttcaaaaggtcccatacctccctggttgctggacatcaagtaccttagccctcttctgttggcttacgaggacatgatgaaggaaaaagacgagctgaacgctacgctcaaggaagaaatgcggatgtttaggatgcgggtccaagaggtcgtcaaagagaatgaagagcttcaccaggaactgaacaagtcatccgccgtcaccagcgaagagtggaggcagctgcagactcaagccaagttagtcctggaggagaacaaactactcttggagcaactggagattcaacagagaaaggctaaggatagtcaccaggagaggctgcaggaagtgagtaaactcacaaagcagttgatgttactcgaagctaagacccacggccaggaaaaagagcttgctgagaatcgcgagcaattggagatcctccgagcaaagtgccaggagctaaagacccactctgatggtaagatcgcagtggaagttcacaaatcaatcgtaaatgaactaaagtctcagctccagaaggaagaagaaaaagaacgggcagaaatggaggagctgatggaaaagctcacggttctgcaggcacagaaaaagagtctgctgctggaaaagaattccctgaccgagcagaacaaggcacttgaagctgaacttgagagagctcagaagatcaaccggaaatcccagaagaagatcgaagtgctcaagaaacaggtagaaaaggcaatgggcaacgaaatgagtgcccatcagtacctggcgaacctcgtgggcctcgccgaaaatatcacccaggagcgggacagtcttatgtgcctagccaagtgccttgagtctgaaaaggatggtgtgctgaataaagtgattaagtctaatattagactgggcaaactggaggagaaggtaaagggatataagaagcaggcggctttaaaactgggcgacatctcccacaggttactggagcagcaggaagattttgctgggaagactgcacagtatcgtcaggagatgaggcatctacatcaggtgcttaaggataaacaggaggtcttggatcaggcactccaacagaatagggagatggaaggggagctagaagttatttgggaaagtacgttccgagaaaatagacgaattagagaattgctgcaggatactttaactcgcaccggagtccaggataaccctcgagcacttgtagcgcctagcctgaacggcgtgtctcaggcggatctgctggacggctgcgacgtctgctcctacgacctcaaatcccatgctcccacttgctag

SEQ ID NO: 23320 - DNA, 639 bp, synthetic construct
  source 1..639: mol_type = other DNA; note = Synthetic coding sequence
atggccgcccggcggggcgccctgatcgtgctggagggcgtggacagggccggcaaatccacacagtcacggaaacttgtggaggctctgtgtgctgctggtcaccgcgccgagctcctgaggtttcctgagcggagcacagagatcgggaagctcctctcaagctatctgcagaaaaagagtgatgttgaggatcacagtgtgcacctgcttttttccgcaaacaggtgggaacaagtccctctgattaaggaaaaacttagccagggcgttactctggtggtagacaggtatgccttcagcggcgtcgccttcacaggcgccaaggaaaatttctcactcgactggtgcaaacagccagacgtgggtcttccaaaacctgaccttgtactgttcctgcaactgcagcttgctgacgccgccaaaagaggggctttcgggcacgaaagatacgagaatggggcattccaggagagagcgctgaggtgttttcaccagttgatgaaggacacaacattgaactggaaaatggtcgacgcaagcaaaagcattgaggctgtgcacgaagatatccgcgtgctgtctgaagacgctatccgaacagctaccgagaaaccgctcggtgaattgtggaagtag

SEQ ID NO: 23321 - DNA, 504 bp, synthetic construct
  source 1..504: mol_type = other DNA; note = Synthetic coding sequence
atggaggagacctacaccgacagcctggaccccgagaagctgctgcaatgcccttatgataaaaatcatcagattcgggcatgtagattcccctatcacctcattaaatgtagaaagaatcaccctgatgtagccagtaaactggcgacctgtccattcaacgcgcggcatcaagtgcccagggccgaaatttcccaccatattagctcttgcgatgatcgcagctgtatcgagcaggatgtggtgaatcagactcgctctctgcgccaggaaaccttggcagaatctacatggcaatgtccgccatgtgatgaagactgggataaagatctatgggagcagacgagcacccccttcgtatggggtactactcactactcagacaacaatagtccggcttcaaacatagtgaccgaacacaagaataatcttgcaagcggcatgcgggtgcccaaaagtctaccctacgttctgccttggaagaataatggaaacgcccaatag

SEQ ID NO: 23322 - DNA, 381 bp, synthetic construct
  source 1..381: mol_type = other DNA; note = Synthetic coding sequence
atggccgccggccccgagccccccgagtgggagccccggtggcggaaagccctgagaggaaaggagaataaggggtcagtagaaataatgcgcaaagatctcaacgacgctagggatctccacggacaggctgaatccgcagcagctgtgtggaagggacacgttatggaccgccggaagaaggcactcacagactacaagaagctgagagccttctttgtagaggaagaggagcactttctacaggaggctgaaaaggaagaaggcttgcccgaagacgagctcgccgaccctacagagcgattcagatcacttctgcaggctgtgagcgagctggagaagaagcacagaaacctggggctaagtatgcttctccagtag

SEQ ID NO: 23323 - DNA, 1668 bp, synthetic construct
  source 1..1668: mol_type = other DNA; note = Synthetic coding sequence
atgcagagctgcgagagcagcggcgacagcgccgacgaccccctgagcagaggtctcaggcgcaggggccaaccacgagtagttgtcataggggctggacttgctgggctcgcggcggccaaggctctgcttgagcaggggtttaccgacgtcactgtgctcgaagccagctcccacattggaggtcgagtgcaatcagtgaagctgggacacgctacattcgagctgggggctacgtggatacacgggagtcatggtaatcccatatatcatttggccgaggctaacggtctactggaggagaccacggatggcgaacggagcgttggtagaataagtctctatagcaagaacggcgtggcttgttatctcacaaaccatgggaggaggatacccaaggacgtcgtggaggagttctcggatctgtacaacgaggtgtataacttaacacaggaattttttcgccatgacaagccggtaaatgcagagtctcagaacagcgtgggcgttttcacacgagaggaagtacggaacagaatccgtaacgatcccgatgaccctgaagctacaaaaaggcttaagctggcgatgattcagcagtacctgaaggttgagtcctgcgagagcagctcccactctatggatgaagtgagcctgtcagcctttggggagtggaccgaaattccgggcgctcaccacatcattccatctggatttatgagagtagtggagttgttggctgagggtattcccgcccatgtcatacagttaggtaagcctgtccggtgcatccattgggatcaggcctcagcccggccaaggggacctgaaatcgaacctcgcggcgaaggggatcacaatcacgacaccggggagggggggcaaggcggtgaagaaccgcgcggaggacgctgggacgaagatgagcagtggtcagtggtggttgagtgcgaggattgtgagctgattccagcagatcacgttattgtgacagtgtcccttggcgtccttaagaggcaatacaccagtttcttccgccccggcctccccactgaaaaggtcgcagcaattcatcgactaggaataggtaccacagataagatattcctggaatttgaggaaccattttggggaccggagtgtaacagcctgcaattcgtctgggaggatgaagcagaatcacatactctaacctaccctccagaactttggtacagaaagatttgtgggttcgacgtgctttacccacctgagaggtacggccatgttttatctggctggatttgtggcgaagaggctttggtcatggagaagtgtgacgatgaagccgttgccgagatatgcactgagatgctgcggcaattcaccggcaatccaaacatacctaagcctcgacgaatactacggtcggcctggggctcaaacccttattttcgagggagctattcctacactcaagttggttcttcaggcgctgacgtcgaaaagctcgctaaaccattgccctacaccgaatcctccaagacagccccgatgcaggttttatttagcggggaagccactcaccggaaatactattccacaacccacggtgccctgttgtcgggtcagcgagaggctgcacgtctcatcgaaatgtatcgcgacctctttcagcaaggaacttag

SEQ ID NO: 23324 - DNA, 3153 bp, synthetic construct
  source 1..3153: mol_type = other DNA; note = Synthetic coding sequence
atggccctgtacgacgaggacctgctgaagaaccccttctacctggccctgcagaagtgtcggccagacctctgtagtaaagtggcacagatccacggcattgtgctcgttccttgcaaaggctccctgagcagttccattcaatccacgtgccagttcgagagctacattctgatacctgtagaggaacattttcagactctgaatggcaaagacgtgtttatccagggcaaccgcattaaactcggagcaggatttgcctgcctgttatccgtcccgatcctgtttgaagaaacattttacaatgaaaaggaggaatccttctcaatcctctgtatcgcccaccctttagagaagagagaatcctcagaggaaccattagccccctccgaccccttctctttaaaaaccatcgaggatgtccgcgaattcttaggccgccacagcgagaggtttgaccggaacatcgctagcttccatagaaccttccgggaatgtgagagaaaatcgttgcgccatcacatagattcggctaatgcgctgtatactaaatgtctccagcagctgctcagagattctcatctcaagatgctcgcaaagcaggaggcccagatgaatttgatgaaacaggccgtggagatttacgtgcatcacgaaatttataacttgatcttcaagtacgtgggaacgatggaggcctccgaggacgccgcttttaacaaaattactcggtctctccaagacctgcagcagaaggacattggagtgaaacccgagttctcctttaatatcccccgggctaagagggagctcgcccagttaaataagtgtacatcgcctcaacaaaaactggtgtgcttgcggaaggtggtgcaactgatcacacagtctccatcacagcgtgttaacttagagactatgtgtgccgacgacctgctgtccgtcctgctttacctcctcgtgaaaacagagatcccgaactggatggctaacctctcttatattaaaaacttccggttttcatctttggccaaggatgaacttgggtactgtctcactagttttgaggcggccatcgagtatatccgccagggttctctatctgccaaaccccccgagtcagaagggttcggagatcggctgtttctgaaacagcggatgtccctgttgtcgcaaatgacaagcagtccaaccgattgtttatttaagcatattgcgtcagggaaccagaaagaagtggaaagacttctgagccaggaggaccatgataaggataccgtgcagaaaatgtgccacccactctgcttctgcgacgattgcgaaaagctggtgagtgggaggctcaacgacccatctgtggtcacaccctttagccgggatgatagaggccatactccactgcatgtagcggcagtctgtggacaggctagcctgatagatcttcttgtttcaaagggagcaatggttaacgccacggattaccatggtgcgaccccacttcacctcgcttgccagaaaggctaccaaagcgttactctccttctgctccattataaggcatctgccgaggtgcaagataataatggcaacacacctctccacctcgcctgtacatacggtcacgaagactgcgtgaaggcactggtgtactacgacgtagagtcctgccgcctggacattggcaatgaaaagggcgatactccacttcacatcgctgccagatggggctaccagggcgtgatcgagacactcctccagaatggagcctcaactgagatccagaatcggctaaaggagacgcccctcaaatgtgccctgaatagcaagattctgtcggtcatggaagcctatcacctttcctttgagcgacgccaaaagagcagcgaggcccctgttcagagtccacaaagatccgtggactctatctctcaggagagctctacatcatcctttagcagcatgagtgcctctagtcgccaggaagagacgaagaaagactacagggaagtggagaagttattgcgcgctgtcgcggatggggacctcgaaatggtgcggtacttacttgaatggactgaggaggatctggaggacgcagaagataccgtctctgcagcagatccggagttctgccacccgctatgtcagtgccctaaatgcgcgcccgcccagaaacggttggcaaaggtgcccgcttccggattgggcgtaaatgtaactagccaagacggctctagccccctccacgttgcagcattacatggccgagccgacctgatccccctcctcctgaaacacggcgccaatgcaggggccagaaacgcggatcaggccgtgcctctgcacctcgcttgccaacagggacatttccaggtcgtgaagtgcctcttggatagcaacgccaagccaaacaagaaggatctctcagggaacactccactcatctacgcttgcagcggcggccatcacgaattagtggccctgctcctccaacacggagcttcaataaatgcttctaacaacaagggaaatactgccctgcacgaggccgtgattgagaaacatgtgtttgtggtggagttgctattgctccacggcgccagtgtacaagtactgaataaacgacagcgaacggcagtggattgtgccgaacagaactccaaaatcatggagctgctgcaggtagttcccagttgtgtcgcgtctctggatgacgtggctgagacagaccgcaaagaatacgtgacagtgaagatccggaaaaagtggaattcgaagctgtacgacctgcctgatgaaccatttacacggcagttttacttcgttcacagcgcgggccagtttaagggcaagacctcccgggaaatcatggctcgcgatcgatccgttcctaacctaacagaaggctcactgcatgaaccagggagacagagcgtaacccttagacagaacaacctccccgcacagagcggctcacacgcagctgagaaaggaaattctgattggcccgagagaccaggcctgacacagactgggcctggacaccggcgcatgctgcgtcggcacacagtggaagacgcagtagtgtctcagggccctgaggccgccggtcccttatccactcctcaggaggtgagtgcctctcggtcatag

SEQ ID NO: 23325 - DNA, 1662 bp, synthetic construct
  source 1..1662: mol_type = other DNA; note = Synthetic coding sequence
atggacgtggacaaggagctgggcatggagagcgtgaaggccggcgctagcggcaaacccgaaatgaggttgggaactcaggaggagactagtgaaggcgacgcaaatgagtctagccttctggtcctttcatctaatgtcccactcctggcacttgagttcttggaaatcgcccaggccaaagaaaaggccttcttgcctatggtctcacacacatttcacatgcgcaccgaagagtcagacgcgagccaggagggagacgacttgcctaagagctcagctaatacttcccacccaaagcaagacgacagtcccaaatcatcggaggaaaccatccagcctaaggagggggatattccaaaggccccagaggagaccatacagagcaagaaggaggacctccctaaatcttctgagaaagcaatacaacccaaggagagtaacattccgaaatcctctgctaagccaatacagcccaaattggggaatatcccgaaagcatcagtgaagccctcacaacctaaagagggcgacattccgaaagcacccgaagaaactatacagagtaagaaagaggacctgcccaaatcctcagaggaagcaattcagcctaaagaaggggacatcccaaagagttccgccaaaccgatccagcctaaactggggaatattgctaagacgtccgtcaagccaagccaacccaaagaaagcgacatccctaagtcacctgaagaaacaattcagcccaaagaaggagatatcccaaaaagcagtgccaagcctattcagcccaaattgggcaacattcctaaggcctcagtgaagccgtctcagccaaaggagggcgacatcagcaaaagccccgaagaggccatccagccgaaagaaggcgacctgcctaagtccctggaagaggcaatccagcctaaagagggcgacattcctaagagccccgaagaagccatccagccgaaagaaggagacattcctaagtctctggaggaggcaatccagccgaaggaaggcgacattcccaagtctcctgaagaaacaattcagccaaaaaagggagatattcccaagagtcccgaagaggctattcagccaaaggaaggcgacattcccaagtctccaaagcaggcgatacagcccaaggagggagacattcccaagtcactggaagaagctatcccaccgaaggagatcgacatccccaaatccccagaagaaacaatacagcctaaggaggacgattcccctaaatctctcgaggaggcaactcctagcaaggaaggagatattcttaagccagaagaagagacaatggaatttcccgagggtgacaaagtgaaggtgatcctttccaaggaggatttcgaagcgtcgttgaaggaggccggtgaacggctggttgccgttgatttttctgccacgtggtgcgggccatgtaggactattcggccatttttccacgcactaagtgtgaaacatgaagacgtcgttttcctggaagtggacgccgacaactgtgaagaggtggtgagagagtgcgcaattatgtgcgtccctaccttccagttctataagaaagaagaaaaagtggatgaactatgcggtgccttgaaagagaaactcgaagccgtgatcgctgagcttaaatag

SEQ ID NO: 23326 - DNA, 2268 bp, synthetic construct
  source 1..2268: mol_type = other DNA; note = Synthetic coding sequence
atggtgagccacggcagcagccccagcctgctggaggccctgagctctgattttcttgcctgtaagatttgtttggagcagttaagggctcccaaaactctgccatgtctgcacacctactgtcaggactgtcttgcccagttagccgatggtggcagggttcggtgccccgagtgcagggagactgtccctgtccctccagagggtgtcgcctcttttaaaactaatttcttcgtaaacgggctgctagacctggtgaaagctcgggcgtgtggggatctgcgagcaggcaagccagcctgcgcgttgtgtcccttggtgggcggaacgagtacaggagggcctgcgacagcccgatgtttagattgtgcagacgatttgtgccaggcatgtgctgacggacataggtgcactcgacagacccacacccaccgtgttgtggacctcgtgggctacagggcaggctggtatgatgaagaagctcgggaacgtcaggccgctcagtgcccccagcatcccggcgaagccctacgttttctatgtcagccatgttcccagctgctgtgtcgcgagtgcaggctggatccgcacctcgaccacccctgtctgccacttgccgaagcagtgcgggcccggaggcctggactagaaggccttctcgcgggcgtggataataatttagtggaactcgaggcagcccggagagttgagaaggaagccctggccaggctcagggaacaggcagcccgagttgggacccaggtggaggaagcagcggaaggggttttgagggcgctgttagctcagaaacaagaagtcttgggacagctgagagctcatgtggaggccgccgaggaggccgcgcgcgaaagactcgccgaactggaagggcgggaacaggtcgctagagccgccgctgcatttgcaaggcgggtgttaagtcttggtcgcgaggccgagatactctctctcgagggagctatcgcccagcgcttgagacagctgcagggttgtccatgggcgcccggccccgctccgtgcctcctgccgcaactggagttacatccgggattacttgataagaactgccacctgttacgcttgtccttcgaggaacagcagccccagaaggacgggggaaaggatggcgcaggaacccaggggggggaagaaagccagagccgcagggaagacgagcccaagacagaaaggcagggcggggtgcagccacaagccggggatggcgctcaaactccaaaagaagaaaaagcacagacaaccagggaggaaggcgcccagactctggaggaagatagagcgcagaccccgcatgaggatggcggtccccagcctcacagaggtggccggccaaataagaagaagaagtttaagggtcggctaaagtcgatcagccgcgaaccctctcccgccttggggcccaatctcgatggctctggcttgctcccaagacccatcttctattgcagcttccctacccggatgcctggggacaagcgatcaccaaggattacaggcctgtgcccatttgggccccgcgaaattctggtagcggatgaacagaatcgggccctgaaacgattttctttgaacggggactacaaagggactgtgcccgtgccggaggggtgctccccgtgcagtgttgcggctcttcagtctgccgtggcgttctcagcctccgcccgtctgtatctaattaaccccaatggggaggtccagtggagacgcgctttatccctgagtcaggcatcgcacgccgtcgccgcactgccctctggcgacagagtcgccgtttcggtggccggccatgttgaagtctacaatatggagggatcgctcgccacccggtttattcccggcggcaaggcttcacgcggactgagggccctggtctttctcaccacctctcctcaggggcattttgtggggagtgactggcaacaaaactccgtggtgatctgcgacggcctgggacaagtggtcggcgaatataaaggtcctggcctacacgggtgccaacccggcagtgtgagtgtcgacaagaaggggtatatttttctgaccctgcgcgaagtgaacaaagtagttatcctggaccccaaggggtccctgctgggggactttctgacagcttaccatggcttagagaaacctcgtgtgacaacgatggtggatggaaggtacctcgtggtttccctaagcaacggaacaattcatatatttagagtgcggtcacccgattcttag

SEQ ID NO: 23327 - DNA, 1467 bp, synthetic construct
  source 1..1467: mol_type = other DNA; note = Synthetic coding sequence
atggccgccggcagcgaggccaccacccccgtgatcgtggccgccggtgccgggggcgaagagggcgagcacgtcaagccattcaaacctgagaaggccaaagaaataataatgtctctgcagcagcctgccattttctgcaacatggtttttgattggcccgcccgccactggaacgcaaaatatctgagtcaggtcttgcatgggaagcagattcggttccgtatgggtatgaagagcatgtcaaccgttccccagtttgagaccacctgtaattatgtggaagccactctggaggagttcttaacgtggaattgtgatcaatcctcaatcagcggtccctttagagactacgatcactcaaagttctgggcttatgctgattacaagtacttcgtgagtctgttcgaggataagaccgatctgttccaagacgtgaagtggagcgactttggctttcctggcaggaacggacaggaaagtaccttatggataggttccctgggggcacacactccctgccatttagatagctatggctgcaacctggtgttccaggtgcagggccgcaagagatggcacctctttccgcccgaggacaccccttttctctaccccacccgcattccctatgaggaatcctcagttttctctaaaattaatgttgttaaccctgacctcaaaaggtttcctcagttcagaaaggcccagcgtcacgccgtcacattaagtcctggacaggtacttttcgttcctagacattggtggcactacgtggagagcatcgaccccgtcacagtatcgattaattcctggatcgagcttgaggaggaccacttggctcgagtcgaggaggccatcacacggatgctcgtctgcgcactaaaaactgccgaaaatccccagaatactcgagcgtggctgaacccaactgaagttgaggaaaccagtcatgccgttaattgctgctacctgaatgctgcagtgtctgccttcttcgacagatgtcgcacatctgaggtcgtcgaaatacaggccctgagaactgacggagagcatatgaaaaaagaagaactgaacgtttgcaatcatatggaggttgggcaaaccggcagtcagaatctgaccaccggcacggacaagcccgaagccgcctctccttttgggcccgatttagtgccggtagctcagagatcagaagagccaccttccgagcgaggggggatattcggaagcgacggcaaagacttcgtggacaaggacggggaacactttggtaagttgcactgtgccaagcgccaacaaattatgagtaattctgagaacgcaatcgaggaacagatcgccagtaacacaactactacgccacagacctttatatctacagatgacctgctagactgtctggtgaatccacaggtcacacggatagttgcccagcttctgatccaggggcgctcgctgtag

SEQ ID NO: 23328 - DNA, 579 bp, synthetic construct
  source 1..579: mol_type = other DNA; note = Synthetic coding sequence
atggcccccaagcccggcgccgagtggagcaccgccctgagccacttggtactgggtgtggtttctctgcatgctgctgtgtctaccgcagaggccagtcgtggggccgccgctgggttcctgttacaagttctggccgcaaccactacacttgctcccggactgtcaacccatgaagattgccttgcaggcgcttgggtggctacggttatcggtttgcctttgctggcgtttgacttccactgggtgaatggagatcgctcgagtgccaatctcctcctggggggtgggatggtactcgccgtggcaggtggtcatctgggacctgagggtcgatccgtggcaggacaggctatgttgctggttgtcgccgttactattctaatagtggctgtattcacagccaatacttacggtatgtggggtggtgccatgttgggagttgctgggctcctcagcaggttggaagaggatcgcctcttgctgctgccaaaagaggacgtctgcaggtgggccctagctgtcggctcttgggcttactgccgcgcactccatactcagaggctccagtgggagtag

SEQ ID NO: 23329 - DNA, 462 bp, synthetic construct
  source 1..462: mol_type = other DNA; note = Synthetic coding sequence
atgaccagcgagagcaccagcccccccgtggtgccccccctgcactctcccaagtctcccgtgtggcctaccttcccatttcatcgtgaggggtccagagtttgggagaggggtggcgtcccacccagggacctgccaagcccactgcctacgaaacgcactaggacctattcagccaccgcacgcgccagcgctggcccagtatttaagggggtatgtaagcagttctcccgctcccaggggcatggatttatcactccagaaaacgggagcgaggatatctttgtgcatgtcagcgatattgaaggggaatatgttcccgtggagggtgatgaggtcacttacaaaatgtgccccattcctccgaagaaccagaaatttcaggccgtggaggttgttctcacccagctggctccacatactccccacgaaacgtggagtggccaggtcgtgggatcctag

SEQ ID NO: 23330 - DNA, 537 bp, synthetic construct
  source 1..537: mol_type = other DNA; note = Synthetic coding sequence
atgagcagcttcagccgggccccccagcagtgggccaccttcgccagaatctggtaccttctggacgggaaaatgcagccccccggaaaacttgccgcaatggcttcaatcagattacagggcctacacaagcctgtttatcatgccctcagtgattgcggagatcacgttgtaataatgaatacccggcacattgccttctcaggcaacaagtgggagcagaaagtgtatagctcccatacagggtaccccggagggtttagacaggtgactgcggctcagttgcacctccgagaccccgtagctattgttaaactcgctatttacggcatgctgccgaaaaatctacaccgacgaactatgatggaacggctgcatctgttccccgatgaatatatcccagaagacattcttaagaacctggtagaggaacttccacagccacgaaagatcccaaagaggctggatgagtacactcaggaggaaatcgatgctttcccaaggctttggacccctcccgaggattaccggctctag

SEQ ID NO: 23331 - DNA, 8763 bp, synthetic construct
  source 1..8763: mol_type = other DNA; note = Synthetic coding sequence
atgcggggccggcggggccggccccccaagcagcccgccgcccccgccgctgagagatgcgcgcctgccccaccaccacctccacccccgcctaccagtggacctattggtggcctaagatctcgacatcgcggttcaagtaggggcagatgggctgcggcccaggccgaagtggcccctaagacccgcctctcctcccctcggggcggaagttcaagccggcggaaaccccctccccctccacctgccccccccagcaccagcgccccaggcagagggggacgcgggggcggaggcgggcggacagggggcggcgggggcggggggcacctcgctagaactactgctgcacggcgagcagtgaataaggtggtttatgacgaccacgaaagcgaagaggaggaagaagaggaagatatggtcagcgaagaagaagaggaagaagacggtgacgcagaggaaacacaggacagcgaagatgacgaggaggatgagatggaagaagatgatgacgattcagattatcccgaggaaatggaagacgatgacgacgatgcttcctattgcaccgagagttcatttaggagccattcaacttactccagcacaccaggcagaaggaagccacgcgtccatcgaccacgctcacctatcctggaggagaaggatatccctcctctggaattccccaaaagtagcgaagatttgatggtgccgaatgagcatattatgaacgtaattgccatttacgaggtcctgcggaactttggaacggttctcaggctatcgccattcagatttgaagatttttgtgcagctctcgtatcccaggagcagtgcaccctcatggccgaaatgcacgttgtgcttttgaaagcagtcttgcgggaggaagatacatctaacaccacattcggaccagctgatctgaaggacagcgtgaactctaccctgtacttcatcgacggcatgacttggccagaggtcctgcgggtctattgcgagtccgataaggaatatcaccacgtcctgccctaccaggaagctgaggactacccgtacggaccagtcgaaaataagatcaaagtgctgcagtttctggtcgatcagttcttgaccaccaacatagcccgcgaagagctaatgagtgaaggcgtgatccaatatgacgaccattgcagagtatgccataagttaggagacctgctctgttgtgagacttgctccgccgtctaccacctggagtgcgtgaagccgccactggaagaggtgccagaagacgaatggcagtgcgaggtctgtgtcgctcataaggtgcctggcgtcactgattgcgtggctgagattcagaagaataaaccttatatacgacacgaaccaatcggctacgacagatcaaggcggaaatattggttcctgaatcgtcggctgattattgaggaagacacagagaatgagaatgagaagaaaatttggtactacagcactaaggtacaactcgcggaactgatcgattgcctagataaggattactgggaagcggagctgtgcaaaattctagaggaaatgcgtgaagaaatccaccgtcacatggatattactgaggatctgacaaataaagcccgcggcagtaacaagtctttccttgccgccgctaacgaggagatacttgagagcattagagcaaagaagggcgacattgataatgtaaagagtcctgaggagaccgagaaagacaaaaacgagacagagaacgacagtaaggacgccgaaaaaaatcgtgaggagttcgaggatcaatcactggagaaggactctgacgacaaaaccccagatgatgatccggagcaggggaagtcagaggtgggagatttcaaaagtgagaaaagcaatggtgagttaagcgagtctcccggtgccgggaagggcgcaagtgggtcaacccgaattatcactagactgcgaaaccctgatagtaaactaagccagctgaaatcccagcaggtcgcggctgctgctcacgaagccaataagctgttcaaggaaggcaaggaggttctggttgtcaacagccagggagagatcagccgactcagcaccaaaaaagaggtcatcatgaaaggcaacatcaataattatttcaaactcggacaggagggcaagtatcgcgtgtaccataaccagtacagtactaattcttttgccctgaataaacatcagcatagggaggaccacgataaacgtagacatttggcccacaagttttgcctgacccccgcaggcgagtttaaatggaatggaagtgtacacggctcaaaggttctcaccatatctacccttaggttgacaatcacccagctagagaacaatatccctagctcttttttgcatcctaactgggctagccaccgcgccaactggataaaggcagtccagatgtgtagcaaacccagagagttcgccctggcccttgcgattttagagtgtgcagtgaaacccgtcgtgatgttaccaatttggcgtgagtccttggggcacacgcgattacacaggatgacttctatcgagcgcgaggagaaagaaaaagtcaaaaaaaaggaaaaaaagcaggaggaagaggaaaccatgcagcaagccacttgggtcaagtacacctttccggtgaagcaccaggtgtggaaacagaagggcgaagaatatcgggtgacaggttacggtggatggtcatggatctcaaaaactcatgtgtatcgattcgtccctaaactgccgggtaacaccaacgtcaactacagaaagagtctcgagggaactaaaaacaatatggacgagaatatggatgaatccgacaagcgcaagtgctcacgatccccgaagaaaatcaagattgagcctgactctgaaaaagatgaagtcaaaggatctgacgccgccaaaggtgcagatcaaaatgagatggatatttccaagatcactgaaaagaaggaccaggatgtgaaggagctgctggattccgatagcgataagccctgcaaggaagagccaatggaagtagatgacgatatgaagacggagagtcatgtcaattgtcaggagtccagccaggtcgacgtggttaatgttagtgaagggtttcatctgcgcacgagctacaaaaaaaaaacaaagtcctctaaactggatggactgctcgaaagaaggatcaagcaattcaccctggaagagaagcagaggctggagaaaatcaagctggaggggggcattaaaggtatcgggaagacatcgaccaacagctccaagaatctgtccgaaagtcccgtaataactaaggctaaggaggggtgtcagtcagactccatgaggcaggagcaaagcccaaacgccaataacgatcagcccgaagaccttatccaaggctgcagcgaatccgattcctctgtgctgcgaatgagtgatccgagccatactaccaacaagctgtatccgaaagaccgtgtgctcgacgacgtgtcgatccgtagcccagaaacgaagtgcccgaagcaaaactccatcgaaaacgatattgaggaaaaagtgtcagatctggcctcgcgcggacaggaaccatctaagtctaaaaccaaggggaacgacttcttcattgacgattccaagctggctagcgccgatgatatcggaaccctcatctgtaaaaacaagaaacccctaattcaggaggaaagtgacaccatcgttagtagcagtaagagtgccctccacagttccgtgcccaaatctacaaacgaccgggacgctacacccctatcccgagccatggacttcgagggtaaactcggatgcgatagcgagagtaactccacgttagagaactcctccgataccgtttccatccaggatagcagtgaggaggacatgattgtccagaattctaatgaatcaatctcagagcagttccggaccagagaacaggacgtcgaggttctcgagccacttaagtgtgaattggtgagcggggagtctaccgggaattgcgaagatcgccttcccgtaaaaggaactgaggccaatggcaaaaagcctagccagcaaaagaaactggaggagcggccagtaaacaagtgtagcgaccagattaaattgaagaatactaccgataagaagaacaacgaaaaccgcgagtccgagaaaaagggacagagaaccagcacattccaaataaacgggaaggataacaagcccaaaatctaccttaagggagaatgcctgaaggagattagtgagtcccgtgtggtgtccggtaacgttgagcccaaagtgaataatatcaataaaataatcccggagaacgacatcaaatctttgacagttaaggagagtgctatccggccattcattaatggagatgtgatcatggaagactttaacgaaagaaacagttctgaaacaaaatcccaccttctgagtagcagcgatgctgaaggaaattacagagatagtctggagacccttccttctactaaagagtcagactctactcagaccactaccccttctgcaagctgtccagagagtaatagtgtgaatcaggtagaggacatggaaatcgaaacttcagaggtaaagaaagtaacttcttcccctataaccagcgaggaggagtcaaaccttagtaatgacttcatcgatgaaaatggacttccaattaacaagaacgagaacgtcaacggagagagtaagcgcaaaactgtaattactgaagttaccacgatgactagtaccgtcgcaacggagtctaaaacggtgatcaaggtggagaagggggataagcagacagtggtaagcagtacagagaattgtgccaagagtactgttaccacgacgaccactaccgttacaaaacttagcaccccctccaccggcggcagtgttgacattatcagcgtgaaggagcagagtaagacagtggtgacgacgactgtgacagatagtctgaccaccaccggaggaaccttagtgacctcaatgactgtgagtaaagaatactctaccagagacaaggtgaagctgatgaagttcagcagacctaaaaaaactagaagcggcaccgctcttccaagttatcggaaatttgtgacaaaatccagcaagaagtccatttttgtcctgcctaatgatgatctaaagaagttagcgcgcaagggaggcatccgggaagtgccttatttcaattacaacgctaagccggctctggatatctggccttaccctagcccgcggcccacatttggtatcacatggaggtatcgcctgcagacggtgaagtccctcgctggagtcagtttgatgttaagactcctgtgggcttcccttcgctgggatgatatggcagccaaagccccgccgggtggaggcacgacacgcactgaaacatcggaaaccgaaatcaccactacggaaatcattaaacgccgcgatgtaggcccctacggcatacgttcagagtactgcattcggaagattatctgccccatcggagtaccagaaacccccaaggagacaccaacaccgcaacgcaagggcctgaggtcttcagccctgcgaccaaaacgacccgagacacctaaacagacaggacccgtgatcatagagacttgggtggccgaggaggagttggaactgtgggaaatcagagcattcgctgagcgagttgaaaaggagaaagcacaggccgtggaacagcaggccaaaaaacggctcgagcaacaaaagcccaccgtgattgctacttcaaccaccagtcccacctcaagcacgacttccactatcagtccagcccagaaggtgatggtggcccccatttccggatctgtgacaaccggcaccaagatggtgcttacaaccaaggtgggtagccccgctacggttacctttcaacagaacaagaacttccatcagaccttcgccacctgggtcaaacagggacagtccaattcaggcgtagtacaggtccagcagaaagtactggggatcatcccgtccagcaccggcactagtcagcagactttcacatcattccagcctaggaccgctacagtcacaatcaggccaaacacatctggctctggcgggaccacaagcaacagtcaggtgatcactggaccgcaaatccgccctgggatgaccgtaattagaacccccctgcagcaatccaccttggggaaagcgataatacgtaccccagtgatggtccaaccgggtgccccacaacaggtgatgacacagatcatacgcgggcaaccagtgtcaacggccgtctccgcccccaacacagtctcctcaacccccggccagaagtcattaactagtgccacatctacatccaatatccaatcatctgctagtcagcccccgcgccctcaacagggccaagtgaagctgactatggcacagctgacccagttaacccaggggcatggaggcaaccagggcctaacagttgtgattcaaggtcagggacagacgactggacagctgcaacttattccccaaggagtaactgtgttgccaggccccggccagcagctaatgcaggctgctatgcctaacggaacagtgcagcgctttctgtttacaccactcgctactacggccaccacagctagtacaaccactacaaccgtttctactactgcagccgggaccggcgaacagcggcaaagtaagctctcaccccagatgcaggtgcaccaagacaaaactcttcccccggcgcaaagttcctctgttggccccgccgaagcccagccacaaacagcccagccttccgctcagccacagcctcagacccaaccgcagtctccagcccagcccgaggtccagacccagcctgaggtgcagacacagaccaccgtgagctcacatgtaccaagcgaagcccaacccacccatgcccagtcctccaaaccccaagtggcagcccagtctcagcctcagtctaatgtacagggccagtcaccggtcagagtacaatccccctctcagacacgtattagaccaagcacccccagtcagctatctcccgggcagcaaagtcaggtccagactactacatcccaacccattccgatccaaccacacacctcgttgcaaatccctagtcagggacagccccagtcccagccccaagttcaatcatcaacacagactctgagcagcggacagacccttaaccaggtaactgtgagcagccccagtcggccgcagctgcagatccagcaaccccagcctcaagtcatcgcagtaccacagctccagcagcaggtccaggtgctctcccagatccagagtcaggttgtggctcaaattcaggctcagcaatccggcgttccgcagcagattaaactgcagctgcccatccagattcagcaatcctctgccgtacagactcatcagattcagaatgtagtgaccgttcaggcagcaagcgtccaggaacagcttcagcgcgtccagcagttgcgagatcagcagcagaagaagaagcaacagcaaattgagatcaagagggaacacacactgcaggcaagcaaccagtctgagataatacagaagcaggttgtcatgaaacataatgcagtcattgagcatctcaagcagaagaagtccatgacgccagctgagcgagaggagaaccagagaatgattgtctgtaatcaagtgatgaagtatattctggataagatcgacaaggaggagaagcaagccgctaaaaagaggaaacgagaagaatctgttgagcagaaacgttccaagcagaacgcaaccaagctctcagctctccttttcaagcataaagaacagctgcgcgccgagattctcaaaaaaagagcgcttcttgacaaagacctccagatcgaagttcaggaagaattgaagcgcgatttgaaaatcaaaaaggaaaaggacctcatgcagttagcccaggctacggccgtcgctgccccctgtcctcctgtcaccccagctccaccggcgcccccggcccctccaccttccccacccccaccccccgcagtgcagcatactggactgctgagcactcccacgcttccagctgcatctcaaaagcggaaaagagaggaagagaaagacagctctagtaagagcaaaaaaaagaagatgatctctacaacttccaaagagactaagaaggatacaaaactgtattgcatctgtaagaccccgtatgacgagtccaagttctatatcggttgtgaccgttgccaaaactggtaccatggccggtgtgttggaatcctgcaatccgaggccgagctcatagatgagtacgtttgtccacaatgtcagagcaccgaagacgctatgaccgtccttacacctcttactgaaaaggactatgaaggccttaaaagagtgctgagaagtttgcaggctcataagatggcctggccattcctggaacccgtcgacccgaacgacgctccggattactatggggttatcaaagagcctatggatctggcaaccatggaagagcgagtccagcgtcgatactacgaaaagcttacagaattcgttgcggatatgacgaagatctttgataactgccgctattataacccaagcgattcccctttttatcagtgcgccgaagttttagagtccttcttcgtgcagaaacttaaaggctttaaggctagtcggtctcataacaataagttacagagtaccgctagttag

SEQ ID NO: 23332 - DNA, 390 bp, synthetic construct
  source 1..390: mol_type = other DNA; note = Synthetic coding sequence
atggccgacccccgggtgcggcagatcaagatcaagaccggcgtggtgaagcggctcgtcaaagaaaaagtcatgtacgagaaagaggctaaacaacaagaagagaagattgaaaagatgcgggcagaggatggggaaaactacgacattaagaagcaggcggagattctgcaggagagccgcatgatgataccagactgccagaggcggctggaagccgcttatctggatcttcaaagaatactggttagcaaagatttttgcgtgatgtttaaattttttttttcaatacagtacatggagagtcaaaagtttaaatatttaaccctgcgtacctcatggcagtattttctctttacatgcccactgtataggtacattttgaaatag

SEQ ID NO: 23333 - DNA, 582 bp, synthetic construct
  source 1..582: mol_type = other DNA; note = Synthetic coding sequence
atgagcgacgacgacagccgggccagcaccagcagcagcagcagcagcagttctaaccaacagactgaaaaggaaaccaacactcctaagaaaaaagagtcaaaagtgtctatgtcaaaaaatagcaaactgctatctacttctgccaaaaggattcagaaagaattagccgatataacactggatccacctcccaactgctcggccgggccgaaaggggacaacatctatgagtggcggtctacaatcctcggtcctccaggctctgtctacgaagggggtgtatttttcctcgatataacctttaccccagagtatccatttaaaccacccaaagtgacatttcgcactaggatctatcattgtaacataaattctcaaggggtgatctgtttggacatattaaaagacaattggagcccagccctgaccatctcaaaagtactgctgtccatttgttcactgctgactgactgcaaccccgccgatccattggtgggatcaattgccacacaatatatgaccaatcgcgcagaacatgatagaatggcaagacaatggaccaagaggtacgcaacatag

SEQ ID NO: 23334 - DNA, 1395 bp, synthetic construct
  source 1..1395: mol_type = other DNA; note = Synthetic coding sequence
atgagcctgcagttcagcaacggcagccggcacgtgtgcctgcggtctggggcaggctcagttcggccactgaatggcggtgccgggttcgcggggagcagcgcttgcgggggtagtgtagccggatctgagttcagctgcgctctcggaggcggattggggagtgtgcccgggggcagccacgccggaggagccttagggaacgcagcatgtatcggctttgctggcagcgaaggtggattgctgtctggcaacgagaaggttacaatgcagaatctgaatgatagactggctagctacctcgacaacgtgcgagcactggaggaagccaacgccgaactcgagaggaaaatcaaaggctggtacgagaagtatggccctgggtcctgccgtggactcgaccacgactactcgcggtatcaccttacaattgaggatctaaagaataaaatcatctcaagtaccactacaaacgccaatgtgattctccaaatcgacaatgcgcgccttgctgccgatgactttcgccttaagtatgaaaatgagctgacattacatcagaacgttgaggccgatatcaatgggctacggagagtgttggacgagctgactctctgtagaactgatcaggagcttcagtacgaatccctgtctgaagaaatgacttatcttaagaaaaaccatgaagaggaaatgaaagccctgcagtgcgcggctggcggtaacgtcaacgttgaaatgaatgctgcacctggggtggatctggccgtgttgttgaataacatgcgcgccgagtacgaggcattggcagaacagaacagaaaagatgcggaggcatggttcaatgagaagagcgcaagcctgcagcagcagatctctcacgactctggggcagctacctttgccaggagccagctaacagaaatgagacgcactctccaaacgctggagattcagcttcagtcactgatggcgaccaagcattccctggagtgcagcctgactgagacagaatcaaactactgtacacagctcgctcagattcaagcccagattggtgcactagaagagcagctgcatcaggtcaggaccgaaacggaggggcagaaacttgaatatgaacacctgctggacgttaaggttcacttagaaaaggagatcgaaacctattgcaggctcatagacggggatggcaattcgtgctctaagtctaaaggctttggaagtgggtctccggggaactcctcaaaagacttatcaaagactacccttgtgaaaaccgttgtcgaggaattggatcagcgaggcaaagtgctgagttcccgtatccattctattgaggaaaaaacctctaagatgaccaatggcaagaccgaacagagggtccctttctag

SEQ ID NO: 23335 - DNA, 2013 bp, synthetic construct
  source 1..2013: mol_type = other DNA; note = Synthetic coding sequence
atggaggagttccggcggagctacagccggctgtgccgggagagcggagccgagccccaggaagcggtcctgcaacaactccaccagcttccacgcggtaggctggatctcgccacccaatcgctgaccgtcgaaacatgccgggccttgggaaagctattgcctagagagaccctttgtaccgagttggtgctgtccgattgcatgctgtctgaagagggggcaacgctgcttttaagaggtttgtgcgccaacaccgttctgagatttttagacctcaaggggaacaatttgcgggctgccggcgctgaggccctggggaaactcttgcagcagaataaatccatacagtccttgactctcgaatggaacagcctcggaacttgggacgacgcatttgctactttttgcgggggccttgctgcgaatggagctctccagcggctagacctccggaacaatcaaatcagccataaaggcgccgaggagctagctctggcgctgaaaggaaacaccacacttcagcagctggatctgcgatggaataatgttggcctcctgggcggacgggccctcatgaattgtcttccttccaaccggactctctggcgactggatctggccggtaacaacatacccggagatgtgctaagggccgtcgagcaggctatgggtcatagtcaggatcggctgacaaccttccaagagaaccaagccaggacccacgttctctcaaaggaggtccaacatttgagagaagagaagtccaagcagtttctggacctgatggaaactatagataagcaacgggaagaaatggctaagtcatctcgggcaagcgccgcccgcgtgggccagctacaggaagccctgaatgagaggcacagtatcattaacgctctcaaagcaaagttacagatgactgaagccgcactggctctgtcggagcagaaagcccaggatctaggcgagttgctggccaccgcagagcaggagcagctgagtttgagccagaggcaagcaaaggaattgaaactagagcagcaagaagccgccgagcgcgaatctaaactcctgcgggatttgagcgctgctaatgaaaaaaaccttctgctgcaaaatcaggtagatgagctggaacggaaattccggtgccagcaggagcagttgtttcagacaaggcaggaaatgacaagtatgagcgctgagcttaaaatgcgcgccatccaagcagaggaaagacttgacatggagaaaagaagatgcaggcagtctttggaagacagcgaatctctcagaatcaaggaggttgaacatatgactagacaccttgaggaaagcgaaaaagctatgcaggagagagtgcagcgtctcgaagcggcccgacttagtctcgaggaagagctctcccgggtgaaagcggccgcacttagcgaacggggccaggccgaagaggagctgatcaaagcaaagtcccaggccaggctcgaagagcaacagagactagctcatctcgaagataaattaaggttactggcacaggcccgtgacgaggcccaaggggcttgtctacagcaaaagcaggtggttgccgaggctcagacccgtgtctcccagctcggtctccaagtcgaaggtttgagacgccgtctcgaagagcttcagcaagagctgtccctgaaggatcaggaaagggtggctgaagttagcagggttcgagtagaattgcaagagcagaacggacggctccaggcggagctggctgctcaggaggcacttagggaaaaggccgccgcactagaacgtcagctgaaagtgatggcaagcgaccacagggaagccctgcttgaccgcgaatcagaaaacgcaagcctgagagaaaaattgcggttacgggaggccgagattgccaggatccgggacgaagaagcccagagggcatccttcttgcagaatgcagtgctcgcttacgtccaagcaagccctgtgcgtaccctttctccacctaagtag

SEQ ID NO: 23336 - DNA, 1782 bp, synthetic construct
  source 1..1782: mol_type = other DNA; note = Synthetic coding sequence
atggagcccgccaccgccccccggcccgacatggcccccgagctgacacccgaggaagaacaggctacgaagcagtttctcgaggagatcaataaatggacagtgcagtacaatgtcagtcctctatcgtggaacgtggcagtgaagtttctaatggcgcggaaatttgacgtgctgagggcaatcgaactgtttcatagctatcgggagactcggcgcaaagagggtatcgtcaagttgaagccccatgaagagcctctgaggtcagagatcctgtcaggaaagtttacaatcttgaatgtgagggaccccactggtgcttcaatagccctctttacagcccgattgcaccatccacacaagtccgtgcagcatgtggtacttcaggccttgttctacttgctggaccgagccgtagactccttcgagacgcaacgcaacgggttggtgttcatctatgacatgtgtggctctaattacgctaatttcgaactcgatctgggcaagaaggtgctgaacctgctgaagggagccttccccgctcggctcaagaaggtgctaatcgttggggcacccatctggtttcgcgtcccgtacagcatcataagcttacttctgaaggacaaagtgagagaacgaattcagattctgaaaaccagcgaagtcacccaacacctccccagagaatgtctgcccgaaaaccttggaggctacgtgaagatcgatctcgctacttggaattttcagttcctgccccaagttaacggacacccagaccccttcgacgagattatcctgttttccctgcctcccgcactggattgggactccgttcacgtccctggcccccacgccatgaccatccaggagttggtagactacgttaacgcaaggcaaaagcagggaatttacgaagaatacgaagatatacgacgcgaaaatccggttggcaccttccactgctctatgagtcccggcaacctagagaagaaccgctacggcgacgtcccttgtctcgaccagactagagtgaagcttaccaagaggagtggccacactcaaactgattatatcaatgcttctttcatggatggatacaagcagaagaacgcctacataggcacacaggggccactggagaacacttacagagacttctggctgatggtgtgggaacaaaaggtgctcgtgattgtgatgaccacgaggtttgaggaaggaggccggcggaagtgtggacagtattggcctctcgaaaaagactcgcgcatcagatttggcttcctgaccgtcaccaatctgggcgtcgaaaatatgaaccactacaaaaagacaaccctagaaatccataacacagaagaaagacagaaaagacaggtcacacactttcagtttttgagctggcccgattatggcgttccatcatccgctgcaagtctgatcgactttctcagggtcgtgagaaatcagcagagcctggcagtgagtaacatgggtgctagaagtaagggacagtgcccagaaccccccatagtcgtccattgctcagctggaattggtaggacgggtacattctgctcgttggacatatgcctggcccagttggaagagctcggcaccctgaatgtctttcaaacggttagtcggatgagaacacagcgggcatttagcatacagactcccgaacagtactacttttgctacaaagcaatcctcgagtttgccgagaaggaaggcatggtgtccagcgggcagaatctcctagcagtagaaagccagtag

SEQ ID NO: 23337 - DNA, 1884 bp, synthetic construct
  source 1..1884: mol_type = other DNA; note = Synthetic coding sequence
atggagggcctggccggctacgtgtacaaggccgccagcgagggcaaggtgcttaccctggcggctcttctgctgaacagaagcgaatcagatatccggtaccttcttggctacgtctcacagcagggcggtcaaagatccacacctttaatcatcgccgctagaaatggtcacgccaaagtcgtgaggctgttgttggagcactatcgcgtccagacccagcagaccggtactgtccgtttcgatggatacgttattgacggtgcaaccgctctttggtgtgcagcaggggccggccatttcgaagtggtgaagttgttggtttctcacggggccaacgtcaatcacaccaccgtcactaactccacacctctgcgggctgcttgtttcgatggcagactggacatcgttaagtacctggtagaaaacaacgccaacataagcatagccaacaagtacgacaatacctgcttgatgattgccgcatataaaggtcatactgacgtggtgaggtacctcctggaacagcgcgccgaccctaatgccaaggcacattgtggcgccacagcactccactttgccgcagaggccggtcatatcgacatcgtaaaggaattaatcaaatggcgggcggctatcgtggttaacggccatgggatgacacctctgaaggttgcggccgaaagctgcaaggcggacgtggtggaacttctgctgtctcatgcagactgcgatcgccgctccaggattgaagcactggaactgctcggcgcttcctttgctaacgaccgggaaaattatgacattatcaaaacctatcattacctctatctcgctatgctggaacgtttccaagacggggacaacatcctggagaaagaagtgcttcccccaatccatgcctacggaaatcgcacggagtgccggaatcctcaggagctggagagtattcgccaggatagggatgcattacatatggaaggcctgatcgtcagagagaggatcctgggtgccgacaacatcgatgtgtcacaccctattatttatcgcggagccgtgtatgctgataacatggagtttgagcagtgtatcaaactgtggctacatgccctgcatctgagacagaaggggaatagaaatactcacaaggatcttctgaggttcgcccaggtcttttcacaaatgattcatctgaatgaaaccgtaaaagctcctgatattgagtgtgtcctgcggtgctctgtgctggagatcgaacagtctatgaaccgggtcaagaacatcagtgacgccgacgtccataacgccatggacaactacgaatgcaacttgtatactttcctgtacctggtttgtatatccaccaagactcagtgctctgaggaagaccagtgcaagataaataaacaaatttataacttgatacacctggacccgcggaccagggagggcttcacactgctgcatctggcagtcaacagtaatacaccagtggatgactttcatacaaacgatgtatgctctttccctaatgctctggttaccaagctgttgctggactgtggagccgaggtgaatgccgtggacaacgagggtaactctgctttgcatataattgtccagtataatcgtcctatctcagactttctgactctacactccattatcattagcctggtggaggcgggcgcacatacagatatgacgaataagcagaacaagacacctctggacaaatcaacaacaggggtgtccgagatattactcaagacacagatgaagatgtctctgaaatgtcttgccgctcgggcggtcagggccaatgacataaactaccaggatcaaatacctcggaccctggaggagtttgtcgggttccactag

SEQ ID NO: 23338 - DNA, 378 bp, synthetic construct
  source 1..378: mol_type = other DNA; note = Synthetic coding sequence
atgcccagcgagaagaccttcaagcagcggcggaccttcgagcagagggtggaggacgtccgtctaatacgggagcagcatccaaccaagattcccgtgatcattgaaaggtataagggggagaaacagcttccagttctggacaaaactaaatttctggtccctgaccacgtgaatatgagcgagctcattaagatcattcggcgaagactccagctcaacgcgaatcaggcgttcttcctgctcgtcaatggacattcgatggtttcagtgagcaccccgattagcgaggtctacgaatccgaaaaggatgaagacgggtttttatacatggtctgcgcctctcaggaaacatttggcatgaagctttccgtttag

SEQ ID NO: 23339 - DNA, 3786 bp, synthetic construct
  source 1..3786: mol_type = other DNA; note = Synthetic coding sequence
atgggcaccggcgacttcatctgcatcagcatgaccggcggcgccccttggggatttcgactgcagggcgggaaggagcaaaaacagcccctgcaggtggcaaaaatcagaaatcaaagcaaagcctctggaagcggtctctgtgagggtgacgaagtagtctccattaacggaaatccatgtgctgatctcacttaccccgaggtcatcaaactcatggaatcgattacggacagtctgcaaatgcttattaaaagacccagtagcggcattagcgaagctctgatctctgagaatgagaataaaaacctggagcacctgacccacggcgggtatgtcgaatccacgacgctgcagattagaccagcaactaaaactcagtgcacagaattctttctcgcgcctgtcaagacggaagtgccacttgctgaaaatcagcgaagtggaccagactgcgccggctctctgaaggaggagacgggcccctcataccagcgagctccccagatgccagattcacaacgcggtagggtggctgaggagcttatcctccgggaaaaagtcgaggcggtgcagcccgggccggtggtggagctgcagctaagcctgtcacaggaacgccataaaggtgcttcaggtccactggtagccctccctggtgccgaaaagagtaaaagcccggacccagatccgaacctgtcccacgacaggattgtacatatcaactctatccccaccaatgaaaaggcggacccctttctgcgcagttccaagatcatccagatctcttccggcagagaacttagagtaatccaagagtccgaagccggcgacgccggtctgccacgggtagaagtgatcctcgattgcagcgaccgacaaaaaactgaaggctgtagactgcaggccgggaaggagtgtgtggatagtccggtggagggcgggcagagcgaggcacctcctagtctggtgtcttttgccgtttcatccgagggaacagaacagggagaggaccctcggagcgagaaggaccacagcaggccccacaaacaccgtgctcggcatgctcgcctgcggaggagcgaatccttgagtgagaaacaggtcaaggaggctaaatcaaaatgcaagtctatcgctcttctgctgacagacgccccaaaccctaatagcaaaggggtccttatgttcaaaaaacgacggcggcgagcacgtaagtatactctcgtcagttacggtacaggagagctcgaacgcgaagcagacgaggaagaagagggtgacaaggaagatacgtgcgaagtagcctttcttggggcctcagagtctgaggtcgacgaagagctcctgtccgacgtcgatgataacacacaggttgtcaatttcgactgggatagcggattggtggatattgaaaaaaagttgaaccggggagataagatggagatgcttcctgacacaacaggcaaaggcgcccttatgtttgccaaaaggcgggaacggatggatcaaatcacagctcaaaaagaagaggacaaggtgggtggcactccatctagggagcaggacgcagcacagacggatggactgcgcaccactactagttatcagagaaaagaggaggagagcgtccgtacccaatctagtgtctccaagtcctacatagaggtaagtcacggactcggacacgtgccacagcagaatggattttccggcacttcagagactgcgaatattcagcggatggtacctatgaatcgcacagcgaagcctttccccggatcagtgaatcagcccgccacacctttttctccaacaagaaatatgacatccccgattgctgactttccggccccccctccctacagtgccgtgacacccccccccgatgctttctctcgcggtgtgtccagccccatcgcagggcccgcccagccaccaccatggccacagcctgccccctggtctcagcccgcgttctacgactcatcagagagaattgccagtcgggatgagaggatttctgtcccagccaaacgtacagggattctccaggaggccaagaggcgcagtacaacaaagcctatgttcacttttaaagaacctaaggtcagccctaatccagagctgctgagcttgttgcaaaatagcgaaggcaagcggggtaccggcgctggaggcgacagtggacccgaggaagactatctttctttgggcgccgaggcttgcaacttcatgcaatcctcttccgcaaagcagaaaactccccccccggtggctcccaaaccagccgtaaagtcttcaagttctcagcctgtcacacctgtaagtcccgtatggagccccggagtggcccctacacagccccctgctttcccaacgtcaaacccctcaaaggggacagtggtgtcttccatcaagattgctcagccatcttatcccccagcccgcccggcgagcacacttaatgttgctggaccttttaaaggaccacaggctgctgttgccagtcagaattatactcctaaaccaactgtgtccactccaaccgttaacgcagtgcaaccaggtgccgtgggccctagcaacgagctccccggcatgtccgggaggggtgcccagcttttcgcaaagcgccagagtcgcatggaaaaatacgtagttgactccgacaccgtgcaggcccacgccgcaagggcccaatctcctacaccctctctgcccgcatcctggaaatactcaagcaacgttcgcgcacctccccccgttgcctacaacccaatccactccccctcttatcctctggccgctctgaaaagtcagcctagtgctgctcaacctagtaagatgggaaaaaaaaaaggcaagaagcctctaaacgcactggacgtaatgaaacaccaaccttatcaacttaacgcttcactcttcacctttcagccccccgacgcaaaagatggtcttccccagaagagcagcgtcaaggtaaactccgctctggcaatgaagcaagcgttacctccccggcccgtgaatgccgctagccctactaatgtccaggctagcagcgtttactccgtcccagcctacacctctcccccatcctttttcgctgaggctagctcacctgtgtcagctagccccgtgcccgtagggatcccgacttctccgaagcaagaaagcgcaagctcatcctacttcgtggcacccagaccgaagttctcggccaagaagagtggggtgacaatccaggaatcaggccgctccctctcccttccaggtcgctcggtaccaccaccgatttcgaccagtccctgggtgtaccagccaacgtacagctattctagcaaaccgacagatgggctcgagaaggctaacaaaagaccaacaccctgggaggccgccgctaagtcccctctaggtctggtcgacgacgccttccagccaaggaatatccaggagtcaatcgtcgcaaacgtcgtaagcgctgccagacgtaaggtcctgcctggcccccctgaagactggaatgagagactctcatatattcctcagactcagaaagcctatatggggtcatgtgggcggcaggagtacaacgtaaccgctaacaataacatgagtaccacctcccagtacggcagccagctgccgtacgcctactatagacaggcaagccgtaatgactctgcaataatgtccatggagaccagaagcgattattgtttgcctgtcgctgattataactacaatccacatccccgcgggtggagacgtcagacctag

SEQ ID NO: 23340 - DNA, 1146 bp, synthetic construct
  source 1..1146: mol_type = other DNA; note = Synthetic coding sequence
atgagctggaccgtgcccgtggtgcgggccagccagcgggtgagcagcgtgggggcaaactttctgtgcctcggcatggcactgtgtccccgccaagcgacacgcattccactaaacggaacctggctgtttacccccgtctccaagatggcgacagtgaagtccgagttaatcgaacgctttacgagtgagaaacctgtgcatcacagcaaagttagtatcataggtacaggaagcgttggaatggcttgcgccatttctattctgctgaagggtctgtcggacgagctggctctggtagacctagatgaagacaaattgaagggtgagacgatggatttgcaacacgggagtcctttcacaaagatgcctaatatcgtgtgctcaaaagactactttgtgaccgccaacagtaacctggtcattatcacagctggggctagacaggaaaagggggagactagattaaatctggtacagcgaaatgttgcaatttttaaattgatgatctcctccatagttcagtactccccgcactgcaagctgataattgtcagcaatcctgtggacatcctgacgtacgtagcctggaaactttcggcatttccaaagaatagaatcatcgggagtggctgcaatctcgataccgcacgatttcggttcctgatcggtcagaaacttggcatccatagcgaatcctgtcatggctggattctaggggagcacggcgattcctccgtgccagtctggtctggagtgaatatagcaggcgtccctttgaaggacctgaatagcgacatcggaaccgacaaggacccagagcagtggaaaaacgtccataaagaggttaccgctactgcatatgaaattattaaaatgaagggctatacatcctgggcgatcggtctcagcgttgctgacttaaccgaatctatccttaagaatctcaggaggatccaccctgtctccacaattattaaaggtctgtacggtattgatgaggaggtcttcctctccatcccctgcatccttggcgagaacggcattacaaatcttattaagattaagcttacccctgaagaggaggcacacctcaagaaatctgctaagacactttgggagattcaaaacaagctgaaactgtag

SEQ ID NO: 23341 - DNA, 861 bp, synthetic construct
  source 1..861: mol_type = other DNA; note = Synthetic coding sequence
atgatggccacccccaaccagaccgcctgcaacgccgagagccccgtggctctggaggaggctaagacttccggagcccctggcagcccccaaactccccccgaacggcacgactcgggagggtccttgccactgacacccagaatggaatctcattccgaagatgaggacctggctggggctgtgggaggattgggctggaattctcgttcccctcgtacccagagccccggcgggtgttctgcggaggctgtgctggccaggaagaaacatcggcgacgcccatcaaaacgtaagaggcactggaggccttacctggagctctcttgggccgagaagcaacagcgggacgagcggcagagccaacgagcgtctagagttagagaggagatgttcgccaagggacagcccgtggcgccgtataacactacccagttcctgatgaatgaccgggatcccgaagaacctaacctggatgtgccccatgggattagccatcccggatcgagcggtgaaagtgaggccggagactccgatgggagaggccgagcccacggcgaattccagcgtaaggacttcagtgagacatacgagcgttttcacaccgagtctctgcagggaaggtccaagcaagaactcgtgcgcgactacctggagcttgagaaacggttatcacaagctgaggaagagacacggaggctccagcaattacaggcttgcactggtcagcaaagttgccgtcaggtggaagaacttgcagcagaagtccagaggctccgtaccgaaaaccaacgcctgaggcaggagaaccagatgtggaatagagagggctgtagatgtgatgaggagcccggcacgtag

SEQ ID NO: 23342 - DNA, 1206 bp, synthetic construct
  source 1..1206: mol_type = other DNA; note = Synthetic coding sequence
atggcccacgtgagcagcgagacccaggacgtgagccccaaggacgagctgaccgctagtgaagccagcacacgatctcctctttgcgagcacactttccctggcgattctgacctgcgctccatgatcgaggaacatgcattccaggtccttagccagggaagcctgctggaaagcccgagttacacagtgtgtgtgtccgaacccgacaaggatgacgactttcttagcctgaacttccctagaaagctatggaaaatcgtggaatcagaccagttcaagtcgatctcatgggatgagaatggcacatgtatcgtaatcaacgaggagctgtttaagaaggaaattctggagaccaaggcgccgtataggatttttcaaacagatgcgattaagagctttgtccgtcaactgaatctctacggcttttccaaaattcaacagaacttccagcgttcagcgtttttagcgaccttcctgtctgaggagaaagaatcctcggtgttgagtaaactgaagttctactataacccgaactttaaacggggataccctcaactgctggtcagagtcaaacgacgcatcggtgtcaagaacgcatcaccaataagtactctgttcaacgaggatttcaacaaaaagcactttagggcaggtgcaaatatggaaaatcataattcagcactggcggccgaagccagtgaggagtcgctgttcagcgccagcaagaacctgaatatgcctcttaccagagaatctagcgtacgccagataattgccaacagtagcgtgccaattcggagcgggtttcccccgccaagtccctcaacctctgtgggccccagcgaacaaatcgcaactgaccaacacgctattctgaaccagcttaccaccatccacatgcactcacactccacgtacatgcaggctaggggccacatcgtgaactttattactaccaccacatctcaatatcatattatttctccacttcagaatggatactttggattaacggttgagccaagtgccgtccccactcgttaccccctcgtgtctgtgaatgaggccccataccgaaacatgcttcccgcgggcaacccgtggctccagatgcccaccattgccgacaggtccgccgccccccatagcagactggcattgcagcccagtcccctcgacaagtaccaccctaactataattag

SEQ ID NO: 23343 - DNA, 1728 bp, synthetic construct
  source 1..1728: mol_type = other DNA; note = Synthetic coding sequence
atggccatggcccccagccccagcctggtgcaggtgtacaccagcccagcagcggtggccgtgtgggaatggcaggatggcttaggcacatggcacccctactccgcaactgtgtgctcctttattgagcagcagttcgtccagcagaagggacaacgcttcggcctggggagcctggcacacagcatcccactgggccaggcagacccatctctggccccatatataatagacttgccatcttggacacagttcaggcaagacactggaacaatgagggcagtgagacgtcacctctttccccagcacagtgcaccgggcaggggcgtggtgtgggagtggctgtcagacgacggctcctggaccgcatatgaggcctctgtctgcgactatctcgaacagcaagtagcgcgtggcaatcagctggttgatctagcgcctctcgggtataactacactgtaaactacaccacacatacccagacgaataaaacttcatcgttttgccgaagtgtgaggcggcaggctggccccccttatccggtcacaacaattattgctcctcccggccacacaggagtggcgtgtagttgccatcagtgcctttccggttctcggacaggaccagtgagcggtcgctataggcatagtatgactaacttgccagcttatcccgtcccccaacatccccctcaccgaactgcatctgtatttggaacccaccaggccttcgcaccatataacaagccttccctgtccggggcacgtagcgctccaaggctgaacacgacgaacgcgtggggagcggctcctcccagcctgggcagtcagcctttataccggtcctcattgagtcatttaggcccacagcacctgccccctggttcgtcgacttccggggccgtaagtgcttctttgccaagcggcccaagctcttcacctggatccgtgcctgcgactgtacctatgcagatgccaaagccctctagggtgcagcaagctctggcaggggctacgcccaagccagagcccgagccagagcaagtcatcaagaattacaccgaggaactcaaggtgccgcctgacgaggattgtatcatttgtatggagaaactgtcaactgccagcgggtactccgatgtgacagactctaaggccatcggaagcctggccgtcggtcacctaacaaagtgctcacacgctttccacctgctctgcttgctggctatgtactgcaatggcaacaaggatgggtcccttcagtgtccttcttgcaagaccatctatggcgagaagaccggtacccagccccaaggcaagatggaggtcctcaggttccaaatgtccctcccaggacacgaggattgcggtacaatcctgatcgtctatagcattccacatgggatccaggggcccgagcatccaaacccaggcaaaccttttacggcgcgcggctttccacgacagtgctacctcccagataacgctcagggcagaaaggtgctcgaactgctcaaggtggcttggaaaagacggcttatattcaccgtcggcacctcgtcaaccacaggtgaaaccgacactgtagtatggaacgaaatacaccataaaaccgagatggataggaacataacagggcacggttatccggatcccaactatctgcagaacgttctggctgagctggcagcgcagggggtgaccgaagactgcctcgagcagcagtag

SEQ ID NO: 23344 - DNA, 1095 bp, synthetic construct
  source 1..1095: mol_type = other DNA; note = Synthetic coding sequence
atggagcacaacggcagcgccagcaacgccgacaagatccaccagaaccgcctgagcagtgtgacagaagatgaagaccaggatgccgcattaacgatagtgaccgtgttggacaaagtcgcctccattgttgacagtgtacaggctagtcagaaacgcattgaagagagacaccgagagatggaaaacgccattaaatctgtgcagattgacctactgaagctcagtcaaagccacagtaacactggccatatcataaacaagctcttcgagaaaactcgaaaagtaagcgctcatatcaaggatgtcaaggcaagggtcgagaaacagcaaattcacgtcaagaaagtggaagtcaagcaggaagagataatgaaaaaaaataagtttagggttgttatattccaggaaaagtttcgatgcccaaccagtctgagcgtggttaaagataggaatttaactgagaaccaagaggaggatgacgatgatatcttcgatccccctgtggatctctccagcgatgaggaatattacgtcgaggagagccggtccgctcgcctgagaaaatcagggaaagaacacatagacaacatcaaaaaggcattcagcaaggaaaatatgcagaagacaagacaaaacctggacaaaaaggtgaaccgcatcagaacgcgaattgtaactccagagcggcgggaacgcctgaggcaatccggagaaaggctgagacagtccggtgagagactcagacagtcaggggaacggttcaagaaaagcatctctaacgctgctccatctaaggaagctttcaaaatgcggtccctccgcaagggaaaggatcggaccgtcgctgaaggggaagaatgcgctcgggagatgggcgtggacattatagcccgatctgaaagcctcggtccgatatccgagttatactccgatgaactgtctgaaccagaacatgaagctgcccggcccgtgtaccccccccacgagggccgggagataccaacccccgaaccccttaaagtgacttttaaatcccaagtcaaggttgaggatgatgagtcactcctcttagatctgaagcactctagctag

SEQ ID NO: 23345 - DNA, 1266 bp, synthetic construct
  source 1..1266: mol_type = other DNA; note = Synthetic coding sequence
atgcccaccctgagcgtgttcatggacgtgcccctggcccacaagctcgagggatcactacttaagacctacaaacaggacgactacccaaataagatcttccttgcctacagagtatgcatgacaaatgaaggccacccctgggtctcccttgttgttcagaaaaccagattgcagataagtcaggacccgtcactgaattatgagtacctgcccacgatgggactgaagtccttcattcaggcctctctggcgctgctgttcggcaaacatagccaggcgattgtcgagaacagagtgggtggcgtgcataccgtaggagattctggagcctttcagcttggcgtacagttcctgcgggcctggcataaagatgcgcggatcgtttatatcatcagttctcagaaagagttgcacggcctcgtttttcaggatatgggcttcactgtctatgaatacagcgtttgggacccgaaaaagctctgcatggaccctgatatcttgctgaatgtggtggagcagattccacatgggtgtgttttagttatgggcaacatcatcgactgtaagctgacgccaagtggctgggctaaactaatgtccatgattaaatcgaaacagattttcccattctttgatatcccctgccagggcttatacacctccgatctcgaggaggataccagaatcctgcagtattttgtctctcagggttttgagtttttctgtagtcaatctctgtctaagaattttggcatctacgacgaaggcgtggggatgttagtcgttgttgctgtgaacaaccagcagctattatgcgtgctttctcagctggaaggcctggcccaagccctctggctaaatccacctaacactggcgcacgcgtgataacctccatactgtgtaatcctgctctgctcggagagtggaagcaaagcctcaaggaggttgtggagaacattatgcttaccaaagaaaaggtgaaggaaaagttacagctgctcggtacccctgggtcatggggacatatcactgaacagtccggtacccacggctatctcggccttaactcacagcaggtggagtacctcgttcgcaagaaacatatttacattcccaagaatgggcaaattaacttctcctgtattaatgccaacaacatcaactacattacggaaggaataaatgaggcagtgctgctgacggaatctagtgagatgtgcctaccaaaagaaaagaaaacacttatcggaatcaagttgtag

SEQ ID NO: 23346 - DNA, 576 bp, synthetic construct
  source 1..576: mol_type = other DNA; note = Synthetic coding sequence
atgggcaagagctgcaaggtggtggtgtgcggccaggccagcgtgggcaagacctcaatcctcgagcagcttctctatggtaatcatgttgtggggagcgaaatgatagagactcaggaagacatttatgtgggctccatcgaaacagataggggggtgcgtgagcaggtccgcttctacgacactagaggtctgcgagatggagccgagttgcccaggcattgtttttcttgcaccgatgggtacgtcctcgtctactctacagacagcagagagtcatttcagagagtggaactgttaaaaaaggagatagacaaatccaaggataaaaaagaagtgacgattgtggttctgggaaataaatgcgatctgcaggagcagaggagggtggatcctgacgtcgctcagcactgggctaaaagtgagaaggtgaaattgtgggaggtgtctgtcgccgataggcggtctctgctggaaccctttgtatatcttgccagcaaaatgacgcagcctcaatctaaatctgcattccctctgagtagaaaaaataaagggtcaggttcattggacggatag

SEQ ID NO: 23347 - DNA, 3207 bp, synthetic construct
  source 1..3207: mol_type = other DNA; note = Synthetic coding sequence
atggtgagcagcgaccggcccgtgagcctggaggacgaggtgagccacagcatgaaggaaatgataggtgggtgctgtgtctgcagcgacgagaggggctgggcggagaatcccctggtgtactgtgacggtcacggttgctccgtggctgttcaccaagcctgctatggaatcgtccaagtccccacaggcccttggttctgcaggaaatgtgagagtcaggaaagggctgcccgagtccggtgcgaactctgcccccacaaagatggggctctaaaaaggactgacaacggaggttgggcccacgtggtgtgcgctctgtacattcctgaggtgcagttcgctaatgtgtcaaccatggagccaatagtcctgcaatcagtccctcatgacagatacaataagacctgctatatttgcgacgaacagggccgagagtcgaaggccgctaccggcgcttgcatgacatgcaacaagcatggctgccggcaggcctttcatgtcacctgcgcgcaattcgcagggctgctttgcgaggaggaaggaaacggggccgacaacgtccagtactgcggttattgtaagtaccacttcagcaaactcaaaaagagcaaacggggatctaatcgttcctatgaccagagcttgtccgactcttcgtcccacagtcaggataaacatcacgaaaaagagaaaaaaaagtataaggagaaggataaacacaagcagaagcataagaaacaacccgagccttcacccgcgctggtgccatccttgacagttaccaccgagaagacttacacttcaacgtccaataacagcatcagtgggtccctgaagcgattagaggatactactgcacgttttaccaacgcaaattttcaggaagtgtcagcacacaccagtagcggtaaggacgttagcgaaaccaggggttcagagggaaaaggcaagaagtcttctgcgcactcctcaggacagaggggccgcaagcccggcggaggtagaaatcccggcacgacggttagtgccgccagcccctttcctcaaggcagcttctctgggacacccgggtccgtgaaatccagctcagggtctagcgtgcaaagccctcaagatttcctgagtttcaccgacagtgatctcaggaatgactcgtatagtcacagccagcagtcttctgccaccaaggatgtgcacaagggcgagtctggctcacaggaagggggcgtaaactccttcagcacactgatcggattaccgagcacgagcgccgtaacctcccagccaaagagcttcgagaactcaccaggagatttgggcaatagtagcttacctacagcagggtataaacgggcccagactagtggcattgaggaggagacagtgaaggaaaaaaaaagaaaagggaataaacagagtaaacatggaccggggcgaccaaaaggcaacaaaaaccaggagaatgtaagccacctctccgtctcaagcgcctcacccaccagctctgttgcatccgccgcgggctctattacctcttcttctcttcagaaatctcccacactgctgagaaatggtagtttgcagtcgctctccgtcgggtcctcacctgttggatctgaaatttctatgcagtacaggcacgatggcgcctgtccgaccacaacgttctcagaactcctgaatgcaatacataacggaatctataactcaaatgacgtagccgtcagctttccaaatgtcgtgtcgggatctggttcaagtacaccagtgtctagcagccatctgcctcaacagagctcggggcatctgcagcaagtgggcgcgctatcccctagtgcggtctcctctgccgctcctgccgtcgctaccacacaggccaacactctgtctggttcatccctcagccaagcgcccagtcacatgtacgggaatcgatccaactcaagcatggcggcactgattgcccagtcagagaacaatcagactgaccaagatctcggagacaactctaggaacttagttgggaggggaagtagcccccgtgggtctctgtcccctcggtctccagtttcctcactccaaattagatacgatcagccgggaaactccagcctggagaacttgccacccgtggcagcaagcatagagcagttacttgagagacagtggagtgagggccagcaatttttactagagcaaggcaccccaagtgatatccttgggatgctgaaaagcctacaccagctgcaggtcgagaaccgacgtttagaggaacagattaagaacctgacagccaaaaaagagaggctgcagctcctaaacgcacaattatcagttccatttcctactattacagcaaatcctagccccagccaccaaatccataccttttccgcccaaaccgctcccaccacagattcgctcaatagttcgaagtctccacatatcgggaattctttcctgcctgataactccttgcccgtgctcaaccaggatctgactagttctggacagtccacaagcagttctagcgcattaagtaccccgcctccagccgggcaatccccagcacagcaagggagcggcgtcagcggtgtacagcaggtgaatggagtaactgtgggagccttggcttctgggatgcagcctgtgaccagcacaatccccgcagttagcgctgttggaggtatcattggcgcactgccaggaaaccagctggccatcaacggcatcgtgggcgctctgaatggggttatgcagacgccagtgactatgtcccagaacccgaccccactgacacacacaaccgtaccgccaaatgctactcacccgatgccggcaacattaaccaattccgcttccggactgggcctgcttagcgatcagcagcggcagatcctgatccatcaacagcaattccagcaactcttaaacagccagcagttgaccccagagcagcaccaagctttcctgtatcagctcatgcagcaccatcatcagcagcaccaccagccagagctgcaacaattgcaaatcccaggacccactcaaattcccatcaacaaccttctagctgggacacaggcacccccgttgcacacagctacaactaatcctttcctgaccattcatggcgataatgctagtcagaaagtcgcccggctttcagacaaaacaggcccagtagcccaggagaaatcctag

SEQ ID NO: 23348 - DNA, 1353 bp, synthetic construct
  source 1..1353: mol_type = other DNA; note = Synthetic coding sequence
atgagctgcctgatggtggagcggtgcggcgagatcctgttcgagaatcctgaccagaatgccaagtgtgtgtgcatgctaggggatattcgcctgagaggccagacaggcgtcagggccgaacgccgcggatcatatccttttatagactttagactgttgaattctacaacctacagcggagaaatcggcaccaaaaagaaagtgaagagacttttgtcttttcagagatactttcacgcttcaagactgctcagaggaataatcccccaggcgccacttcacctcctagatgaagattacttgggtcaggccagacatatgctctctaaggtgggtatgtgggatttcgatattttccttttcgatcggctgactaacggcaactcgctagtgacactgttgtgtcacctcttcaacactcacggcctgatccaccattttaagctggacatggttaccctgcatcggttcctcgtcatggtacaggaagactatcattcacagaacccctaccataacgccgtacatgcggctgatgtgacccaagcgatgcactgctacctgaaagagcctaaactggctagctttttgactccacttgatatcatgttgggtctattagcagctgccgctcatgatgtggatcatccaggcgtgaatcagccttttctgattaagaccaatcaccacctggcaaacctgtatcagaatatgtccgtcctcgagaatcatcattggaggagcaccatcggcatgctccgagaatctcgactgttagcccaccttcccaaagagatgactcaagatatagagcagcaactcggctctctcatcttagctactgacatcaacaggcagaatgagttcctgacacggcttaaggctcacctgcacaataaagatctgaggttagaggatgcccaggatcgccattttatgctgcagatcgctcttaagtgtgctgacatctgtaacccctgtcgaatttgggagatgagtaaacagtggagcgaaagggtttgcgaagaattctatcgccagggtgaattggagcaaaagtttgaactcgagatttcacctctttgtaaccagcagaaggattcaattcctagtattcaaattgggttcatgtcatacattgttgaaccattgtttcgtgaatgggcccacttcacaggcaacagtaccctcagcgagaatatgcttggacatctggcacataacaaggcccagtggaagtccctgctaccccggcaacatcggtccagagggagctccgggtctggccctgaccacgatcacgccggacagggcaccgagagtgaagaacaggaaggagattccccctag

SEQ ID NO: 23349 - DNA, 2268 bp, synthetic construct
  source 1..2268: mol_type = other DNA; note = Synthetic coding sequence
atggccggctgcatccccgaggagaagacctaccggcggttcctggaactctttttaggcgaattcaggggtccctgcgggggaggtgaaccggagcccgagccagaacccgagccagaacctgagcccgagagcgaaccagaacctgagccagagttagtggaagccgaggccgccgaggcctccgtggaggagccaggtgaggaggcagcgaccgttgccgccacagaagaaggcgaccaggaacaggaccctgagccggaagaagaagctgcagttgaaggagaagaggaggaagaaggggcggccacagctgctgctgccccaggccacagcgccgtacctcccccaccaccccagctgccacctctcccccccttgcctcggcccctgtcggagcgcatcacacgcgaggaagtggaaggggaatcattggatttgtgcttacaacagttatacaaatataattgccccagctttctcgcggccgctctcgctagggccaccagcgacgaggtactccaatcagatctctccgcccactatatccctaaagagacggatggaacagagggtaccgtggaaatcgagactgtgaaactcgcccgcagtgtattctcgaaactgcatgaaatttgttgtagttgggtcaaggattttcctctccgccggaggccccaactatattatgagacatctatccacgctataaagaacatgaggagaaagatggaggacaagcacgtgtgcatacctgacttcaacatgttgtttaatctggaagatcaggaggagcaggcctactttgccgttttcgacggtcatggcggtgtagatgcggcaatctacgcctcaattcatctccacgtgaatctggttagacaagaaatgttccctcatgatccagccgaagctctctgcagggcctttagggttactgatgaacgctttgtccagaaggccgctcgggagagtctgagatgtggaacaacaggcgtcgtgacatttatcaggggaaatatgctacacgtggcatgggttggtgactcgcaggtgatgctcgtgcgcaaggggcaggcagttgagctcatgaaaccccataaaccagacagagaagacgagaagcaacgcatcgaagcgctgggcggctgcgtggtatggtttggtgcctggcgcgttaatgggagcttgagcgtaagccgagccattggggacgctgagcataaaccatacatatgcggcgacgccgattccgccagtacagtccttgatggcactgaggactacctaattttagcctgcgacggattttacgataccgtcaaccccgatgaggccgttaaggtggtcagcgaccatctgaaagagaataacggcgactcatcaatggttgctcataagctcgtggcgtcggcaagagatgccggcagctccgataacataacagtgatcgttgtgttcttgcgcgacatgaataaagcagtgaacgtgagcgaagagtctgactggactgagaactccttccagggcggccaggaagacggaggcgacgataaagaaaatcacggagagtgcaagcgaccctggccgcagcaccaatgcagtgcaccagcagacttgggttacgacgggagagtggatagcttcaccgaccgcactagcctttcaccaggctcccaaatcaacgtgctggaggatccggggtacttggacttgacccagattgaagccagcaagcctcacagtgcgcaatttttgctgccagtcgaaatgttcgggccgggggcaccaaagaaggcgaacctgataaatgagttgatgatggagaagaaatcagttcagagcagcctgcctgagtggtcgggcgccggagagtttccaacagccttcaacctgggatccactggcgagcagatctataggatgcagtccctgtcccctgtttgctctggtctagagaatgagcagtttaaatccccggggaatcgggtgagtaggttgtcacatttaaggcaccattactccaaaaagtggcatcgttttcgcttcaaccctaagttctattcattcctctccgcgcaggaacccagccacaagatcggaacttctctaagctctctgactggaagcggtaagcggaatcggattaggtcatccctgccatggcgccagaactcctggaagggctattcagagaacatgcgcaagttgagaaaaactcacgacataccttgcccagatctcccatggtcatacaaaatagaatag

SEQ ID NO: 23350 - DNA, 771 bp, synthetic construct
  source 1..771: mol_type = other DNA; note = Synthetic coding sequence
atggccagccggtacgaccgggccatcaccgtgttcagccccgacggccacctcttccaggttgagtatgcccaggaggccgttaaaaaggggtccacagccgtgggaattcggggtacaaacatcgtggtactgggggttgaaaagaagtcagtcgcaaaactgcaggatgagcgtaccgtccgaaaaatctgtgccctcgacgaccacgtatgcatggctttcgcagtcctcacaattttcattggcctaaccgccgatgccagagtggtgataaatcgagctcgggtggaatgtcaatctcacaagctcaccgtcgaggatccagtgaccgtcgaatacatcactcggttcatcgccactctgaaacaaaagtacacgcagagtaatggccgaagacccttcggaatttcagcactgatcgtggggttcgacgacgacggtataagcagactgtaccagaccgatcctagtggcacatatcacgcctggaaggcaaacgccattggacgctccgccaaaaccgtgagggagtttctggagaaaaattatacagaggatgccatagccagtgactccgaggcaataaagctcgccataaaagctctgctggaagtggtgcaatctggaggcaagaatatcgagctggcaattattaggaggaaccaaccccttaaaatgttttccgccaaggaggtggagctgtacgtgacagagatcgagaaagagaaggaagaggcagagaaaaaaaaaagcaagaaatccgtgtag

SEQ ID NO: 23351 - DNA, 3108 bp, synthetic construct
  source 1..3108: mol_type = other DNA; note = Synthetic coding sequence
atggccccccggctgcagctggagaaggccgcctggcggtgggccgagacagtccgccctgaggaagtaagtcaggagcacatcgagaccgcctataggatttggttggagccatgtattcgcggagtttgtcgcaggaattgcaaagggaatcctaactgcctagtagggatcggggaacatatatggctgggggagattgatgaaaactcgtttcacaatatcgacgaccctaattgtgagaggagaaaaaagaatagttttgtggggttgaccaaccttggagccacctgctatgtgaacacatttctccaggtttggtttctgaacctcgaactgcggcaagcattatatctttgtccctccacttgcagtgattacatgctcggagacggaatccaagaggagaaggactatgagccccagaccatttgtgaacacctacaatatctgttcgcactgctgcagaactctaaccggagatacatcgacccttctggtttcgtgaaagctttggggctcgacactgggcagcagcaggatgcacaagagttttctaagctgtttatgagcctgttagaagacacgttgagcaagcaaaagaatccggatgtgcggaatatagtccagcagcagttctgcggcgagtatgcctacgtcacagtgtgtaatcagtgcgggagggagtcgaaactgctcagtaaattctatgaactggaactgaacattcaagggcacaaacagctgactgattgtatatctgaatttctgaaggaagagaagctggagggagacaatcgctatttctgtgagaactgccaaagcaaacagaacgcgactcgcaagatccggcttctgagcctcccttgtactctaaatctgcagctgatgagattcgtgttcgatcgtcagaccgggcacaagaaaaagctgaacacttatatcggattcagcgagattctggacatggaaccatacgtcgaacacaagggcggtagttatgtttacgaactctccgccgtcttaattcatcgcggggtctccgcttacagcgggcattacatagcccacgtaaaggaccctcagagcggtgagtggtataaatttaatgatgaagacatcgagaaaatggaaggaaaaaaattacagctcgggatagaggaagatctcgccgagcctagcaaaagtcagacacgcaaacccaagtgcggtaaaggtacacactgctcccgtaacgcttatatgctcgtctatagactccagacacaagaaaagccgaacaccaccgtgcaggtgcccgcctttttacaagagctcgtggatcgcgacaattcaaaattcgaggaatggtgcattgaaatggctgagatgaggaaacagtccgtggataagggtaaggccaagcacgaggaggttaaggagttataccaaagattgcctgccggggcagagccctacgagttcgtgtcactcgagtggttacagaagtggctggacgagagcaccccaacaaaaccgatcgataaccacgcgtgcctctgcagccatgacaagctgcatcccgataaaatcagcataatgaagaggatctccgagtatgctgcagatattttctattccagatatgggggcgggccgcgcctcacagtgaaggctctgtgtaaggagtgtgtggtcgagaggtgccgcattcttcggctgaaaaatcagctaaacgaagactataaaaccgtgaacaatctgctcaaagctgccgtcaaagggagtgacggcttttgggtaggcaaaagcagtctacgctcctggcgacagctcgctctcgagcagctagacgaacaagatggcgacgcagagcaaagtaacggtaagatgaatggaagtacactcaataaagacgagtccaaagaggaaagaaaggaggaagaggaattgaattttaacgaagacattctctgtcctcatggagaactgtgcatcagcgagaatgaacggaggcttgtgtctaaggaggcctggagcaaactgcagcaatatttcccgaaagcgccagaatttccctcttataaggagtgttgctcccaatgcaagatccttgagagggagggagaggaaaatgaggcgctgcacaagatgatcgccaacgagcagaagacctcccttccaaacttgtttcaggataaaaataggccttgcctgtcaaattggccagaggatactgatgtgctgtatattgtgtcacagtttttcgtcgaggaatggcgcaaatttgtgcgaaagcccacccgctgttccccggtctcaagcgtcggcaattccgccctcctgtgcccacacggagggcttatgttcacatttgcatctatgaccaaagaggattctaaactcatcgcactgatctggccttctgaatggcagatgatccagaaactgttcgttgttgatcacgtgatcaagatcaccagaatagaagtgggggacgtgaatccgagcgagacccagtacattagtgaacctaagctgtgtcctgagtgtcgcgagggcctgttgtgtcagcaacagcgagacttgcgcgagtacacacaggcaactatttatgtccacaaagtcgtggataacaaaaaggtgatgaaggattctgctccagaactaaatgtctcatcttccgaaacggaagaagataaagaggaggccaagccagacggagagaaggatcctgatttcaatcagtcaaacggaggaacaaagcgacagaaaatctcacatcaaaactatatagcctaccaaaagcaagtgatacggagatccatgcgccatagaaaagttagaggcgaaaaggccctgctcgtgtccgctaatcaaactctgaaggaactgaagatccagatcatgcacgctttctctgtggcacctttcgaccagaacctgagcatcgatgggaagatcctgagtgacgattgtgcaaccctggggacattaggagtcatccccgagagcgtgattctgcttaaggcagatgaacccatcgcagactatgctgcaatggacgacgtgatgcaagtttgcatgcctgaagaggggttcaaagggacagggctcctggggcattag

SEQ ID NO: 23352 - DNA, 2382 bp, synthetic construct
  source 1..2382: mol_type = other DNA; note = Synthetic coding sequence
atgctgatccagagcgagaagaagacccagctgagcaagaccgagagtgtgaaagaatctgagagcctcatggagtttgcccaacccgagatccagccacaggaattcctgaatagaagatatatgacagaggtggattacagcaataagcagggagaggaacagccttgggaagcagactatgccagaaagccaaacctgcccaaaagatgggacatgctaactgagcccgacggtcaggagaaaaaacaggagtcattcaaaagctgggaagcctcaggcaagcatcaagaggtaagcaaaccggccgtaagtttagagcagcggaaacaggacacgagtaagctgagatcaacactccctgaagaacaaaagaagcaggaaatcagtaaatcaaaaccgtctccatcacagtggaaacaagatacacctaaaagtaaggcaggttacgtgcaagaggaacaaaaaaaacaggagacgcctaaattatggccagttcagctgcagaaggagcaggatcccaaaaagcagacacccaagagttggaccccgagtatgcagtcagagcagaacactacaaaatcgtggaccaccccaatgtgtgaggagcaagattccaagcagccggagacacctaaatcatgggagaacaacgtcgagagccagaaacattcactgaccagtcagagccagatcagccctaaatcttggggagtagccacggcgagcctaatccctaacgaccagttgttgcctcggaagcttaataccgagcccaaagacgtgcctaagcccgtgcaccagccggtgggttcaagcagcacgctgccaaaggacccggtgctacggaaagagaaactccaagacctgatgacccagattcagggcacttgcaactttatgcaggaaagcgtattggacttcgacaaaccatcgtccgccatccccacaagtcaaccccctagtgctacccccggctcacctgtagcctccaaggagcagaatctgagtagccagtctgacttcttgcaggaacctctgcaggctactagcagccccgttacgtgttcctcaaacgcttgtttagttactacagaccaggcaagttctggctccgagaccgaatttatgaccagtgagacgcctgaggctgctatcccacccggcaaacaacccagtagcctagcgtctcccaacccacctatggctaagggaagcgagcagggctttcagtccccacccgcctcttcatcaagtgttacgattaacaccgcaccctttcaagctatgcaaacggtatttaacgtgaatgcccctttaccacctaggaaagaacaggaaatcaaggagagcccatattcacccggctacaaccaatcgttcaccaccgcctctactcagacaccaccacagtgccaactcccttccatccatgtggaacaaactgttcacagccaggagactgcaaattatcatcccgacggtacaattcaggtatctaacggttctctcgctttctaccctgctcaaacaaatgtgtttccacgcccaactcagcccttcgtaaattctcgagggtccgtcagggggtgcactcggggaggtcgcctaattacaaattcttatcggagccccgggggctataaaggatttgatacctataggggactgccgtctatctcaaatggcaactattcacagctacaattccaggccagggagtactcgggggccccttactcccagagggacaattttcagcagtgctacaagagaggtggaacatctggcgggccacgcgccaattcccgggctggttggagcgactcctctcaggtgtctagcccggagagggacaacgagacgtttaactctggggatagtgggcaaggcgattctaggagtatgacgccagtggatgtgcctgttacaaatcctgcggctacaattctgcccgtccacgtatatcccctgccccagcaaatgagggttgcattttctgccgcgaggacgagtaatctggccccaggaactttggaccaacccatagtatttgatttacttctgaataacctcggagagacttttgacttgcagttgggccggtttaattgcccagtgaacggaacttacgtcttcatattccacatgttaaaactggcggtgaatgtccccctgtacgtgaatctgatgaaaaacgaagaggtgcttgtctcagcatatgcgaacgacggagccccagaccacgagacggcgtccaatcacgccattctgcagctcttccagggggaccagatctggctgcgcctccatagaggggcgatttacggctcatcgtggaagtactccacattcagcggctacctactttaccaagactag

SEQ ID NO: 23353 - DNA, 1083 bp, synthetic construct
  source 1..1083: mol_type = other DNA; note = Synthetic coding sequence
atggaggagctgagccaggccctggccagcagcttcagcgtgagccaagacctcaattccaccgcagctcctcatcctagattatcgcagtataaaagcaaatatagctctctggagcaatctgagagacgcagacggctgttagagcttcaaaaatccaaaaggctcgactacgtgaaccatgcccggcgacttgccgaggatgattggactggaatggaatcagaagaggagaacaaaaaagacgatgaggagatggacattgacacggtgaaaaagctcccgaagcactatgcaaaccaactcatgctctctgagtggctcatcgatgtgccaagcgacctgggccaggagtggattgttgttgtgtgccccgtaggtaagagggctcttattgtggcctccagaggtagtaccagcgcgtatacaaaatctggctactgtgttaatcgcttctcttctctcctgccgggaggcaataggagaaacagcaccgcaaaagactacactatcctcgattgtatttacaatgaggtgaatcagacgtattacgtactcgatgtaatgtgctggcggggccaccctttctacgactgtcagaccgactttagattttactggatgcactccaaactccctgaggaggaaggtttaggcgagaaaacgaaacttaatccatttaagtttgtcggtctcaagaacttcccatgtactccagaatctctctgcgacgtgctgagcatggattttccatttgaagtcgatggactgctgttttaccacaaacagactcattatagcccaggaagtaccccactcgtgggttggttgagaccttatatggtttctgatgtcttaggtgtggcagtcccagcaggccctcttaccacaaagcccgactatgccggtcaccaactccagcagattatggagcacaaaaaaagtcagaaggagggtatgaaagagaaactgacacacaaggcgagcgagaatggtcattacgaactggaacacttgtcaaccccaaaactgaagggcagctcccacagccctgatcatcctggttgcctcatggagaactag

SEQ ID NO: 23354 - DNA, 525 bp, synthetic construct
  source 1..525: mol_type = other DNA; note = Synthetic coding sequence
ctgatccacaagcccctgaagcgggccatcaccaccctgatggccggtatacttaggttagtagtgcagtggcctcccgggaggttgcagaccgtcacaaagggcgtcgagagcctcatctgtaccgactggatacgtcacaagtttacaaggagcagaattcctgagaaagtctttcaagccagccctgaggatcatgagaagtacggcggagatccccagaacccccataagttgcacattgtcaccagaattaagtcgactaggaggcgtccctactgggagaaagatattattaagatgctgggcctcgaaaaagctcacacacctcaggtacacaagaacatcccaagcgtgaacgccaagcttaaagtagtgaaacatttaatccgcattaagcccctcaaactaccacagggattgccggccgaggaaaacatgagcaacacctgtctgaaaagcaccggcgaactggtggtacagtggcatttaaagcccgtggagcagaaagctcatgagagctag

SEQ ID NO: 23355 - DNA, 1434 bp, synthetic construct
  source 1..1434: mol_type = other DNA; note = Synthetic coding sequence
atggccacctacacctgcatcacctgccgggtggccttccgggacgctgacatgcagagggcacattacaaaaccgattggcatcgctacaacctgcggcggaaagtcgcttcgatggcacctgtgactgccgaagggttccaggagcgagtcagggcccaacgagcggtcgctgaggaagagtcaaagggtagcgcgacatactgcactgtctgctcaaagaaattcgcctccttcaacgcatacgagaatcatctgaaatctcggcgccacgttgagctggagaaaaaagccgtgcaggccgtgaacaggaaagtggaaatgatgaacgagaaaaatctggaaaaaggactgggcgtggactccgttgataaagatgccatgaatgctgcaatccagcaagctatcaaagcccaaccaagcatgagcccaaaaaaagcccctccggccccagcgaaagaggctagaaatgtggtagccgttggaaccggcggtcgtgggactcacgatcgagatccttctgaaaagccaccgagattacagtggtttgaacaacaggctaaaaaactcgccaaacagcaggaggaagattcagaagaggaggaggaggatcttgacggcgacgactgggaggacatcgacagcgatgaggagctcgaatgcgaagacaccgaagcaatggatgatgttgtggagcaagatgctgaagaagaggaggccgaggaaggccctccattaggcgccataccaattaccgactgtctgttttgttctcaccattctagctcactgatgaagaacgtcgcacacatgacaaaggaccactcctttttcatccccgacatagaatatctgtccgatatcaaagggcttattaaatatctcggtgagaaagttggtgtggggaaaatctgcctgtggtgcaacgaaaaaggaaaaagcttttacagtaccgaggcagtccaagcacacatgaacgacaagagccactgtaagctctttaccgacggggacgccgccttggagttcgcagatttttacgacttcaggtctagttatcctgaccacaaagaaggagaggatccgaataaggccgaagagctcccttctgaaaaaaacttggagtatgatgatgagaccatggagctgatcctgccgtccggtgcaagagtcggacaccgttcattaatgcgctattataaacagaggttcggcctgagcagagccgtcgccgttgctaagaaccgaaaggccgttggaagagtcctccagcagtatcgcgctctaggctggaccgggtccaccggagcagctttgatgagagagcgcgatatgcagtacgtgcaaagaatgaagtctaagtggatgctaaagactgggatgaagaataacgccactaaacaaatgcacttccgtgtccaggtgaggttttag

SEQ ID NO: 23356 - DNA, 2862 bp, synthetic construct
  source 1..2862: mol_type = other DNA; note = Synthetic coding sequence
atgatcaccagcgccgccggcatcatcagcctgctggacgaggacgaacctcagctgaaagagttcgccctccacaagctaaacgccgtagtcaatgatttttgggcagagattagcgagagcgttgataagatcgaggtgctttatgaagacgaaggatttcgtagtagacaattcgccgcccttgtggcaagtaaggtgttttaccacctgggtgcctttgaagaatctctgaattacgccctaggcgctggcgatctctttaatgtcaacgataattctgagtatgtcgagaccattattgcgaaatgtatcgaccattacactaaacagtgtgtggaaaacgccgacctcccagagggagagaagaaacccatcgaccagcggctggaagggatcgtcaataagatgttccagagatgcctggacgaccacaagtacaaacaagctattggtattgcgctagagacaagaagactggacgtttttgaaaagacaatcctggagtccaacgatgtgccaggcatgcttgcttacagccttaaactctgtatgtcactgatgcagaacaaacagtttaggaacaaggtactcagagtccttgttaaaatatatatgaacctggagaagccagattttattaatgtgtgccaatgtttaatctttctggacgacccccaggcggtttctgatatccttgagaaacttgttaaggaggacaaccttcttatggcctaccagatctgtttcgatctatacgagtctgcatcccagcaattcctttcaagtgtcatccagaatctgcgaacagtggggacaccgattgcatctgtcccgggatccactaacaccggaacagttcctgggtctgagaaagatagcgattcgatggagacggaggagaagacatcctccgctttcgtcggtaagactcctgaggcttcccccgaacccaaggatcaaactcttaagatgatcaagatactgtcgggggaaatggcaattgaactgcacctccagtttctgatccgcaacaataacaccgatctcatgatactgaaaaataccaaggatgccgtccggaattccgtttgccatacggctactgttatagctaactccttcatgcactgcggcactacgagcgatcaatttctgcgtgataatcttgaatggcttgcacgcgcgacgaattgggcgaaatttacagccaccgctagtctcggcgttattcacaaaggccacgagaaggaggccctgcagctcatggctacttatctccctaaagacacttctcctggaagtgcttatcaggaagggggcggcttatacgccctgggcctgatccatgccaaccacggaggcgatatcatagactacctattaaatcagttgaagaatgccagcaatgacatcgtgagacatggtgggtctctaggcctaggactcgccgccatgggcacagctagacaagacgtatacgatctcctgaagaccaatctgtaccaggatgatgccgttactggggaggctgcggggctggctttgggtctggtgatgctggggagtaaaaatgcgcaggccatagaggacatggtgggttacgctcaagagactcagcacgaaaaaattttacgcgggctcgccgttggaattgctctggtcatgtacgggaggatggaggaagcagatgctcttattgagagtctctgccgagataaagatccaattctgcgccgaagtggtatgtacacagtagctatggcatattgcggaagtggaaacaacaaagcaatcaggcgcttactgcacgtcgccgtgagcgatgtgaatgatgatgtacgaagagcagccgtcgaatcactcgggtttatcctgttcagaaccccggagcaatgtcccagtgtggtgagcctcctgtctgagtcgtacaatcctcatgtcaggtatggggccgccatggctttaggcatctgctgtgccggtaccgggaacaaggaggccatcaaccttcttgagcccatgacaaacgatcctgttaattatgtgagacagggagccctaatcgcaagcgccctgatcatgatccagcaaaccgaaatcacatgtccgaaggtcaatcagtttcgccagttgtacagcaaggtgatcaatgataaacacgatgacgtgatggcaaagttcggagccatcctcgcacagggtatcctggacgccggcggccataatgtgaccatctctctccagagtcgcacaggccatacccacatgcccagtgtggtgggtgtgcttgtgtttacacagttctggttttggttcccgttatcccattttctgtctctggcatatactccaacttgtgtcatcgggctcaacaaggacctgaagatgcccaaagtccagtacaaaagcaattgcaaaccgagtacctttgcctatcccgccccattagaagtgcctaaagagaaggagaaggagaaggtatccacagctgtgctgtccatcactgctaaagcaaagaaaaaggaaaaggaaaaggaaaagaaggaggaagagaaaatggaggtcgacgaagccgaaaaaaaggaggagaaggagaagaagaaagagccagaaccgaactttcagctcctcgataatcccgcccgcgtcatgcctgctcagttgaaggtgctaaccatgccagagacatgtcggtatcagccctttaagcccctctctatcggaggcattatcatcctcaaggacacctccgaggacatcgaggaattggtggagcccgttgcagctcatggccctaaaatcgaagaggaagagcaggaaccggaaccacccgaacccttcgaatatatcgatgattag

SEQ ID NO: 23357 - DNA, 984 bp, synthetic construct
  source 1..984: mol_type = other DNA; note = Synthetic coding sequence
atgtgcagcaccagcggctgcgacctggaggagatccccctggacgacgacgacctgaataccattgagtttaaaattctggcttattacaccaggcatcacgtgttcaaaagtactcccgcactcttttctcccaagttactgaggaccagatcactgagccagcgaggactcggtaattgtagtgcgaacgaatcttggacagaagtttcttggccatgtagaaactcccagtccagtgagaaggccattaatttgggtaaaaaaaagagttcatggaaagccttctttggagttgttgagaaggaagactctcaatccacccctgcaaaagtctcggcgcagggccagagaactttggaataccaggattcacattcccagcagtggtcccgctgtttgagcaacgtggagcagtgcctggagcatgaagccgtagatccgaaagtgatcagcatcgctaatcgcgtggcagaaatcgtctatagttggccgcctcctcaggccactcaggctggtggctttaagagcaaagaaatatttgtcaccgaggggctcagcttccagctgcagggtcacgtgccagtggcatcatctagtaaaaaagatgaagaggagcagatcctggccaaaatcgtagaactgctcaagtactcaggcgaccaattggagaggaagctgaaaaaggacaaggccttaatggggcatttccaagacggactgtcgtactccgtttttaagacgatcaccgaccaggtacttatgggcgttgatcccagaggagaaagcgaagtcaaagcccagggattcaaagcggccctggttatcgatgtcaccgccaaactgactgctattgataatcatcctatgaaccgtgtgttgggctttgggaccaagtacttaaaggagaatttctcaccgtggattcagcagcatggcggatgggagaaaattttagggatctcccacgaagaagttgattag

SEQ ID NO: 23358 - DNA, 1086 bp, synthetic construct
  source 1..1086: mol_type = other DNA; note = Synthetic coding sequence
atgggcggcgccgtgagcgccggcgaggacaacgacgagctgatcgacaatcttaaggaagcccagtacattaggactgaactggtcgaacaggcttttcgagccattgaccgcgccgattactacttagaagagttcaaggagaacgcctataaagatctggcgtggaaacatggcaatatccatctgtctgccccctgtatctacagtgaggtgatggaggctcttgatttgcagccagggctttcatttttgaatttgggctccggaaccggctaccttagctcgatggtgggcctgatcctgggccccttcggcgtcaaccatggagtcgagttacactccgatgttatcgagtacgcgaagcagaaacttgacttcttcattaggacaagcgactcgtttgataaattcgacttttgtgagccatccttcgtcactgggaactgcctagaaatatcacctgactgttcacagtacgaccgggtgtactgcggtgctggtgtccagaaggagcacgaagaatacatgaaaaatttgctgaaagtgggcggaatcttagttatgccactagaggagaaactgaccaagattacccgaacaggcccaagtgcttgggaaaccaagaagatcctcgcagtgagctttgcccctctaatccagccgtgccattccgagtcagggaaatcaagactagtgcagctccccccggtggctgttcgctccctgcaggatctggcacgaatagcgatcagggggacgatcaagaagataattcaccaggagaccgtgagtaagaatggtaatggactgaagaatacaccgagattcaaacgacggagagtcaggaggagaaggatggaaacaattgtgttcttagacaaggaggtatttgcttctagaattagtaacccttcagacgataattcatgcgaagacctggaggaggagagaagagaagaagaggagaaaacaccaccagaaaccaagcctgacccccccgtgaatttccttcgtcagaaggttctgtccctgccccttcctgatcctctgaaatactacctcctttactaccgagagaaatag

SEQ ID NO: 23359 - DNA, 780 bp, synthetic construct
  source 1..780: mol_type = other DNA; note = Synthetic coding sequence
atgaaggacgtggacaacctgaagagcatcaaggaggagtgggtgtgtgagaccggttccgataatcagcctttaggtaacaaccagcagtccaactgtgagtattttgtggacagcttgtttgaagaagcccagaaggtgtcaagcaagtgcgtttctcctgctgaacagaagaagcaggtcgatgtgaacatcaaattgtggaagaatggcttcacagttaacgacgactttaggtcttactctgacggcgcttcacagcagttcttgaattccataaagaagggagaattgcccagtgagctccagggaatctttgataaagaagaagtcgacgttaaggtcgaggataaaaaaaatgagatctgcctcagcaccaagccagtgtttcagcccttcagtggccaaggacatcgcctcgggagcgccaccccaaagattgtttccaaagccaaaaatattgaggtagagaacaagaacaacttgtccgccgtgcccctgaataacctagaacctatcactaatattcagatctggctcgcaaacggtaagcgaattgtccagaagtttaatataacacacagggtgtctcatattaaggacttcatagagaaataccaagggagtcagcgtagcccccccttttccctggccaccgccctgcccgtgcttagactgcttgatgagaccttgacccttgaggaggccgatctacagaatgccgtaatcatccaaagactacaaaagacggccagttttcgcgagctgagtgaacattag

SEQ ID NO: 23360 - DNA, 990 bp, synthetic construct
  source 1..990: mol_type = other DNA; note = Synthetic coding sequence
atggtgcggaccaagacctggaccctgaagaagcacttcgtgggctatcccacaaattccgacttcgagctgaaaaccgcagagctcccacccctcaaaaacggtgaagtgttgctagaggcactgttcctgactgtagacccatacatgcgggtggcagccaagcgcctaaaggagggcgacaccatgatgggtcagcaggtggcaaaggtggtggagagcaagaacgtagcccttcccaagggcaccatcgtcttagcatctcccggttggaccactcacagcatctctgatgggaaggacctggagaagctgctgactgagtggcccgacaccataccactttcacttgccctcgggacagttggtatgcctgggctgaccgcctacttcggacttctggagatttgtggtgtcaagggcggcgagaccgtgatggtgaatgctgctgcaggggcagtcggatccgttgtaggacagatagccaaacttaaaggctgtaaagtcgtgggagctgtaggatctgacgagaaagtagcttacctccagaaactgggttttgacgtggtctttaattataaaacagtggagagcctggaagaaacgttaaagaaagcaagtccagatgggtatgattgctacttcgataacgttggcggagagttcagcaacactgttatcgggcagatgaagaaattcggtagaatcgcaatctgcggcgccattagcacttataaccggactggtcccctccctccaggcccaccacctgagattgtgatttaccaggaactacgaatggaggcattcgtggtttatagatggcaaggagatgccaggcagaaggctcttaaggacttgttaaaatgggttcttgaagggaagattcagtataaggagtatatcatcgaaggatttgagaacatgccagcggcattcatgggaatgctgaagggggataacttggggaagaccattgtgaaggcctag

SEQ ID NO: 23361 - DNA, 3006 bp, synthetic construct
  source 1..3006: mol_type = other DNA; note = Synthetic coding sequence
atgcagagcaccgacctgggcaacaaggagagcggcaagatctggcatcggaagccctctcccgctactcgtgacggaattatcgttaacattatacacaatacctcggactaccatcccaaggttttaaggttcctaaacgtggcattcgacggaactggggactgtctcatagccggagaccatcaaggcaatatttatgtgttcgacctgcatggaaaccgctttaacctcgttcagaggactgctcaggcgtgtacagccctggctttcaatctgagaaggaaaagcgagtttctcgtcgccttggcagactacagcataaagtgcttcgatacagtaactaaggagctggtatcctggatgagaggccatgagtcaagcgtcttctccataagtgttcacgcgagtggtaaatacgctatcacaacgtctagtgacaccgcccagctgtgggatctggatacatttcagcgaaagaggaaactcaatattcggcagtccgttggtattcagaaggtattctttttaccgttgtccaacacaatcctcagctgttttaaagataattccatattcgcatgggagtgtgataccttattttgcaagtaccagctgcctgcccctcctgagagctctagtatcctgtacaaggtgtttgcagtgactcgggacggccgtattctcgcagcaggtggtaagtcgaaccacctgcacctctggtgtctggaggcccgccaactattccgcattattcagatgcctacgaaagtgcgggctatccgacacctggagtttctgcctgactcttttgacgcggggtccaaccaggtcctgggggtgctgtctcaagacggtatcatgagatttattaatatgcagacatgtaagcttctgttcgaaatcggctcattggacgaagggatttcctcctcagccatctccccacacggtcggtatatcgctagcatcatggagaatggatctttaaacatctacagtgtccaagcgctgacccaagagataaacaaacctcctcctccgcttgtgaaagttattgaagacctccctaagaataaattgagttcgtccgatctgaagatgaaggtaacctccggtagagtgcaacaacccgcgaagtcaagagagtcaaagatgcagacccggatcctgaagcaggacctgaccggagacttcgagtcgaagaagaatgaactgccggacggactgaataagaaacggctgcaaatcctgctgaagggctacggggaatatccaactaagtacaggatgttcatttggcgttcactgttgcagctgccggagaatcacaccgctttctctacacttattgataagggcacacatgtggcattcctgaacttgcagaaaaagtatcctatcaagtcaaggaaactgcttcgcgtgctccagaggaccttgagtgcacttgcacattggagcgtgatattttccgataccccttacttacctctgctggcgtttccgtttgtaaagctcttccagaataaccagctgatttgctttgaggtgatagcaactctgatcatcaattggtgtcagcattggtttgaatattttccaaaccctcccatcaacatcctgagtatgatcgaaaacgtcctcgccttccacgataaagagttacttcaacactttattgaccatgacatcacatcccagctctatgcttggcccctactggaaaccgtattcagtgaggtgctgacacgggaagagtggctcaagctattcgacaatattttttccaatcatccttctttcctgctaatgacagtggttgcctacaatatctgttctagaacacccctgctgagctgcaacttaaaggatgattttgagttttttttccaccacagaaataatctggacattaacgtcgttatcagacaggtctaccatcttatggaaacaacacctaccgacatccaccctgactctatgctgaatgtgtttgtagcccttaccaaagggcaataccccgtgtttaaccagtacccgaagtttattgtggattatcagacacaagaaagagaaaggatccggaacgatgaactggactatctgcgagaacgccaaacagtcgaggacatgcaggcgaaagttgaccaacagcgcgttgaagacgaggcctggtaccaaaaacaggaattgctgagaaaggcagaagaaacccgacgggagatgcttttgcaggaggaagaaaagatgatccagcagaggcagagactggctgccgttaagagggaacttaaagtcaaggagatgcacttacaggatgccgctcgtaggcggtttctcaaactgcagcaggatcaacaggaaatggagctgcggcgcctagacgacgaaatcgggaggaaggtgtacatgcgtgacagggagatcgcagccaccgcaagagacctcgaaatgcgccagctcgagttagaatcacagaagagactgtacgagaaaaacctgacagagaatcaggaagcactggcaaaagagatgagagcagacgccgatgcctaccgcagaaaagtagacctcgaggaacacatgttccataaactcatcgaagctggtgaaactcagtctcagaagacccagaaatggaaggaggcggagggaaaggagttccgcctgagatctgcaaagaaggcttccgctctctcagatgcttccagaaagtggtttcttaaacaggagatcaacgctgccgtggaacacgcagaaaacccctgccataaagaggagccacgcttccagaacgaacaggacagcagctgcctgccccgcacatcccagctaaatgattcaagtgaaatggacccatccacgcagatcagccttaaccgaagggctgttgagtgggatacaaccggacagaatctgattaagaaagtgagaaacctgagacaaaggcttaccgcaagggcccgccatcgctgccagacaccccacctgctggctgcatag

SEQ ID NO: 23362 - DNA, 651 bp, synthetic construct
  source 1..651: mol_type = other DNA; note = Synthetic coding sequence
atgagcttcctgttcggcagccggagcagcaagaccttcaagcccaaaaagaatatccctgaaggaagccatcaatatgagctactgaagcacgctgaagccacactaggaagcggtaatctccgtatggcggtcatgctccccgaaggcgaggatctgaatgagtgggttgccgtaaatacagtggatttcttcaaccagataaacatgttgtacggcacaatcactgatttctgtacagaggagagctgccccgtcatgagtgccggacctaaatatgaataccactgggcagatggaactaatattaaaaagccaattaaatgctcagcgcctaagtatatcgattatctgatgacctgggtccaggaccaactcgatgacgaaactctctttccttctaagatcggcgtgccttttccaaaaaacttcatgagcgtggccaagactatacttaagcggttgttcagggtgtatgcgcatatctaccatcagcatttcgatcccgtgatccagctgcaggaggaggcacatctgaataccagcttcaaacatttcatcttttttgtgcaggaattcaacttaatcgacaggagagagctggcgcctcttcaggaactgattgagaaacttacgagtaaagacagatag

SEQ ID NO: 23363 - DNA, 477 bp, synthetic construct
  source 1..477: mol_type = other DNA; note = Synthetic coding sequence
atggccgcccagggcgtgggccccggccccggcagcgccgccccccctggattggaagcagcccggcaaaaattggcattgcggcgtaagaaggtcttatctaccgaggagatggaactatacgaactggcccaggcagcaggcggcgggattgatccagatgtcttcaagatcctggtcgaccttctgaagctcaatgtagccccacttgcagtgtttcaaatgctgaagtctatgtgcgccggtcagaggcttgcatcagaaccgcaggaccccgcagcagtcagcctgccaaccagcagcgtgcctgagaccaggggccgggataaaggatcagctgctctcggaggggtgctggcactggcagaaaggtcaaaccacgaaggcagcagccagcggatgccgcgtcagcccagtgcaactaggctgccaaagggtgggggccccggtaaatccccaacccaagggtcaacttag

SEQ ID NO: 23364 - DNA, 1425 bp, synthetic construct
  source 1..1425: mol_type = other DNA; note = Synthetic coding sequence
atgaacagcgtgagccccgccgccgcccagtaccggagcagcagcccggaagatgcccggagacgccctgaggccagacggcctagaggcccacgaggacccgatcccaacggcctggggcctagcggagcctcaggacccgccctgggcagccctggggccggaccttccgaacctgatgaagtcgacaagttcaaggcaaagtttctgacagcgtggaacaacgttaagtacggctgggtagttaagtctcgcacgagttttagtaagatttcctccatccatctttgtgggcgccggtatagattcgagggagagggggatattcagaggttccaaagagacttcgtgagtagactctggttgacttacagaagagacttccctccgttacccggtggctgcctcactagcgactgcggatgggggtgcatgcttagatctggacagatgatgctggcccagggacttctgctgcatttcctgcctagggactggacatgggcagagggtatgggcctagggccaccagaactgagtggctccgcctctccttcccggtaccacggaccagctcgctggatgcctccccggtgggcacagggagctccagaattggaacaggagagacgccacagacagatcgtgagttggtttgcagaccatcctagagctcctttcggactacaccgactcgtcgaactcggtcagagtagcggtaagaaggctggagactggtacggaccttcccttgtggctcacatcctgcgtaaggcagtcgagtcgtgtagcgacgtgacacgcctggtggtttatgtatcgcaggactgcaccgtatataaggcggatgtcgcacgtcttgtcgcacgcccagatcccactgccgagtggaagagcgtcgtgatactggtgcccgttagacttgggggcgagaccctcaatcccgtttatgtgccttgcgtgaaggagctcttgaggtgcgagttatgcctcggcattatgggtggcaagccaaggcactccctgtacttcattgggtaccaggacgatttcttactttacctcgatcctcattattgtcaacctactgtggacgtgtctcaggccgactttcccctggagagcttccactgtacctccccacgcaagatggcctttgctaaaatggacccaagttgcacggtcggattttatgccggagaccggaaagagttcgaaacactctgttccgagctgacccgcgtactttcatcctcgtccgccactgaacgctatcctatgttcaccctggcagaaggtcacgctcaggatcattcattggatgacctctgttcccagctggcacagcccacactccgactcccgagaacagggagactgctccgagctaagagaccgagcagcgaggatttcgtgtttctctag

SEQ ID NO: 23365 - DNA, 945 bp, synthetic construct
  source 1..945: mol_type = other DNA; note = Synthetic coding sequence
atggccttcgtgacccggcagttcatgcggagcgtgagcagcagctccaccgcttccgcctctgccaaaaagattatcgtgaaacacgtcaccgtcatcgggggtggcctgatgggggccgggattgcccaggtcgcagctgcaaccggacatactgtggtgttagtggaccagaccgaggacatcctggccaagagcaagaagggcattgaagaaagcctcagaaaagttgcaaagaagaagtttgctgagaatttgaaggccggagacgaatttgtcgagaaaaccctgtccacaatagcaacgtctaccgacgcagcatccgtggtccactcaactgaccttgtggtggaagcgatcgtggaaaatctaaaagtgaagaacgaactgtttaaacggctggacaagttcgccgcagaacataccatctttgcctccaataccagttcacttcagatcacatccattgccaacgctacaacaaggcaggacagattcgccggactgcattttttcaatcccgtgccggtcatgaaattagtggaggttattaagaccccgatgacatctcaaaaaacgtttgaatctctggtggacttctctaaagccttaggcaagcatcccgtatcatgtaaggataccccaggcttcattgttaataggctgctggtgccttatctgatggaggctatacgattgtacgagcggggagatgctagcaaggaggacatagacacagcaatgaaactaggagccggctacccaatggggccatttgagctgctggactatgttggcctggatacgaccaagttcatcgtggatggttggcacgaaatggatgcagagaatccgttgcaccagcccagtccttctctaaacaaactagtggcagaaaacaaattcgggaaaaagaccggggaaggattctacaagtataagtag

SEQ ID NO: 23366 - DNA, 810 bp, synthetic construct
  source 1..810: mol_type = other DNA; note = Synthetic coding sequence
atgggcaactgctgctggacccagtgcttcggcctgctgcggaaggaagccgggagactccaaagagtgggtggcggaggcgggtctaagtactttcggacatgctcccgcggcgagcacctgactatcgaattcgagaatctcgttgaaagcgacgaaggcgagtcaccaggaagctcacatagaccattgacagaagaagaaattgtcgatttaagagaacggcactatgactccatcgctgaaaaacagaaagacctggacaagaaaattcaaaaagagcaggaacgtcaacgcatagtgcaacaatatcaccccagtaataacggtgagtaccagtcatcaggacccgaggacgactttgagagttgtttaaggaacatgaaaagccagtatgaggtctttagaagtagcaggctgtcctcagatgccacagtgctgactccgaataccgaatccagctgcgatctgatgacaaaaacaaagtcaacaagtgggaacgacgattcgacatctctggacctggaatgggaagatgaggagggcatgaatcgcatgctgcccatgagggaacggtcgaaaactgaggaagatatactgcgcgctgctttaaaatatagcaacaagaagactgggagcaaccctacgtcagcaagcgacgatagtaacggtttagagtgggagaatgacttcgtcagcgccgagatggatgacaatggcaactccgaatacagcgggttcgttaatcccgttttggagctttctgactctggaattcgacactctgacactgatcagcagaccagatag

SEQ ID NO: 23367 - DNA, 1371 bp, synthetic construct
  source 1..1371: mol_type = other DNA; note = Synthetic coding sequence
atgaagtgcgagcactgcacccggaaggagtgcagcaagaagaccaagaccgacgaccaagaaaacgtcagcgccgatgccccgtccccagcccaggagaacggagagaagggtgaattccacaaactggccgatgctaagatcttcttatctgactgtctggcctgtgacagctgcatgaccgccgaagagggcgtgcaactgtctcaacagaacgcaaaggacttcttcagagtattaaacctgaacaagaagtgtgacacttccaagcacaaggtcctggtcgtctctgtgtgtcctcagtctctcccctatttcgctgctaagttcaatctgtctgtaacggacgccagccggcgcctgtgcggttttctgaagtcactcggcgtgcattatgtcttcgataccaccattgcagcagattttagtatacttgagtcccagaaagagttcgtcagacgatatcgccagcactccgaagaggaacgtaccctgcctatgctcactagtgcttgtcccggctgggtaaggtacgcagagcgcgtgttggggcgccctattaccgcgcacttgtgcacggcaaagtccccccagcaggtgatgggaagtctggttaaagactattttgcccgacagcagaacctcagcccagaaaagatattccacgttatagtagccccgtgttatgacaagaagctcgaggcccttcaagagagcctgcctcctgcccttcacggcagccgaggcgccgattgcgtgctgacctccggcgaaatcgctcagattatggagcagggcgatctgtctgtccgcgacgcagcagtggacacgctgttcggagacctgaaggaagacaaagtcactagacacgatggcgcctcaagtgatgggcatctcgcgcacatatttcgacatgctgccaaggagctttttaatgaagacgtggaggaggtgacctatagggccctccgtaacaaagatttccaggaggtgacattagaaaagaatggtgaagtagttctccggttcgctgctgcatacggattcagaaacatccagaatatgatcttgaaactgaagaaggggaagtttccttttcacttcgttgaggtgctggcttgtgccggcggctgcctcaacggcaggggccaggctcaaacccccgatgggcacgccgataaagctcttctcaggcagatggagggaatttatgccgacattcccgttaggagaccagaatcctcagcacacgtgcaagaactctaccaggaatggctcgagggaattaatagtccaaaggcaagagaggtactccacaccacatatcagtcccaagagcgcggcactcacagcctcgacatcaaatggtag

SEQ ID NO: 23368 - DNA, 612 bp, synthetic construct
  source 1..612: mol_type = other DNA; note = Synthetic coding sequence
atggcccacgtgagcagcgagacccaggacgtgagccccaaggacgaacttactgcgtccgaggcgtctacccggtcacctttatgtgagcataccttccctggggacagcgatctgagatccatgatcgaggaacacgcctttcaggtgctcagccagggcagtttactcgagtcgccaagctacactgtttgtgtcagcgagccagataaagacgacgatttcctcagccttaacttccctcgaaaactatggaagatagtggaatccgaccagtttaagagcatcagctgggatgagaacggaacatgcatcgtgattaatgaggagctgttcaaaaaagagatcctggagacaaaagctccatatcggatcttccaaaccgatgctataaaaagcttcgtgagacagctgaacctttatgggttctccaaaattcagcagaattttcagcgatccgcattccttgctacattcctcagtgaagagaaggaatcgtcagtactatccaagattcgattcactaagatgaaactctcgcgatccagtacttacgaaaatcgctacttgtgttgcaacctgcatctgaaggacgaaagtaactacagttag

SEQ ID NO: 23369 - DNA, 2052 bp, synthetic construct
  source 1..2052: mol_type = other DNA; note = Synthetic coding sequence
atgaacaccagcatcccctaccagcagaacccctacaacccccggggatcctccaacgtgattcaatgctataggtgtggggacacttgcaagggcgaggtggtgcgggtacacaataatcacttccacatacggtgttttacctgtcaggtttgtgggtgcggtctggcccagagcggtttcttcttcaaaaatcaggagtatatctgcactcaggactaccagcagctttatgggactaggtgcgacagctgcagagacttcatcacgggagaagttatctctgcgctgggccgcacctatcaccctaagtgttttgtctgttccctgtgtaggaagccattccccataggggataaggtgacattctccggcaaggagtgtgtctgccagacatgttcgcaatctatggcctcatctaaaccaatcaaaatccggggcccttcccattgcgctggctgtaaagaagaaatcaaacacgggcagtccctgttggccttggacaagcaatggcatgtgagttgttttaagtgtcagacctgctccgttatcctgacaggggaatacatctcaaaagacggtgtcccgtactgtgaaagcgactatcacgcccagtttggaatcaaatgtgagacctgtgatcggtacatttctgggcgcgttttggaggcaggcggtaagcactaccaccccacctgcgcccggtgcgtgcggtgccaccaaatgtttacagagggggaagagatgtatctcactggtagcgaggtctggcaccccatatgcaagcaggcagctcgggccgagaagaagctgaaacatcgccgcacctctgagacctccatctcaccacccggatctagcatcggttctccaaatcgtgtgatatgcgccaaggtggacaatgagatcttgaactataaggatttagcagcacttcctaaggttaagtcaatctacgaagtgcagcgtcccgacctgatttcttacgagcctcactctaggtatatgtctgacgagatgctcgagcggtgcggatatggggaatctctcggcacactcagcccttatagtcaagacatctacgagaacctggaccttcgacagcgccgagcttcatcgccggggtatattgactcccctacatacagtcggcagggcatgagtcccaccttctcccgttctccccatcactattaccgcagtggtccagaatctggcaggtcatctccataccactctcaactggacgtgcgctctagcactcctacctcatatcaggcaccaaagcacttccacatccctgcgggggactcaaacatttatagaaaacctcctatttacaaaaggcacggggacctttccacagccactaaaagtaagacgtcagaagatatttctcagacaagcaagtattctccaatatacagtcccgatccctactacgcgtcagagagtgagtattggacatatcacgggtccccaaaagttccaagagcacgccgtttcagctccggaggcgaagaagatgacttcgatcgttcaatgcataagctgcagagcggaatcgggcggttgatactgaaagaagagatgaaagctcgatcttctagctacgccgacccctggaccccccctcgctcatctacatccagccgcgaggctttacacaccgcgggatacgaaatgagtctcaacggctcacccagatcccactatctggccgacagcgacccgctaatctctaaaagcgctagccttcccgcataccgccgcaacgggctccaccgcacgccttctgcagacctgtttcactatgattctatgaatgcagtaaattggggtatgagagaatataaaatttatccatacgaacttctgctggtaacaacgagggggagaaataggctgcctaaggacgttgaccggaccaggctagagaggcacttgtcacaagaggagttttaccaagtgttcgggatgaccatatccgaattcgataggctggctctttggaaacgtaacgagctgaagaaacaggcgcgcctgttctag

SEQ ID NO: 23370 - DNA, 2541 bp, synthetic construct
  source 1..2541: mol_type = other DNA; note = Synthetic coding sequence
atgctgttcaccgtgagctgcagcaagatgagcagcatcgtggaccgagacgactcgagcattttcgatggactggtggaggaggatgataaagataaggcgaagcgtgtatctcgcaacaagagcgaaaagaagagacgcgaccagttcaatgtcttgatcaaagagctcgggtcaatgcttccaggaaatgccaggaagatggataaaagcactgtgctgcagaaatctattgattttttgagaaaacacaaggagattaccgctcagagtgacgcctccgaaattcgacaggattggaagccgacgttcctatccaacgaagagtttactcagttgatgctggaggccctggacggcttcttcttagccatcatgacggatgggagcataatctatgtgtccgagagcgtcacatctttactcgagcacctcccctctgacttggtcgaccaaagcatcttcaacttcattccagaaggcgagcactccgaggtgtacaagatccttagtacacacctactggagagtgattcactgacccccgaatacctgaagtccaaaaaccagctggagttctgttgtcacatgctgagagggactatcgaccctaaggagccgagcacgtatgaatatgtaaagttcattgggaattttaagtccctcaattctgttagttccagtgcccacaacgggttcgagggtaccatacagaggacccaccgcccctcctacgaggaccgagtgtgcttcgtggcgaccgttagacttgcaactcctcagttcatcaaggagatgtgtaccgtggaggaaccaaacgaggaatttacttcccggcactcgctggagtggaagttcctgtttctggaccacagggcccccccaataatcggctatttacccttcgaggtgctggggacaagtggatacgattattatcacgtggacgatctggagaatctggccaaatgtcatgaacacctgatgcagtacggtaagggcaaaagctgttactaccggtttctaaccaaaggccagcagtggatctggctacaaactcattactatatcacctaccaccagtggaacagccggccagagtttatcgtctgcactcacaccgtggtgagctacgcggaggtgcgagccgagcggcgccgtgagctgggtatcgaagagtcgctgccggaaaccgcagcggacaaaagccaggattcaggctccgataatcggataaatacagtgagtctgaaggaggctctggagagattcgaccattccccaacaccgtcagcttcttctaggagtagtaggaaaagcagccacactgccgtatcagacccctccagcacaccgaccaagatcccaactgataccagcacccctcctaggcagcatctgcccgcccatgaaaagatggtgcaaagacgcagctccttctcaagccaatcaatcaactctcaatcggtgggaagttccttgacgcagccagtgatgagtcaggccacaaacctgccgatcccgcaaggcatgtctcaatttcaattttcagctcagctaggcgccatgcaacacctgaaggatcagctggagcaaaggacaagaatgatcgaagccaacattcatcgacagcaggaggaattgaggaaaatccaggaacagcttcaaatggtacatggccagggcctccagatgtttctacagcagagcaaccccggcctgaactttggaagtgtccagctgtctagcgggaattccagcaatattcagcaacttgcgcccatcaatatgcagggacaggtggtccctaccaaccagatacagagtggaatgaatacgggccatataggcaccacccagcatatgattcagcagcagacgcttcagtctactagtacacagagccaacaaaatgtgcttagcggacatagccagcagacctctctcccctctcagacacagagtaccctcacagcgcctctatacaatacgatggtgatttcacagccggcggctgggagcatggtgcagattccatccagcatgcctcagaattctacccaatctgctgcggtgactaccttcacccaagatagacagatcaggtttagccaaggccagcaactggttacgaagctcgtgacagcccctgtggcttgtggcgctgtgatggtgccatccacaatgctgatgggacaggttgttacagcctatcccactttcgccacacagcagcagcagagccagacactctccgtcactcagcagcagcagcagcagagcagccaggagcagcagcttactagcgtacaacaacccagtcaggcccagctgacccagcccccacagcaattcttgcagacaagccgcctattgcacggcaaccccagtacgcaactgatcctgtctgccgctttcccattacagcaatctacttttccacagagccatcaccagcaacaccagtcccagcagcaacagcaattgagccgacatcgaacggacagtctacccgacccctcgaaagtccagccacagtag

SEQ ID NO: 23371 - DNA, 1656 bp, synthetic construct
  source 1..1656: mol_type = other DNA; note = Synthetic coding sequence
atgggccggaaggccatcgtgctggccatcgccaacaccagcctggcattcccgctgtgccaacacctggtcacattctgcctcggcgaagatgatggagtccataccgttgaggatgcttctcgcaagctggcagtcatggacagccaggggcgcgtgtgggcccaggaaatgctcttaagagtttcgcctgatcacgttaccctgctagatccagcgagcaaggaagaactggagtcatacccactgggcgctattgttcgatgcgacgccgtaatgcctcccggtcggagccggtctctgctgctgctggtctgccaggagccggagcgagctcagccggatgtgcatttctttcagggcctccgcctgggcgctgaattgatcagggaggatattcagggggcccttcacaattatagaagcggacgaggcgaaaggcgggctgcagccctgcgcgcaacacaggaggagttgcaaagggataggtcacccgccgctgagacacctccccttcagcgcagaccgagcgtgagggcagtgatatctacagtcgagagaggagctggaaggggtcgacctcaagccaagccaatcccagaggctgaagaggcacagcgccccgagcccgtcggaacaagcagcaatgcagatagcgccagccctgacttgggcccaagaggcccagacctggcggtgctgcaggctgagagagaggtcgacatcctcaatcacgtattcgacgacgtcgaaagctttgtgagccgactccaaaaatctgctgaagcggcacgggtgctggagcacagagaaaggggacgacggtctcgccggagagccgcaggggaaggactccttacactgcgcgccaaacccccatcagaggccgagtacactgacgtcttgcagaagattaagtacgcattttcactgctggcaaggctgagagggaacatcgccgatcccagctcaccagaattactccattttctctttggcccattgcagatgatcgtcaacacgtcaggcggcccggagttcgcctctagcgtaagacgaccacacctgacctcggatgccgtggcccttttgagagacaatgttacccccagagaaaacgaattgtggacctcgcttggtgacagttggacaaggccggggctggagttgagccccgaagaagggccgccctacagacccgaattcttttcaggatgggaaccccccgtcactgacccacagtcccgtgcatgggaagaccccgtggaaaagcaactgcagcatgagcggagaagacgacaggtcacccaagccacccagcaaggccgggggtgggaggttcggggaagggggcggtccgcatggcccaggcttaccagactctcttacttccttcagcagagcgcccctcaggtggccgtgaatggccatagagacctggagcctgagtctgaaccgcagttagagagcgagactgccgggaagtgggttttatgcaactacgacttccaggcgagaaattcctcagaactgagtgtgaaacagagagatgtccttgaagccctccaggacaaggagaaggtgtctgagctcgaggctgttatggaaaaacaaaagaaaaaggtcgagggggaggtcgagatggaggtgatctag

SEQ ID NO: 23372 - DNA, 1689 bp, synthetic construct
  source 1..1689: mol_type = other DNA; note = Synthetic coding sequence
atggccgccagcgccaagcggaagcaggaggagaagcacctgaagatgcttcgagatatgaccggcttgccccataaccggaagtgcttcgactgcgaccagagaggacccacatatgtgaacatgaccgtgggttcgttcgtctgcacctcttgcagcggttctctcagaggactcaaccccccacaccgggttaaaagcatttcaatgacaacattcacgcaacaggagatcgagttcctccagaagcacgggaatgaagtgtgtaaacaaatttggctcgggctttttgatgataggagctcagccattcccgactttcgcgacccccagaaggtgaaagaatttctgcaggaaaaatacgaaaaaaaaagatggtatgtaccccccgaacaggcaaaggtggtggccagcgtccatgcctccatcagcggttctagcgccagtagcacttcaagtaccccagaagtcaaacccttgaagtctttgttaggggattccgctcccacattgcacctgaacaaaggaacccccagccagtcccccgtagtcggcagatcccaaggtcaacagcaggagaaaaaacagttcgacctgctcagtgatctgggcagcgacatttttgccgcccctgccccgcaatcaactgcgaccgcaaacttcgctaacttcgcgcattttaacagccacgctgcccagaattcagcaaacgcagattttgcaaacttcgacgcttttggccagtcctctgggtccagcaacttcggaggatttcccaccgcaagccactctccgttccagcctcagacaactggcggctctgccgcttctgtcaacgctaatttcgcccattttgacaacttcccaaagtcatcctccgctgacttcggaaccttcaacaccagccagagccaccaaacggcgtccgccgtttctaaggtgtctaccaacaaagccggtctccagacagccgataagtacgctgcattagctaatctcgacaacatcttttctgcaggacagggtggggaccaggggtctggatttggcactacgggtaaggctcctgtgggcagtgtcgtttccgtgccaagccagtcctctgccagtagcgacaagtatgccgccctggccgagttagattctgtgttttcatctgctgccacctcgagcaatgcctatacgagtactagcaacgcctcctctaacgttttcggcacggttcccgtcgtggcaagcgcacagacccagcccgctagcagctcagtccccgcaccgtttggggccacgccctcaaccaatccttttgtagcagcagctgggccttccgttgccagttcaacaaaccccttccagaccaacgcgcgcggggccaccgccgcaacattcggtacggcttccatgagtatgcctaccgggttcggcaccccagccccatattctttgccaacttccttctctggcagtttccagcagcctgcttttcctgcacaggccgccttcccccagcagactgcattttctcagcagcctaatggcgctggatttgctgcatttggccaaaccaagcccgtggtgactccattcgggcaggttgcagcagcaggggtgtcaagcaaccctttcatgactggcgctccaacaggccagttccctacaggttccagttccacgaatccatttttatag

SEQ ID NO: 23373 - DNA, 2052 bp, synthetic construct
  source 1..2052: mol_type = other DNA; note = Synthetic coding sequence
atggccgccgccgtggccgcccccctggccgccggcggcgaggaggctgccgccactacgagcgtgcctggcagccctgggttacccggcagaagaagcgccgagcgggcactggaggaagccgtggccaccggcactttaaaccttagcaatcgccggctgaaacattttcccaggggcgctgctcgatcctatgatctgtcagatattacgcaagccgacttgtcgcgcaatcggtttcctgaagtgcccgaagctgcatgtcagcttgttagtctcgaagggctctccctgtatcataactgcctcagatgcctcaatccagcactcggcaacctcaccgcgctgacctacttgaatctctctaggaatcagctgtccttgctccctccatacatatgtcagctgcccctgcgggtgctgattgtatctaacaataaactgggggccttgccccctgatataggcaccctcggttcgctccgtcagctcgacgtaagtagcaacgagttgcagagcctgcccagtgagctgtgcggcttaagctctctccgggacctaaatgtgagaaggaatcaactgagtactctaccagaggaactgggagatttgcctctagtgcgcctggactttagctgcaatcgcgtttcccgcataccagtctctttttgtcgccttcgccacctacaagtgatccttctcgattcgaacccactgcagtctcctcccgcacaggtgtgtctaaagggcaagctgcatatcttcaaatatctctctaccgaagctgggcagcgtgggtcagctcttggtgacctggcaccttcccgaccacctagcttcagtccctgtccagctgaggatctttttcctggacatcggtacgatgggggcctggacagcggctttcatagcgttgatagtggttctaaacgctggagcggcaacgaatcgacagacgagttctctgagttgagttttagaataagcgagctggcacgtgagccacgcggccctcgtgaacgcaaggaagacggatctgccgacggcgatcccgtgcaaattgactttatcgatagccacgtacctggcgaggatgaggaacgcggcaccgtcgaagaacagaggcctcccgagttgtcccccggtgccggagaccgagagcgcgccccttcttcaaggcgggaagagccagccggagaggagcgccggaggcctgataccctgcagctatggcaggagagggagagaaggcaacaacaacagagtggagcctggggcgcccctcgaaaggactcactgttgaagcctggactgagagcagttgtggggggtgccgccgccgtcagcacccaggctatgcacaatggctcccctaaatcttccgcatctcaagctggcgcggctgctggccagggggcacccgcgcctgccccagcatcgcaggaaccactgcctattgccggccccgctaccgccccggctccaaggcctttaggaagcatccaacggcccaattctttcctgtttcggtctagttctcagagcgggagcggcccatccagtcccgactctgttcttcgaccccgcagatacccccaggtccctgacgagaaggaccttatgactcagttgcgccaggtgctcgagtcacggctgcagcggccactgcccgaagacctcgcggaggccctcgcatcaggtgtgatcctgtgccagcttgccaaccagttgcgccccagatcagtgcctttcatccatgtaccatctccagctgtgcctaagttgagcgccctcaaggcccgtaaaaacgtcgagtcttttctggaagcctgtaggaagatgggagtacctgaagctgacctgtgctccccttcagatctactccaggggactgcccggggactcaggactgccttggaggctgtaaaacgagtgggcggtaaagcgttgccacctttatggccaccaagcgggttggggggcttcgtcgtgttctatgttgtgcttatgctcctgctgtatgtcacctacactaggttgctgggatcctag

SEQ ID NO: 23374 - DNA, 303 bp, synthetic construct
  source 1..303: mol_type = other DNA; note = Synthetic coding sequence
atgagcaccagcaccagctgccccatccccggcggccgggaccagctgccagactgttactccacaacacccgggggcaccctctatgcgaccacaccgggaggcacgcgcatcatttacgaccggaagtttcttctggagtgcaagaatagcccaattgcccggactcctccttgttgcttgccgcagatcccaggagtaaccaccccacctaccgcaccactaagcaagttggaggagcttaaggagcaggagacagaggaggagattcctgacgatgcccaattcgagatggatatctag

SEQ ID NO: 23375 - DNA, 2382 bp, synthetic construct
  source 1..2382: mol_type = other DNA; note = Synthetic coding sequence
atgcccatggagagcgccagcagcgacaacaagaagcagatccccaatgaggcgagcgccaggtctgaacgggatacctcagacttggaacaaaattggtcgctacaggatcattacaggatgtacagcccaatcatttatcaagcgctgtgcgaacacgtgcaaactcagatgagcctgatgaacgaccttacttctaagaacattcctaacggtatcccagctgttccctgccacgctccatcccactctgagagccaggcaaccccacattctagctatggcttgtgtacaagcacccccgtatggagcttgcaaaggccgccatgtccccctaaggttcactctgaggtgcagacggacggtaattctcagtttgctagtcagggcaagactgtgagcgcgacatgtactgatgttctgagaaacagtttcaatacatctcctggagtgccctgttccctgccgaagacggatatttctgctattccgaccttgcagcagcttggcctggtgaatggcattcttcctcagcagggcattcataaggaaactgatctgctgaaatgcattcaaacctacttgtccctgttcaggagtcacgggaaggagacccatcttgattctcagacccatcgcagccctacacagagtcagccagccttccttgccaccaacgaggaaaaatgtgcccgggaacaaatacgcgaggctacatccgagcggaaggatctgaacatccatgtccgcgatacaaagacagtgaaagacgtgcaaaaggccaagaatgtgaacaagactgccgagaaagtgaggattataaagtatcttctgggcgaattgaaggctcttgtggccgagcaggaagactctgagattcagagactgatcactgagatggaagcctgcatctcagttctccctacagtgtctggcaatacagatatccaggtggagatcgccctggctatgcagcccttgcggagcgagaacgctcagctgaggcgccagctgcggattctgaaccagcaacttcgtgagcagcagaaaacccagaaacccagtggcgccgtcgattgcaacctcgagctgtttagcctgcaaagcctgaacatgagcctccagaatcaactggaagagtcgttgaaaagccaggagttacttcagtccaagaatgaggaacttctgaaggtcatcgagaaccagaaagatgaaaacaagaaattttcctccatctttaaggacaaggaccaaactattctggaaaataagcagcaatatgatattgaaatcacccggattaaaatcgaactcgaagaagctttggtgaatgtgaaaagcagtcaatttaagcttgaaactgctgagaaggagaaccagatcttagggatcactcttcgtcagcgggacgccgaagtaacccgcctccgagagctcacccgcacactgcaaaccagcatggccaagcttctatctgacctgtcggtcgactccgctcgctgtaaacctggtaataatcttacgaagagcctgctcaatattcatgacaagcagctgcaacatgaccctgctccagcccatacgtctatcatgtcttatctgaacaagcttgagactaactacagcttcacccattctgagccactgtctaccattaagaacgaagaaacaatcgagccagacaagacttacgagaacgttctatcatctaggggtccccagaattcaaatactagagggatggaagaagcttccgctcccgggatcatctccgcactgagcaagcaggattccgatgagggtagcgagactatggcactgatcgaggatgagcataatctagataatactatctatatccccttcgcaaggtctacccccgagaaaaagagtccactgagtaagcggctttcccctcagcctcagatccgcgctgccaccactcagctcgtatcaaattctggattggcagtaagcggcaaagaaaacaagctttgcacacccgttatatgcagttcgtccaccaaggaagctgaggacgcccccgagaaactgtcaagagcctctgacatgaaggacacccagttgctcaagaaaatcaaggaggccattggcaaaatacccgccgcaacaaaggaaccagaggaacaaacagcgtgccatggtccaagcggatgcctgagcaatagtttacaggttaagggtaacactgtgtgtgatggcagcgtgttcacctccgacctcatgtccgattggagcatcagctctttctctaccttcacatctagggatgagcaggattttaggaacggattagcagctctggatgctaacattgctcgtctccagaagtccctgcgtacaggactgctggaaaagtag

SEQ ID NO: 23376 - DNA, 1119 bp, synthetic construct
  source 1..1119: mol_type = other DNA; note = Synthetic coding sequence
atgaccttccagttcaacttcaccatcgaggaccacctggagaacgaactgactcctatacgggatggtgctctgacactagacagttctaaagaattatccgtgagcgagtctcagaagggggaggagcgggaccgcaaatgttcggcagaacaatttgatctgcctcaggatcacctttgggagcacaaatctatggagaacgctgctccctcacaggacactgatagcccactgagcgcagcctcctcatcccgaaacttagagccccacggcaagcagcctagtctgcgggccgctaaggaacatgccatgccaaaagacctgaaaaaaatgctcgagaacaaggtgatcgagacactgccaggattccagcacgtgaagttaagtgtggtgaagacgatcttactgaaggagaatttccccggtgagaatattgtcagtaaaagttttagcagtcatagcgacctgattacaggcgtctatgagggcggcctgaagatctgggagtgtacctttgatcttctggcatacttcactaaggcaaaggtgaagtttgcaggcaaaaaagtgctcgacctgggatgtggatccgggctgctgggcatcacagccttcaagggagggtcaaaagaaatacattttcaggactataactctatggtgatagacgaagtgacgctgcctaatgtggtggccaactcaaccctcgaggatgaggaaaacgacgtgaacgagccggatgtgaaaagatgccgcaaacctaaggtaactcagctttacaaatgcaggttcttcagcggagaatggtcagaattttgcaagctggtactgagctccgaaaagttatttgtgaaatacgatttaattcttacctcagagacaatttacaatccagattattactccaacttacaccagacctttttgcgccttctcagcaaaaatgggcgtgtcctgctggcgtcgaaggcgcactactttggcgtcggggggggagtgcatctgttccagaagttcgttgaggagagggatgtctttaagactcgcatcctgaaaattatagacgaaggactgaagcgatttattattgaaataacctttaagttccccggctag

SEQ ID NO: 23377 - DNA, 336 bp, synthetic construct
  source 1..336: mol_type = other DNA; note = Synthetic coding sequence
atgaccaccctgcgggccttcacctgcgacgacctgttccggttcaataacatcaacctggatcctttaaccgagacctacggaatcccgttctatctccagtatctggcacactggccagagtattttatcgtggccgaggctcccggcggagaactcatgggttatattatgggcaaagctgaagggtccgtggcacgggaggagtggcatggtcatgttacagctctctccgtggcacctgaatttagaaggctcggacttgcggcaaagctgatggaactcctggaggagataagcgagcgctatgaagagtctacattccagggatactag

SEQ ID NO: 23378 - DNA, 1449 bp, synthetic construct
  source 1..1449: mol_type = other DNA; note = Synthetic coding sequence
atgaacggcaccctggaccaccccgaccagcccgacctggacgccatcaagatgttcgtcggccaggtgccgcgcacctggtcagagaaggatttgcgtgagttatttgaacagtacggagcagtctacgagattaacgtactccgtgacaggagtcaaaaccctccccaaagcaagggatgctgcttcgttaccttttacaccaggaaggcagccctggaggctcagaacgcccttcacaacatgaaggtcctccccgggatgcaccaccccatccaaatgaagccggcagattccgaaaagaataatgctgtggaagacagaaagctcttcatcggcatgatatccaagaagtgcactgagaatgacatacgagtaatgttctcctctttcggacagatcgaagagtgtcgcatactaagaggcccggacgggctgtcgcgcggctgcgccttcgtgacttttaccacccgggctatggcacagactgccatcaaagcaatgcaccaagcacaaacaatggaaggttgtagctctccaatggtggtgaagttcgcagatactcagaaagataaggagcaaaagcgaatggcacagcagctacagcagcagatgcaacagatcagtgccgctagcgtgtgggggaacctggcaggcttaaatacactgggtccccaatacctggcgctgttgcagcagaccgcaagctcaggtaatctcaataccctctctagcctacatcctatgggagggttgaacgcgatgcagttgcagaatctggccgctctggctgccgctgcgagcgcagctcagaacaccccatctggcacaaacgcccttacaacatcatctagcccgctgtccgtgttgacatcgtcaggcagctccccaagcagctcctcttctaattcagtgaaccccatcgcatccctgggtgccttacagaccctggccggcgcaactgctggcctgaacgttggctctctcgccgggatggccgctctgaacggcggattgggatcttccggcctctcaaacgggaccggcagtacaatggaagccctgacccaggcatattctgggatccaacagtacgccgccgccgccctgccaaccttgtacaaccagaacctgctgacccagcaatcaattggagccgccgggagccagaaagagggaccagaaggcgccaatctctttatctatcacctgcctcaggaatttggtgaccaggacctgttgcagatgttcatgcccttcggcaacgtggtgtccgcaaaggtatttatagacaaacagaccaatctgtcaaaatgctttgggttcgtgtcatatgacaacccagtgtcagcccaggcagctatccaatccatgaacgggttccaaattggtatgaaaaggcttaaggtgcagctcaagcgatccaaaaatgatagcaagccctactag

SEQ ID NO: 23379 - DNA, 1347 bp, synthetic construct
  source 1..1347: mol_type = other DNA; note = Synthetic coding sequence
atgagccccctggagtgcagcgagtgcttcggcgaccagctgctgcaccgaacctacacttggcaattgacactgcactcaagacccaactatacgagaaagcgcgacaccagatctgaaagtctggagatacctattagtgtcgtgctcccgcaaagaggtaccgcggagcccttcccccgtctgcataacctgtatagtactccccggtgcgcccagcaggcggcactccctagactgtctaggcgcatggcatctcagcattcctacccccttaaccggtttagctctgtaccgctggatccaatggagaggcccatgtctcaagccgatctcgagttggattataatccaccacgtgtgcagttgagtgatgaaatgtttgtttttcaggatggtaggtgggtgaatgaaaactgcaggcttcaatctccctacttttcgccaagtgcctctttccaccataagcttcatcataaaaggctggcgaaagagtgcatgctgcaggaagaaaacaagtcactaagggaagagaataaagctctgcgagaagaaaaccgcatgctgtcaaaggagaacaagattcttcaagttttttgggaagaacacaaggcatccctgggcagggaggagtcccgagctccatcacccttactgcataaagattcagcctccctggaagttgtaaagaaggatcatgtggctcttcaggtcccccggggtaaggaggactctaccttgcagctgttgcgggaggaaaacagggccctgcagcagcttttggaacagaagcaggcctattgggcacaggccgaagacacagccgctcctgctgaggaatctaagcccgcaccgtcacctcatgaagaaccctgttcccccggtctactgcaggatcagggctctggactatccagccgttttgaggaacccaagggcccacccgcacgccaggaagattccaaggagctgcgggcgctgagaaaaatggtatctaatatgtcaggcccttcaggtgaagaagaggccaaggtggggccaggtctgcctgacggctgccaaccacttcagctgctccgggaaatgagacaggctctgcaggcacttctgaaagagaaccgactgctacaggaggaaaaccgcactctgcaggtgctccgagctgagcaccgtgggttccaagaagaaaacaaagcgttgtgggaaaacaataaacttaaattacagcagaaactcgtgatcgacacggtcaccgaagttacggcccgcatggaaatgctgattgaagaactgtatgctttcatgcccgctcggtcccaggaccccaagaaaccttctagggtttag

SEQ ID NO: 23380 - DNA, 1002 bp, synthetic construct
  source 1..1002: mol_type = other DNA; note = Synthetic coding sequence
atggccgccgccgccgccggcaccgccaccagccagcggttcttccagagcttcagcgacgcgctcatcgacgaagacccacaggcggccctcgaggagctaaccaaagcgctcgaacaaaagcctgacgacgctcagtactattgccaaagggcatattgtcacattttgctggggaattactgtgtcgcagtggccgacgcgaaaaaaagcctggaactgaatcctaataatagtacagcaatgctgcggaagggaatctgtgaataccatgagaaaaactacgcagccgctctggagacctttaccgaggggcagaaattggacagtgccgatgccaatttctctgtttggatcaagagatgtcaggaagcccagaacggttctgagtctgaggtgtggacccatcagagcaagattaaatacgactggtatcagacagagtcgcaagttgtgattacgcttatgattaagaacgtacagaaaaatgacgttaacgtagaatttagcgagaaggagctcagcgccttggtgaaactgccctcaggtgaagattataatctgaagttggaactcctgcaccccatcataccggaacagtccaccttcaaggtgctgtccaccaagattgagatcaagctgaagaagcccgaggccgtgaggtgggagaaactggagggacaaggcgatgtccctacacctaaacagtttgtggctgacgtgaagaatctgtacccatcttcaagcccatatacccggaactgggataagctggttggcgagataaaagaagaagagaagaacgagaagctcgagggcgatgctgccttgaataggctctttcaacaaatctactctgacggatctgatgaggtgaaaagggctatgaataaatcctttatggagtcaggggggaccgtgctgtccaccaattggtcggacgtcggcaaacgaaaagtggagattaacccaccagatgacatggagtggaagaagtactag

SEQ ID NO: 23381 - DNA, 1029 bp, synthetic construct
  source 1..1029: mol_type = other DNA; note = Synthetic coding sequence
atgagcctgcacggcaagcggaaggagatctacaagtacgaggccccatggaccgtgtatgccatgaactggtcagtgcgccccgataagagatttcgcttagccctcgggagcttcgtggaagagtataacaataaggtgcaacttgttgggctggacgaggaatccagcgagtttatttgcaggaacacctttgaccatccctatccgactacgaagctgatgtggatcccagatacaaagggagtgtaccctgatttattggccaccagtggggattacctcagagtgtggcgcgtgggcgagacggagacaagacttgaatgcctcttaaataacaataagaatagtgacttctgcgctcccttgacctccttcgattggaacgaggtcgacccttatttgctcggcacctcatcaattgacaccacgtgtaccatctggggactggagaccgggcaggtcctgggccgggtaaatctggtttcaggccacgtgaaaacccaactgatagcccatgataaggaggtctacgatatagcttttagccgggcagggggcggcagggacatgttcgcatccgtcggcgcagatggttctgttcggatgtttgatctccgacatctggagcattcaaccataatttacgaggacccacagcatcacccattactgcggttgtgctggaataagcaggacccaaactaccttgccactatggcaatggacggcatggaggtggtaattctggacgtgcgcgtcccttgtactccagtggccagattaaataaccatcgggcatgtgtcaacggcatcgcatgggcaccccattctagttgtcacatttgtactgcggctgacgatcatcaggcacttatttgggatatccagcagatgccgagggctatcgaggacccaatactggcctatactgccgagggagaaattaacaatgtgcagtgggcatctactcagccagactggatcgcaatctgctataataattgcctggagatcctgcgggtgtag

SEQ ID NO: 23382 - DNA, 507 bp, synthetic construct
  source 1..507: mol_type = other DNA; note = Synthetic coding sequence
atggccgagggcagccggatcccccaggcccgggccctgctgcagcagtgcttgcacgctcgcctacagatccggccagccgatggagatgtagcggcccaatgggtggaagtccaacgagggctggttatctacgtctgtttctttaagggcgcagataaagaactgcttccaaagatggttaacaccctgcttaacgtgaagctatccgaaacagaaaatggtaaacacgtatcaatcctggacctcccaggcaacatcctgattatcccacaagcgactctgggtgggcgtctcaaaggccggaacatgcaatatcactccaattccggtaaggaggaaggttttgaattatactcacagttcgtgaccctgtgtgaaaaagaggtagccgcgaatagcaagtgtgccgaggcgcgggtagtagtggagcatggcacatacggtaaccgacaggtactgaagctcgataccaatggaccatttacccaccttattgagttctag

SEQ ID NO: 23383 - DNA, 3069 bp, synthetic construct
  source 1..3069: mol_type = other DNA; note = Synthetic coding sequence
atggagggcgccctgaccgcccgggacaaggtgggcgtgcaggacttcgtccttctggatgcttacacctctgagtccgcttttgtggataatcttaggaagcgattcagcgagaatctgatctatacatacatcgggactctactggtgagcgtgaacccttatcaggagcttggaatatacacggttagccagatggaactgtaccaaggcgtgaacttctttgaactgccgccgcacgtatacgctatagccgataatgcataccgcatgatgtgcgccgagctcaataatcactttatcctgatctcgggtgaatctggggcagggaagaccgaggctagtaaaaaaattctggaatatttcgccgtcacttgccccatgacacagtcattgcaaatcgcaagagatcgtctgttattctccaaccccgtcctggaggcattcgggaatgctaggacgctgcggaacgataactcttcccgattcggaaagtacatggacatccagtttgacttccagggaatacccgttggagggcatattatctcctacctgatcgaaaagtctcgcgttgtgtatcagaatgagggcgaacgaaactttcacatcttttaccaacttttggctggcggtgaggaggagcggctttcttacttggggctggaacgagatccacagctgtataagtacctgtcgcagggacactgtgcaaaggaaagcagtatctcagacaagaatgattggaaaaccgtttctaacgccttcagcgttatcgactttacagaggccgatctcgaaaacctgtttgggatcatcgcctcagttttacaccttggaaacattggattcgaggaagatgaccaggggtgcgccacaatccctgatactcatgaaatcaaatggatagctaagcttttgggtgtccaccctagcgtgcttttggaagccctgacacaccgaaaaatcgaggcgaaaaccgaggaagtgatttgccctctgactctagagctgtccgtctacgccagggacgcgatggcaaaggccgtttacgggagaacatttacttggcttgtgaacaaaattaacagctccttggtgaataaagactttacccgtaaaacagtgattggccttctagacatctatggcttcgaggttttcgacaaaaacggtttcgagcaattctgcattaactactgtaatgagaagctccagcagctgctgattgaaagaactctaaaagccgagcaggcggagtatgaaatggagggcattgagtgggagccaattaaatactttaataacaaaatcatctgcgacttagtagaggagcggcacaaggggatcatctccatcttagatgaggaatgtattcgacccggtcccgctacggatctgagttttttagagaagctggaggagaaggttgggaagcacgctcattttgagaccagaaagctcgccggccctaagggacgcaagcgaattgggtggatggaattccgactactgcactacgccggtgaggtgacatactgtacgaaaggtttcctggaaaagaataatgatttgctgtatcgacatctgaaggaagtgttgtgcaagagcaaaaatatcatcctgagagagtgttttctactggcagaactcgaaaaccgaaggaggcctcctactgttgggacccagtttaagaacagtctgtcatctctcctggagacactcatctctaaggaacccagttatatccgctgtataaaacccaatgaccgaaaagaaccaagcaaatttgacgactttctgataagacaccaaatcaagtacctcggtttaatggagcatttgagggtaagacgggcagggtttgcatacagacgaaaatacgaacattttctgcagaggtacaagagcctatgccccgacacgtggcctcactggcacgggcccccggcggaaggggtggagcgattgataaagtatatcgggtataaaccggaggagtacaagctaggaaagacaaaaatttttatacggttcccacgcaccctctttgccactgaagatgctttcgaattcagtaagcaccagctcgtcgcgcggatccaagctacttacaagaggtgcctgggcagacgagagtacgtcaagaaacgccaggcagcaatcaagctagaggcccactggcgcggagccctcgcccggaaggcaatccaacggaggaagtgggctgttcggataatccgcaaattcatcaagggattcatcagccgcaacaaacctctctgtcctgataacgaggagttcattgttttcgtgcgcaagaattacattctgaatcttcgttatcacctgcccaaaacagtgcttgacaagtcctggcttaggcctcctggcattctagaaaatgctagtgatttgcttaggaaaatgtgtgtgagaaacttagtccagaagtattgtcgcggtattaccgccgaacggaaggctatgatgcagcagaaggtcgtcacctcagagatttttaggggccgcaaagatgggtacacagagtccttgaaccagccatttgtgaattctaggattgatgaaggcgatatcaacccgaaggtgcttcaactgatttctcatgaaaagatccagtatggcgttccggttatcaaatacgaccggaaagggttcaaagcgagacagcgccagctaattttaactcagaaggccgcctatgtagttgaactggccaaaatcaaacaaaagattgagtattctgccctgaagggagtgagcactagcaacctgtccgacggaattctggtcattcatgtatcccctgaggactccaaacaaaagggagatgcagtcctgcaatgcggccacgtctttgaagcagttaccaagttggtgatgctggtgaaaaaagagaatattgttaacgtggttcaggggagcttgcagttcttcattagtcctggaaaggagggaactattgtatttgacacagggttggaggagcaggtgtacaagaataaaaatggccagctcacagtcgtgtccgtgcggaggaaatcatag

SEQ ID NO: 23384 - DNA, 1044 bp, synthetic construct
  source 1..1044: mol_type = other DNA; note = Synthetic coding sequence
atgaacaccctgatggacgtgctgcggcaccggcccggctgggtggaagtcaaagacgaaggcgagtgggatttttactggtgcgacgtcagttggctccgggagaacttcgaccacacatacatggacgaacacgttcgcatcagccacttcagaaaccactatgagctgactcggaaaaattacatggttaagaacctgaaacgcttccggaaacagttggaaagagaggccggtaaactcgaagccgctaaatgcgacttctttccaaaaacctttgaaatgccctgtgaataccatctattcgttgaggaattcaggaagaaccccggcattacttggataatgaagcccgtagctaggtctcagggaaagggaatcttcttgtttcgccgactcaaggatatcgtggactggcgtaaagacacgcggagttcagacgatcaaaaggacgacatccccgtagagaattacgtcgcccaacgatacattgaaaacccatacttgatcggcggccgcaaatttgatttaagggtctacgtacttgtgatgtcatacatccctcttcgcgcatggctgtaccgcgacggctttgcgcgattcagtaatacccggttcacactgaatagtattgatgaccaatatgtccacctgacaaacgttgctgtgcagaaaacctcccccgattaccaccccaaaaagggctgtaaatggacccttcagcgctttaggcagtacttagctagcaagcacggaccagaagcagtagagacactctttcgcgacatagataacatttttgtgaagagtttacagtccgtccagaaagtcattatttccgacaaacattgttttgagctgtatggttacgacatactgatcgaccaggaccttaagccttggttacttgaagtaaatgcctcacctagcttaaccgcttccagccaagaagactatgagctgaagacttgtctgttggaagacaccctgcacgtcgtagatatggaggctaggtctttgcgagcggattcaccatgctggtag

SEQ ID NO: 23385 - DNA, 444 bp, synthetic construct
  source 1..444: mol_type = other DNA; note = Synthetic coding sequence
atgagcagcgagccccccccccccccccagccccccacccaccaggccagcgtcggcctcctggatacccctcggagccgtgagcggagtcctagcccccttcgagggaatgtggtccccagccctcttccaacccgccggactaggaccttcagcgcaacagtgagggcctcccaggggcccgtgtacaagggggtgtgcaaatgcttctgccgatctaagggtcacggattcattacacctgccgacggggggccggatatttttcttcacatcagcgatgttgagggagaatatgtgcccgtcgagggcgacgaagttacttacaagatgtgctcaatcccgcctaagaatgagaaactccaggccgtggaggtggtcataacgcaccttgctcccggaacaaagcatgaaacctggagcgggcacgtaatttcaagctag

SEQ ID NO: 23386 - DNA, 558 bp, synthetic construct
  source 1..558: mol_type = other DNA; note = Synthetic coding sequence
atggccgacggcggcggcggcggcggcaccggcgccgtgggcggcggcggtacgtcacaggcatcagctggcgccgcaaccggggctacaggggcgtctggcggcggggggccaatcaatcccgcctcactgccccccggcgacccacagttgatcgcactcattgtggagcagctgaaaagcaggggtctgttcgatagttttcggagagactgccttgctgatgtagacaccaagccagcttaccagaatctgcggcaaaaggtagataatttcgtgagtacccaccttgacaagcaagagtggaacccgaccatgaataaaaatcaactgaggaatggcttacgccaaagcgtagtccagagcggcatgctggaagctggtgtggatcggatcataagccaggtggtggatcctaaactgaaccacatatttcgaccacagattgagcgagctatccacgagtttttggcagctcaaaaaaaagccgcagtgcctgcaccacctcccgagcccgagggtcaggatcctcctgcaccctcccaagatacctcttag

SEQ ID NO: 23387 - DNA, 6351 bp, synthetic construct
  source 1..6351: mol_type = other DNA; note = Synthetic coding sequence
atggacgaggtggagcaggaccagcacgaggcccggctgaaggagctgtttgacagctttgacaccaccggcacaggaagcctgggacaagaagagctgacagacctctgccatatgcttagtctggaagaagttgcacccgtcttgcagcaaactttattgcaggacaacctgctcggacgggtccactttgaccaatttaaggaggcgttaattctgatcctatctcgaacgctcagcaatgaggagcacttccaggagcccgactgttctcttgaagcacagcctaagtacgtgcgcggtggaaagcggtatggtcggcggtctctaccggagttccaggagtctgtagaagaatttccagaagtgacggtgatcgagcctctagatgaagaggcccggccgtcccacattcccgcgggcgactgctccgagcactggaagactcagaggtctgaagaatacgaggccgaggggcagcttcggttctggaatccggatgatctgaacgcatcccagagcgggagcagcccaccccaggattggatagaggagaagctacaagaggtttgtgaggacctgggcattacacgcgacgggcatctgaatcggaaaaagttagtcagcatctgcgaacagtatgggctgcagaatgttgacggtgagatgctggaagaggtttttcataaccttgatcctgatggaacaatgtcagttgaagacttcttctatggtcttttcaagaacggtaaaagtttgacaccttccgctagcaccccatatcgccaactgaaacggcacctttctatgcagtcgtttgacgagtccggccgccgaacaacgactagttctgcgatgaccagtaccatcgggtttagggtgttttcctgtctggatgatggcatgggtcatgcttcggttgagaggattctggatacatggcaggaggaaggtattgagaactcgcaggagattcttaaagcactggatttctccttggacggcaacattaacttgactgaactgaccttggccttggagaatgagttattggtgaccaaaaattccatccatcaggccgccctggctagttttaaagctgagatccgccatctgctggagcgtgttgatcaggttgtccgggagaaagagaagctcagatctgaccttgacaaggcagagaagcttaaaagccttatggcttccgaggtggacgatcaccacgccgctatcgaaaggcggaacgagtataaccttcggaaactcgatgaggaatacaaggagcggatcgcagctctcaagaacgaactgcggaaagaaagggaacagattttgcagcaggcaggcaagcaaagactggaactggagcaggaaatcgaaaaggcgaagactgaggaaaactacatccgtgatagactcgccctctccctgaaagagaattcgcggctggaaaatgaacttcttgagaatgctgagaatgtgctcgcggagaaattcggagacctggacccttcctcagccgaattcttcctacaggaggagaggctgacacagatgcgtaatgagtatgagcgccagtgcagagtgttgcaggatcaggtggatgagttgcagtcagaactggaagagtatagagcacagggtcgcgtcctgagattgcccctaaagaattccccctccgaagaagtggaagcgaactcaggggggatcgaacccgagcacgggctgggaagcgaagagtgcaatccactgaacatgtcgattgaagccgaactggtaatcgagcagatgaaagagcagcaccacagagatatctgctgccttcggctggaactagaggacaaggtgcgccactatgagaagcagttggatgagacagttgtgtcctgtaagaaagctcaagagaatatgaaacagcggcatgaaaatgagacacatacgcttgagaaacagatatctgaccttaaaaatgagatcgcggaactacagggacaagcggccgttctcaaggaagcacaccacgaagcaacgtgcagacatgaagaagaaaagaaacagcttcaggtgaaactggaggaagaaaagacacacctgcaggagaagctgagactgcaacacgagatggaactcaaggccagacttacccaggcccaggcctcatttgagcgggaacgggaaggcctacagtctagcgcatggaccgaggagaaagtgagaggtcttactcaggaacttgaacagttccatcaggaacagcttacatcattggttgaaaagcatactttggagaaagaagaactcagaaaagaactactggaaaagcatcaaagggagttgcaggagggcagagagaagatggagacagagtgcaaccggcgtaccagtcaaatcgaggcccagtttcagagcgattgccaaaaggtgacagaaaggtgcgagtcagctctgcagagcttggaagggagataccggcaagaactgaaagatctccaagaacagcagcgcgaagaaaaaagtcagtgggagtttgagaaagacgaactgactcaggagtgtgcggaagctcaggagctccttaaggagaccctcaaacgcgagaaaaccacatcactagttttgacacaggagagggaaatgctcgaaaaaacttacaaagagcatctgaattccatggtggtcgagcgacagcagctgctccaagatctggaggatctacgaaatgtctccgagactcaacagagtcttctctctgatcagattctggagttaaaaagcagccataagagggagctgagagaaagggaggaggtgctgtgtcaggcaggcgcttctgagcagctggcttctcagagactcgaacggttggagatggaacacgaccaagagaggcaggaaatgatgtccaagttgttggccatggaaaacattcataaagctacttgcgagactgctgacagagaacgagcagaaatgtctaccgaaatctcccgattgcagtccaaaataaaggagatgcagcaggccacttctccgctgagtatgctgcagtcagggtgccaggttattggtgaggaagaggttgagggtgatggtgccttatcactcctgcagcagggcgagcagctactcgaagaaaatggagatgtgttgctctctcttcagagagctcatgaacaggccgttaaagagaatgtgaaaatggccactgagatttccaggctccagcagcgtctgcaaaagcttgagcccggcttagtgatgtcctcctgtttagacgagcctgccactgagtttttcggcaataccgccgagcagactgagcagttcctacagcaaaatcgcacaaagcaagtcgaaggtgtcacccgacggcatgtcctgagcgacttggaggacgatgaggtgcgtgacctggggagcacaggcacctcttctgtccagaggcaggaagttaaaatagaggagtccgaggcaagcgtagaaggctttagtgagctcgaaaattcagaggagacaagaaccgaaagctgggagctcaagaaccagatcagccagctgcaagaacagttgatgatgctgtgcgcagactgcgacagagcttccgaaaagaaacaagatctcctgttcgacgttagcgtgctgaaaaagaagctgaagatgctggaaagaatccccgaagccagtcccaaatataagctgctgtacgaggacgtgtcccgcgagaatgattgcctgcaggaggagctccggatgatggagacaagatacgacgaagctctagaaaataataaagaactaaccgcagaggtgtttcgccttcaggacgaactgaagaagatggaggaggtaaccgagacgtttctgtccctagaaaagtcatatgacgaggtcaaaatagaaaacgaaggcctgaacgtcctggtactccgattacaaggcaagatagagaagcttcaggaatctgttgtacaaagatgtgattgctgtttgtgggaagccagtctggaaaatctggaaatcgaaccagacggcaatatcttacaattgaaccagacgctggaagaatgcgtccctcgggtgagaagcgtgcaccacgtaattgaggaatgcaagcaggagaatcaatacctggagggcaacactcagctgctggagaaggtgaaggcacacgaaattgcatggctgcacggaactatacagactcatcaggagaggcctcgggtacagaatcaggttattctcgaggagaacacgacattgctgggctttcaggacaaacacttccagcaccaggccacaattgcggaactggaactggagaaaaccaaactccaagagctcacaaggaagctgaaagaacgagtcactattctcgtgaaacagaaggacgtcttgtcacacggggagaaggaggaggaactgaaggccatgatgcatgatctgcaaatcacgtgttcggagatgcagcaaaaagttgaactgctgcgatacgaatcagagaagctccagcaggagaatagcattctccgcaacgagatcacaaccttgaatgaggaagactcaatttccaatctgaagctggggacactcaacggatcacaggaagaaatgtggcaaaagacggagacagtgaaacaggaaaatgccgccgtacagaaaatggtggaaaacctgaaaaagcagatctctgaactgaagatcaagaaccagcagctcgatcttgaaaacaccgagctgagccagaaaaactctcagaaccaggaaaaactgcaagaactaaatcaacgcttaacggaaatgttgtgtcagaaggagaaggaaccagggaatagtgctctggaagagagggagcaagaaaaattcaacttaaaggaggagctggaaaggtgtaaggttcagtctagcactctggtctctagtcttgaggctgagctcagcgaagtaaaaattcagacacatatagtccaacaggagaatcacctgctgaaggatgagctagagaagatgaagcagctgcatagatgtccagatctgtctgactttcaacagaaaatcagttccgtgctgagttataacgagaaactgctaaaagagaaggaggcactctcagaggaactgaacagttgtgttgacaagcttgcaaagtcatccctgcttgaacaccggatagctacaatgaagcaggaacagaagagttgggagcaccaatcagccagtctcaagagtcaactggttgcttctcaggaaaaagtgcaaaatctcgaggacacggtgcaaaacgtaaatctgcagatgtctaggatgaagtcggacctgcgcgtcacacaacaagaaaaagaggctctgaaacaggaagtaatgtccttacataagcagctgcagaatgccgggggcaagagttgggcaccagagatcgcaactcatccatctggcctccataatcagcagaagcggcttagctgggataagctagatcaccttatgaacgaggaacagcaattgttgtggcaggagaatgaacgtttgcaaactatggttcaaaacacgaaagccgaattgacgcacagtcgcgagaaggtgagacagctcgagagtaacctgctgcctaagcatcagaaacacctcaatccttcgggaaccatgaatcccactgaacaggagaagctgtccctgaaaagagagtgtgatcagtttcagaaagaacagagccccgcaaaccgcaaagtgagtcagatgaattccctggaacaggagctcgagactattcacctcgaaaacgagggcctaaaaaagaagcaagtgaagttagacgagcagttgatggaaatgcagcatctacggtctacggccaccccttctcccagcccgcacgcctgggacctacagctacttcagcagcaggcttgccctatggtcccaagggaacagttcctccagctgcagcgccagcttctgcaagccgaaaggatcaatcagcacttgcaagaggagctggagaataggacttctgagacaaatacccctcagggaaatcaagagcaactagtgaccgtcatggaggagagaatgatcgaggtggagcagaaactgaagctggtaaaacggctcctccaagagaaagtgaaccagttgaaggagcaactctgcaaaaatactaaagcagatgctatggtgaaggacctgtacgtcgagaacgctcaactgctgaaggctctggaagtcacagaacaaaggcagaaaaccgcagagaaaaagaattatttgctggaagaaaaaatagcgagcctgtctaatatcgtgcggaacttgactcctgctccactgacgtctacacctcctctgaggagttag

SEQ ID NO: 23388 - DNA, 2664 bp, synthetic construct
  source 1..2664: mol_type = other DNA; note = Synthetic coding sequence
atgcccatcctgctgttcctgatcgacaccagcgccagcatgaaccaacggtcacacctggggacaacttacttggatacagccaagggagcggttgagacattcatgaaacttagggcgagagatcctgcgtctagaggggatagatatatgcttgttaccttcgaagaaccaccatatgccattaaggctggctggaaggaaaaccacgccacgtttatgaacgaattgaaaaatctgcaggctgaaggactaactactctcggacagagcctgcgtactgcttttgatctactcaacttaaacaggctggtgacaggtattgataattatggccagggtaggaatccattcttcctcgagcctgccatcattattactattaccgacgggagcaagctcactacgacttcaggggttcaggacgaactccatctgcccctaaacagtccgctgcccggcagtgagctgactaaggagcctttccgctgggaccaacgcctcttcgctttggtcctccggctgccagggacaatgtcagttgaatccgaacaattgaccggtgtccctttggatgactccgccatcacacctatgtgtgaggtgaccggcgggagatcctactccgtttgctcacccagaatgttaaaccaatgtctcgaatccctggttcagaaagtgcagtctggtgtagtcatcaactttgaaaaggccgggccagaccctagccccgtggaagacggccagccagacatctcacgaccatttggaagtcagccttggcattcttgccacaaactgatctatgttaggcctaaccctaagaccggagttcccatcggccactggcccgtgccagagagcttctggccggaccagaatagtcccacactacctcctcgaacaagccatcccgtggtgaagttttcctgtacagattgcgagccaatggtgatagacaaactgccttttgacaagtatgagttggaacctagccctctgacccaattcattctggagagaaaatcaccccaaacatgttggcaggtctacgtgtcaaattccgccaagtattctgagctgggccatccctttgggtaccttaaggcatccaccgccctcaactgcgtgaacctgtttgtgatgccctacaactatccagtgctgctgcctcttctggacgacttatttaaagtgcataaggccaagccgactctgaaatggcgacaatcattcgagagctatctgaagacaatgcccccatactacctaggacctctgaagaaagccgtccgaatgatgggagcccccaatttgatagcagacagtatggagtacgggctcagctatagcgtgatctcataccttaagaagctgtctcagcaagccaagatcgaaagtgatagagtgatcgggagcgtcgggaaaaaagttgtgcaggagacaggtatcaaggttagatccaggtctcacggtctgtccatggcgtaccgtaaggactttcaacagctactacaagggattagcgaggacgtgcctcacaggctgcttgaccttaacatgaaggaatatactggtttccaggtggccctcctcaacaaagatcttaaaccccagacctttagaaacgcttatgacatcccccggcggaatttactagatcatctgaccagaatgaggtctaatttacttaaaagcacaagacggtttttaaaaggacaggacgaagaccaggtgcactctgtccccatcgctcagatggggaactatcaagaatacctaaagcaggtaccttctcctcttcgtgagctagatcctgaccagcctagacgtctgcacacctttgggaacccattcaaactggataaaaaaggtatgatgatcgacgaagcggatgaattcgtcgcgggaccccagaacaagcacaaaaggcctggcgagcctaatatgcaaggtatcccgaagaggcggaggtgcatgagccccctgctgcggggtcggcagcagaatccagtcgttaacaatcatatcgggggcaaaggcccgccagcacccacaactcaggctcagcctgacctgattaagccgctcccactgcacaagatatccgaaacaaccaacgacagtatcatccacgatgtggtagaaaaccacgtagctgaccagttgagcagcgatattactccaaacgccatggatacggaattcagtgctagtagccccgcatcgctgctggagcggccaaccaaccacatggaagctctcggacatgatcatctgggcacaaatgacctgacagtcggtgggtttttggagaatcatgaagaacccagagataaggagcaatgcgcggaggaaaatataccagcctcttccttaaacaagggcaagaaattgatgcactgccgttcccacgaagaagtcaacacagagctcaaagcgcagatcatgaaagaaatcagaaaaccgggtagaaaatatgagagaatcttcacactgttgaagcacgtgcaaggaagcctgcagacccgactgatatttctgcagaatgtgatcaaagaagcctcccggtttaagaagcgtatgctgatcgagcagctggagaacttcctggatgaaatacataggagggcaaaccaaatcaaccacattaactcaaactag

SEQ ID NO: 23389 - DNA, 1944 bp, synthetic construct
  source 1..1944: mol_type = other DNA; note = Synthetic coding sequence
atgagcgacgaggtgttcagcaccaccctggcctacaccaagagccctaaagtaacgaagcgcacaaccttccaggacgagttaatccgggctattacagccagaagcgctcggcaacgctctagcgaatactcagatgactttgattccgacgagatagtttccctgggcgatttcagtgacacctctgccgatgaaaactctgtgaataaaaaaatgaacgacttccacatctcagacgacgaggagaagaacccaagtaagctactgttcctgaagacgaacaagagcaacggcaacataacgaaggatgagcctgtatgcgctatcaagaacgaagaagagatggcccccgatggatgcgaagatatcgtggtgaagtccttttccgaatctcagaacaaggacgaagaatttgaaaaggataagatcaagatgaaaccaaagcccaggatcctgtctattaagtccacctcatcagcggaaaataattcattggacactgacgaccacttcaaaccttccccaaggccgagaagtatgctgaaaaagaaaagccacatggaggagaaggacggtttagaagacaaggagaccgccttatcagaagagctcgagctgcactctgcgccttccagccttcctacccctaacggaatccaattggaggctgagaagaaagcattctcagaaaacctagatcccgaagatagttgcttgacatcactggcttcttcctccttgaaacaaattcttggcgattcgttctcgcctgggtccgaaggcaatgcgtctggcaaagaccctaatgaggagataaccgagaaccacaatagcctcaagtcagacgagaacaaagaaaactctttctcagctgatcacgtaacaaccgccgtggaaaaatctaaagaaagtcaggtaacggccgacgatttagaagaggagaaggccaaggctgaacttataatggacgacgacaggacagtagaccccctcttaagtaagtcgcagagcatcttgatctctacgagcgccacagcgagctccaaaaaaacgatagaagatcgtaatatcaagaacaagaaatccacaaacaaccgagcaagtagcgcaagcgcaaggctcatgacttctgaatttctcaagaaatcgagcagtaaacggaggacacctagcactaccaccagtagccattatcttgggaccctgaaagtgctggaccagaaaccctctcagaagcagtccattgagcctgatagagccgacaacatcagggccgcagtgtaccaggagtggctagagaaaaagaatgtttatctccatgagatgcaccgcataaaaaggatagaaagcgagaacttgcgcattcagaatgagcagaagaaggcagccaaacgggaggaagcactggcatcctttgaggcatggaaagctatgaaggagaaagaggccaagaaaattgctgcaaaaaaaaggctggaggagaaaaataaaaagaaaactgaagaggagaacgccgctaggaaaggagaagccttgcaggcttttgagaaatggaaggagaaaaagatggaatatttgaaagaaaagaaccgaaaggagagggagtacgaacgtgccaagaagcagaaagaagaggaaacagtcgcagagaaaaaaaaagataaccttaccgctgtggaaaagtggaatgagaaaaaggaagcatttttcaagcagaaggagaaagagaagattaatgagaaacggaaggaagagttgaagcgggcagagaaaaaggacaaggataagcaggccattaacgaatacgagaagtggctggagaataaggaaaagcaagagcggattgagcgcaagcagaagaagcggcacagctttttagaatctgaagctctcccgccttggtctccaccttccagaactgtgtttgccaaagtgttttag

SEQ ID NO: 23390 - DNA, 1074 bp, synthetic construct
  source 1..1074: mol_type = other DNA; note = Synthetic coding sequence
atgcagaccttcctgaagggcaagcgggtgggctactggctgagcgagaaaaaaataaagaaactcaacttccaggctttcgctgaactgtgtaggaagaggggcatggaagtggttcaactcaatctgtcccgccctatcgaggagcagggccccttagatgtgatcatacataagctcacagacgtgatcttggaagccgatcagaacgactcccagtctctggaactggtccataggttccaggaatacattgacgctcaccccgaaacaatagtgctcgaccctctgcctgccattcgaactctattggatagaagtaagagctacgaactgatccggaaaattgaagcatatatggaggatgaccgtatttgcagccccccttttatggaactgacctccctgtgcggggacgacacaatgcgattgttggaaaagaacggccttacgttcccttttatctgcaaaacacgtgtggcccatggcacaaacagccatgaaatggccatcgtgtttaatcaggaaggcttgaatgctatccaaccgccttgcgtcgtccagaattttatcaaccacaacgcggtcttgtacaaggtcttcgtggtcggagaaagctatacagtggtccagcgtccaagtctgaagaatttcagcgcaggcacgtccgatagggaatcgatctttttcaattcacataacgtttctaaaccagagagctccagtgtgctgactgaacttgacaagattgaaggggtgtttgagagaccttctgacgaggtgattagagagttatctcgggccctaagacaggccctcggggtgagcctgtttgggatagatatcattatcaataaccagactgggcagcacgccgtaatagacattaatgccttccctgggtacgagggagtaagtgaattcttcaccgatcttttgaatcacattgccaccgtcctgcaggggcagagtacggccatggccgcaccctcgggagagttccgggccggcgacctatgttgcgatctcggtaaaagctttcaagtgtttgggcccccacccccctgcctgtag

SEQ ID NO: 23391 - DNA, 852 bp, synthetic construct
  source 1..852: mol_type = other DNA; note = Synthetic coding sequence
atgctgcggtgcggccagatgatcttcgcccaggccctggtgtgccggcacctaggcagggactggcgatggacccagagaaagagacagccagattcctactttagtgtgctgaacgcattcatagaccgcaaagattcctattacagtattcatcagatcgctcagatgggcgtcggagagggaaaatccattggacagtggtacggaccaaatactgtggcccaagtgctgaaaaaactagctgtgtttgatacctggagcagcctcgctgtgcatattgccatggacaatacagtggtaatggaggagatcagaaggttgtgtcgaacctcagttccgtgcgctggggccaccgcatttcccgcagactcagacagacattgtaatggctttcccgccggagctgaggtgaccaatcgtccttctccatggcgccctcttgttttactgatccctctccgccttgggctgaccgacataaacgaagcttacgtcgaaaccctgaaacactgcttcatgatgcctcagagtttgggagttattggaggaaagcccaattccgctcactatttcattggatacgtgggtgaagagttgatctaccttgacccccataccacacagcccgcggtggagcctaccgacgggtgtttcatccccgatgagagcttccattgtcagcacccgccatgtagaatgtctattgctgaactggacccttcgatagccgttgtgctgggcgtcggaaagcagggtaggctcgtgcgttcaattccttgggcaccccggcctagttcttggtgtgctgcggtcttgggtgcggccgtggtgatgtgtggcacaccttag

SEQ ID NO: 23392 - DNA, 2160 bp, synthetic construct
  source 1..2160: mol_type = other DNA; note = Synthetic coding sequence
atgggcttcagcaacatggaggacgacggccccgaggaggaggagcgtgttgctgagccccaggcaaacttcaacaccccacaagccctcaggtttgaagagctgctggcgaatctgctgaacgagcagcaccaaattgctaaggaactgttcgaacagttaaagatgaaaaaaccaagcgccaagcagcagaaggaagtggagaaggttaagccccagtgcaaagaggtgcaccagaccctcatcttagaccccgcccagcggaaacgccttcaacagcaaatgcagcagcatgtgcagttgctcactcaaatccacttgcttgccacctgtaaccccaacctaaaccccgaagcaagcagcacccgcatatgcctgaaagagctgggaacattcgcccaatcttcaatagctctgcaccaccagtacaatcctaaattccagacactctttcagccctgcaatcttatgggggccatgcagcttatagaagacttctccacccacgtgtccatagactgcagtcctcataagaccgtaaaaaagacagccaatgagttcccatgtctgccaaaacaagtcgcatggatcctggcaaccagcaaagtgttcatgtatccagaactgttacccgtatgctcgcttaaggctaaaaacccccaggataagatcctctttactaaggccgaagataataaatacctgttgacatgtaagactgcacggcaactgactgtacggattaaaaacctcaacatgaatagagctccagacaatattataaagttctataagaaaacaaagcagctgcctgtactgggaaagtgctgcgaggagatccaaccacaccaatggaaaccaccgattgaacgggaagagcaccgcctccccttctggttgaaagcgagtctgccatctatacaggaggagctccgacatatggcggatggagccagagaggtggggaacatgaccggtacaacagaaatcaatagtgatcaggggctcgagaaggataactctgagcttggaagcgaaacaagataccccctgctgctccctaagggggtggtgctaaagttaaaacccgtcgccgatcggttccctaagaaagcttggaggcagaaaagaagcagtgtactgaagcctctcctgattcagccgagtccctccctgcagcctagcttcaaccccggcaagacgcctgcccagagtacacacagcgaagcccctcccagcaagatggtcctgcggattccgcatcccatacagccggccacagtgctccagacggtgcccggtgtccccccgctgggtgtgagcggcggagaaagcttcgagtctcccgccgcattgccagccatgcctcccgaagctcgcacgtcattcccactcagtgaatctcaaactctgctgtcatccgctccagtccccaaggtgatgatgccctcgccagcctcttctatgttccggaagccctacgtacggagacgcccttcaaagcgcagaggtgctcgcgccttcaggtgtataaagcctgcccctgtgatccatccggcttctgtcatttttacagtgcccgccactaccgtaaaaattgtcagcctgggcggtggatgcaacatgatacaacccgtcaatgccgcagtggcccagtctcctcagactattccaattgcaactctgctcgtaaatcccacctcgtttccttgccctctgaatcagcccctcgtggcgtcctctgtgagcccactaatcgtctccggaaatagtgtaaatcttcctataccgagtacaccggaggataaggcgcacatgaatgttgacatcgcttgcgctgtcgctgacggagagaacgcttttcagggactcgagcccaaattagagccccaggagttgtcgcccctctctgccaccgttttccccaaggttgagcactcaccagggcccccccccgtggacaaacagtgtcaagaggggctctccgaaaattcggcttaccggtggaccgtagtcaaaactgaagaaggacgacaagctcttgaacctctcccccagggtatacaggagtctctgaataacagcagtcccggagacctggaggaagtcgtaaaaatggagcccgaagatgctaccgaagaaatctccgggtttttgtag

SEQ ID NO: 23393 - DNA, 1134 bp, synthetic construct
  source 1..1134: mol_type = other DNA; note = Synthetic coding sequence
atggaggccgccgccgtgaccgtgacccggagcgccacccggcggcggagacgtcagctccagggactcgccgctccggaagctggaacccaggaagaacaagaagatcaggaaccacgccctagacgtaggcgccctggccggtccattaaggatgaagaagaggagactgtgttccgagaggtcgtgtccttctctcctgatccactgccagtccgatattacgataaagacacgacaaagcctatatccttttacctttcgtcccttgaggagcttctggcctggaagccgcgcctggaggatggttttaatgtggctctggaaccgttagcctgccggcaacctccactcagcagccagaggcctcgcactctactgtgtcacgatatgatgggcgggtacctcgacgaccgctttatccagggatcagtggtacagacaccatacgctttttaccattggcaatgcatagacgtgtttgtgtacttcagtcatcacacagtcaccattcctcccgtgggttggaccaacaccgcccatcgacacggggtgtgcgtgcttgggacttttatcaccgaatggaacgagggcggaaggttgtgcgaagcctttctagccggcgacgaacggagttaccaagctgttgcagatcggctggtacagattactcagttctttaggttcgacggatggttaatcaacatcgagaattcactttcactggcagcagtgggaaatatgcccccttttctccgctacctgaccacccagcttcatagacaggtgcccgggggattagtgctctggtacgatagcgtggttcagtctggacagctgaaatggcaggacgagctgaaccaacacaatcgcgtatttttcgacagctgcgatgggtttttcaccaactataattggcgggaagaacacctcgagaggatgctgggtcaagcaggtgagagacgtgccgatgtatatgtcggtgtcgatgtctttgctagaggaaacgtcgtagggggaagattcgacacggacaaatctctggagctgattaggaaacatggcttttccgtcgctctgtttgctccaggttgctctgtcttccctggcgttggcaacctgctgtgttgctag

SEQ ID NO: 23394 - DNA, 927 bp, synthetic construct
  source 1..927: mol_type = other DNA; note = Synthetic coding sequence
atgcggggcaagcggcggccccagacccgggccgcccggcggctggcagctcaagagagcagcgaggcagaggatatgtcagtgcctagaggccccatagcacaatgggcagatggggccatctcccctaatggtcaccgacctcaacttagagcggccagtggtgaagactctacagaggaggcccttgctgctgctgcggccccctgggagggcggcccggttccgggcgtcgacaccagtccattcgcaaaatctctcggccactcgaggggcgaggccgatctgttcgacagtggcgatattttcagcacagggactgggtcgcaatctgtcgagcgaaccaaaccaaaggccaaaatcgccgaaaatcctgccaatccccctgtggggggcaaagctaagagtccaatgtttcccgcactgggagaagcctcgtcagacgacgacctctttcagtctgccaaaccaaagcccgccaaaaagacaaaccccttcccattgctcgaagatgaggacgatttgttcaccgatcagaaagtgaaaaaaaacgaaaccaaaagtagtagtcagcaggacgtgatcctgactacacaggatatcttcgaagatgacatcttcgcgacagaagccatcaagccatcccagaagactagagaaaaggagaagactctggaaagcaatttgttcgacgacaatattgacatcttcgccgatctgaccgtgaaacccaaggaaaaatcaaagaaaaaagtggaagctaagtccatcttcgatgatgacatggacgacatattttccaccggcattcaagctaagaccaccaagcccaaatcccggagcgcacaggccgcgccggaaccccgatttgaacataaggtttctaacatctttgacgaccctttgaatgcttttggcgggcagtag

SEQ ID NO: 23395 - DNA, 933 bp, synthetic construct
  source 1..933: mol_type = other DNA; note = Synthetic coding sequence
atgctgaagaacaagggccacagcagcaagaaggacaacctggccgtgaatgctgtggcccttcaagatcatatcttgcatgatctccagcttagaaatttatctgtggcggatcactccaaaactcaggtgcaaaagaaagaaaataagtctctgaagagagatacaaaggccatcatcgacaccggcctgaaaaaaaccacacagtgtcccaagcttgaagatagcgagaaagaatacgttttggaccccaaacccccccccctcacacttgctcagaagctggggctgattggtcccccccctcctcccctatcatcagatgagtgggagaaggtcaagcaaagaagtctgctgcagggtgactccgtccagccatgtcccatttgcaaggaagagttcgagctccgcccacaggttttactcagctgtagccacgtctttcataaagcctgtttgcaggcattcgaaaagttcaccaataagaagacctgtcctctttgcagaaaaaatcaatatcagaccagagtgattcatgacggcgcccgcctctttcgaatcaagtgcgtgacaaggatccaggcctactggcggggttgtgtcgttcgtaagtggtaccgcaacctgaggaaaactgtccctcccaccgatgccaaactgaggaaaaagttttttgagaaaaagtttacggagattagtcacagaatcttatgctcttacaacacaaacattgaagaattgtttgccgagattgaccagtgtttggcaatcaacaggagcgtgctccaacagctggaggagaagtgtggacacgagatcacagaggaggagtgggagaagatacaggtgcagaatgaaacgagcgcgtgtttcgaggacccatgtctgggagcccacggctcacattttagtctgtcaaatttcttgctgtag

SEQ ID NO: 23396 - DNA, 1119 bp, synthetic construct
  source 1..1119: mol_type = other DNA; note = Synthetic coding sequence
atgcgggtgggccccgtgcggagcgccatgagcggcgccagccagccccgaggccctgctctgctgtttccggcaaccaggggtgtgcctgctaaaagactcctggatgccgacgacgcagctgccgtcgctgccaagtgccccagactgagcgagtgtagtagccccccggattacctctctccgccgggcagtccgtgctccccacagcccccaccagccgccccgggcgccggagggggttccggtagcgcacccgggccttctcggattgcggactatcttcttctgcctcttgctgaaagagagcacgtttccagggccctatgtatccacaccggacgtgaactcaggtgcaaggttttccccatcaaacattatcaggacaagattcggccttacatccagctgcccagccactccaacatcaccggtatagtggaggtgatcctgggtgagaccaaggcttatgtgttctttgagaaagatttcggcgacatgcactcttacgtcaggtcaagaaagcgacttcgggaagaagaggcggcccgacttttcaaacagatcgtgtccgctgtggcccactgccaccagagcgcgatcgttttgggagacctgaaactgcgcaagttcgtgttttcaaccgaggagagaacacaactccggttagagtccctagaggacacccacatcatgaagggtgaagacgatgctctgtctgacaagcacgggtgtccagcttatgtgtcaccagagatccttaatacaaccgggacgtattctggtaaagctgcggatgtgtggtctcttggcgttatgctgtacaccctgctggtgggccgatacccctttcacgactccgaccccagcgcactgttcagtaaaattcgacgtggccagttttgtatcccggaacatatttcacccaaggcgcgctgtctgatccgttccctgctgcgtagggagccgagtgagagactcacagctcccgaaatcctactccacccttggtttgagtccgtgttggaaccaggctatatagactctgagattgggactagtgaccaaatcgtccctgaataccaggaggattctgatatttcaagtttcttctgttag

SEQ ID NO: 23397 - DNA, 1554 bp, synthetic construct
  source 1..1554: mol_type = other DNA; note = Synthetic coding sequence
atggagaccgacctgaacagccaggaccggaaggacctggacaagttcatcaagttttttgcactgaagaccgtgcaggttatcgtccaggctcgtctgggcgagaaaatctgtacccgctcatctagcagcccaacaggatctgactggtttaatttggccatcaaggacattcctgaagtgacacacgaagccaagaaagcactcgccggtcagctccccgccgtgggccgatctatgtgtgtggagatatcgctcaagacttctgaaggagacagcatggaactggagatttggtgccttgaaatgaacgaaaagtgtgataaagaaattaaagtctcatataccgtttacaatcggctttccctgctactgaagtccctgcttgccattaccagagtcaccccggcctaccggctcagtaggaagcaaggccatgagtatgtcatactataccgaatatactttggggaggtgcaactctcgggcctgggcgagggctttcagacagttcgcgtcggaacagtcggtaccccggtgggtacaatcactctgtcttgcgcctacagaattaatttggccttcatgtctacacgtcagttcgagaggacacctcctattatggggatcatcattgatcatttcgtggataggccgtacccctcctcatcacccatgcatccctgtaactataggactgcaggtgaagatacgggtgtgatctacccctctgtagaggatagccaggaggtgtgtacaacctccttctctacctcacccccgagccagctctcctcaagcaggctctcttatcagccggccgctctcggggtgggcagcgccgacctcgcctatccggtggtttttgctgcagggctgaatgcaacgcatccgcaccaactgatggtccccgggaaagaggggggcgtcccccttgcgccaaatcagccggtgcacggtactcaggccgaccaagaacggctcgccacatgcacgccttccgaccggactcattgtgcagccaccccatctagttcagaggacactgagactgtaagtaatagctccgaaggtcgggcctccccccacgacgtgctcgaaactatttttgtgcgtaaagtgggcgcttttgtgaataagccgatcaatcaagtaacgctgacctcgttagatattcctttcgccatgtttgccccgaaaaacctggagttggaagataccgacccaatggtcaacccccctgatagccctgaaacagagagccctctgcaggggtccctacattccgatgggtcttctggtggaagctcaggaaatacacacgatgacttcgtgatgattgacttcaagcctgctttttcaaaagacgatattctgcccatggacctgggcacgttttatcgcgaatttcagaatccaccccagttaagctctctgtctatcgacataggggctcaaagtatggcagaggatctggacagccttcccgaaaagttggccgtccacgagaagaatgtcagagaattcgacgcgtttgtggagacactacaatag

SEQ ID NO: 23398 - DNA, 1488 bp, synthetic construct
  source 1..1488: mol_type = other DNA; note = Synthetic coding sequence
atgtggcggggctgcgcccggagccggaagcggaagaaggtggacaatgactacaatgcgctgagggagaggctttccactttaccggacaagctgtcttacaacatcatggttccatttggcccttttgcgtttatgcccggaaagttggtccacacgaatgaggtcacagtgctccttggcgataactggtttgcaaagtgcagcgctaaacaagccgtggggctagtggagcatcggaaagagcacgtccgaaaaacaatagatgatctcaagaaagtaatgaagaacttcgagagccgggtggaatttacagaggatctgcaaaaaatgtctgacgctgcaggagatatcgtggacatccgggaagaaatcaagtgtgatttcgaatttaaggcaaaacatcggatcgcccacaagccacactcgaaacccaagacttccgatatttttgaggctgatatcgcgaatgatgtgaaatcaaaagatttgttggctgacaaagaactatgggcccgactggaggagctggagagacaggaagagctgctgggcgaattggatagcaagcccgataccgtgatcgctaatggtgaagacacaacatcatctgaggaagaaaaagaagacagaaacacaaacgtcaacgcaatgcaccaggtgaccgacagccatacaccctgccacaaggacgtggctagtagtgagcctttctccggacaggtgaatagccagcttaactgttctgttaacggcagctcatcgtatcactccgatgatgatgatgacgacgacgacgatgatgacgatgataatatcgacgacgatgatggggataatgaccatgaggctctgggggtcggcgataacagcattcctactatctatttttctcacaccgtggaaccaaagcgggtgcgtatcaacacaggaaagaatactaccctcaaattttccgaaaaaaaagaagaagcaaagaggaaaagaaagaattctactggctcgggacactccgcacaagagctgcctactatccgcactcccgcggacatctaccgtgcttttgtggatgtggtgaacggggagtacgttcccaggaaatccatcttaaagtccagatcccgggaaaatagcgtttgctctgataccagtgagtcaagtgctgccgagttcgatgatagacgaggagtgctgagaagtatctcctgtgaagaagctacgtgtagcgacacaagcgaatcgatcctggaggaggagccccaggagaatcagaagaagttgctcccactgtcagttacccccgaagctttttctggaaccgtcattgagaaagaatttgtctctcccagtttaactccacccccagctatcgcacaccccgctcttcccacgataccagaacgcaaagaggttctgttagaagccagcgaggaaaccggtaagagggttagtaaattcaaggccgctagactgcagcaaaaggattag

SEQ ID NO: 23399 - DNA, 1458 bp, synthetic construct
  source 1..1458: mol_type = other DNA; note = Synthetic coding sequence
atgtgccaggtgggcgaggactacggcgagcccgcccccgaggagcctcctcccgctcccagaccctcacgggaacagaagtgtgttaagtgtaaagaagcgcagcccgtcgttgtaattcgcgctggcgacgccttctgcagagattgttttaaagctttttacgttcacaaattccgtgctatgcttggcaagaaccggctgattttccccggggaaaaagttttactcgcctggtcggggggaccaagcagcagcagtatggtgtggcaggtgcttgaaggcttatctcaggactccgctaagcgtcttaggtttgtcgccggagttatcttcgttgatgaaggtgcagcttgcggacagagtctcgaggaaaggtccaaaacactggccgaggttaagcccattcttcaggccacaggcttcccatggcacgtcgtggcccttgaagaagtgtttagtctacctccgagcgtgctgtggtgcagcgctcaagagctggtgggtagtgagggcgcttataaggcagcagtggacagcttcctccagcagcagcatgttctcggcgctggtggagggcccggaccaactcagggcgaggaacagcccccacaacctcctctggatccccaaaacctggctcggcctcccgcccccgctcagactgaggcgctgagccagttgttctgtagcgttagaactttaacagcgaaggaggaactcctgcagactctgaggacacatctcatccttcacatggccagggcacatggttatagcaaagttatgaccggcgattcttgtacgaggctggcgattaagctgatgactaacctggcgctgggaagaggcgccttccttgcctgggataccgggttttccgacgagagacatggcgatgtggtggtcgttaggcctatgagagaccacaccctcaaggaggtggcattttataataggctattcagcgtgccctcggtgtttactcctgcagtggataccaaggctccagagaaagcatcaatccacagactcatggaagcctttatcctgcggctccagacacaattccctagtactgtttccaccgtgtataggaccagcgagaaactcgtaaagggcccccgggatggccctgccgccggtgactcaggacctaggtgtctgctgtgcatgtgcgctctggatgtcgacgcagccgacagtgcaacagcttttggggcccaaacgagttctcggctctctcaaatgcagtccccaataccactgaccgaaacccggacacctccaggcccgtgttgctcaccaggggttggatgggctcagagatgcggtcagggggcgtgccgcagagaagatccgcaggcctgcattgaggaacagctgtgctactcctgtagggtgaatatgaaagatttggggctcggtctggctggggatcctgggctgtcagactag

SEQ ID NO: 23400 - DNA, 1353 bp, synthetic construct
  source 1..1353: mol_type = other DNA; note = Synthetic coding sequence
atgagcctgcggctgagcagcgccagccggcggagctgcccccggcccacaaccggatctttgcggctctatggaggaggcacatcttttggcaccggcaattcctgcgggataagcggaattgggtccggcttcagcagcgcatttggcggaagcagttctgggggaaacacagggggcggcaacccctgtgctgggttcactgtgaacgaacgggggctgctgtccggcaatgaaaaggttaccatgcagaacctcaatgacaggctggcctcctatctggattctgtccacgcactcgaagaagccaacgcggatttagaacaaaagattaaaggctggtacgaaaaatttggaccaggcagctgtcgcggcctggaccacgattactccaggtatttcccgataattgacgatcttaaaaatcagatcatcgcctccacaacttccaacgctaatgctgtgctgcagatcgacaatgccagactaaccgctgacgatttcaggctaaagtacgagaacgaactggccctgcatcagagcgttgaagctgacgtgaatggcctcagacgagttctcgacgagattactctgtgtcggactgaccttgaaatccagtacgaaactctgagcgaagaaatgacgtacctcaaaaagaatcacaaggaagagatgcaggtccttcagtgtgccgctggaggaaatgtgaacgtggaaatgaacgctgcaccgggtgtggatctgacagtacttctgaacaacatgcgagccgaatacgaggctcttgccgagcagaaccgccgagatgctgaagcatggttcaacgagaagtcggctagcctgcagcagcagatctccgaggatgtgggggcaacaacctctgcccgcaacgagctcactgagatgaaaaggactctgcaaactttagagattgaactacagagccttctggctactaagcatagtctggagtgctccctcacggaaaccgagagtaattactgcgcccagctggctcagatccaggctcaaatcggcgccctggaggagcagctgcaccaggtccggacagaaacagagggacagaagctggagtacgaacagcttctcgatataaaacttcaccttgaaaaggagatcgagacttattgcctactgattgggggcgacgatggagcctgcaagtctgggggttataagtcgaaggattacggttccgggaatgttgggagtcaggtcaaggacccagcaaaagcgattgtggttaaaaaagtcttggaagaagtagaccagcggtccaaaatactgactacacgcttgcacagcctggaggagaagtcccagagcaattag

SEQ ID NO: 23401 - DNA, 2679 bp, synthetic construct
  source 1..2679: mol_type = other DNA; note = Synthetic coding sequence
atggaccagcccgaggccccctgcagcagcaccggcccccggctggccgtggctcgggaacttctcttagccgcactcgaggagctgtcacaggaacaactgaaaaggtttcgacacaaactgcgtgacgtcggacccgacgggaggagtatcccatgggggcgcctggaacgcgcggacgcggtggacttggccgaacaattggcacaattctatggcccagaaccggctctagaagttgcaagaaaaaccctgaagagggcggatgctcgcgacgtagcggcgcagttacaagagcgccgcctgcagcgactgggactcggcagcgggactctgctctccgtgtcagagtacaaaaaaaaatatagagagcatgtcctccagctccacgcaagggtcaaagagaggaacgccagatcggtgaagattacgaaacggttcactaagctcctgatcgctcccgaatcagctgctccagaggaggcgatgggacctgctgaggaacctgagcctggccgggcgaggagatccgacacacacaccttcaaccgtctcttccgtagagacgaggagggcagaagacctctaaccgtggttttacaaggtcctgctggaattggcaaaaccatggccgctaagaaaattttgtatgactgggctgctggcaagctgtatcaaggtcaggtggacttcgcttttttcatgccttgcggcgaactgctagagcggccaggcactcggtctttagctgatcttatcctggatcagtgccccgatagaggagccccggtaccacagatgcttgcccagccccaacgcttgttatttattctcgacggcgccgatgagctgccagcacttgggggacccgaggcagcaccctgcacagaccccttcgaagccgcttccggagcgcgcgtgctcgggggcctcctgtccaaagccctcctgcccaccgccctcttgctagttactacaagagccgcggcgcctggtaggttgcaggggaggctatgttccccacagtgcgccgaggtgcgcggattctcagataaggacaagaaaaaatacttctataaatattttagggacgagagacgagcggagagagcctataggttcgttaaggaaaatgagacactgtttgcgctttgcttcgtcccattcgtttgctggatcgtctgcaccgtcctccggcagcagctcgaactcggacgcgacctttcacggacatctaagaccacgacttctgtatatctgctctttatcacatccgtcctgtcttcagctcctgttgccgacggccctcggttgcagggtgacttaaggaatctatgtcgcctcgcgcgcgaaggggtccttggacggagagcccaattcgccgagaaggaactcgagcagctggaattgcggggaagcaaagtccagaccttatttctttcaaaaaaagagttacctggagtcctggagaccgaggtgacttatcagtttattgaccagagctttcaggaattcctcgccgcacttagctacctgttggaggacggaggcgtgccgcgcacagctgctgggggtgtcggcacactgctcaggggagacgcacaaccacatagtcatctggtgttaacaacacggtttctctttggcctactgagcgcggagcgcatgcgtgacattgagagacattttgggtgcatggtgtcagaacgggtaaagcaagaggctctgaggtgggtgcaaggtcagggccagggctgccccggcgttgcacctgaggttacggagggcgctaaggggctggaggacacagaggagccagaggaggaagaggaaggcgaggagcctaactaccccctggagttgttgtattgtctgtacgaaactcaggaagatgccttcgtgcgccaggccttatgccgtttccccgaattagcgcttcaacgggttagattctgccgcatggacgtggccgtcttgtcttattgcgttagatgctgtcctgcagggcaagctctcagacttatttcttgccggctggtcgcggcacaagaaaagaagaagaagtctctagggaagcgactgcaggcttccctgggagggggctcttcctctcagggcactacaaaacagctgccagcctccctgctccaccctttatttcaagcgatgacagacccattgtgccacctgtcttctctcaccttatctcactgcaaactacccgacgctgtgtgccgtgatctttccgaggcactgcgagcagcccccgccctcacggaacttgggctcctgcacaaccggctgtccgaggctgggctgcggatgctcagtgaagggttagcctggccgcagtgcagagtacaaacagtgagagtgcagcttcccgatccccagcgggggctgcagtacctggttggcatgttaagacagtccccggcgctgacgactctggatctaagtggttgtcagctgcctgccccaatggtgacctacctgtgtgcagtgcttcagcatcaagggtgtggcttgcagacactgtcactcgcaagcgttgagctaagtgagcagtccttacaggagcttcaagctgttaagcgcgcgaagccagacctggtcatcactcatccagccttagatggtcatccacagccccctaaagagttaatcagtactttctag

SEQ ID NO: 23402 - DNA, 1047 bp, synthetic construct
  source 1..1047: mol_type = other DNA; note = Synthetic coding sequence
atgggcaaggactactacaagatcctgggcatccccagcggcgccaatgaggacgaaatcaagaaggcctaccggaagatggcgttgaagtaccatcccgataaaaacaaagaacccaatgcggaggaaaaatttaaggaaattgctgaggcctacgatgttctgagtgatcctaagaaacggggactgtatgatcagtacggtgaggaggggttaaagaccggtggggggacttcaggcggcagctccggatcctttcattacactttccacggggatccccacgcaacatttgcctctttttttggaggatccaatcccttcgatatctttttcgcatcatccaggagcaccaggccgttttccggctttgaccccgatgacatggatgttgatgaagacgaagatcctttcggagcatttggacgcttcgggtttaacgggctgagccggggccctcgcagggccccagagccactttatccccggcgcaaagtgcaagacccccccgttgttcacgagctgcgtgtcagtcttgaagaaatctatcacggatctacaaagagaatgaagatcactagacgaagattaaatcccgatggaagaactgtgcggactgaggacaagatactgcacatcgttatcaagcgtgggtggaaggagggcaccaagatcacatttccaaaagagggcgacgccacaccggataacatccccgccgatatcgtattcgtgctaaaggacaagcctcatgctcatttccggagagacggaactaacgtactgtactcagcattgatatctttgaaagaagccctttgcggctgcactgtgaatatccccaccatcgatgggagagtaatcccgctcccatgtaatgacgtcatcaaaccggggacagtcaaaaggttgcgaggcgagggactgcccttccccaaagtgcccacccaaaggggggatctgatcgttgaattcaaggttcgcttcccagaccggctcaccccacagaccaggcagatcctaaaacagcatctcccctgttcctag

SEQ ID NO: 23403 - DNA, 1899 bp, synthetic construct
  source 1..1899: mol_type = other DNA; note = Synthetic coding sequence
atggacaccatgatgctgaacgtgcggaacctgttcgagcagctggtgagacgggtggagatcttatccgaaggtaacgaggtgcaatttatccaattagctaaggattttgaggatttccgcaagaagtggcagcgaactgatcacgagcttggaaagtataaggacttactcatgaaggcagaaaccgagcggtccgcgctggacgtgaagttgaaacacgcccgaaaccaggttgacgtagagataaagcgccggcaaagggccgaagccgactgtgaaaaactggagcgtcagatccagctcattagggagatgctgatgtgtgatacttctggcagcatccagttgtcagaggagcagaaatccgccctggcctttttaaatagaggacagccatcatcttcgaacgctgggaataaacggctttctactattgatgagagcggcagcatactgtcagacatttcattcgacaagactgatgaatcccttgattgggatagctccctggtcaaaaccttcaagttgaagaaacgggagaaaaggcggtccacctctagacaatttgtggatggtcccccagggcccgttaaaaagaccaggtccattgggtccgctgtcgatcaggggaatgaatccatcgtcgccaaaacaaccgttaccgtacccaatgacggcgggcccattgaggccgtgtcgactattgaaacagttccttactggacaaggtcgaggcggaaaaccggtacattgcaaccctggaactccgattccactctgaactcccggcagctggagccaaggactgagaccgactccgtaggtaccccccagagtaatgggggtatgaggctgcacgactttgtgtctaaaaccgtgattaaaccagaaagctgtgtcccatgtggcaagcggatcaagttcggtaagcttagtcttaagtgcagagactgccgggtggtgtcccaccctgaatgccgcgacagatgccctctgccttgcattccaacgcttattggcacccctgtcaagataggagaggggatgctcgccgatttcgtgagccagacaagcccaatgataccctccattgtcgtgcattgcgtgaatgaaatcgagcaacgcggtctgacagaaactgggctctacagaatatccggatgtgatcggacagtgaaagagctcaaagagaaattcctgcgcgttaagaccgtacccttgctgtccaaagtcgacgatattcacgcaatctgctccctcctcaaggactttctcagaaacctgaaggagccactgctcacatttcgcctgaatcgggcatttatggaggctgctgaaattacagacgaagataatagcatcgctgcgatgtatcaggcagtgggcgagctccctcaagccaacagggacaccctagcctttctgatgattcacctccaacgtgtggcacagtcacctcatactaagatggatgtcgcgaacctcgccaaagtctttggcccgaccattgtcgcccatgctgtgccaaatcccgaccccgttacgatgttgcaggacatcaagaggcagccgaaagtggttgagagactgctaagcctgcctctggaatactggtctcagttcatgatggtggaacaggaaaatattgatcccctgcacgtcatcgaaaactccaacgctttctctacgccccagactcccgacatcaaggtttccttgctgggtcccgtgaccacaccagagcaccagttgctgaaaactccctcatcctcctctctgtctcagcgcgtgcgatccaccctgaccaaaaatacccctagattcggcagcaagtccaaatcagctaccaacctcggcagacagggaaacttttttgcgtccccaatgctgaaatag

SEQ ID NO: 23404 - DNA, 12075 bp, synthetic construct
  source 1..12075: mol_type = other DNA; note = Synthetic coding sequence
atgagcagcgagcaggacaagagcgccagcaaggagaagagcaagaagcccgtcagattcttaccccagctcagtatggagaagcttgccagcaaggaaaagttcaaggccccagcccgcgctcttccgcagctgtccatggtgtccaccaaaccacactggcagcaggccgcccccagttttcacctttcagtaaagcaagatgatgagtcccccgaaccgttttctgtgaaaaatgaacagtcacatgcggaatacatggaacgcttcggaaagaaaggcaaattgccccaccaggtcgatgactcatacgtgggccccagcacaagcaaaagcaagggaaagtctccccataaggaaagggaaaacttccgaagcactctggtcaatgttatcatgcaacaagacgccgacctggattcggccgttcctgacggctccactattcccaagcctaccgctagtgccattgagaaggacatcttacgatactactattacatccaccacggcattgataccgaccatgttgctcctatggaggactcctggctggagcacgtgttggatctcgtaccccagcatctgaaggtgttcaccgactccatcgtcacactctctgatgagatgagggaagattatctgctcagcgtccgcaagagtatagttgactttgtcctcaaggacccccgggagaaaggtgatgataaaaagactgatgagctccctgcccacagagccgagatggagatcctgcccaaaccctggcggaagagttttctcgcagctagttcctacatccgggatcatctaaatgctatgaaccctaccatgctggcggtcctggacctatggcacacaaatttcaaaaaactcaggctcgtggacataaaggagtttcataactgccaggatgccctggagctgagtagcttccagaacatcatcatgcgacatatggactcggctaaagagactttgttgaagatgtggtttccggaggttcagaacatctactaccagggcaacaagaagaaacagcttcctacaggtgacagcagcgccaaattagagagcttctttaactgtgctgctgccctaatgacacttcagctgcaggacctgaccttagtgtccatgcaggattttaccgacttgattgctcagccacccgacagcgtgagggcatttgaacatcccggctttattatgcgcttgattcttgacaatgacactatcaaatttgagccagaattatcggactacattgacatttttctaaacgtgtacgacgtgatgattaaggcagtgtccttcgtccctagggtagaaaccaaactttactcaaaatgggagagcaaaagtaagccaacaacactgaagcctatcattctcaacgagatagtggatgctcacaaggagaagatcaaggaggtgataatgaaggaaagtgtggcccccactgaacacctgagactttacgataaatatgactttctgatcacacgtaaggctgaacgggatgtcgacaatttcctcgctgagaaccactcttacgagaaaattatcgatgaaatttgcaaatatcaaaagctcattgaggagatccagtacactagtattaagacaattcgactcggtatgtttgagatgcattgtgaagaactgattcgtgctttggtcaaacgtgccgacatcatttgtggaaagctgttagctaagatgttcagagaccaccaggaggtaaacacaaggctgtgcgacgagttcgaaagaatagctgaaaaggctctttccactcctcctaacactgcagaactgatggagatgaaagcctatatccagaaggtggaagttacagatatgattgaattggaacaaagactggtcgactcaaagaactgtcttgctttcctgattgaatacgtcaatttcagtcccgccgatatgcgccttaacaatagcgtatttcagtggtatggcaggatgggagaaattttcgaagagcatcggaagattatcaaagagaagatagaacagtaccaggaaggtcttaaactgcgctgtgaaagattcgtcgaggagctggagagttatgccaagcaatctgaggagttttacagttttggggacctccaggatgtgcagaggtacttaaaaaaggctcaaatcctcaatggaaagctggacctcgccgcagacaaaattgaacaattcaatgcagaggaggaagctttcgggtggttaccgagcgtgtatcctcagaggaagaagattcaagatggcctgaacccataccttcgactatatgaaactgccgtggagttcagcagtaactaccgcgcctggaccgaaggcccgtatcataaagtcaatcccgaccaggtagaagccgacatcggaaactactggcgggggttgtataagcttgagaagacgttccatgatagcccttacgctctcgccatgaccaagaaagttcgcagtaaggtggaggatttcaaacagcacatcccccttattcaagttatctgtaatcccggtcttcgaccccggcactgggaagctatgagcgcaattgtcggctaccccctacagccttctgacgacagcactgttagttcctttctcgatatgaatctcgaaccatacatcgatagatttgagggcatttctgaggctgctagcaaggaatacagtcttgaaaaagctatggagaaaatgatcacagagtgggatgctgtggagttcgtgatccattcttaccgggaaactggcactttcattctcgcctcagttgatgagattcagatgctgcttgacgatcatattattaaaacccagaccatgcgaggctcaccttttattaagccttacgagaagcagatgcgggaatgggagggcaagcttctactgctccaggaaattctcgacgagtggctgaaggttcaggctacttggttatacctcgaacccatctttagttcccccgacattatgagtcagatgccagaagaggggcgtcgattcacagcagtggataaaacctggcgagacatcatgagatcggtgatgcaggataaacacgtccttacagtcgtaacaattgatcgcatgctggaaagactcaaaaaatctaacgagcttctcgagctgatcctgaaagggcttaatgagtatctcgaaaagaagaggctgttctttcctcgctttttctttttgtcaaatgacgaactcctagaaatactgtcagagaccaaagaccccactagggttcagcctcacttgaaaaaatgctttgagggcatagccaaggtggagttcaccgagaccttggatatcacccacatgaagagtagcgaaggggaagtcgtcgagctcatcgagatcatcagcactgccaaagcaagaggccaggtcgaaaagtggcttgtggagcttgagagggtgatgatcaacagcattcataaggtaactggcgacgccaccttcgcatatacaaagtacgaaaggatcaactgggttagagattggcccggccaaacagtgctgtgcgtaagccagattttttggactaaagaagtgcaaaccgccatccctatgggaattaaggctttggaacagtacctgaaaacctgtaatcgccaaattgatgacatcgttacactggttagaggaaaactcagcatgcagaaccgcgtgaccttgggagccctggtggtgctggacgtgcatgctagggatgtacttagctcactcgttaaaaagaatatctcggacgactccgactttgagtggctaagccagctgcggtattattggcaggagaaccaccttgaaactaagatgattaacgccggattgcggtacggctatgaatacctcgggaacagcccaaggttagttataacaccacttaccgaccgctgctatcgaacactgttcggcgctctacatctgcatttgggcggcgcgcccgagggacctgcagggactgggaagactgagaccacaaaagacctggcaaaagctgttgcgaaacagtgcgtcgtttttaactgctctgacggcctggactacctcgcactcgggaaatttttcaaaggacttctatcttgtggcgcatgggcctgctttgatgagtttaatcggattgacctggaggtgctgtccgtggttgcgcagcagattttgactatccaacgcggaatcaacgctggggcggatatcctgatgtttgaagggacggaattgaagctggaccccacatgtgccgtgtttatcacaatgaatcctggctatgctggcagatcagaacttccggacaatcttaaggcactgttccggactgtggccatgatggtgcccgactacgccatgatcgccgaaatcgttctttactcctgcggatttgtgacagcccgtccactgagtgtcaaaatagtcgctacctaccggctttgttcagagcagttgagctctcagcatcactatgactacggcatgcgggcggtcaagtccgttctgaccgccgcaggtaacttaaagttgaaataccccaatgagaatgaagagattttgttgcttcgttctatcattgatgttaatctcccaaaattcctgagtcacgatctacctctgtttgaagggatcactagcgatctgttcccaggagtgaagctaccaaagccggactataatgacctccttgccgcaatcaaagacaattgcgccagtatgaatttacagatgaccgctttcttcagcgagaaaatcctccaggtgtatgaaatgatgattgtcagacacgggttcatgattgtcggggagcccttcggtggaaaaacatccgcctatagagttttggccggtgccctaaatgacatatgcgagaaaggtctgatggaggaaaataaagtgcagattactgtcctgaatccaaagagcgtaacaatgggacaactgtatggccaattcgattccgtgagccatgagtggtctgacggtgtgttagccgtctctttccgcgctttcgcatcctcagtaacacctgatcgtaaatggttgatttttgacggtccagtagatgctgtttggatagagaatatgaatacagtgctggacgataataagaagttgtgtttgatgtctggagaaatcatccagatgagcccccaaatgaatctgatttttgaacccatggacctggaggtcgcttccccagctaccgtttcaagatgtggaatgatctatatggagccacacatgttaggatggaggccacttatgttgtcatgggtgaacctgttgccagccagtgtaagcgtgatccagaaagagtttataatgggactgtttgatagaatggtgcctgtatcggtagaatttatcaggaaacacacaaaggagctgtcccccacctccgatacaaacctcgttcgttctctgatgaaccttatagactgctttatggacgatttcgcggacgaagtaaagctgaaagagcggaacgatagggagacctacagccttctggagggaatttttctgttttcacttatctggtccgtgggtgccagttgtacagatgatgatcgactgaagttcaacaagattctgagggagctaatggagtcgccaatctcagatcgaaccaggaacacattcaaactccagagcggaacggaacagacctcctcgaaggcgttgaccgtgccctttccggagaagggcaccatctacgattatcaatttgtcaccgaagggatcggaaaatgggagccatggattaagaagcttaaggaggccccccccattcccaaagatgtgatgttcaatgagataatagtaccaacactggacactattaggtactccgcgttaatggaactgttgaccactcaccagaagccaagtatctttgtggggcctactggcaccggcaagtcagtgtatattacaaattttttactgaatcaactcaataaggaaatttacaagccacttctgataaatttttccgctcagacaacagccgcacagactcagaacattgtgatgagcaaactggacaagcgtcgcaaaggcgtatttggaccccctctggggaagagaatggtggtgttcgttgatgacgtcaacatgcccgctcgagaagtctatggagcacagccccctattgaactcctgcgccaatggctggaccactggaactggtacgatctcaaggactgttcaatgattaagttggtcgatatccagattatgtgtgctatggggccccctggcggaggtcgcaatccagtcactcccaggtacatgagacattttaatatcattacgattaacgaattcagcgacaagtccatgtacactatcttctcacgcattttgacatggcatttggagatctgttacaaattccccgatgagttcctggacctgacaacgcagatcgtcaacggaactatgacactttataaggaggcaatgaaaaatctcttgcccacccccgccaaaagccattacctctttaacttgcgggattttagccgagtgatacaaggggtttgtctctccagaccggagacgaccgagaccacagaggtcatcaaacggctttgggttcacgaagtcctgagggtatattacgatcggctgttggacaataccgatcgaagttggctaattaattacattcaagagatactgaggaattacatgtacgaggatttccatgaactttttcaaagattagattttgacaatgacggaatggtagaggctgatgaccttcgctcattgatgttttgcgactttcacgatccaaaacgggaagacaccaactatcgagagattgcggatgtggataaccttagaatgatcgtggagatccatttagaggagtacaataacatctctaaaaagcctatgaaccttgtgctcttcaggttcgcaatcgaacatatcagcagaatctcacgtatcctaaagcagccacgcagccacgccctgctggtcggcgtcggaggctctggtcgccagagtgtaactcgactcgccgctcacatggccgactatagcgtgtttcaagtggaaatttccaagggctacgataccacagagtggcacgaagacctgaaggtcatcctgcgtaagtgcgctgaaggggaaatgcagggggtctttttattcacagacacacaaatcaaagaagagagctttttagaggacgttagcaatttgctgaatgctggcgagatccccaacctgttcgcactggacgagaagcaggagatctgcgacaagatgagacagctggatcgccagcgagacaaaaccaagcagactgacggaagtccaattgctctgttcaacatgtttatagaccactgtagatcacagttacacgtggtcctggccatgtctcctattggcgatgcttttagaaacaggctgcgcaaattcccagccttggtgaattgttgcaccatcgattggttccaaagctggcccgaagacgcccttcaagctgtggctagccgttttctggaagaaatcgaaatgtccgaggagatcagagacggatgtatcgacatgtgcaaatcttttcacacctctactattgatctctccaagtctttctttgtggagctccagagatacaactatgtgacccccactagctaccttgaactgatcagcactttcaagctgttactggagaagaaacggagtgaagtgatgaagatgaagaaacggtatgaggtggggctggagaagctggattccgcctcgtcacaggtcgctacaatgcagatggagctggaggctctgcacccacagttgaaagtggctagcaaggaggtggatgagatgatgattatgatcgaaaaagaaagcgtggaggtagctaagacagagaaaattgtgaaggctgatgagaccatcgcgaatgaacaggctatggcaagcaaggccattaaagacgagtgtgatgctgatcttgccggtgctctcccaattttagagtcagcgctggcggccctggatacactgacagcccaggatattaccgttgtgaagagcatgaaaagtccccctgcaggcgtaaaactggtgatggaagcaatttgtatactgaaaggcataaaagccgacaagatccccgaccctacgggctctgggaaaaaaatagaagatttctggggaccagcaaagcggctcctgggggatatgagatttcttcagtccctgcacgaatatgataaggataatataccccccgcttatatgaacattatacggaaaaattacatccccaaccctgattttgtccctgaaaagataaggaacgcctcaacagcagctgagggattgtgtaagtgggtcatcgctatggattcttacgacaaggtcgccaagatcgtcgcacccaagaagattaaacttgccgccgccgagggggaactcaagatagccatggatggcctgagaaaaaagcaagccgccctgaaggaggtgcaggataaattggccagactccaggataccctcgagcttaacaagcaaaaaaaagccgatctcgagaatcaagtggatttgtgctctaagaagttagaacgggcagagcagctcatcggcgggttgggcggggaaaaaactcgctggtcacacacggctttagagctcgggcagctgtatatcaatttaaccggcgatatcttgattagttcgggcgttgtggcttatttgggagcctttacttctacctacagacagaatcagacgaaggagtggactacactctgcaagggtcgagatataccatgtagcgacgactgctcactgatggggaccctgggcgaggcggtaaccatccgcacatggaacatcgctggacttccctcagacagcttctctattgataatggcataatcataatgaacgccagacgctggccattgatgatagaccctcagtctcaagctaataagtggattaaaaatatggaaaaggctaactctctatacgtgatcaagttgtctgaacccgattatgtccgcacactcgagaattgcatccagtttggcacaccagtgcttttagaaaatgtgggagaggagttggatcccatccttgaacctctgcttttgaaacagaccttcaaacagggtggctctacttgcatcagacttggagattccaccatagagtatgctcccgacttcagattttacatcactactaagttacgcaacccccactacttaccagaaacgtcagtgaaagtgactctgctcaatttcatgatcactcccgaaggtatgcaggatcagctgcttggcattgtcgtggcgcaggagaggcctgatttagaggaggagaagcaggctttgatattacagggcgcagagaacaaacgacagctgaaagaaatcgaggacaaaatcctggaggtgctgtccagctctgagggaaatatcctggaggatgagacagcaattaagattctgagctcctctaaagctttggctaacgagatcagtcaaaagcaggaagtggcggaggagactgagaaaaagatagatacaacccgtatggggtataggccaatagctatccactctagtattttgttcttttcccttgctgacctggcgaatatcgagccaatgtaccagtactccctgacgtggtttatcaatctgtttatcctgagtatcgaaaactctgagaaatctgaaattctggccaaacggttgcaaatcctgaaggatcactttacctacagcctgtacgtaaacgtgtgcagaagcctatttgaaaaagacaaattgttattttccttttgtctgacaatcaacctgctcttacacgagcgggcaatcaataaggccgagtggagattcttgctaactggaggcattggccttgataatccctatgcgaatttgtgtacgtggcttccccagaagagctgggacgaaatttgtcgactagacgatctgcccgctttcaaaacaatccgccgcgaatttatgaggctgaaagacgggtggaaaaaggtgtatgactcacttgaaccacatcacgaggtttttcctgaggaatgggaggataaggcgaacgagttccagagaatgctaatcattcggtgcttgcgcccagacaaggttatccccatgctgcaggagttcattattaacaggttgggtcgcgccttcatcgagccacctccattcgatttagcaaaggcctttggggacagtaactgttgtgcccctttgatcttcgtgctgtcacccggcgccgacccaatggccgccctcctgaaattcgccgatgatcagggatacggtggctccaagctcagttcactgtctctcggccaaggccagggtcctatagcaatgaaaatgctggaaaaggccgtgaaggaagggacatgggttgtgcttcaaaattgtcatctcgccaccagctggatgcccacactggaaaaagtctgtgaggaactgagccctgagagtacgcatcccgattttcgcatgtggcttacaagttaccctagccccaatttcccggtgagtgttttgcaaaacggggtgaaaatgaccaacgaggcccccaaaggcctaagagcgaacattattaggtcctatctaatggatcccatatccgatcccgagttctttggcagctgtaaaaaacccgaggaatttaagaaattactgtatggactttgcttcttccatgcactggtgcaggaacggcggaaattcggtcctcttggatggaacattccatatgagttcaacgagacagatctgcgcattagtgttcagcagcttcatatgttcctgaaccaatacgaagagctgccttacgaggctttgcgctatatgaccggcgagtgcaactatggggggcgagtcaccgacgactgggaccgccgaactttgagatcaatcctgaataaattcttcaatccagagttagtggagaacagtgattacaagtttgatagtagcggcatttacttcgttccccctagcggtgatcataaatcctacattgaatatacaaaaacactgcctctgacgcccgccccagaaattttcgggatgaacgctaacgctgacataaccaaagatcaaagcgaaacccaactattatttgacaacatactactgacacagtctcggtctgccggcgcaggagccaaatcgtctgacgaagtggtgaacgaggtggcctctgatattctcgggaagttgccaaacaatttcgacattgaagcagccatgcggagataccctacaacttacactcagtccatgaatacagtactggtccaggagatggggcgattcaacaaactgttgaaaacgatcagggacagttgcgtcaacattcaaaaagcaatcaagggcctggcagttatgtccactgatctggaggaagtggtttcctccattctgaacgtaaagatccccgaaatgtggatgggtaaatcctatccctctctcaaaccactggggagttacgtgaacgattttctcgccaggttgaagttcctccagcaatggtacgaagtggggccccccccagttttttggctgagtggcttctttttcactcaggctttcttaactggcgctcagcagaattatgcccgtaaatatactatccccattgacctgttggggtttgactatgaagtcatggaagataaggagtataagcacccaccagaggatggcgttttcatccatggtctgtttctggacggcgcatcttggaatcgcaagattaagaagttggccgaaagtcaccctaaaatcctctatgacactgtgccagtaatgtggctgaaaccttgtaaaagggccgacatcccaaaacgccctagctacgttgcacctctctacaaaaccagtgaaagacgcggagtgttgtccactacagggcattccaccaattttgttatagctatgacactgccaagcgaccagccaaaggaacactggattggtagaggtgtcgccttgctatgccagctcaattcatag

SEQ ID NO: 23405 - DNA, 1506 bp, synthetic construct
  source 1..1506: mol_type = other DNA; note = Synthetic coding sequence
atgagcagccggcaggacaagagcgccagcaaggagaagagcaagaaaccagtaaggtttctgcctcaattgagcatggaaaaactagcaagcaaggaaaagtttaaagctccagctagggctctgcctcagctctcaatggtgagtaccaaaccacactggcagcaggctgcccccagttttcacctgtcagtgaaacaggatgatgagtcacccgagcctttttctgtcaaaaacgaacaatcgcacgcagagtatatggagcgcttcggaaaaaagggcaagctgccccatcaggtcgacgattcatatgtgggcccctcaacgagtaagtctaaggggaagtcaccccacaaggagcgagaaaacttccggtccactctggtcaacgttattatgcagcaggatgctgacctcgactccgccgtccccgacggcagtacaattcccaagccaactgcgtcagcaatcgagaaagacatcctccgctattactactatatccaccacggtattgacacagaccatgtcgcccctatggaggacagctggctcgaacatgtcttggatctggttccgcaacatttaaaagtcttcactgatagtatcgtcacactgagcgatgaaatgagggaggattatttactctcagtgcgcaaatctattgtcgactttgtgttaaaggatccacgggagaagggcgacgacaagaaaaccgacgagttacccgctcaccgggcagagatggagatcctcccaaaaccctggcgaaagtcctttctggccgcctcatcatatattcgcgatcaccttaacgcgatgaaccctaccatgcttgctgtgctggatctgtggcacaccaatttcaagaaactgcgtctcgtggacatcaaggagtttcacaattgccaggacgcgctcgagttgtccagttttcagaatatcattatgaggcatatggactccgcgaaagagacactcctgaagatgtggtttcccgaagttcagaacatctactaccagggaaataagaagaagcagctcccaacaggcgacagctccgctaaactcgaatcattcttcaattgcgctgcagccttaatgaccctccagctccaggaccttaccctcgtcagcatgcaagatttcacagatctgatcgcgcaacccccggattcagtgcgggcattcgaacaccctggatttatcatgaggctgattctcgacaatgacactataaaatttgaacctgaactgtctgactacatcgatattttcctgaatgtctatgacgtgatgattaaagccgtctcattcgtgccccgcgtggagactaagctctacagtaaatggagaaacaaggcaaagcccggacatttttatttctcacacattcagaggagtgtgaccttccaacattcagaagtcagcagcccccagaactcccacttcaaaatagtttctccgttctcggtgctcggatttacatggagatgtcaattatag

SEQ ID NO: 23406 - DNA, 840 bp, synthetic construct
  source 1..840: mol_type = other DNA; note = Synthetic coding sequence
atggccgcccccgtgcggcggaccctgctgggcgtggccggcggctggcgccggttcgagaggctctgggccggcagcttatcttcccggagcctggctctggcagcggcaccttcgagcaacggaagtccatggagacttttgggtgccctttgtctgcagcgtccaccagtcgtgtctaaacctctcactcctttgcaggaggagatggcaagcctactgcaacaaattgaaattgagcgaagcctatacagtgaccacgagctgcgggcgttggacgaaaatcagaggctggctaagaagaaggctgacctccacgatgaggaggatgagcaggacatactacttgctcaggacctagaagatatgtgggagcagaagttcctccagttcaagctcggggcgcggataaccgaagccgatgaaaagaatgatagaactagcctcaaccgaaaacttgaccgaaatctggtgctgttggtcagagagaaattcggcgatcaggatgtgtggattctgccacaggcagaatggcagccaggggaaactctccgcggcactgccgaacgcactcttgcaactctctccgaaaataacatggaggctaagtttctcggcaatgccccatgtggacactacaccttcaagttcccccaggcgatgcgcaccgagagtaacctgggagcaaaagttttcttttttaaagccctcctgctgaccggtgacttcagtcaggccgggaataagggtcatcacgtgtgggttactaaagatgaactgggcgactacctgaaacccaagtaccttgcccaggtccgacgattcgtgagcgacctgtag

SEQ ID NO: 23407 - DNA, 609 bp, synthetic construct
  source 1..609: mol_type = other DNA; note = Synthetic coding sequence
atggaggccgaggccggcggcctggaggagctgaccgacgaggagatggccgcccttgggaaggaagaacttgtccggcggttgcggcgtgaggaggccgctcggctcgcagcacttgttcagcgcgggcgcctgatgcaggaggttaatagacaacttcaaggccatcttggcgaaatacgcgagctaaagcagcttaacagaaggctgcaggctgagaatagagagttgcgcgatctctgttgtttcctggattcagagcggcagagagggcgccgcgccgcccgccagtggcagctgttcggcacacaggctagccgggctgtgcgggaagatctggggggatgctggcagaagctggccgaactggaaggaagacaggaggagcttcttagagaaaatctcgctctcaaggagctctgtcttgccctgggggaagagtgggggcccagaggcgggccgtctggcgcaggaggctcaggtgcaggtcccgcccctgaattggcactcccaccttgtggtccccgtgatctaggcgatggttcctcgtcaacggggagtgtaggatcccctgatcagttgccgctggcatgttctccagacgactag

SEQ ID NO: 23408 - DNA, 1353 bp, synthetic construct
  source 1..1353: mol_type = other DNA; note = Synthetic coding sequence
atgcgggagtgcatcagcatccacgtgggccaggccggcgtgcagatcgggaacgcctgttgggaactttactgcttggaacatggtattcagcccgatggccagatgccctcggataaaactatcggagggggggatgatagctttaatactttctttagcgaaacaggagctggtaagcacgtgccccgggccgtctttgtcgacttagaacctacggtggtggatgaagtcagaacagggacctacaggcagctgttccacccggagcagctgatcaccggcaaagaggacgcagctagcaactacgcccgagggcactataccattggcaaagagatagtggatctggtcctggatcgtatcagaaaactcgccgatttatgcactggcctacagggattcctcatctttcactcatttggcggcggtactggttcaggtttcgcgtctctactgatggagcggctcagtgtggattactctaagaagagcaaactcgagttcgccatctatcctgcaccccaggtttcgacggccgtggttgagccctataacagtatcctgacaacccataccactctggagcattcggactgcgcattcatggtcgacaatgaagcgatctacgatatctgcagaaggaacctggatatcgaaagaccgacatataccaacctaaaccgcctgatcggacagatcgtgtcaagcattacagcttccttgcgttttgacggtgctctcaatgtggacctgacagaatttcagaccaacctggtaccctatccccgcatacattttcctttggcaacctatgcccccgttatcagtgcagaaaaagcataccacgagcagctgagtgtggctgagattactaacgcttgcttcgagccggctaaccagatggtgaagtgcgatccaagacatgggaagtacatggcttgttgcatgctataccgcggagacgtagtccccaaagacgtaaatgccgcaatcgcaaccattaagaccaaacggacaatccagttcgtcgactggtgccctacaggcttcaaagtggggatcaattaccaacctcccaccgtcgtgcctggcggtgatttggctaaagtgcagagagctgtgtgtatgttaagcaatactacagccatcgctgaggcctgggcaagactggtccataagttcgatctcatgtatgccaaatgggcattcgtgcattggtatgtgggtgaaggtatggaggaaggagagttttcagaagccagggaagacctcgcagctctggagaaagattgtgaagaagtgggggtagattctgtagaggccgaagcagaagagggtgaggcgtactag

SEQ ID NO: 23409 - DNA, 3078 bp, synthetic construct
  source 1..3078: mol_type = other DNA; note = Synthetic coding sequence
atggtggccatggccgaggccgaggccggcgtggccgtggaggtgcgggggctcccccccgccgtgcctgatgaactgctgaccttgtatttcgagaacaggcgaaggtcaggagggggccccgtgctttcatggcagcgattgggttgcgggggcgttttgactttccgcgagcctgctgatgctgaaagagtgcttgctcaggctgatcacgaactccacggtgctcaactctctctgaggccagctccccccagggctccagctcgtttgctattgcagggccttccaccaggaacgacaccgcaacgcctggaacagcacgtccaggcactgctgcgggcctcagggttgcctgtgcagccctgctgtgcgctggccagtcctaggcccgacagggctttggtgcagctgccgaaaccacttagcgaggctgacgttcgcgtcctggaagaacaggcccagaatcttggtctggagggaacactcgtctcactggccagggtgccacaggcccgcgccgttagagtcgttggtgacggcgcgtctgtggacttgttgttgctcgaactgtacctggaaaacgagcgccgatccggcggaggaccgctcgaagacctgcagcgcttgcccggccccctgggtactgtggcgtcatttcagcagtggcaagttgccgaacgggtgctgcaacaggaacaccgactgcagggaagcgaactgtcgcttgtcccgcactacgacatactagagccggaggagttagccgaaaacacaagtgggggagatcatccctctacacagggcccacgagccacgaagcacgccctgctgcgcaccgggggcctcgtcaccgcactgcagggagccggcacagtgaccatgggatcaggcgaggaacctggtcagtccggagcctccttgaggacaggacccatggtccagggtcgcgggatcatgacaactggatcagggcaagaaccaggacagtccggtaccagtctccggacagggccaatgggctccctcggacaagcagagcaggtgtctagcatgcctatgggttctctcgagcacgaggggctcgtgtccttgagacccgtgggattgcaggagcaggagggccctatgtccctggggcctgtgggctctgccggccctgttgagaccagcaagggtttgctggggcaagaggggctggtcgaaatcgccatggatagtcccgagcaggagggcctcgttggacccatggaaatcaccatgggttctctagagaaagcaggaccagtgagtccaggttgcgtaaagctggccggacaggagggcctcgtggagatggtccttctgatggaacccggcgccatgcgattccttcagctgtatcacgaagacctgcttgctggcctgggcgacgtggctttactgccactggagggcccagatatgaccgggtttagactgtgcggcgcccaggcgagctgccaagcagcggaagagttcctgcgctcgctgttaggaagcatttcttgtcacgtgctgtgcttggagcatccgggcagcgcccggtttcttctcggccctgaaggtcaacacctcttgcagggcctcgaggcccagttccagtgcgtgtttgggacagagcgacttgcaacggctaccctagacacaggacttgaagaagtagaccccacagaagctcttcctgttctgccggggaatgcccacacattgtggacaccggactcgacaggcggcgatcaggaggacgtctccctggaagaagtaagggaactactggcgaccctggaggggctggatctggacggcgaggactggctgccacgggaactggaagaagaaggacctcaggagcagcccgaggaggaagtgacacctggacacgaggaggaagaacccgtggcgccaagcacggtggcccctcgctggctggaggaagaggctgctcttcagctggcgctccaccgctccctcgagccacagggccaggtcgcagagcaggaggaagctgcggctttgcgccaggccctaacattgtctctgttggaacaaccaccactagaggccgaggagcctcccgacggcgggactgacggcaaggctcagctggtggtgcactcagctttcgaacaagatgttgaagagctggaccgggcccttagagcagcactcgaagttcacgtgcaggaggagacagtgggcccctggcggcgaactctgccagcggaactgcgcgcacggctcgagaggtgtcacggtgtgtccgtggcccttcgcggcgactgtactatcttacggggttttggcgctcaccctgcccgggccgctcgtcacctggtggctttactggccggtccttgggatcagtctttagctttccctctcgcggccagcggacctaccctggctggacagactctgaagggcccttggaacaacctggagcgcttggctgagaacacgggagaatttcaggaggtggtacgggccttttacgacaccttggacgccgcacgatccagcataagggttgtcagagtcgaaagggtatcacaccccctgctgcaacagcaatacgaactgtatagggaacggctcctccagcgctgtgagcgcagaccagtggagcaggtgctgtaccatggtactacggctcctgccgtgcccgatatttgtgctcatggcttcaaccgcagcttctgcgggcggaacgcaacagtttacggaaagggagtgtatttcgcccgtcgcgcaagtctgtctgtccaggaccgatattctcctccaaatgctgacggacacaaggccgtgtttgtcgcaagggtcttgacaggggactacggtcaagggcgccgaggactcagagctcctcccctgcggggaccgggccacgtcttgctgaggtacgacagcgctgttgactgcatttgtcagcctagcatttttgtgatttttcatgatacccaagccctgcccacccacttaattacttgtgagcacgtgccaagggcatcccccgacgatccctctggtctcccaggcaggtcccccgatacctag

SEQ ID NO: 23410 - DNA, 390 bp, synthetic construct
  source 1..390: mol_type = other DNA; note = Synthetic coding sequence
atgagccacctgcagagcctgctgctggacaccctgctgggcaccaaacacgtcgactccgccgcactgatcaagatacaggagcgcagcttgtgtgtcgcttcgcctgggtttaacgttactccttcagacgtgagaactctggtaaacggtttcgcaaagaacccgttgcaggcacggagagagggactttactttaaaggcaaggactacaggtgtgtgcgagcagatgagtattctctgtatgctaagaacgagaataccggagtcgtcgtggtgaaaacccacctgtaccttctggtcgccacatacacggagggaatgtatccgtcaatatgtgttgaagccacagagagcctgggagactatctgagaaaaaaaggctcatag

SEQ ID NO: 23411 - DNA, 945 bp, synthetic construct
  source 1..945: mol_type = other DNA; note = Synthetic coding sequence
atgctgggcaagggcggcaagcggaagttcgacgagcacgaggacggcttggaaggcaagatagttagtccctgtgatgggccatctaaggtgagttatacactccaaaggcagacgatcttcaatatatccctgatgaagttatataatcatagacccctgaccgagccatctctccagaaaaccgtcctcatcaataatatgctgcgaagaatccaggaggaactgaaacaggaggggagcttgaggcctatgttcacaccaagctcacagccaactacagaacccagcgactcctatagggaggccccaccggctttcagtcatctggcgtcaccctctagccacccttgtgaccttggatccacaaccccgttggaggcgtgtctgaccccagcatctctgttagaagacgatgatgacactttctgtacttcgcaggccatgcagcctactgcccctactaagttgagtccccctgctctgttacctgaaaaggattctttttctagtgcactagatgagattgaagagctgtgtccaacaagcacatctaccgaggccgcaacagccgctacagactctgttaagggcacaagctccgaggcaggaacacagaagctcgatggcccacaggaaagccgggccgacgattctaagctcatggatagcctccccggcaactttgaaatcaccacgtcaactggattcttgaccgatctgacactggatgacatcctgttcgctgacatcgacacctcgatgtatgatttcgacccctgtacttcctcaagtggcactgcatcgaaaatggctccagtctcagctgatgatctattgaaaacactcgctccttatagcagccagccagtcacccctagtcaacctttcaagatggacctgaccgagctggatcacattatggaagtgttggtggggtcatag

SEQ ID NO: 23412 - DNA, 246 bp, synthetic construct
  source 1..246: mol_type = other DNA; note = Synthetic coding sequence
atgaagggcagccggatcgagctgggcgacgtgaccccccacaacataaagcagcttaagaggctgaaccaggttattttccccgtaagctataacgataaattttacaagaaattcggcttcgagatcattgagacaaagaagaattattataaacgcattgagccggccgatgctcacgtgctgcagaaaaatctaaaggtgcctagcggtcaaaatgccgatgtgcaaaagaccgacaactag

SEQ ID NO: 23413 - DNA, 1437 bp, synthetic construct
  source 1..1437: mol_type = other DNA; note = Synthetic coding sequence
atggccagcgccaccgaggaccccgtgctggagcggtacttcaaggggcacaaggcggctataaccagcctggatctctccccaaacgggaagcaactagccaccgcctcctgggacacattcttgatgctgtggaatttcaagcctcacgcgcgggcctaccggtacgtcggacataaggacgtggttacatcagtacagttttcaccacatgggaacctactcgcctctgcaagcagagatcgcaccgtccgattgtggatccccgacaaaaggggtaagttctccgaattcaaagcacatactgcacccgttagaagcgtcgacttctccgcagatggacagttcttggccacagcctctgaagacaagtcgatcaaggtctggagcatgtaccggcagagattcctgtacagtctataccggcatacccattgggttagatgtgccaagttttctccagatggcaggcttatcgtgtcttgctctgaggacaaaacaatcaagatctgggacactaccaataagcaatgcgttaataatttcagcgacagcgtaggatttgccaatttcgtggactttaatcctagtggaacttgtattgccagtgccggctctgatcagaccgttaaggtctgggacgtgagagtgaacaagctgttacaacactatcaggtgcactcgggcggggtgaactgtatctcctttcatccgagcgggaactacctgataactgctagtagcgatggcaccctcaagatcctggatttactcgaggggcgactgatatacaccctgcagggtcatacgggacctgtgtttaccgtctcatttagtaaagggggcgaactgttcgcctcgggaggcgccgatacccaggtcctgctatggcgtacaaactttgacgaactccactgtaaaggccttacaaagaggaatcttaagcgcctgcacttcgattctcccccacacctgctggatatctacccccgcactccacacccccacgaagagaaggtggagaccgtggagattaatccaaaactcgaagtgatcgacctacagataagtactcctccagtcatggacatcttgtcgttcgacagcaccaccaccaccgaaaccagcggccggaccttgcctgacaagggggaagaggcttgtgggtacttcctgaacccgtccttaatgtcaccggagtgtctgccaacaaccaccaagaaaaagactgaggacatgtctgacttgccgtgcgagagccaacgatctatcccattagccgtgacagacgccctggagcatatcatggaacagcttaacgttctgacgcaaaccgtgtccatcctggagcagaggctcactcttacagaagacaagttgaaagattgtctagagaaccagcaaaaactgttctccgctgtgcagcagaagagctag

SEQ ID NO: 23414 - DNA, 1263 bp, synthetic construct
  source 1..1263: mol_type = other DNA; note = Synthetic coding sequence
atgctgaaggccgtgatcctgatcggcggcccccagaagggcaccaggtttcgtcccctttcttttgaagtgcctaagccactgtttccagtggccggcgtgcccatgattcagcatcatattgaagcatgtgcacaagttccagggatgcaagaaatcctcctcatcggcttctaccagcccgacgagcctttgacgcagtttctcgaagccgctcagcaggaattcaacttaccagtcagataccttcaggagttcgctcctctgggtaccgggggcggactttaccatttccgcgaccagatccttgcaggatcacctgaggccttttttgtcctaaatgctgacgtttgttctgactttcccctctcggcaatgctggaagcgcatcgcaggcagcgacacccctttctgcttctcggtaccactgcaaacagaacgcaaagtttgaactacggatgcattgtggagaacccccagacgcatgaggtgctgcattatgtcgagaaaccgagcacattcatctccgatatcattaactgtggaatttatctcttttccccagaagctctgaaacccctaagagatgtctttcagcggaatcagcaggacggccagttggaagatagtcccggtctttggcctggggccggaacaattcgacttgagcaagatgtattttctgcactcgctggtcagggacagatctatgtgcatctgacagatggcatctggtctcagattaaatctgccggatctgccttgtacgcatcccgcctctacctgtcacggtatcaggatacgcaccccgaaaggcttgccaagcacaccccaggaggcccctggattagaggaaatgtctacatacacccaacggcgaaggtagcccccagcgctgttctgggccctaacgtgtcaatcggtaaaggcgtgacagtgggtgagggagtgagactccgggaatccatcgtactacatggcgcgacgcttcaggagcatacgtgcgtgttgcacagcatcgtcggttggggctccaccgttggccgctgggcacgggtggaagggaccccttcagacccgaaccccaatgacccccgcgcccgtatggactctgaaagcctgttcaaagatggaaaactactgcctgctataacaatcctgggatgtagagtgaggatccccgcagaagttctgattttgaactcaatcgtgctgccccacaaagaactgtcgagatccttcaccaaccaaatcattctatag

SEQ ID NO: 23415 - DNA, 1215 bp, synthetic construct
  source 1..1215: mol_type = other DNA; note = Synthetic coding sequence
atggaccaggactacgagcggcggctgctgcggcagatcgtgatccagaatgaaaacactatgcctagggttacagagatgagaaggacccttacccctgcaagcagtcccgtgagctcgcctagcaaacacggagataggttcatcccctcccgtgccggcgccaattggtctgtgaatttccaccgcataaacgagaacgagaaaagcccctcccagaatcgaaaagctaaggacgccacctccgacaatggaaaggatgggttggcttactcagctcttctcaagaacgaactcctgggcgccggcattgagaaagtgcaggacccacagacggaggaccgcaggctgcagccttcaactcctgagaagaaaggactgttcaccgttacacgactgtgcgatttgtctgtggagggtgatagcgtgactagcgtgggatggagtgaacgggggaatctggtagctgtagggacacacaaaggctttgtccagatttgggacgcggcggcggggaagaagttatctatgctcgaaggccatactgcccgcgtcggagctctggcctggaatgcagagcagcttagcagcggcagccgcgatcgaatgatcctacaaagggatattagaacacctccactccaatcagagaggaggctccagggacacaggcaggaagtgtgcgggctgaagtggagcactgaccaccagctgctcgcaagcggcggtaatgataataaactcctggtgtggaatcacagctccctgagccctgtccagcaatacactgagcacttggctgcagtgaaggcaatcgcatggtcaccacatcagcacggcctcctggcctctggcggaggcacagctgatagatgtatcagattctggaacacactcacggggcagcccctgcagtgtatcgacactggctcacaggtctgcaatctggcctggtctaagcatgctaatgagctcgtatcaacccacggctacagccagaatcaaatccttgtgtggaagtatccatctctgacccaagtagctaagcttactggtcactcctatagagtgctttacctagctatgtcccctgatggcgaagctattgtaactggcgcaggagatgagacactacggttctggaacgtgttcagcaagacccggagcacgaaggagtccgtttcagtactaaacttattcacacgcatccggtag

SEQ ID NO: 23416 - DNA, 5892 bp, synthetic construct
  source 1..5892: mol_type = other DNA; note = Synthetic coding sequence
atgaagcagcggaagggccagggcagcggcggcagccggggccggaaaaaacgaggcctcagtgatatcagtcctagcacaagtttaccccctctcgtggaaggacagcttaggtgcttcctcaagctgacggtgaatagagttatctggaagatagcgaagcccccgacttgcgttctggtacgagtgcggtggtggggagaaacctcggatggcacactgttttgtccccgtgatgctttgcagaccgagcccaaagcagtgcgcacgacgacgcgctacgccatacgctgtggaccaaaacaattcacttcttaccttaccgacatggcggtcctggtgctggaagtgatcacgaaactcgacggcctgccaataggccgcgtacagatcaatggactggcacagctttccccgactcaccagataaacggattcttcaccatcgtttcgagtacctctaaaaagttgggtgaattgcaggtatcattagccctggagccactttctgagacctatgactcttatcacccgctacctaccaccgacatgacagaaaacgtcctgctgagcaaacaggggttcagggagaataccgaacccagctctacacagtttcaggtgccgagccgtcctagagatattcacacgattaaaatcgatggtaaagaactggccgctaatagcagtcggagcaccactccaaggggtaaagaccatgtgtgttttgccgaaaaccctgacaccattaaagattccagctttggcttgcagcatagcctgaattccggacagagcctcgagtctgttaccctaaaaggacgggcgccacggaaacagatgtctctgctgaacagcagtgaattccagccacagataaggaccgttgccaagagtcattctgatagctgtatcctgtcttccaataacttacccactaaagaccttcttagtgccctattggagcagggcaacaaattgagaaatgcaatggtcatttccgccatgaaaagttcccccgagacatctatgctgcttgatcaggtgcatccccctatcaacgaggatagcttacgggccagcacccaaataagagccttctcccgaaaccgattcaaagaccacatagaagatcacctgctgccctctaccgagaatacattctggaggcatgacaccaaagccgacactagggctattcaactactcctgggctccgccgaactgtcccagggaaatttctgggacggcctgggatcacctcccgatagcccaagtcctgggtcagatgtctactgcatttctgagttgaatgacccacagtacgatcaaagcctgctggagaatctcttctacaccgcaccgaaatcagatacaagtatttctgattttctgtcggaagaagatgatatcgttcccagtaagaaaattagtcagtcgacagctttagctcgcagcagcaaagtccttgagtccagtgatcataagctgaaaaagagaagcgctggaaagaggaatcggaatctcgtggaacaacaaatgcttagcgaaacaccggaagacgcccagactatgaccctgtctgtcgacagactggctcttcttgggagaactcattccgtgcggattatcatcgagaccatgggtgtgcctcctgactccccacagatgacgccaggaaagaagtcatacgcaggacctcccccgaaggttacaaccgcaaaaaagaggacattttttgtggagtaccactttcctgtcggtttcagcgagtcaggcctagggaagacagccctgatcacggaggtcgtgaggttagcatcttcgaagatcactgacggcaaagtcaagttccagcaacgcttcgtttttcccgtgcagtttggcggccctatgatcgagcactggtggaattctaatctgactttccagatctatgtcaagaagacacctcagaaaaaaccagaagtgataggatccgtgagtctctccctgagagctgtgattcagtctgagctgctgagcttttctgaccagctgcccgttcaacaggagaacggccagtccccgttcggcccccttaaagtcacaatggagctgattaccgataacaaggacttcaccggaatcaatacaaagctgtcaggcaacactcactacactcctctgtgcgctccaacatccccaaataaggcactcccagaattaaaccaggatatgacttgtaccaaaaatcctcagaatctcaatcaaatccatgaagagacggccaaaaaggcccagaatttggtcctgcccaaccgaaaatccccctctcccgtggccccacacccgtctacgtttgtagcgacgcccgcctcacacaacctggtgaaccagacaaatgggaccacaaaggagagcgcactactccttcacgtgcttctgatggtccccgacggtaaagactttatcagcggggagtccgaaaaacagtccccgtgtaacgtgtatctgaactgtaaacttttcagcactgaggaagtcacaaggtcggtgatcgcctggggcactacccagcctgtatttaattttagtcaggtgatccccgtttcattgtcctcgaaatatctggagaggttgaagaacaatgtgatggtgattgagacatggaataaggtccggtcacccggccaggataagttactcggacttgtcaagttgccccttcatcagttctacatgagcttcaaagatgccaagatttccaggttgctcttggatgcccagtatcctgtggtcgccgtagatagttacatgccagtgatcgacgtgttcagcgggcatcagaacggctctcttagagtctttctagcgatgggctcctccaatcaaattatggctttacagcggcttaaaaacgaagaaggaaccctgccacccttttccccgaggcccgcgcactttctggatcagccaaccgccgctagtgtggcaatggcagaggacagaggcaatgggctgatggagcactgcttcgagatccacattgaaatggtgaagggcctcgctccattgcaagccacggtgtggggtgaagccgactgttatgtacagtattactttcccgttcagcacagccagtcctccgttctgaaaggacctgaattcctggaaaacgggatcacattgaagccctttcgaaccgcgactacgctctgcgtacccgacccaatcttcaactcagagcaccaccactccctgctgttgccagccgaagtgccggtgcaaagactgttgctgagcgcattcagcgcccagggcctcgtgcccgggggaggagtccagtttgaaatctggtgccggtattactaccccaatgtgagagaccaaaaagtcgccaagggtaccctgccgctgtcgagaatatgcgccatggttactacacagcaccgggaggacgtaggaatccagacgtttaacttacctctgacaccccggatcgagaaccggaaagagctgcgaaaccagagctctggcctgctcgacgtgggcttacgttaccgtcgaagcccccgcactgcagagggggtcctggctgcccgcactgtgagcatttcagtgcagatcattcgagcatgcggtctgcaggctgcggccaaagctctggcagaaagagagcctgcccttcagttcagcgctactgtcggtgtgaatgcatcagtcacgacgcatctgtcatttcttccccagggcgaacagcgcaggactcaccccgttgcttgctctttctgcccggaatttagtcatcatgtggaatttacatgtaatctggtcacacagcattgctccggcgaggcttgtttcctggctgaacttctggagtttgccgaggtcatttttgcagtctatcatgaaaatactaaatcagcttccgatataatctccatagagtcttgtaaggaatatctcctgggtgtggtgaaagtgcctacaaaagagctgttaatcaagcgttccggtatcacggggtggtatcctattatcctgcctgaagacggaggtctccctcacgggttggaactgatgcaaaaaatcgtcggcggactcgagctctccatctccttcactcatcggggtgaccgcgagcgagtactcgaggcagcagaacacttagggtggagtttcgaaaattcactaaaggacttcgtgaggatggatgagggcgagccagccaccgtgacaatatcaacccccagactgtggcttccaatccactgcgttcttttggcgggccacaatcacatccataaaaatacttactgctacttgcgctacaagttttacgaccatgaagccttctggacgcctctgaagaaaccaaaagagagcgtcaacaagaaacaaattatggttaccttcaaagcctccaaaagggcggaggtcaccaggggcccatccttgttatggtacttcagggaggagagactggaaattcaggtctggcgggcttatggtaatgatagcgtcgaaagaccccaccagactgactcctggataggatccgcatacgtagacttggccagactgggcgagcgttccgcccggactctcacggtttccggtgtgtacccactcttcggccgcaacgcgagcaacctgtcaggagcagccctgagggtgcatgtcgttctctcctccctcagcagccacctcgagcccacccacgagctcgatagtatggactgctctagccactccgagtcagagcaattaccccgtagaaatgatgaggtgcaattgagccctccagaagtgatctcctgtcaccagaagagtccggccagtacccaagtaccttgttcatctaccacagctgaagtgcgcctgactcaggagggccccgcagacctcgatggcacattcgctgtctccattctggttgagagggccatgcacctgagtctgaaagggtctcccctgaccgagagaaaggtgagcataccaagctgctgcgtctcttttgccaccgcagacgagagcagccccgtgtacacacaggttgtcgaaaacacggattctcccatttggaacttccagcagcagagcaggttgagcaaagagctcctgttggaccctcagcaaaccttggtgttcaaggtgtggcataagggcgacgaggagcgggtcataggttttgcaagtgtcgacctctcccccttgcttagcgggtttcaattcgtgtgcggatggtacaatattactgatttcagcggagaatgtcaaggtcagatcaaagtcgccgtctccccccttgagtccctcatccactttaaggaagagcgccaagcccgcaggggagttgaaacaagtaagagcctgatacctatatattctcctttttccttccccgcaagcgacacctacgcagcattttccagccacatggcccgccagactcttgaccagctggcccatgcgagttccaaggagctggacttcagtagccccggtcgcagcgacaccacgcgttcccaggcgtccagacatgaggaacatgttcagaacatcaggcggtttcacgaatcactgcacctgcagggtgaggccccccttccatgtgacgacaaactgacaacatcgcctctctcatctcagacatccatacttacctcgttgagaaaaaacctatctgagctggatcaaattcagaggtactttaggcagaagttaacaaagccgtttcttccattgtctccccagacccagacagcaatctcccagcatcaggagagctgtcgagaccatctgggacccggagcgagttcactagatcctggttcccagtgcattctagagaagtcatccaatctggtgttacaagtttcaagcctgattaccggttcatattag

SEQ ID NO: 23417 - DNA, 5586 bp, synthetic construct
  source 1..5586: mol_type = other DNA; note = Synthetic coding sequence
atgaagcagcggaagggccagggcagcggcggcagccggggccggaaaaagcgcgggctgtccgacattagtcctagtacttcacttccaccgctggtagagggccagctgcggtgtttcctcaaactcacggtcaaccgcgtgatctggaaaatagccaaacccccaacgtgcgtgctcgtgcgtgtgcgttggtggggagaaacgagcgacggcacgctcttctgcccaagagacgctctgcaaactgagcccaaggccgtgcggacaacgacccggtatgctatccggtgtggccccaagcaattcacctcctacttgacagacatggcagtcctggtcctggaggttatcacaaaactggacgggctccccatcgggcgcgtccagatcaacgggcttgcacagttatctccaacccaccagattaacggatttttcactattgtatccagcacaagcaagaagctcggtgagcttcaggtgtctttggccctggaaccgctgtctgaaacatatgactcgtaccaccccctgcccactacggacatgaccgagaacgtgctgctcagtaagcaagggtttcgcgaaaatactgagccttcgtcgactcaattccaggttccttcgagaccccgggatatccatactatcaaaatcgatgggaaagagctcgcagcgaattcctcacggagcacaactccccgcggcaaggaccacgtgtgcttcgctgaaaatcccgataccattaaagattctagctttggtcttcagcatagtcttaatagtggacagtctctggaaagcgtgacactgaaaggtcgggctccaagaaaacagatgagcctattgaatagttccgagtttcaaccccaaattcgtacggtggcaaaatcgcatagtgattcttgtatcttgtcttccaacaacctgccaactaaagacctgcttagtgctttgttggaacagggaaacaaacttcggaatgcaatggtgatttctgccatgaagagctcacctgagacaagtatgctgcttgatcaggtccatcccccaatcaacgaagacagcttgcgagcatctactcagatacgcgctttcagcagaaataggttcaaagatcacattgaggatcatctgctgccatccactgaaaacactttttggaggcatgacacaaaggctgacactagggccatccaactcctgttaggatccgccgaactgtctcagggtaacttttgggacggtctcggatcccctccagactcaccgtcccctggcagcgatgtctattgcatatctgaactgaacgatccccagtacgaccagtccctgctggaaaatctgttttacacagcaccaaaatccgacacttccatctccgatttcctctctgaggaagatgacattgttcccagcaaaaagatctcacagtctactgcactggcccgctcctctaaggtgttggaatcctccgaccacaagctcaaaaagcgcagcgctgggaaaaggaatcgcaatttagtcgaacagcagatgctcagtgaaacgcccgaggacgcccagacaatgaccctgtctgtcgacagactggctctgttaggaaggacacactcggtgagaatcatcatcgagaccatgggggtgcctccagactcgccgcagatgacccccgggaagaagagctatgcagggccccccccgaaggttaccacggccaagaaaaggacgttttttgttgagtaccacttccctgttggatttagcgaatcagggctgggcaaaacagccttgataaccgaggttgtgagattagcctcctccaagattacagatgggaaagttaagttccagcagagattcgtattcccggtgcaattcggaggccccatgatcgagcactggtggaattccaatcttacattccagatttacgtcaagaaaacccctcaaaaaaaacctgaagtgattggtagcgtatcgctatcgctgagagccgtgatacagtccgagttgctttccttttctgatcaactgccagtccagcaggagaatgggcagtcgcccttcggccccctgaaggtgactatggaactcataaccgataacaaggatttcactggcattaacaccaaactcagtggcaacacacattatactcccttgtgcgcccctacctctcccaacaaagctctgcctgaattgaaccaagatatgacctgcactaaaaacccccaaaatctgaatcagatacatgaggagacagccaaaaaggctcagaatctcgtgttaccaaatcgaaagtccccctcgcccgtggcacctcatccttccacattcgtagccactcccgcctcccataatctggtgaaccaaaccaacggcacaacaaaggaatccgcactgctgctgcacgtgctcctgatggtgcccgatgggaaagacttcataagtggggaatcagaaaaacaaagtccctgcaacgtctatttgaactgtaaactcttctcgacagaggaggtcactagaagcgtaattgcttggggcacgacacagcccgtcttcaacttttctcaagtcatacccgtttcgctgagttccaagtatctggagcgactcaagaataacgttatggttattgagacctggaacaaagtccgctccccagggcaggataaattgctcggtttagtcaagttacccctgcatcaattctacatgtctttcaaagatgcaaagattagcaggcttctgctcgacgctcagtatccagtggtggccgtcgattcctacatgccggtgatcgacgttttttcggggcaccagaatggttcattacgcgtgttcctggcgatgggaagctcaaatcagattatggctttgcagcgccttaagaacgaggaggggacacttcctcccttctccccccggccagcgcacttccttgaccagcctactgcggcatccgtggcgatggcagaagatagaggaaatggcctgatggagcattgcttcgaaatccatatcgaaatggtgaagggcttagccccccttcaagccactgtttggggcgaagctgactgctatgtgcagtactactttccagtgcagcatagccagagcagcgtacttaaggggccagagtttctggagaatggcatcaccttgaagccttttcgcactgcaacaactctctgcgttcccgatcccatcttcaactccgaacatcaccatagcctgctactaccagccgaggtaccagtgcagcggctccttctgagtgcattttccgcgcaaggcctcgttcccggcggcggggtgcagtttgagatctggtgccggtattattaccctaacgtgagggatcagaaggtggctaaagggaccctgcctctgtcacgcatctgcgccatggtgacaacccagcaccgcgaggacgttggtattcagacgtttaacctgcccctgacaccgcgcatcgaaaaccgcaaggagctgcgtaatcagtcttccggtctgttagatgttggcctacgctatcgtcgatcacccaggaccgccgagggtgtcttagccgcccgcaccgtcagtatctccgtgcagataatccgggcctgcgggctgcaagctgcagccaaggcattggccgaacgcgagccagccctacaattctccgctaccgtgggagtgaacgcctccgtgacaacccatctgtcatttctccctcagggcgaacagaggaggactcacccagttgcttgctctttctgccccgaattcagccatcatgtcgagtttacttgtaatcttgtgacacaacactgtagcggtgaagcctgctttctcgcggagctccttgaatttgctgaagtgatctttgccgtatatcacgaaaatacgaaatcggcttccgacattatcagtatcgagtcttgtaaggaatatctactgggcgtggtgaaggtgcccacgaaagaattgcttatcaaacgaagtggaataaccggctggtaccctatcattctacccgaagacggaggattgccccatggacttgaactaatgcaaaagatcgtgggcggactcgagcacctgggctggtcctttgaaaactcactcaaggattttgtccgaatggacgagggagaacctgcaactgtcaccatctccactccaagactgtggctgcctatccattgtgtgctgctagcgggacacaaccatatccacaaaaacacttattgctaccttaggtataaattttacgaccacgaagctttctggacccctttaaagaagcccaaggaatcggttaacaagaagcaaattatggtcacttttaaggccagtaagagggcagaggtgacgcggggcccttccctgttgtggtattttagggaagagcggctggagatccaggtgtggcgcgcctacggtaacgattctgtggagaggccacaccagacagattcctggatcggtagcgcctacgtcgatcttgcccggctcggcgagcgcagcgccagaacactgacagtttcgggagtctaccccttgttcggccgaaatgctagcaatcttagcggagctgccctgcgtgtgcatgtggtgctgtccagtctgagcagccaccttgaacctacccatgaacttgactccatggactgctcctcacactcagagtctgagcaactcccacggagaaatgatgaagtgcagcttagcccacccgaggtgataagttgtcatcagaaaagcccagcttcaacccaggtgccttgcagttctactaccgcggaagtcaggctgacgcaagagggtcccgctgacttagatggaacctttgctgtttctatcctggttgagagggctatgcacctgtctctgaagggcagcccactgacagagagaaaagtgtcaatccccagctgctgcgttagcttcgcgaccgctgacgagtccagtccagtgtacacacaagtggtcgaaaacacagattcaccgatatggaatttccaacagcagtctagactttcaaaagagcttcttctggatccgcagcagaccctggtgtttaaggtctggcacaaaggcgatgaggaacgagtgattggtttcgcgtccgtggaccttagcccccttctgtcaggcttccagttcgtgtgtggctggtataacataacggacttctccggcgaatgccaggggcaaataaaagttgctgtaagtccgttggagtcactcatccacttcaaagaggagaggcaggcgaggcggggagtggaaacgtccaaaagtctgatccctatctactctcctttttcattcccggcatccgacacatatgcggccttttctagtcatatggcacgccagactcttgatcaacttgcgcatgcgagtagcaaagagctcgattttagctctcctgggcgaagtgacactacccgtagccaagcaagtaggcatgaggagcatgttcagaacatacgccgtttccatgaaagcctgcacctacagggcgaggctccattaccttgcgatgacaagcttactacatcccccctgtcctcccaaacttag

SEQ ID NO: 23418 - DNA, 1131 bp, synthetic construct
  source 1..1131: mol_type = other DNA; note = Synthetic coding sequence
atgctgaccttcctgcagcagctgcgggtggactggcccgccgcctccgagagagccagttcccatacgctcaggagtcacgcactggaggaacttacatccgccaacgacggtcgaacactgagccccggcatcctggggagattatgtctgaaggagctagtggaggagcaggggcgaacggccgggtatgatcccaatctagacaattgcctcgtgacggaggacctgctgagcgtactagcggaattgcaagaagccctttggcactggccagaggatagccatcctggcctagccggcgcaagcgataccggtactggtggttgtttagtcgttcacgtggtgtcgtgcgaagaggagttccaacagcagaagctcgacctgctatggcagaaactcgtggacaaggcccccttacggcagaagcacctcatttgtggccccgtcaaggtggcgggagcaccaggtactctgatgacagccccagaatattacgagtttcggcacacacaggtgtgcaaagctagcgctctgaaacatggcggtgacctggcacaggatccggcatggacagaaatctttggtgtcttatcagtagccacaattaagttcgaaatgctgtccaccgcaccccaatctcagctcttcctcgccttggcggactcatctatatccactaaggggaccaagagcggtacctttgtcatgtataactgcgcccgcttggccacactgttcgagtcctacaaatgttcaatggagcagggcttgtatcctaccttcccccctgtttcttctcttgactttagtctcctgcacgatgagggagagtggctgctcctcttcaacagtatcctgccttttccagacctgcttagcaggaccgccgttttggattgcacagctcccggcctccacattgcagtccgcaccgagatgatctgtaagttcctcgtacagttgtccatggactttagctcctactacaatagagtccatattttaggggaacctaggcctcacttattcggccaaatgttcgtgcgtctgcagctcctgcgagcagtgcgtgaggtgctgcatacaggattggcaatgttagggctccctccactctctcacatctag

SEQ ID NO: 23419 - DNA, 1572 bp, synthetic construct
  source 1..1572: mol_type = other DNA; note = Synthetic coding sequence
atgaaccagccctgcaacagcatggagccccgggtgatggacgacgacatgctgaaattggcggtcggcgatcaaggtccacaagaggaggccggccagctcgccaagcaagagggtatcctgtttaaggatgtgctctctttgcagctggatttccgcaacatcctccgaattgataacctctggcagtttgaaaacctaagaaagttacagctcgataacaacattatagaaaaaatcgagggcctcgaaaacttggcccatctggtgtggttggacctgtcattcaacaacatcgagaccatcgagggtctggacactctggtgaatctggaggatctgagcttgttcaataaccggatttctaagatagactccctcgacgcgcttgtaaagctacaggtcctttcactcggtaacaatcgcattgataacatgatgaacatcatttacctgagacgatttaagtgcctgcgtacactctctcttagccgcaaccctatctctgaagcggaggactacaaaatgtttatctgtgcttacctgccggacttgatgtacctggactaccgccggatcgacgaccataccaagaaactggccgaagccaagcaccagtattctatagacgagctgaagcatcaggaaaacctcatgcaggcccagctggaagatgaacaggcacagagggaagagctggagaagcacaaaaccgcattcgtggagcacctcaacgggtccttcttattcgactccatgtatgccgaggatagcgaaggcaacaacctgtcatatttgcctggcgtaggcgagctgctggagacctataaagacaagtttgtcatcatctgcgtgaacatttttgagtatggcttgaagcagcaggagaagcggaagacagaattagacaccttttccgaatgtgtaagggaagctatccaggaaaaccaggaacaggggaagaggaagattgccaagttcgaagaaaagcatctgagttcattatccgcaatccgcgaggagttagagcttcccaacattgaaaaaatgatactcgagtgcagtgctgacatttccgagctttttgatgctcttatgacgcttgaaatgcaactggtggaacagcttgaggaaacaattaacatgtttgaacggaatatcgtcgatatggtcggtttgttcatagaaaacgttcagtctctgatggctcagtgcagggacttggagaaccaccatcacgagaaactgctagagatttccatctcaacactggagaagattgtggaaggtgacttggacgaggatctcccaaatgatttgcgcgccctctttgttgataaggacacgatagtgaacgccgtaggagcttctcatgatatacacctgttaaaaatcgacaaccgcgaagatgaactggtaaccagaatcaacagttggtgcactagattgatcgaccgcatacacaaggatgaaattatgcgaaatagaaagagagtcaaggaaataaatcagtacattgaccacatgcagtccgaattggataatctggagtgcggggatattttggattag

SEQ ID NO: 23420 - DNA, 1680 bp, synthetic construct
  source 1..1680: mol_type = other DNA; note = Synthetic coding sequence
atgaaggtgatcacctgcgagatcgcctggcacaacaaggagcccgtgtatagcctggactttcaacacggaactgctgggcggattcatcgcctggcttcagccggtgtcgatactaacgtccgtatttggaaggtggaaaaaggaccagatgggaaagccatcgtcgagttcttgtccaacctggccagacataccaaggctgtgaatgtggtccgtttctctccaacaggagaaattctggcctccggcggcgacgacgccgtcatcctgctgtggaaggtgaatgacaacaaagaaccagagcagatagcctttcaagacgaggatgaggcacagctgaataaagagaattggaccgtcgtgaagacattgaggggccacttagaagatgtatacgatatctgctgggcgactgacggaaatctcatggccagcgcctcggtagataataccgccatcatctgggatgtaagtaagggacagaagatctccatattcaacgagcataaatcgtatgtgcagggcgtgacctgggaccccctgggacagtacgttgcgaccctgtcctgtgacagggtgctgcgggtctactcaatacagaaaaagcgcgtggcgtttaacgtgtcaaagatgttatcagggatcggcgcagagggggaagctagaagttaccgcatgtttcatgacgactccatgaaatctttcttccgacgcttatcttttactcctgacggatccctgctgctgacacccgccggctgcgtggaatccggagagaacgttatgaatacaacctatgtattctcacgaaagaacctcaagagaccgatcgctcatctgccatgccctggtaaggcgacattagctgtccggtgctgccccgtgtacttcgaactgcgcccggtggtggaaacaggtgtcgagctgatgagtctgccctatcggttggtattcgcagtagccagcgaagactctgtgttactgtacgacacacagcagtccttcccctttgggtatgtttccaatattcactaccatacactttcagacatctcttggtcctccgacggagcatttctagccattagcagcactgacggttattgtagctttgtaaccttcgaaaaggacgaacttggtatcccccttaaggaaaaacctgtgctgaatatgcgaacacctgacaccgcaaaaaagacgaagtcccagacacatcgaggttcgtccccaggcccccgtccagtggaggggactccagcctctagaacccaggacccgtctagcccaggcaccacaccaccacaagctaggcaggcccccgcccccactgtgatccgggacccacctagcatcacccccgcagtgaagtcccctctgcccggtccttcggaggaaaagactctgcagccttcatcgcaaaacacaaaggcgcatccatccagaagagtgaccctcaacacgttgcaggcttggtctaaaactactccaaggcggatcaatctcacccctctgaaaaccgacactccaccaagtagtgttcctaccagcgtgatttccacacctagcactgaggagatccagtctgagacccccggtgatgcccagggcagtcctcctgagctgaagcgccccagactagatgagaacaagggggggaccgaatccttggatccttag

SEQ ID NO: 23421 - DNA, 1527 bp, synthetic construct
  source 1..1527: mol_type = other DNA; note = Synthetic coding sequence
atggccgacggccaggtggccgagctgctgctgcggcggctggaggcttccgacggtggactcgattccgccgagttagctgctgaactgggtatggagcaccaggcggttgttggggcagtcaaatcgctgcaggctctgggcgaggtgatcgaagccgagctacgctctacaaaacattgggaacttacagccgagggcgaggaaatcgctagggagggctcgcatgaggcacgtgtattccgttccattccccccgagggactggcgcagtcggagctgatgaggttaccttctggcaaagttggattttccaaagcaatgtcaaataagtggatacgggtggacaagagcgctgcagacggcccacgcgtgtttagagttgtcgactcaatggaggatgaggtccagcgaaggctccagctcgtgagggggggccaggccgaaaagcttggagagaaggagagatctgagctccgtaaacggaaactgcttgcagaagttaccttgaagacatactgggtgtcaaaaggatccgcatttagtacctccatcagcaagcaggagactgaactgtccccggagatgatctctagcggctcctggagggatcggccctttaagccctataactttttagcccacggagtactgccagactcagggcatctccatcccctgttgaaggtgagaagccagtttcgccaaatcttcctggaaatggggtttacagaaatgcctacggataacttcatagagagttctttctggaacttcgacgccttatttcagcctcagcagcacccagcaagagatcagcacgacaccttttttctgagagatccagcagaggctctccagctcccaatggactacgtgcaacgcgtgaagaggactcattctcagggcggttacgggagtcaaggttacaagtataattggaagctcgatgaggcacgcaagaatctcctccggacccataccaccagcgcgagtgccagggccctttacagactggcacagaaaaaaccctttacccccgtgaagtactttagtatcgaccgggtctttaggaatgagactctggatgctacgcacctggctgaatttcaccagatcgagggggtcgtggcggaccacgggttgacactaggtcatcttatgggcgttcttagagaatttttcactaaactggggattacacaactacggtttaagccagcctacaatccttataccgagccttccatggaagtcttctcctaccatcagggattgaaaaaatgggtggaagtgggaaactccggagtcttccgccctgaaatgctgctgccaatgggactgcccgaaaacgtttcggtcattgcgtggggactgtcgctggaacgtccaactatgatcaaatacgggatcaacaacatccgcgagctggtggggcacaaggtcaacttacaaatggtgtacgactcgcccctgtgcagattggacgcagaacctcgccccccacctacccaagaagctgcctag

SEQ ID NO: 23422 - DNA, 1203 bp, synthetic construct
  source 1..1203: mol_type = other DNA; note = Synthetic coding sequence
atgagcagccccctggccagcctgagcaagacccggaaggtgcccctgccaagcgaacctatgaaccctggcagaagagggatccggatttacggcgatgaagacgaagtggacatgctttccgatgggtgtgggtcagaggagaagattagcgtgccctcatgttacggcggtatcggtgcgcctgtgtcaagacagggagacagtctggcccctcctgaggtcgattttgatcgtctcctggctagccttcaggacctaagcgagctcgtcgtagagggtgacacccaggtcaccccagtgccaggcggagctagattgcgcactctggagcctattcccttgaagctatatcgcaacggtattatgatgtttgatggccccttccagcccttttacgatccaagcactcaaagatgtttgagagacattctcgacggctttttcccttccgaattacagagactctacccaaacggcgttcctttcaaagtgagcgatctacgcaaccaggtgtacctcgaggatggtttggacccttttcccggcgagggccgagtggttggacgacaactgatgcacaaggcactggaccgggttgaagaacacccagggtcccggatgactgctgaaaaattcctcaataggttacctaagtttgtgattcggcagggggaggtcatcgacatccgaggacccatccgggatacactgcagaactgttgccccctgcctgcgcggattcaggaaatagtcgtggaaaccccgacacttgcagctgagagagagcggagccaggaatctcccaacactcctgcacctcctctatctatgcttcggatcaagtccgagaatggcgagcaggcatttttgcttatgatgcagcctgacaacactattggtgatgtcagagctcttctggcccaagccagagtgatggacgcgtccgccttcgagatcttctcaacatttcctcccactttgtatcaggacgataccctcactctgcaagccgcgggtctcgttccaaaggccgcccttttgcttcgcgccaggcgcgcccccaagagcagtctgaagttcagcccaggaccctgtccaggaccgggccccgggccatcacctgggccaggaccaggacctagcccaggaccagggcccggaccctctccctgccctggaccgtctcccagtccacagtag

SEQ ID NO: 23423 - DNA, 1350 bp, synthetic construct
  source 1..1350: mol_type = other DNA; note = Synthetic coding sequence
atggccagcgccctgcggcccccccgggtgcccaagcccaagggcgtactcccctcacactattacgaaagttttctggaaaagaagggtccgtgtgatcgggattacaagaaattttgggccggtctgcagggtctgaccatatacttttacaacagcaaccgggacttccaacatgtcgaaaaactgaacttgggtgctttcgaaaagctgacggacgagattccatggggaagctcccgtgatccaggcacacatttctctctcatcctgcgggaccaagagatcaaatttaaagtggagacacttgagtgccgggagatgtggaaggggttcattctcaccgtcgtggagttgagagtgccaacagacctaacactgctgccgggccacttatatatgatgtcggaggtgctggcaaaggaggaagcgcgccgcgctctggaaacgccctcctgtttcctgaaggtgtcacggcttgaagcccagcttcttctcgagaggtatcctgaatgcggaaatttgctcctgaggccttccggagacggcgccgatggcgtcagtgtaacaacacgacagatgcataacggtacacatgtcgtccggcattacaaggtaaagcgagaaggaccgaagtatgtaatcgacgtggaacagccatttagctgcacttcactggacgctgtggtcaattacttcgtgagtcacacaaagaaggccttggtcccatttcttctggatgaagattacgagaaggtactggggtacgtcgaagctgataaagaaaatggtgaaaacgtctgggttgccccgtccgcaccgggccccgggccagctccctgcaccggaggcccaaagcctctgtctcctgcctcctcacaagataagctacccccattgcccccactcccaaaccaggaagagaactacgtgacccccattggagacggccccgcagttgactacgaaaaccaggacgtggccagctcctcttggccagtaatcctcaaacctaagaagctccctaaacctcccgcaaaactgcccaaaccgccagtcggcccaaaaccagttgaaaagggctttcaccatgtggcacaggcaggcctcgagctattaacaagttctgatcctcctactagcgcttctcaaagtgccggtatcacgggcgtctcccaccacacatggccgcatctgtcctctctccctgaacctaaagtttttaatggtggactggggaggaaacttccggtgtcgtctgcccagcctctctttccaacggccggcctggctgatatgactgccgaattgcagaagaagcttgagaaaaggcgggcgctcgaacactag

SEQ ID NO: 23424 - DNA, 1239 bp, synthetic construct
  source 1..1239: mol_type = other DNA; note = Synthetic coding sequence
atggaccccatccggagcttctgcggcaagctgcggagcctggccagtacattggattgtgaaacagcgagactgcagagggctctggacggagaggagtccgatttcgaagattaccccatgaggatcttgtacgacctacacagcgaggtgcagacactgaaggatgacgttaacatccttctggataaagcccggctggaaaaccaggaagggatcgactttatcaaggctaccaaagttttgatggagaaaaacagcatggacatcatgaaaatccgggaatacttccagaaatacggatattcaccccgcgtgaagaagaattctgtacacgaacaagaggcaatcaattcagacccagagttgagcaactgcgaaaatttccagaagacagatgtgaaagatgacctgagcgatccccccgtggcttcaagctgtatctccgagaaatccccccgttcacctcagctcagcgacttcggcctcgagagatacatcgtcagccaggtgctgccaaaccctccccaggccgtgaacaactacaaggaagagccggttattgtcactcctcccaccaagcagagcctcgttaaggtccttaaaacgccaaagtgtgcgctgaagatggacgacttcgagtgcgtaacacctaaacttgaacatttcgggatttccgagtataccatgtgcttgaacgaagattataccatgggactcaagaatgcccggaataacaagagtgaggaggcgatcgatactgagagccgtctgaatgataatgtcttcgcaaccccttctcccatcatccagcaactggagaaatctgacgccgaatataccaattccccactggtaccgacgttctgcactccaggtctgaagatcccatctacaaaaaatagtatcgcactagtgtccacgaactatcccctctcaaaaacgaacagctcctctaatgatttggaggtggaagaccgtacctcactggtccttaattccgatacttgttttgaaaatctgactgacccttccagccccaccatctcaagttacgaaaatctgttaaggacgcctacgcctcctgaggtgactaaaattccggaagacatcctacagttgctctctaagtataattctaacctagcgactcctatcgccatcaaggcagtgccaccttctaaacgcttcctcaaacacggccaaaacattagagatgttagtaacaaggaaaactag

SEQ ID NO: 23425 - DNA, 2583 bp, synthetic construct
  source 1..2583: mol_type = other DNA; note = Synthetic coding sequence
atgaccgagggcaccaagaagaccagcaagaagttcaagttcttcaaatttaaaggcttcggttccctgtcaaatctgccacggagcttcacactacggaggtcttctgcctctatcagccgccagagccacctggaacccgacacattcgaagccacacaggatgatatggtaacggtccccaagtcacctcctgcctacgcccgatccagcgatatgtattcccatatggggaccatgccacggcccagcatcaagaaagcacagaatagccaggccgctcggcaagcacaggaggccggtcctaagcccaatctagtgcctggtggcgtccctgacccacccggactagaggccgctaaggaagtgatggtcaaggccacaggcccactggaggatacccccgccatggagcctaacccgtctgcagttgaagtcgatccaatccgtaagcctgaagtgcccacaggagatgtagaagaagagcggcctcccagagatgtgcatagtgagcgtgcagctggagagccagaagctggctcagattacgtgaagtttagtaaagagaaatacatcctggactcttcacctgaaaagctgcacaaggagcttgaggaggagctcaagctcagctccaccgacctgaggtcacatgcctggtatcatggtcggataccccgtgaggtaagcgaaaccctagtgcagcggaacggcgatttcctgatcagagattcccttacaagcttaggcgattacgtgctcacttgccggtggaggaaccaagccctccacttcaaaattaacaaggttgtggtgaaggcgggagagagttatacacacattcagtatctctttgaacaagaatcatttgaccatgtccccgcactggtacgataccacgtggggagtcgcaaggctgtgtctgagcagagcggcgctatcatttattgcccagtgaaccggaccttcccgctccgctacctggaggcttcttacgggctgggacagggcagttcgaagcctgctagcccagtatctccctcaggccctaaaggctctcatatgaagagacggagcgtaacaatgactgatggtctgactgctgacaaggtgaccaggtcggacggatgtccaaccagcacatcgctgccacgtcccagggacagcatcaggtcctgtgctctgtcgatggaccagatcccggacttgcactcaccaatgagccctatctctgaaagtccttcatcacccgcctacagcactgttacacgcgtgcacgccgctcctgccgcaccttctgcaaccgccctgccagcttctcccgtggcccgacgtagctctgagcctcagctgtgcccagggagcgccccaaagacacacggagaaagcgacaaggggcctcacacaagccctagtcacactctgggaaaagccagtccatctccctctctgagctcctatagcgacccggacagcggtcactactgtcagttgcagccgcccgtccggggatcccgagagtgggcagccaccgagacttcaagccagcaggcaaggtcttatggggagagactgaaggagctttcagaaaatggagcacctgagggagattggggaaagacatttaccgtcccaatagtcgaagtgacctcatcttttaatcctgctacttttcagtctctgctcattccacgggacaatcggcccctggaggttggcctgttgagaaaggtcaaagagctacttgctgaggtggacgctagaaccctcgccaggcatgtgactaaggttgactgtctggtggcccggattttgggagtgactaaagagatgcagactctgatgggagtgcgctgggggatggagcttctgactctgcctcacggccgtcagctcagactcgacttattggagcgctttcataccatgagcatcatgttggccgtcgatatcctcggttgcaccggttcagccgaggagcgcgccgcactgctgcataaaaccattcagctagccgcagaactcagggggacgatgggcaacatgttctcctttgccgctgtgatgggggcattagatatggcacaaatcagcagacttgagcaaacatgggtgacattgagacagagacacacagagggcgctattctctatgagaagaaactcaagccatttcttaaatccctcaatgaaggaaaggagggcccacccctgtctaataccactttcccacatgtccttcccctgataaccctgctcgaatgcgactctgctccacctgagggcccagaaccctggggttcaactgaacacggtgtagaggtggtgctggcccacctggaagcggccagaactgtcgctcaccatggcggcctttatcatactaacgcggaagttaagctgcagggattccaggccagacctgagcttttagaagtcttttccaccgagtttcagatgcgtctactgtggggctcccagggtgcatcatcatctcaggctcggaggtacgaaaagtttgataaagtgctcaccgccctttctcacaagcttgaacccgcggtgagatcctctgagctgtag

SEQ ID NO: 23426 - DNA, 573 bp, synthetic construct
  source 1..573: mol_type = other DNA; note = Synthetic coding sequence
atgaccgtgccctggcggcccggcaagcggcggatcacctacaaggaggaagaggacctaacccttcagccaaggcctgccagcagtgcacctgagagcctggtggggctgcaagagggcaaatcaactgaacagggcaaccatgatcagctaaaagaactttatagtgctgggaacctgacagtgcttgctactgacccgctgttgcaccaggaccctgtccagcttgacttccacttcaggcttacatcgcagacgagcgcacactggcatgggctgttgtgcgatcgtaggttgttccttgacataccttatcaggctcttgaccaagggaatcgggaatctctgaccgccacactggaatacgtcgaagagaaaactaatgtggattctgtcttcgtgaatttccagaacgaccgcaatgatcgaggggccctccttcgcgcgttttcctacatggggtttgaggtagtgcgccccgaccatccggcattgcccccactggataatgttatcttcatggtctatccacttgagcgcgacgtgggtcacctgccctctgaacctccctag

SEQ ID NO: 23427 - DNA, 1527 bp, synthetic construct
  source 1..1527: mol_type = other DNA; note = Synthetic coding sequence
atggccaccgactggctgggcagcatcgtgagcatcaactgcggcgattcactgggagtctaccagggccgggtgagcgcagtggaccaggtgtcccaaaccatttctctcacacgtccattccataatggagtcaagtgcctggtgcccgaagtgacgttcagggccggagatattactgaactcaagattttagagatcccaggacctggagacaatcagcatttcggcgacctccaccaaaccgagctagggccgagcggtgcggggtgtcaggtggggatcaatcaaaacggaaccgggaaattcgtgaagaagcccgccagtagctctagcgctccccaaaacatcccaaaacgtacagatgtgaagagccaggacgtcgcagtgtcaccccagcagcaacagtgctcaaagtcttatgtggaccggcacatggagtcactctcccagtccaagagttttcggagaagacacaatagctggagttcaagctctcggcaccccaaccaggctacacccaagaagagcgggctcaagaatggccagatgaagaataaagatgacgagtgctttggcgacgacatagaagagattccagatacagactttgacttcgaaggcaacttggcgttgttcgataaggccgccgttttcgaagaaatcgatacctacgagaggagatctgggacacgatcaaggggaatacctaatgagcggccaaccagatacagacatgacgagaacatactcgagtccgagcctatcgtgtatcgacggatcattgtaccccataacgtcagcaaagaattttgcacagattctggcttagtcgttccttcaatcagctacgagcttcacaaaaagctgctgtccgtggctgaaaaacacggactcaccctcgaaagacggctcgagatgactggagtgtgcgccagccagatggcacttacgctcctcgggggcccaaatcgcttaaatcctaaaaatgtgcatcagcggcccaccgtggcactcctctgtggcccccacgtcaaaggcgctcaaggcatcagctgcgggcgacacttggccaatcacgacgttcaggtcatcttattcctcccaaattttgtgaagatgctggagagtataaccaatgagctctcccttttctccaagacacagggccaacaggtttcttccctgaaagatcttccgacaagcccagtcgaccttgtgatcaattgcctagattgcccagaaaacgtttttttgcgtgaccagccgtggtataaggcagcagtggcctgggccaaccagaatcgtgcccccgttctatccattgatccaccagtgcatgaggtcgagcaaggcattgacgccaagtggagtctcgcgctgggattgccactgccactgggagagcacgccgggagaatttacctttgcgatatcggcattccccagcaggtctttcaggaggtgggcatcaattatcactcccccttcggatgcaagtttgtgatacccctacactccgcatag

SEQ ID NO: 23428 - DNA, 1158 bp, synthetic construct
  source 1..1158: mol_type = other DNA; note = Synthetic coding sequence
atgggccggtggtgccagaccgtggcccggggccagcggccccggacctctgccccttcccgcgcaggagctctcctattgctgctcctgttgctcaggagcgctggatgctggggagcaggggaggcccctggcgctctaagtactgccgatccagccgaccaaagtgtacagtgcgtgcctaaagcaacctgcccttcctctcgaccacggctgttgtggcagacaccaacaacacaaactcttccatccaccactatggagactcaatttcccgtgtccgaaggcaaagtcgatccttatcgctcttgcgggtttagctacgaacaggatccaacccttcgggatccagaagcggtggcccgtcggtggccttggatggtcagcgtgcgagcaaacgggacccacatttgtgcaggcacaattattgcgtcacagtgggtgctgactgtggcccactgcctgatttggcgagatgtgatttactcggtgcgcgtgggatctccctggatcgaccagatgactcaaactgcctctgacgtgcccgtcttgcaggttattatgcattcaaggtaccgggcccagaggttttggtcttgggttggacaggctaacgacatcggtctcctcaagctcaagcaggaactgaaatattctaactacgttagacctatctgcttgcctggtaccgactacgtactcaaagatcactcacgatgcactgttacgggctggggattaagcaaggcggacgggatgtggcctcagttcaggaccatccaagagaaagaggtcatcattttgaataataaggaatgcgataacttctaccataactttacaaagatccctacgttagtgcagatcataaagtcacaaatgatgtgcgccgaagatacccatagggagaaattttgctatgagttgacaggcgagcctctggtgtgctctatggaggggacatggtacttggttggtctggtgtcttggggggccgggtgccagaagtccgaagctccaccaatatatctgcaagtctcctcatatcagcactggatctgggattgcctgaacggacaggcactcgcactgcctgccccatcacgcactctgttactggcactgcctctccctttgagcctgctggccgcattgtag

SEQ ID NO: 23429 - DNA, 750 bp, synthetic construct
  source 1..750: mol_type = other DNA; note = Synthetic coding sequence
atggtggaccggctggccaacagcgaggccaacacccggcggatcagcatcgtcgagaactgttttggcgccgccggtcagccgttgacaatccctggcagggttctgattggggaaggagtgttaaccaagctgtgcagaaagaagcctaaggctaggcagtttttcttattcaacgacatcctggtttacgggaatattgtgatccagaaaaaaaaatacaacaaacaacatatcattccactggaaaatgtgaccatagactcgattaaggatgaaggtgatcttagaaatggctggctgattaaaactccaactaaaagctttgcagtttacgcggctacagccaccgagaaatccgagtggatgaaccacattaacaagtgcgtaactgatctactgagcaagtccgggaagactccgagcaatgagcacgccgctgtctgggtcccagacagcgaagcaacggtgtgcatgcgctgccagaaggcaaaattcactccagtcaacagacgccaccattgccgaaagtgcggttttgttgtgtgtggcccctgctccgaaaaacggttcctactaccttcccagagctctaagcccgtgagaatctgtgacttttgctacgatttgctctccgctggcgatatggcaacatgtcaacccgcccgatccgactcttactcccaatccttgaagtctcccctgaacgatatgtcggacgatgatgatgatgatgactcctccgattag

SEQ ID NO: 23430 - DNA, 2745 bp, synthetic construct
  source 1..2745: mol_type = other DNA; note = Synthetic coding sequence
atgggcgacagccgggacctgtgcccccacctggacagcatcggcgaggtgacgaaggaggatctcttactgaaaagcaaaggaacgtgtcagagttgcggcgtgactggccctaacctgtgggcatgtctgcaggtcgcctgcccatatgtcggctgtggcgaaagtttcgccgaccattcaaccatacacgcgcaagctaaaaagcacaacctaaccgtgaatctgacaaccttcaggctgtggtgttacgcgtgtgagaaggaggtgttcttggagcagcgtctggcagctccccttctgggtagttccagtaaattcagcgagcaagacagtccacctcctagtcaccctctcaaagccgtccccatcgccgttgcggacgagggtgaatcggagagcgaggacgatgatctaaagcctcgtggcctcactggtatgaaaaacctcggcaactcatgctatatgaacgctgcattacaggccctgtccaactgtcccccactgactcagttcttcctggaatgcggcggcttggtgcgtacagataagaaacctgccttgtgtaagagctatcagaagttggtcagcgaagtttggcacaagaaacggcctagctacgtggttccaacatctttgagtcatggcattaaattagtgaatcccatgtttagggggtatgctcaacaagatactcaggaatttctgcgttgtctgatggaccagttacacgaagagctcaaggaacctgtcgtcgccaccgtagctttgaccgaggcacgtgattccgactcttccgataccgacgaaaagagggaaggtgatcggtcaccatcagaggatgagttcctgagctgtgactcctcatccgacaggggcgagggagacggacaggggagaggcggagggtccagtcaggccgagaccgaattactcatacccgatgaggctgggagggccataagcgaaaaggaacgaatgaaagataggaagttttcatggggacagcaacggaccaatagcgaacaggtggacgaagatgccgacgttgacactgcgatggcagcgctggacgaccagcctgcggaggcgcaacctccttcccctaggtcttctagcccctgccgaactcctgagcctgataacgacgcccacctgaggtcgtcatcccggccctgcagccccgtacatcatcacgaaggacatgccaaactgtcatcttctccacccagggcgtcaccagtgcggatggcaccaagctacgtgttgaaaaaggcccaggttttgagtgccggatcccgccggaggaaggaacagcggtacagatccgtgatatctgacatctttgatggcagtatcctctctttagtgcagtgcctgacatgtgatagagtttccaccactgtcgaaaccttccaggatttgtcacttcctatcccagggaaagaagaccttgccaagctgcacagtgcaatttaccaaaacgtcccagctaaacctggagcatgtggtgactcctacgcggcccagggctggctggccttcatcgtagagtatatcaggcgtttcgtcgtctcttgtacccccagctggttttggggcccagttgttaccctggaagactgtctagctgccttttttgctgccgacgaacttaagggagataacatgtattcttgcgaacggtgtaaaaagctgcggaacggcgtgaagtactgtaaggttctgagactgcctgaaatcttgtgtattcacctgaaaaggtttagacatgaagtgatgtactccttcaagatcaactcccatgtgagcttccccctcgaaggtttagacctgaggcccttcctcgcaaaggaatgcactagccagatcactacgtacgaccttctgtctgttatttgtcaccatggcacggctggatcgggccactacatagcctattgccagaatgttatcaatggacagtggtacgaattcgatgatcagtatgtgacagaggtgcatgagacagtggtgcaaaatgcagaaggctacgtgcttttctatcgaaagagcagcgaggaggccatgagggagaggcaacaggtggttagtcttgccgccatgcgggagccctcgttactgagattctacgtgtctcgcgaatggttgaacaagtttaacacattcgccgagccagggcccattactaatcagaccttcctgtgcagccacggaggaattcccccccataagtaccactatattgacgaccttgtggttatcctaccacaaaacgtatgggagcacttgtataatcgattcggtggagggcctgcagtgaatcatctatatgtctgctccatttgtcaggttgagatcgaggcccttgctaagcgccgccgaatcgagatagacacctttattaaactcaacaaggcctttcaggctgaggagtctcccggtgtcatttattgcatttctatgcaatggtttagggaatgggaagctttcgtgaagggaaaggacaatgagccgcccgggccaattgacaattctcgcatagcgcaggtgaagggcagcggccacgttcagctgaagcagggcgctgattatggccagattagcgaagaaacgtggacataccttaattcgctgtatggaggtggccccgaaattgctattcgtcagtctgtggcccaacccctgggcccagagaacctgcacggcgagcagaagatagaggccgagaccagggcggtctag

SEQ ID NO: 23431 - DNA, 1341 bp, synthetic construct
  source 1..1341: mol_type = other DNA; note = Synthetic coding sequence
atgcgggccgcccggcggggcctgcactgcgccggcgccgagcggccccgcagaagaggtcgtctgtgggacagtagtggagtgccccagagacagaaacggccaggcccatggagaacccagactcaggagcagatgagccgagacgtatgcatccacacgtggccatgcacttactatctcgaacctaaacgtcggtgggtgacaggacagctatcattgactagcctcagtttgagattcatgaccgactctacaggggagattttagtgtcatttccactgtcatccattgtggagattaagaaagaggcctcccatttcatcttctccagcataactatcctggaaaagggacacgccaagcattggttttcctcactgagaccgtctaggaacgtggtgtttagtattatcgagcacttttggcgagagttgctgctctcacagcctggagccgtagccgatgcaagcgtcccacggacacggggagaggagctgactggccttatggccggctctcagaagcggctggaggacacggcacgggtgctccatcaccaggggcagcagctggatagtgtgatgagaggcctggataagatggagtccgatcttgaggtagcagaccggttgctgaccgaacttgagagccccgcatggtggccctttagtagtaaactctggaaaacccctcccgagactaagccacgcgaggacgtgtccatgacgtcttgtgagccctttggaaaagagggcatcctgattaaaattccagctgtgataagtcaccggacggagtctcatgtgaagccgggtcggctgaccgtgttagtgtccggccttgaaatccatgacagttcgagtctgctgatgcatcgcttcgaaagggaagacgttgatgatatcaaggtgcactctccttacgagatatcaatacgacaaaggttcattggcaaaccggatatggcatatcgactcatctccgccaagatgcctgaggttattcctatacttgaagtgcagttttccaagaagatggaactgctggaagacgccctcgttttaagatctgccaggacttcatcgccagcagagaaatcctgctcagtgtggcatgctgctagtggcctgatgggtagaaccttacatcgggagccgcctgctggcgatcaggaaggcactgctctgcacctccagacctccctccccgctttgtcagaagcagatacacaggagcttactcaggggttccgccccatgtcgctgtccacacagacagttctagtcatgctatgtagcgaaagcgccggcgccctatggcggcagcggttatcctag

SEQ ID NO: 23432 - DNA, 1896 bp, synthetic construct
  source 1..1896: mol_type = other DNA; note = Synthetic coding sequence
atggccatcgtgcagaccctgcccgtgcccctggagcccgcccccgaggcagcaactgcccctcaagctcccgtgatgggctcagtgtcgtctctgatatccggcagaccctgtcccggcgggccagcccctcccagacaccatggccctccaggacccacttttttccgccaacaggacggactgctgcgaggcggatatgaagcacaagagcccctgtgtccagccgtgcctcccagaaaagcggtgcctgtgacctccttcacgtatattaacgaagatttccgcacagagagcccccccagtcccagtagcgatgtagaggacgcccgggagcagcgggcacataatgcacatttgcgaggcccgccgccaaagctgatcccagtgagtggcaagctggagaagaatatggagaagattctgatacgccctaccgcattcaagccagtactcccgaaaccacgcggcgcaccctctctgccgtcattcatgggacctagggccacaggattgagcgggagtcagggatcattaacacagctgtttggcgggccagcatctagctcttcgtctagttcaagtagctctgctgcggataagcctctcgctttttccggttgggccagtggctgcccatcaggaaccctcagtgattctgggcgtaattctctgtcatcccttccaacctacagcacaggcggagcggagccaacgacgtcttcgcctggtggacatctgcccagccatggatcaggcaggggcgctctgcccgggcccgctcggggagtgcccacaggaccaagccactctgactccggcagatcctcttccagcaagtctacaggctcactggggggccgcgtggctggaggcctgctgggctctggcacacgcgcctcaccagattcaagctcttgtggcgaacgtagccctccgcctccaccacctccaccatcagacgaggccttgttacattgtgtgctggaaggcaagttgagggacagggaggcagaactccagcagctcagggatagcctggatgagaacgaggccaccatgtgtcaggcttacgaggaaagacagagacattggcaaagagagcgcgaggccctgcgcgaagactgcgctgctcaggcccagcgggctcagcgcgctcagcaattgctgcagcttcaggtctttcagttacagcaggaaaagaggcagctgcaggacgacttcgcccagctcctccaggagcgggagcagttagaacggcggtgtgccacacttgaaagagagcagcgagagctggggccaaggctggaggaaacgaagtgggaagtgtgtcagaaaagcggcgaaatttccctgctgaaacagcagctgaaggaaagccaagctgagcttgtacaaaaagggtccgagttagtagcactgagggttgccctccgcgaggcccgggccacattgagagtgtccgagggccgcgcacgcggcctacaggaagctgcaagagcccgtgagctggagcttgaagcctgttctcaggagctgcaacggcatcgccaggaagctgaacaactgcgagagaaggccgggcagctcgatgcagaggccgccggcctgagagagcctcctgtccctccagcgacagccgacccctttttgctcgctgagtctgatgaagctagtgccactgcgaatccggtgcacaggcgctttcagcccacaccggcaaggggtgcggggaaaaagaagggactgccgcccctgcacataccacctgatcctaaagcaagagaatcccagatggctccagcggcgcccgatgtgcccgctcacatcggtgggcaggggagagcctgggcgagattccctggactgtcttccgccgcaagtttattagaatag

SEQ ID NO: 23433 - DNA, 1473 bp, synthetic construct
  source 1..1473: mol_type = other DNA; note = Synthetic coding sequence
atgaacggcgccctggaccacagcgaccagcccgaccccgacgccatcaagatgttcgtcgggcagatcccccgctcttggagtgaaaaggagttaaaagagctttttgagccctatggagccgtctatcaaatcaacgttcttagggatcgcagccagaatccacctcagagcaaggggtgctgttttgtgacattttacacaaggaaagctgcgctggaagcccagaacgctttgcacaacataaagaccttgcctggcatgcaccatcctatccagatgaagcctgcggatagtgagaagtccaacgcagtggaagaccgaaaactgttcattggcatggtctccaagaagtgtaatgagaatgatattcgggttatgtttagccctttcggacagattgaggaatgcagaattttaagaggacccgacggactgtcacgcggatgcgccttcgtgacgtttagtacaagagccatggctcagaacgcaattaaggctatgcatcagagccagactatggagggatgttctagccctatcgtcgtaaagtttgctgacactcaaaaggacaaagagcaacgcagactccagcagcaactagcccagcaaatgcagcagctgaacaccgcaacctgggggaacctgacagggctcggtgggctgacccctcagtatctcgctttactgcagcaggccacctcctcatcgaacttgggggccttttctggcattcagcagatggccggcatgaatgctctccaattacagaatcttgctaccttggctgcagccgccgctgcggcccagaccagtgcaacatccacgaacgcaaaccccctgtcaacaaccagctcagccctgggggccttgaccagcccagtcgcagccagcactcccaactctactgctggagccgctatgaactctctcacttctctgggaactctccaagggttggcgggggctacagtagggctcaataacatcaatgccttggccgtggcccagatgttaagcgggatggcagccttaaacgggggcctgggtgctaccgggctaactaacgggaccgccggaaccatggatgccctcactcaggcttatagcggcatccaacagtacgcggccgcagccctcccaactctgtattcacagtcacttttacagcaacagagtgcagccggcagtcagaaggagggtcccgaaggagctaatcttttcatctatcaccttccccaagaattcggggatcaggacattcttcagatgttcatgcctttcggaaacgtcattagcgcaaaggtttttatcgacaaacagactaaccttagcaaatgttttggtttcgtgtcctacgataatcccgtttctgctcaagccgcgatccaagctatgaatggtttccagatcggcatgaagcgcttgaaggtacagctcaaacggagcaagaacgatagcaaaccttattag

SEQ ID NO: 23434 - DNA, 627 bp, synthetic construct
  source 1..627: mol_type = other DNA; note = Synthetic coding sequence
atggccgccagcgtggagcagcgggagggcaccatccaggtgcagggacaggcactgtttttccgcgaagccctccccggctcagggcaggctcgattcagcgtgttgcttctgcatggaatccgtttcagtagtgaaacttggcagaatctcggcaccctgcacaggcttgcccaggccggctaccgcgcagttgccatcgatctgcccggactgaagggggagcctcccgcccaggagcccttgttgtcacagagtcgggcatcatttctcgctgccgttgttgacgccctggagctaggaccacccgtcgttatctccccgtcattaagtggcatgtatagtctgcccttccttaccgcgcctggaagtcagctcccgggcttcgtgcccgtggctccaatttgcaccgacaagattaatgccgcaaattatgcttctgtcaaaaccccagcactgattgtctacggagaccaggacccaatggggcagactagcttcgagcatttgaagcaacttcctaaccaccgggtgctcattatgaagggagctgggcacccctgttatctagataaacctgaggaatggcataccggcctgctggatttcctgcaaggtctccaatag

SEQ ID NO: 23435 - DNA, 546 bp, synthetic construct
  source 1..546: mol_type = other DNA; note = Synthetic coding sequence
atggagagccggagcgtggcccaggccggcgtgcagtggtgcgacctgggctcgttgcaaccaccaccccctggatttaagcagttttcttatttttcccttcaatcttcttgggactaccgttacgttccaccctgcccagctaacttcgtgttccttgtagagatgggatttttacacgtggaccaggcaggattgaagttgttaacgagtggcatcgacttcgccactagaaagattgccaagcttcttaagccccaaaaggtgatagaacagaacggggattcatttaccattcacaccaattcatcattgcggaattacttcgttaagttcaaagtcggggaagaattcgatgaagacaaccgcggcctggacaatcgcaagtgtaaatcgctggtcatttgggataacgacagattaacatgcattcagaagggagagaagaaaaatcggggttggacgcattggatcgaaggagataagctccacttggagatgttttgcgagggtcaggtctgtaaacagacctttcaaagggcctag

SEQ ID NO: 23436 - DNA, 1647 bp, synthetic construct
  source 1..1647: mol_type = other DNA; note = Synthetic coding sequence
atgagcgccagcctgaactacaagagcttcagcaaggagcagcagaccatggataacctcgagaaacagttaatttgcccgatttgtctcgagatgttcacaaagcccgtggtgattctaccctgtcaacacaatctgtgcagaaaatgcgccagtgacatatttcaagccagcaacccttacctgccgacaagaggaggtacaacgatggcctccggtggacggtttcggtgtccctcatgcaggcacgaggtcgtgctggaccggcacggagtctatgggctgcagagaaacttactggtggagaatatcatcgatatttacaagcaggaatccacgagaccagaaaagaaaagtgaccagccaatgtgcgaggaacatgaagaagaaaggatcaatatttattgccttaattgtgaagtgcctacctgctccttatgcaaagtgttcggagcccacaaggactgccaggttgctccactgacccacgtgtttcagaggcagaaatcagaactgtctgacggcattgccattctggtgggcagcaacgaccgcgtgcagggggttattagtcagttggaagatacatgcaaaactattgaggaatgttgcagaaaacaaaagcaagagctgtgtgagaagtttgactacttatacggtatactggaggagagaaagaacgagatgacgcaggtaatcactaggacccaggaagagaagctcgaacatgtccgcgctcttatcaagaagtattccgatcacttggagaacgtttcgaaactggttgaaagcgggatccagtttatggacgaaccagagatggcggtatttcttcagaacgctaagaccctcctgaaaaagatctccgaagcgagcaaagcgttccaaatggagaaaatcgagcatggatacgagaatatgaaccactttaccgtgaacttgaaccgggaggagaagatcattcgcgaaattgacttctatcgtgaagacgaggatgaggaggaagaggagggcggcgagggggagaaggagggggaaggagaagtaggcggtgaggcagtcgaggttgaggaggtggagaatgtacaaaccgaatttcccggggaggatgagaacccggaaaaagcgtcagaactttcccaggtagagttgcaggcagctcccggggcactgcccgtcagctctcccgagcccccacctgcgctcccccctgctgctgacgcccccgtgactcagggagaagtggtgcctacaggctcagaacagacaaccgaaagcgagacaccggtccccgcggccgccgagacagcggatcccctgttctatcccagctggtacaagggccagacaaggaaagctactaccaaccccccatgtaccccggggtcagaggggctcgggcagatcggtcctccgggtagtgaggattccaatgtgcggaaggccgaggtagcagccgcagccgcatccgagagagctgctgtgagtggaaaggaaacttccgctccggcggctacttcgcaaatcggattcgaagctccacccttgcaagggcaggccgccgcccccgcaagtggatccggtgcagatagtgagcctgcacggcacatattctccttttcgtggctgaactccctgaacgagtag

SEQ ID NO: 23437 - DNA, 1374 bp, synthetic construct
  source 1..1374: mol_type = other DNA; note = Synthetic coding sequence
atgttccccaagttcagcctgcggagcatgttccacggcgccggcggagggaatgacattcagtggtgtttttcccaggtcaagggggcggttgatgacgatgtggctgaagctgacatcatctccacagtggagtttaaccactcaggggagctcctggcaacaggcgacaagggagggcgggtagttatattccagcaggaacaagagaataagatccagagccactcccggggcgaatacaatgtctacagtacatttcagagtcatgagcccgaatttgattacctaaagtccctggagatagaagaaaaaataaataaaatccgctggctcccgcaaaaaaatgcagcacaatttctcttgtctacgaacgacaagaccatcaagctatggaagatttccgagagagacaagcgaccggagggatacaatctcaaggaagaagatgggaggtatagggatcccaccacggtcacgaccctacgagtgcctgttttccgcccaatggatctgatggtcgaggcatccccccggaggattttcgcaaacgcccatacataccacattaatagcatttccattaattccgactacgaaacgtacctctctgccgatgacttacgaatcaacttgtggcacttggagattaccgataggtccttcaacatcgtcgacatcaaacctgccaacatggaggaacttaccgaggtgatcacagccgccgagtttcaccccaattcctgcaacacgttcgtgtactctagctcgaaggggactattagactgtgcgacatgagggcctcagccctttgcgatcggcattcaaaattgttcgaggagcccgaagatccctcaaatcggtccttcttttctgagattatctcttctatctcagatgtcaaattcagtcactcaggccgctacatgatgacgcgagattatttgtctgtgaagatttgggacctcaatatggaaaatcgtccagtggagacttatcaggtgcacgagtatctacggtcaaagctttgctctctttacgagaacgattgtatcttcgataaattcgaatgttgctggaacggctccgattcagttgttatgactggttcatacaacaattttttccgtatgttcgaccggaacacaaaacgcgatatcaccctggaagcatccagggagaataataagcctcggactgtcttgaagcctcggaaggtgtgcgcctccggcaaacgaaaaaaagatgagatctcagttgactccttggatttcaataaaaaaatcttgcacactgcatggcaccccaaggaaaatataattgctgtggcgaccactaataacctgtacatctttcaggataaggtgaactag

SEQ ID NO: 23438 - DNA, 738 bp, synthetic construct
  source 1..738: mol_type = other DNA; note = Synthetic coding sequence
atggccggcctggagctgctgagcgaccagggctaccgggtggacgggagaagagccggcgaattgagaaagatccaggcccgcatgggggtgtttgctcaggctgatgggtccgcttacatcgaacagggtaacacaaaggcacttgctgtggtgtatggcccccacgaaattcgcggctcgcgcgcacgggcgttgcctgacagggcgctggtgaactgtcagtactcaagtgctaccttctccacaggcgaacgcaagaggcgaccacacggtgatcgcaagagttgtgaaatgggcctgcagctgaggcagacattcgaggcggctatactcacacagctacatcccaggtcccagattgacatctatgtgcaagtgctgcaagccgatggcggcacttacgcagcatgcgttaacgctgcaaccctcgctgtgctggacgcggggataccgatgagagatttcgtgtgtgcctgtagcgcggggtttgtggatggcaccgcactagccgatctgtcccacgtcgaagaagcagctgggggtccccagctcgctttagccctgctgcccgctagcggccagattgccctgttggaaatggacgctagacttcacgaggaccacttggaaagggtcttagaagccgctgctcaggcagctcgggacgtgcacacccttttagacagggtggtacggcagcacgttcgtgaagcctcaatcttgctcggagactag

SEQ ID NO: 23439 - DNA, 2631 bp, synthetic construct
  source 1..2631: mol_type = other DNA; note = Synthetic coding sequence
atgatggccgacggcgccgccgccggcgccggcggcagccccagcttgcgtgaactgagagctagaatggtcgctgctgctaacgaaattgccaaggaaagaagaaaacaggacgtggtgaacagagtggcaactcatagttcaaacatcagatccactttcaagccagtgatcgacggaagtatgctgaagaatgacatcaaacagcggctggcccgagaaagacgggaggagaagaggagacagcaggacgcgaacaaagagacccaactcctagaaaaagagcggaagactaaattgcagtatgagaaacagatggaggagcggcaaaggaagctgaaggagagaaaggagaaggaggaacaaaggagaatcgctgctgaggagaaacgccatcagaaggacgaggctcaaaaagagaagtttactgctattttatacagaacgttggaaaggagacgactggctgatgattaccagcagaaacggtggagctgggggggttccgcaatggcgaactccgagagcaaaacagctaacaaacgctccgcaagcacggagaaactcgaacagggaacatccgctctgatacgccagatgcccctctcttccgctggcctgcagaatagcgtggccaaaagaaagaccgataaggagaggagtagctcgttaaaccgccgcgattccaacctgcactccagtacagacaaggagcaggctgagcgcaaaccccgcgtcactggagtcacaaattatgtgatgcaatacgtgacggttccgctgcgtaagtgtacaagcgacgagctgcgtgctgtgatgttcccgatgtctacaatgaaaatccctcctcagaccaaggtagaagaatcccctcttgagaaggttgagacgcctcctaaagcctctgtggatgcaccacctcaggttaacgtggaggtcttttgcaacactagtatggaggcttcccccaaagcaggtgtgggaatggccccagaggtaagcaccgatagcttccctgtggtgagcgtggacgtctcccctgtggtcagcacatacgactctgagatgagtatggatgcctctccagagttaagtatcgaggctcttcctaaggtcgatttggagaccgtgcccaaagtgagtatagtggccagccctgaggctagcttggaggctcctccagaagtcagccttgaggcacttccagaagtatccgtggaggccgcgccagaggggtccctcgaggctcctcccaagggaagcgcagaagtagccccaaaggagagtgtaaaaggatcccccaaggaatctatggaggcgtctcctgaagcgatggtgaaggcgtctccaaagacatcactggaggcatcaatggaggcatccccaaaggccaaggcccgggatgctccaaaaaagagcgagatggataagcaggctttgatcccaatagctaagaagcggctttcctcctacaccgagtgttacaaatggtcttccagcccagagaacgcttgtggcttgccctcccccatatctaccaatagacaaatacaaaaaaactgcccgccctctcccctgccccttatctctaagcagagtcctcagaccagctttccctacaagatcatgccgatccagcataccctgtccgttcagtccgccagctctactgttaagaagaagaaggaaacagtatcaaaaactactaatcgctgtgaagctttgagccagaggcacatgatttacgaagagtctggcaataaaagcaccgccggaattatgaatgccgaggccgccactaagatactgacagagcttagacgcctcgcgcgggaacagcgtgagaaggaggaggaggagcgacaaagggaggaaatgcaacagcgtgtaattaaaaaaagcaaagacatggccaaggaggccgttggcgggcaggccgaggaccacctgaagctgaaagatgggcagcaacaaaacgagactaagaaaaagaaaggatggcttgatcaggaggaccaagaagccccactgcagaaaggtgatgcaaagataaaagcccaggaagaggccgacaagcgcaagaaggagcacgagcggattatgttacagaatctgcaggagagattggagaggaagaaacgaatcgaagaaatcatgaagagaacccggaaaactgatgtgaatgcaagcaaggttacggagacgtcttctcacgatatatacgaagaagccgaggctgataacgaagagtccgacaaagactcgctgaatgagatgtttccaagcgccatcctgaacggcaccgggtctcctactaaatttaagatgcctttcaataatgcaaagaagatgacacacaagctggtgtttcttgaagacggtacatcgcaggtccgaaaagagcctaaaacatactttaatggcgacctgaaaaattttcgacaaaagagcatgaaggatacttcaattcaagaggtggttagccgcccatcctctaagaggatgacctcccataccactaaaacacggaaggccgatgaaacaaatacaacaagccggagttctgcccagactaaatcggagggatttcatgacatactcccaaaatcctccgacaccttccgccagtag

SEQ ID NO: 23440 - DNA, 6291 bp, synthetic construct
  source 1..6291: mol_type = other DNA; note = Synthetic coding sequence
atgtgcagcacccccggcatgcccgcccccggcgccagcctggccttgagagtgtcgttcgtggatgtgcatcctgatgtgattccagtacagctttggggactggtgggcgagaggaggggggaatatcttcgcttatccagagaaatccaggaagccgctgctacccgcggacagtgggccctgggcagcgcctcagcatctccgggagagctctgcctggttcaagtgggactgctgtggcacaggtgtcgggttgtgtctcggcaggcccaggagagtagggtttttctactcgacgaaggtcgcaccattaccgctggcgccggctcactggccccgggcagaagagaattttttaatctgccaagcgaggtgttgggatgcgtgttggcaggcctcgtcccggccgggtgcggtgctgggagtggggagcctccgcagcattggcctgccgacgccgtggacttcctgtctaatctgcagggtaaagaagttcatggctgtgtcttagacgtcctcttacttcaccgcctcgtgctgcttgaagtacctgacgtctttcagcagatgcgagaactgggactggcccggcgcgtccccgattctctgtttaggagcctgctggaaagatacctaacagcagccactgccagtgtgggcagtggcgttccagtgcttagcagagttcccctgaaacagaagcagcccggcctggattacttctacccacagttgcagctgggggtgaccgaggctgttgtgatcacccaagtgtgccatccccatagaatccattgtcagttacgctccgtgtcacaggagatccacaggttgagcgagtctatggctcaagtgtatcgcggatccacggggacaggagacgagaactccacatcagccacctgggaagagagagaggaatctcctgacaaacctgggtccccttgtgcaagctgtggactggatggccactggtatagagcgctgctcctcgaaacttttaggccccaaagatgcgcccaggtgctgcacgttgattatggtcggaaagaactggtatcttgcagcagcctgcgatatctgctgcccgaatacttccgcatgcctgtggtaacctatccgtgcgccctctacggtctttgggacggagggagagggtggtctagatctcaggtgggagatctgaaaaccttaatactgggaaaggccgtgaatgcgaaaattgagttctattgttcattcgagcatgtttactacgtgtctctgtacggcgaggatgggatcaatctcaatcgcgtgtttggagttcagtcttgctgtcttgccgatagggtgctccagtcacaggctaccgaagaagaggaaccagagacctcccagtcacagtcaccagccgaagaggtggacgaagagatcagcctgccagccttaagaagtattcggctgaagatgaatgcattttacgacgcccaggtcgaattcgtaaagaatccatcagagttttggatccgcctccgaaagcacaacgtcaccttttcaaagctgatgaggaggatgtgtggattttattcatctgcatcaaaactggatggtgtggtcctcaaacccgagcccgacgatctgtgctgcgtgaagtggaaggagaacggatattaccgggcaattgtcaccaaactggatgacaaaagtgtggatgtcttcctggtcgatcgtggaaattctgagaacgtggactggtacgacgtccggatgcttttgccacagttcaggcagctgcccatactcgccgtaaaatgcactctcgccgacatctggccactggggaagacctggagccaagaggcagttagttttttcaagaaaacagttctgcacaaggagttggttattcacatacttgacaaacaggatcaccaatacgtaatcgagatcctcgacgaaagcagaacaggggaggagaatatttcaaaggtgattgcccaggccggctacgctaaatatcaagaatttgagaccaaggagaacatcctggtgaacgcccatagtcccggacacgtgtccaatcatttcactaccgagtcgaataagatcccatttgccaagaccggcgaaggggagcagaaggccaagcgggaaaataaaaccacaagtgtgagcaaagctctgtccgacaccactgtggtcactaacggtagcacagagctggttgtccaggagaaagtcaagagagccagcgtgtacttcccactgatgcagaattgccttgagataaagcctggttcatcttcaaagggggagttagaggtggggagtacagtggaagtgagagtgtcatacgtagagaaccctggctatttctggtgtcagttaacacggaatatacagggcctcaaaactcttatgtcagacattcagtactactgtaagaacactgccgccccccaccagagaaacaccctggcctgtctggcaaagcggaccgtgaatcgtcagtggtctcgggctttgatatccggtattcaatcagtcgaacacgttaatgtgacctttgtcgattacggcgaccgtgagatggtttccgtgaagaacatctattctatatccgaggagtttctgaaagtgaaagcacaggcctttcgctgcagcctctacaacctcatccagccggtgggacagaacccttttgtgtgggatgttaaggcaatacaggcctttaacgagtttattgacaacgcttggcagaagaacctggagctgaaatgcaccatcttcgccttggccagtatcaacgaagaactttttaatattgtggacctgctcacacctttccagagcgcttgccacttcctcgtggagaagcgtttggcccgaccggtgaaactgcagaaaccattggaatcctctgtccagctgcacagctacttttactccacacacgacatgaagatcggaagcgaagagcttgtttatatcactcacatcgatgacccttggactttctactgccagttggctagaaatgctaacatcctggagcagctgagctgttcgattacacagctgtcgaaagttctgcttaacctcaagacaagtcctctcaatcccgggaccttgtgcctcgctaagtatactgacggcaactggtatcgcggcattgtgatcgagaaggaaccaaaaaaggttttctttgtggatttcggaaacatttacgttgtgaccagtgatgatctgctgcccattccatcagatgcctatgacgtcttactgctgccgatgcaggccgtccgctgctccctttctgacatcccagaccatattcccgaggaggttgtggtgtggtttcaggaaacaatccttgacaaaagtctaaaagcactggtggttgccaaggaccccgatggaaccttgatcattgaactgtacggggataatatccagataagcgcgagtatcaacaaaaagttgggcctgctctcctataaagatcgaatcaggaaaaaggaatccgaagtgttgtgctccacaaccgaaacactggaagaaaagaatgaaaatatgaagctcccttgtacagagtacttatctaagtccgtggggtacaagcttcccaacaaagagattctggaggagtcctacaaaccgcagatcaacagctcttataaggagttgaagttacttcaaagtcttactaaaacgaacctagttactcagtatcaggatagcgtcggaaataagaactcccaagttttcccactcactactgaaaaaaaggaggagatctctgcggagacccctttgaaaaccgctagagtcgaggcaacattgagtgagcggaagatcggcgactcctgcgacaaggatctgccgcttaagttctgcgaattccctcagaaaaccataatgcccgggttcaaaacgactgtctatgtgagtcatatcaacgacttgtcggacttttatgtgcagcttattgaggatgaagcggagattagccacctgtctgaaagactgaattccgtaaagacccgtcctgagtactatgtggggccgcccctacagagaggggatatgatttgcgccgtgttccctgaagacaatctgtggtatagagccgtgattaaagaacagcagcccaacgacctgctgtccgtgcagttcatagattatggcaacgtcagtgtcgttcataccaacaaaatcgggaggttggatctggtgaacgcaattctgcccggactgtgtatacactgtagcctccagggcttcgaggtccctgataataagaatagtaaaaagatgatgcattacttctcacagcggacctccgaagccgccattaggtgtgagttcgtgaagttccaggataggtgggaggtaatactggccgatgagcacgggatcatagctgacgacatgattagcaggtatgccctcagcgagaaatcacaggtcgagctgtccacacaggtaattaaatccgcttcttctaagagcgtgaacaaatccgatattgatacctcagtgttccttaattggtacaacccagagaaaaaaatgataagggcctacgccacagtcattgacggccccgagtatttttggtgccagtttgccgacaccgagaaattgcaatgtctcgaggtggaggtccagactgccggggaacaggtggctgaccgccggaattgcatcccttgtccatatatcggcgatccctgcatagtcagatacagggaggatggacattattaccgagctctcatcacaaacatatgtgaggattacctcgtttctgtcaggctcgtggatttcggcaatattgaagattgtgttgaccctaaggctttgtgggctatcccctccgagctgctttctgtgccaatgcaggcgtttccttgctgtctctcaggctttaatatatccgagggcctttgttcccaggagggcaatgactacttctatgaaattatcacagaagacgtactggaaattacgattttagagattagacgtgacgtttgcgacattcccctggctatcgtggacctgaaatccaaggggaagtctatcaacgagaagatggagaaatattctaagacaggtatcaaatctgcgctcccatacgagaacatagattctgaaattaaacagaccctgggctcatacaacttagacgtcgggctgaagaagctatcaaataaggctgtccagaacaagatctacatggagcagcagacagacgaactggcagaaattacagagaaagatgtgaacataatcggtaccaagcccagtaatttcagagatccaaagacggataacatttgcgaagggttcgagaatccctgcaaggataagatagatactgaagaactggagggtgagctcgaatgtcacctagttgataaggctgagtttgatgataagtatcttattacaggtttcaacacacttctgccacacgctaatgagaccaaagagattctggaacttaactctctcgaggttcccctttcccccgacgacgaatccaaggagtttctcgagctcgagtcaatcgaacttcagaactctcttgtggtagatgaggaaaagggtgagctgtcacctgtccctcccaatgtacccttgagccaggaatgcgtcacgaagggggctatggagctctttacactgcagctgcctctgtcctgcgaagccgagaagcagcccgaacttgaattgccgaccgcgcagctgcctctcgacgataagatggaccctctcagtcttggcgtgtcccagaaagcccaggaatctatgtgtacggaggacatgaggaagtcaagctgtgtggaaagttttgacgatcagaggcgcatgtctctgcacctgcacggagcagactgtgaccccaaaacgcagaatgaaatgaatatctgcgaggaggaatttgtggaatacaagaatagagacgcaatctcagccttgatgcccttgttctccgaagaggaaagctcagacgggtccaagcataataatggcttacccgatcacataagcgctcagctgcagaatacctatactctcaaagcttttacggtgggtagtaagtgcgtggtttggtctagtttaagaaacacctggtcaaagtgcgaaatcctagagacagccgaggagggcacccgcgtgttaaacctttctaatggaatggaggaaatcgtcaatcctgagaatgtatggaacggcatccctaaacttgacaagagcccacccgagaagcgaggactcgaggtgatggaaatctag

SEQ ID NO: 23441 - DNA, 690 bp, synthetic construct
  source 1..690: mol_type = other DNA; note = Synthetic coding sequence
atgggcaagagctgcaaggtggtggtgtgcggccaggccagcgtgggcaagacaagcattctggagcagctgctgtacggaaatcatgtagttggaagtgagatgatagaaactcaagaggatatctacgtgggatctatcgagactgatcggggtgtgcgtgagcaggttcgcttctatgacacccgcggactgagagatggcgcagagttgccccggcactgcttctcttgcaccgatggatatgtattggtgtacagcaccgattcccgcgaatcgttccaaagagtggagctgttgaagaaagaaatcgataagtctaaagacaagaaggaagggctcacgttgccaccacgattagagtgtagcggcatgataaccgcacactgctcactcaatctcccccggttgcggtggtcttcttgcctctccccacttcttagactacaggtcaccatcgtcgtgctcggaaataagtgtgatcttcaagaacagcggcgcgtggaccccgatgtggcccagcactgggctaagagcgagaaagtgaagctatgggaagtaagtgttgctgacaggcgatcattgctcgagcccttcgtgtacctggccagtaagatgacacagccccagagtaaaagtgcatttcccttgagtcggaagaataagggatctggctcattggatggttag

SEQ ID NO: 23442 - DNA, 2412 bp, synthetic construct
  source 1..2412: mol_type = other DNA; note = Synthetic coding sequence
atggagagcggcccccgggccgagctgggcgccggcgccccccccgccgtcgtggcccggacgccacctgaaccacggcctagtccggagggggatccaagtcctcctcctccacccatgagtgccctggtgcctgatacaccacctgacacccctccagctatgaagaacgcgacaagctctaaacagttacctctggagcccgagtctcctagcgggcaggtgggaccacgccctgccccaccgcaggaggaatctccgagctccgaggcaaagagtagagggccgacaccacctgctatgggtcctcgtgacgctaggcctcctcggcgttcttcccagcccagccccacagcggtccccgcctctgatagtcctcctaccaaacaagaggtgaagaaggccggcgagcgacataagttggccaaagagagaagagaggagcgggctaaatatctggctgccaaaaaagctgtctggttggaaaaggaagaaaaagccaaagccctgagagaaaagcagctccaagagaggcgcagaaggctggaggagcaaagactgaaagcagaacagagaagggccgcgcttgaggagcggcaaaggcagaaattagagaaaaataaagagagatatgaggctgccattcagcgcagcgtgaagaaaacatgggcagagattaggcagcagcgctggtcatgggccggtgctctgcaccactcctctcccgggcataagacaaatcggtctctgcaactatctgcctgggaaagttccatcgtcgatcgcctgatgaccccaacactcagcttcctggcccgctctagaagtgccgtaaccctgcctagaaatggtcgcgaccagggccgaggatgtgaccccgggaggggccctacctggggacgagccggtgcgagccttgcccgagggccacagcccgacaggactcacccctcagcagccgtgcctgtttgtcctaggagcgctagcgcgtcacccctgaccccatgttccgtcacccgaagcgtgcaccgatgcgcgcctgcgggagagaggggcgagagacgtaaaccaaatgccggagggtcgcctgctcctgtacgccggcgcccagaggcttcaccggttcagaagaaggaaaaaaaagacaaagaaagagagaatgagaaagagaaaagcgcgttggcaagagaaaggtcactaaagaagcgacagtccttgcccgcttcgccaagagcaaggctgtccgcttcaactgcaagcgagctttcccctaagagcaaggctcggcccagctctccttcaacctcctggcatcgccccgcgagtccttgtccaagccccgggccggggcacactctgcctccgaagcctccaagcccgagaggcacgactgcctccccaaagggcagagtgcgccggaaggaagaggccaaggaaagcccgtcggccgcagggccagaggataagtcacagagtaagagaagggcctctaatgaaaaggaaagtgccgcacctgcctcacctgctccatccccggccccctctccaacacccgccccccctcagaaagaacaaccccccgccgagacaccaaccgacgcagcagtgcttacctcaccacctgcccctgccccacccgtgacaccatcgaaacccatggctggcactactgatcgggaggaggcaactaggctgttggcagagaaaagaaggcaggctcgagagcagcgtgagagagaggaacaggaaaggaggctgcaggccgagcgggacaaaaggatgcgcgaggagcagttggcaagagaggcagaggcaagagccgagcgcgaggctgaggctagacgtcgcgaggagcaggaagcaagggagaaagcccaggccgaacaggaagaacaggaacgactccaaaagcagaaggaagaggccgaggcccgcagccgggaggaagctgagagacagcggttggagcgggaaaagcatttccagcagcaggagcaagagcgccaagaacgcaggaagagactcgaggaaattatgaaacggaccaggaaatccgaagtatctgagactaaaaaacaggacagtaaggaggccaacgcgaatggctcgtctcctgagcctgtgaaggctgttgaggctcgtagtcctgggctacagaaagaggcggttcagaaagaagaacccattccacaggaaccacagtggtcgttaccatccaaggaactcccggctagcctcgttaacggccttcagcctctgcccgcccatcaagagaatggattttccaccaatggaccctctggcgacaaatcattgtcgcgaacacccgaaactctcctcccattcgctgaggctgaggcctttttgaaaaaggctgtggtgcagtctccccaggttaccgaggtgctctag

SEQ ID NO: 23443 - DNA, 1125 bp, synthetic construct
  source 1..1125: mol_type = other DNA; note = Synthetic coding sequence
atgcgggcccccatgctgcagaagcagcaggccccccggatggacacccccccgcctgaggagcgcttagaaaagcaaaacgaaaaactgaacaatcaggaggaagagactgagttcaaggagttagacgggctgagggaggcccttgccaacctaagggggctttcagaagaggaaaggtccgaaaaggccatgctgcgatcccgcatcgaggaacaatctcagctcatttgtatcctcaaaagacgcagcgacgaggcactcgaacggtgtcaaatcctggagctgctgaacgctgagctggaggaaaaaatgatgcaggaggctgagaaactgaaagctcagggtgagtactccaggaaactggaagagcgcttcatgaccctcgctgcgaaccacgagctcatgctccgatttaaggacgagtacaagtccgaaaacataaagctgcgcgaagagaacgagaagctgcggttggaaaactctagcctgtttagccaggccctaaaggatgaagaggccaaagttctgcaactcacggttaggtgtgaagctctgaccggagagttggaaacacttaaagaaagatgcgcccaagacgcttgccaggcgcaggctcgcgagaaggaactactggaattgcaaagccaacaggcttgcacacataccaaagagacggaacagttgagatctcagctccaaactctgaagcagcaacaccagcaggcagttgaacaaattgcaaaagccgaggaaacccactcatcccttagtcaagagctccaagcaaggttacaaactgtaactagggagaaagaggaacttctacagctcagcatcgagcggggcaaggtgcttcagaacaagcaggcagagatatgtcaactggaagaaaagctggagatagcaaatgaagaccgaaaacatgctcttgaaaggttcgagcaggaggccgtggctgttgacagtaatctgcgagttcgggaacttcagcgcaaagttgacgggatccagaaagcctacgatgaactgcgcctgcagtccgaggcatttaagaagcatagcttggatctgctgagcaaggagcgagagctcaatggcaaactgcgtcacctttctccctag

SEQ ID NO: 23444 - DNA, 585 bp, synthetic construct
  source 1..585: mol_type = other DNA; note = Synthetic coding sequence
atggaggacggcctgctggagatcatgaccaaggacggcggcgacatgcctgcccccctagaggtcagcactgtcccagccgtgggagacgtcatctcaggcgaatacaacggaggcatgaaagagctaatggagcacttgaaggcacagctacaggctctcttcgaagacgtgcgcgccatgcggggggccctcgacgagcaggcctcgcatatccaggtactttccgatgacgtgtgcgctaaccagcgagctatcgtctctatgtgccagattatgactacagcaccacgtcagggaggactgggagtggtggggggcaagggatcctttcaatccgaccctcaggaaccagaaaccccaagccctgggataggcgatagcggcctgctcggcagagaccctgaggatgaggaggaggaagaggaggaaaaagagatgccaagccctgcgacaccctcgtcccattgcgagcgccccgaaagtccttgtgccggtcttctgggcggtgatggccctctggtggagcctttagatatgcccgacatcactttgctacagctggagggagaggcatcactgtag

SEQ ID NO: 23445 - DNA, 1281 bp, synthetic construct
  source 1..1281: mol_type = other DNA; note = Synthetic coding sequence
atggcccacctgcggggcttcgccaaccagcacagccgggtggaccctgaggaactgtttactaaactagataggataggaaaaggctccttcggcgaggtgtacaaggggatcgataaccatacaaaggaggtggttgctatcaaaatcattgatttggaagaagcagaggacgaaatcgaagacatccaacaagaaatcaccgttttgtcccaatgcgactctccgtatatcacacgttatttcggatcctacctaaaatccacaaagctctggattataatggaatacctcggcggtggctcggcattggacctcttgaagccagggccactcgaggaaacgtatatcgccacaattctgagagagatccttaaggggctggactatttgcactccgaacggaaaatccacagagatataaaggcagccaatgtgcttctgagtgaacagggcgatgtgaaactggcagacttcggggtggcgggacagctcacagatacacaaatcaagagaaacacctttgtgggcactccattctggatggcacctgaagtgattaaacagtcagcctacgatttcaaggccgacatctggtcactcggcatcaccgccattgaactcgctaaaggcgagccacccaattctgacctgcatcccatgcgcgtgctgttcttgataccaaagaacagccctccaactctggaagggcagcacagtaaacccttcaaagagttcgtggaagcttgtctgaacaaagacccgagattccggcctacggctaaagagctcctgaaacacaaattcattacacgatatacgaagaaaacatccttccttaccgagttgattgacaggtataaacggtggaaaagcgaagggcacggtgaagaatcctcgtcagaggactccgacatcgatggcgaggccgaggatggcgagcaaggcccaatatggaccttcccacctacgatcagaccatcacctcattccaagctgcacaaagggactgctctgcacagtagccaaaaaccagcggagccagtcaaacgacaaccccgctcccagtgtttatccacactcgtccgtccagtcttcggcgaattgaaggagaagcacaaacagagcggagggtctgtgggggctctagaagagctggaaaacgcctttagccttgccgaggagagctgtcctggtatttccgacaaactaatggtacacctggttgaacgggtgcagagattcagtcacaaccgaaatcacctcactagtactcgttag

SEQ ID NO: 23446 - DNA, 1350 bp, synthetic construct
  source 1..1350: mol_type = other DNA; note = Synthetic coding sequence
atgatgctgagcaccgagggccgggagggcttcgtggtgaaggtgaggggactaccttggtcttgctctgctgacgaggtcatgcggttcttctccgactgtaaaatccagaatgggacgagcggtattcgcttcatctatacaagagagggccgtcccagcggcgaagcctttgtggagctggagtccgaggaggaggttaaactcgcgctaaaaaaagatcgggaaaccatgggtcacaggtatgtggaggtgtttaagtcgaacagcgtcgaaatggactgggtgctgaaacataccggacctaattcacctgatacggctaacgatggtttcgtcaggctaagaggtttgccattcgggtgttcaaaagaggaaatcgttcagttcttttccgggctggagatcgtgcccaatggaatgacccttcctgtggatttccaaggacgatccactggcgaggcttttgtccagttcgccagccaggaaatcgccgaaaaggccttaaaaaagcataaggaacgcattggacacaggtacatcgagatctttaaatccagtagggctgaagtcaggacccactacgaccctccacgtaaattgatggccatgcaaagacccggtccgtacgatcgaccgggtgccggaagaggatacaacagtatcggccggggcgccggatttgagcggatgcgccgaggagcttatggaggaggctatggcggatatgatgactatggtggctacaatgacggctatggatttggatctgaccgtttcggccgggatctcaattattgtttttctggtatgagcgaccatcgatacggcgacggaggaagcagcttccagagcactaccggacactgcgtccacatgaggggcctgccttatcgggctaccgaaaacgatatctataacttcttctctcccctgaacccaatgagggttcatatcgagatcggccccgatgggagagtgacgggggaagccgatgtcgagttcgccacacacgaagacgccgtcgcggccatggccaaggacaaagcaaatatgcagcataggtacgtcgaattgttcttgaactctaccgcaggtacctcaggaggagcttacgatcatagctacgtcgaattatttctcaacagcacagccggtgcctctggaggcgcctatggaagtcagatgatgggcggaatgggcctgtctaaccagtcttcttatgggggtccagcgagccaacagctatccggcgggtatggtggcggttatggggggcagtcctccatgtcagggtacgatcaggtcttacaggagaacagcagcgattaccagtctaatctggcttag

SEQ ID NO: 23447 - DNA, 1317 bp, synthetic construct
  source 1..1317: mol_type = other DNA; note = Synthetic coding sequence
atgtgccccaagaacgccagctactacggcaaccgggccgccaccctgatgatgctagggagattccgtgaagcgcttggggacgcacagcagagcgttcggcttgatgattctttcgtgcgagggcacctccgagagggcaaatgtcacctgtctctcggtaacgcaatggctgcctgtagaagcttccaaagggccttagagctcgaccataaaaacgcccaggcccaacaggagttcaagaacgccaatgctgtgatggagtatgagaaaatcgctgagaccgatttcgaaaaaagagacttccgaaaggtcgtgttttgtatggacagggctctcgaattcgctcctgcctgccatagatttaagattcttaaggctgaatgcttagcaatgctgggaagatatccagaagcccagagcgtagccagcgatatattaagaatggatagtacaaatgcagacgccctgtacgtaagaggtctctgcttatattacgaggattgtattgagaaagctgtgcagttcttcgtccaggcattgcgaatggctccggatcacgaaaaggcttgcattgcttgtcgtaacgctaaggcacttaaggccaaaaaggaggatgggaataaggcctttaaggaaggaaattacaaacttgcttatgaattgtacaccgaagctttgggcattgatcccaataacattaagaccaacgcaaagctatactgtaatcgagggacagtcaatagtaaactcagaaaactggatgatgcaatcgaggattgtacaaatgcagtcaaactggatgacacctacatcaaggcatacctacgccgcgctcaatgctatatggataccgaacaatatgaggaagctgttcgagactatgaaaaggtgtatcagacagaaaaaacaaaggaacataaacagctgctgaagaacgctcaactggaactgaaaaaatcgaagagaaaagactactataagatactgggagtggataagaatgccagcgaagatgagataaagaaggcttaccgcaaaagagccctcatgcatcaccccgaccgtcatagtggagcctcagccgaggtccagaaggaagaggaaaagaagtttaaggaagtcggcgaagccttcaccattctgtccgatccaaagaagaaaacccgctacgatagtggtcaggaccttgatgaggagggaatgaatatgggagacttcgatcctaacaacatcttcaaggcttttttcggcggcccgggtgggttttcgtttgaagccagtggtccaggaaatttcttctttcagttcggttag

SEQ ID NO: 23448 - DNA, 165 bp, synthetic construct
  source 1..165: mol_type = other DNA; note = Synthetic coding sequence
atgcccggcaagaaggcccggaagaacgcccagcccagccccgcccgcgctccagccgagctagaagtagagtgcgctacccaactcaggaggtttggcgacaaattaaattttaggcaaaagctgctgaatctgatcagtaaactgttttgtagcggtacgtag

SEQ ID NO: 23449 - DNA, 1404 bp, synthetic construct
  source 1..1404: mol_type = other DNA; note = Synthetic coding sequence
atggccagcgtggccgccgcccgggccgtgcccgtgggcagcggccttaggggtcttcagcgcacgctcccgctggtggtgattctgggggctaccggcacgggaaaaagtaccctggcactgcagctgggacagagactcggaggcgaaatcgtctcagccgattccatgcaggtgtatgaagggcttgacatcatcacaaacaaagtgagcgcccaggagcaaaggatttgcaggcaccacatgatctctttcgtcgatccgctggtgaccaactacacagtcgtggactttcgcaaccgggcaactgccctgattgaagacatcttcgccagggataagatcccaattgttgtgggcggcactaattattacatagagagccttctgtggaaggtgctcgtcaatactaaacctcaggagatgggcactgagaaggtcatagacaggaaggtggagcttgaaaaggaagatggcctcgtgctgcacaaaaggctgagccaggtggatccggaaatggcagcaaagctgcacccacatgacaaacggaaggtcgcccgcagcctgcaggtctttgaagagactggaatctcacattcggagtttttacaccgtcagcacaccgaggaaggcggaggtcccctaggcggccccttaaagttcagcaatccctgcatcctgtggctgcatgcagatcaggcagtccttgacgagaggctggataaacgcgtcgatgacatgttggccgccggcctgctcgaagaactgagagattttcatcgacggtacaatcagaagaacgtcagcgaaaactcccaggactaccagcatggcatcttccaaagcattggatttaaagagtttcacgaatacctgatcacagaggggaagtgtacgctggaaacaagtaatcagctactgaaaaagggcatcgaggctcttaagcaggttacaaagcgctatgccaggaagcagaacaggtgggtcaagaaccgtttcctgagccgcccaggccccatcgttccacctgtgtacgggctggaggtctccgacgtgtcgaagtgggaggagtctgttttggagcccgccctagagatagtacagtcttttattcaggggcataaacctaccgccaccccaataaagatgccttacaacgaggctgagaacaaaaggtcgtatcatctgtgtgacttgtgtgatcggatcatcattggagatagagaatgggcggcccatataaaatccaagagtcatctgaatcagctcaagaagcgacggaggctggactcagatgcggttaacacaatcgagtctcagtcggtatcccccgatcataacaaggaaccaaaagagaaaggtagtccagggcagaacgaccaagagctaaaatgctcagtgtag

SEQ ID NO: 23450 - DNA, 558 bp, synthetic construct
  source 1..558: mol_type = other DNA; note = Synthetic coding sequence
atgggcgtgaacctgacccggagcaacaaggagaccgtgaagcactccgacgttctgttcttggcagtgaaacctcacatcatccccttcattctcgacgagattggcgccgatgtgcaggctcggcatattgtggtgagctgtgctgctggagtaactatttcctctgttgaaaagaaactgatggctttccaacctgcaccaaaggttatcagatgtatgactaacactccggttgtggtgcaggagggggcaactgtatacgctactgggacacatgcactcgtggaggatggtcagctgttggaacagcttatgtctagcgtgggcttttgtaccgaggtggaggaagacctcatagatgctgtcaccggcttatctggtagtggccccgcctatcagtcaatggcggatcaggaaaaaattagccctgccgcattgaaaaagaccctgctggaccgggtgaaattggagagccctaccgtgtccacgcttaccccgagctctcctggcaagctgttgactcggagcttagcgctgggtggcaagaaagactag

SEQ ID NO: 23451 - DNA, 960 bp, synthetic construct
  source 1..960: mol_type = other DNA; note = Synthetic coding sequence
atgagcgtgggcttcatcggcgccggccagctggccatgctgtggcgcggtgcatcccggccgcaacatccggtaggtagccaagacaactcccagctaccccgcaatgagccagctcacggcgtgagggcccaagaggatggttgcgagcccgatactcagcaacagggggatggcgaagcccagaggagacctgtgtcaggttgcgaggctcacattatccctttcattctggatgaaatcggcgctgatgtgcaagcccgtcatatcgtagttagctgtgctgctggtgtcaccatctctagcgtggaaaagaagttgatggccttccagccggcccctaaggtgatccgatgcatgaccaatacacccgtcgtggtgcaagaaggtgcaactgtttatgccaccggcacacacgctctggtggaggatggccagctcctggagcaactgatgtcctcggttggtttctgcaccgaagtcgaggaagacctaattgatgctgtgacaggactgtcgggaagtgggcccgcatacgcctttatggctctcgacgcgttggccgacggaggcgttaaaatgggactgcctcgccgcctggccatccagctgggggcgcaagccctgctgggcgccgctaagatgctccttgattctgaacagcatccttgccagcttaaagacaatgtatgttcccccggcggagccactattcacgcccttcacttcctggagtctgggggattcagatctctgctgattaacgctgtcgaagccagttgcatcaggacacgcgagctccaatctatggctgaccaggaaaaaatttcacctgcagcgctgaaaaagactctgctggatcgcgtgaagctggagtcccctacggtgtccaccctgacccccagtagccccggaaagttactgactcgatcacttgctctcggaggtaaaaaagactag

SEQ ID NO: 23452 - DNA, 708 bp, synthetic construct
  source 1..708: mol_type = other DNA; note = Synthetic coding sequence
atgctgagcgccacccggcgggcctgccagctgctgctgctgcactctctgttccccgtcccacggatgggaaatagcgcttccaacattgtgtcaccacaggaggcattacctgggcgcaaggagcaaacccctgtggccgcgaagcatcacgtgaacggtaatagaaccgtggagccattccccgaggggacccagatggcggttttcggaatgggatgcttttggggcgctgagagaaaattctgggttttgaagggcgtatacagtactcaggtcggctttgcggggggctatacttctaatccaacctacaaagaagtctgttccgagaagaccggacatgccgaagtggtccgggtcgtttaccagccagagcacatgagctttgaggagctgctgaaggtgttctgggagaatcatgatccaactcagggcatgcggcagggcaatgaccacgggacgcaataccgcagcgcaatctacccaaccagtgctaagcagatggaagcagcgctgtcgtccaaggagaactaccagaaggtgctgtccgaacacggctttggcccaattacaactgacatcagggaaggccagaccttttattatgctgaggactatcatcagcagtacctgagcaaaaacccaaacggctactgcggcttaggggggacaggcgtttcttgtcctgtggggataaaaaaatag

SEQ ID NO: 23453 - DNA, 3873 bp, synthetic construct
  source 1..3873: mol_type = other DNA; note = Synthetic coding sequence
atgagcggccccctggagggcgccgacggcggcggcgacccccggccaggggagtcattttgccctgggggtgtcccctcccctggacctccccagcatcgaccctgccccggccccagccttgccgatgacacggatgccaacagtaatggcagtagcggaaacgagagcaacggacacgaaagtcggggggcctctcagcgatcatctcacagctcatcatctggcaacgggaaggatagtgctcttttagagacaacagaatcaagcaagtccaccaattctcagtctccctctcccccgtctagctcaatcgcctattcccttctcagcgcttccagcgagcaggataacccatcaactagcggatgtagttccgagcagtcagccagggcaagaacacaaaaagaactgatgacagcgctcagagagctcaaactgagactgcctcctgagcgccgggggaaagggcgcagcggaactctagcaacgcttcagtacgctttggcctgcgtaaaacaggtgcaggcgaatcaagagtattatcagcaatggagcctcgaggaaggtgaaccttgctccatggacatgagcacctataccttagaggaacttgagcatatcactagcgaatataccctgcagaatcaggacaccttctctgtggctgtgtctttcctgacggggagaattgtctacatcagtgagcaagcagcggtcttgctgagatgcaaaagggacgtcttccggggcaccagattctccgaactgctcgctccccaagacgtgggtgtattttatggcagcaccgccccctcacgcttgcccacttggggcaccggcgcaagcgctgggtctggtttgagggacttcacccaggagaaaagtgtattctgtaggattcggggaggtcccgacagagaccctgggccccggtaccagccctttaggttgactccctatgttacaaaaatcagagttagcgacggcgctcctgcacagccctgctgcctactgattgcggaacggatacattctgggtatgaggcccccaggatcccaccagataaaagaatatttaccacacgtcatacaccttcctgcctcttccaagatgttgacgagcgcgccgccccgttgcttggatacttgccccaggatttgctgggagcccctgttttgctctttctccacccagaagatagacctctcatgcttgccatccataaaaaaatcctgcagctcgcgggccagcccttcgatcactcccctatcaggttctgcgccaggaatggagagtacgttactatggatactagctgggccggcttcgtgcacccctggagccgcaaggtggcattcgtgctgggccgccacaaagtgcgaactgcgcccctcaacgaggatgtcttcactccacccgccccttcgccagccccaagtctggacacagatatccaggaattaagtgagcagatccaccgtctgctgctgcagcctgtgcactcccccagccccaccggcttatgtggggtgggagccgtaacctcccccggtccacttcacagtccgggcagcagctccgactcaaacggcggagatgcagagggtccggggccacctgcccccgtgacctttcaacaaatttgtaaagacgtgcatctagtgaagcaccaggggcagcaactattcattgaaagtcgcgcccgcccacaatccaggccaagactacctgcaacaggcacctttaaggcaaaagctctcccatgccaatcacctgatcctgagctggaagcaggctctgcccctgtccaggcccccctggccctcgtcccagaggaagctgagagaaaagaagcctccagctgctcataccagcagattaactgtctggattccatactgcgctatctggagtcatgtaatctgccgtccacaacaaagcggaagtgcgcctcctcctcctcatatacaacatcttctgcttccgacgatgacaggcagcgaacagggcctgtgagtgtcggcaccaagaaggatcccccatccgccgctctgagtggggagggtgccacacctcgcaaagagccagtggtaggcggcacactgtcccccttggctctcgccaataaggctgaaagcgtagtaagtgtaacctctcagtgcagtttcagcagtacaatcgtccacgtaggcgataagaagccgcccgaaagcgacattattatgatggaggacctgccagggctggcccctggcccagctccctctcccgctccatctccaacagttgctcccgatcccgcccctgatgcctaccggccggtgggtttaacaaaagccgtcctttccctgcacactcagaaagaggagcaggccttcttgagcagatttcgagacctcggcaggcttcgtggcctagattcctcgtctaccgctccatcagctctaggagagaggggctgtcaccacggcccggctccaccatctcggcggcatcactgtcgttctaaagctaagagaagcagacaccaccagaacccacgcgcagaagctccatgctacgtgtcacacccttccccagtgcccccctctaccccgtggccaactcctcctgctaccacaccctttccggccgtagtgcagccttatcccctgccagtattctctcctaggggtggcccacaacccctaccccctgctcccacaagcgtaccccctgctgctttccccgctcctctggtcacaccgatggtggctctggtgctgcccaactacctttttcctactccttctagttatccgtatggtgccttgcaaactccggccgaggggcctcccacacccgcttcccatagtccctctcctagtctgcccgcactggctccaagcccaccccaccggccagactccccgctttttaacagtaggtgttcttctccgctgcaattaaacctgctgcagctggaagaactgccacgggctgaaggcgccgccgtcgcaggtggaccaggctcaagcgcggggccgcctccacccagtgctgaggccgcagaacccgaagcaaggctggccgaagtcacagaatcctctaaccaggatgccctgtctggcagttcagacttgctggagctgctgctgcaggaggactcccgctccggcaccggtagtgcagcgtccgggtcactcggatccgggctcggcagcggtagtgggtctggctcccacgagggtggctccacgtcagcgtcaatcacccgctcttcacagagcagccatacttccaaatatttcggctccatcgactcttctgaggcagaggccggggccgctagagggggagcagaaccgggggaccaggtcatcaagtacgttctgcaagaccctatttggcttctgatggccaacgccgaccagcgagtgatgatgacatatcaggtgccatctagagacatgacctcagtcctgaagcaagatcgcgaacgtctgcgggccatgcagaagcagcagccccgttttagcgaggatcagcgccgcgagctgggggcagtccactcatgggtcaggaaggggcagctccctagggccctggacgtgatggcctgcgtcgactgtggtagctcaactcaggaccctggccatcctgacgaccccctcttctcagagttagacggcctgggtctcgagcccatggaggaagggggcggcgagcagggctcgagtggcgggggctcaggcgagggagaagggtgcgaagaggcccagggcggcgcgaaggcatcctcgtcccaggatctggctatggaagaagaagaggaagggcggtcttcttctagccccgcactgcccacagccggtaactgcacctcttag

SEQ ID NO: 23454 - DNA, 2022 bp, synthetic construct
  source 1..2022: mol_type = other DNA; note = Synthetic coding sequence
atggagaaggccgtgaacgacggcagccacagcgaggagctgttctgccacctaaaaacaatcagtgaaaaagaagacctgcccaggtgcacgtcagaaagtcacctgtcctgcctcaaacaggacatacttaatgagaaaacagaactggaggctacactgaaagaggccgagctggttacccactctgtcgagctgctgctgcctttgtttaaggacacgatcgaaaaaattaacttcgagaatgccaatttgagcgcactgaatctcaagattagcgagcagaaagagattttaatcaaagagctggacactttcaagagcgtcaagctcgcccttgagcatctcctcagaaagcgagactacaaacaaaccggcgataacctgagctcaatgctcctggaaaacctgactgacaacgagtccgaaaatactaatctaaaaaaaaaagtgtttgagaaggaggcccatatacaggagctgtcttgcttgtttcagagcgagaaagccaacacgctcaaggctaaccgatttagtcaaagtgtcaaggtagtccatgagaggcttcagatccagatccacaaacgagaggctgaaaatgacaaactgaaggagtacgttaagtcattagagaccaagatagctaaatggaatctacaaagtcggatgaataagaatgaagccatagtaatgaaggaagcctcccgacagaagaccgtggcccttaagaaggcgagcaaggtgtataaacagcggctggaccattttaccggcgccattgaaaaactgactagtcagatccgcgatcaggaagccaaattatccgagacaatctcggcctcaaacgcatggaagagtcactatgagaaaatagtgatagagaagacagaactggaggttcaaatcgaaaccatgaagaagcaaataataaatcttttggaggaccttaagaaaatggaagaccatggaaagaattcatgcgaggagattttgcgaaaagtgcattcaatagagtacgagaacgaaaccttgaatttggaaaatacgaagttaaaactccgatttccttgccggattaccgagagtaagaatatgaatatactcatcgtccttgatatgctgtgctatatttcttctgaaaaaactactctggcagcactgaaggacgaagtagtcagcgtcgaaaatgaattgtccgagctgcaggaagttgagaaaaaacaaaaaactcttattgagatgtacaaaacccaggtgcaaaaactgcaggaagcggcagagattgtgaaatccagatgtgagaatttgcttcacaagaataaccagataactaagacgaagaacaagaacgtagagaagatgcggggacagatggagtcccaccttaaggaactggaacgagtgtgtgatagtctgacagcggccgaacggaggctccatgaatgtcaagaatcccttcaatgctgcaaggggaaatgcgcggaccaggagcacactatacgcgagcttcagggccaagtcgacggaaaccacaacctcttgaccaaactatcattggaggaagagaattgcctcatccagctcaaatgcgaaaatttgcagcagaaattagagcagatggatgcagaaaacaaggagctggaaaaaaaattagcaaaccaggaggaatgcttaaaacactcaaacctgaagtttaaggagaagtcagccgagtatacagctttagcccggcagcttgaagccgcccttgaagagggaagacagaaagtagcagaggagatcgagaagatgtcatcccgcgagtccgcactgcagatcaaaattctcgacctggagacagagcttcgaaagaaaaacgaagagcaaaaccagttggtctgtaagatgaattcgaaggcacagcatcaggaggtttgtcttaaagaagtgcagaatagtctggaaaagtcagagaatcagaacgagagtatcaagaactatctgcagttcctaaagacctcctatgtgacgatgtttgaatag

SEQ ID NO: 23455 - DNA, 798 bp, synthetic construct
  source 1..798: mol_type = other DNA; note = Synthetic coding sequence
atggacgacaaggccagcgtgggcaagatcagcgtgagcagcgacagtgtgagtaccttgaactccgaggacttcgtcctggtgagccggcagggagacgagaccccatctacaaacaacgggtcagacgatgagaaaacaggactcaaaatcgtgggcaacggatccgaacagcagcttcaaaaagaactagctgacgtactgatggacccacccatggatgatcagccaggtgagaaggagctggttaagcggtcacagcttgacggagaaggagatggccccctgtctaaccagctgtccgcctcgtcaactatcaaccctgtacccctcgtggggctgcagaagcccgaaatgagcctccctgttaagccgggccagggagattccgaagcaagctctccctttacgcctgtggctgatgaagatagcgttgtttttagcaagctgacctacctgggctgtgctagcgttaatgccccacgatctgaagtggaggctttgcggatgatgagcatcctgaggagtcagtgtcagatttccctagacgtgacattatcggtgccgaacgtgtctgagggcatcgtgagactgctggacccacaaaccaatacagagatcgctaactatcctatctataagatcctgttctgcgtgcgcggacacgatggaacacctgaatcagattgctttgcctttaccgaaagccactacaacgccgagttgtttagaatacatgtgttcaggtgcgagattcaggaggccgtcagtccccaggaaaaaaccctctgcaagtag

SEQ ID NO: 23456 - DNA, 636 bp, synthetic construct
  source 1..636: mol_type = other DNA; note = Synthetic coding sequence
atgtgggccagcctgagcctggaccaccccagcgccaaggagaaccaagctctccgactcatcgagatgcgtgaggaaaacggcaacgttcctaaaacagagcaggcaggaagcctgaagccgctgcgcgataccggaaagtctaacttaaaggaaaaaaaggccaacagcaaactcaagcaaatcgagaaggagtatacccagaagcttgctaaatcctcccagattattgccgagctccagacaacaattagtagccttaaagaagaaaattcgcaacaacagctggccgctgagcggagacttcaagacgtgagacagaagttcgaggacgaaaagaagcagcttattcgggataacgatcaggccattaaggtcctccaagacgagcttgagaaccggtcaaaccaagttcggtgtgctgagaaaaaactgcagcataaggaactagagagccaggagcagataacctatatccggcaggagtacgagacaaagctcaaaggacttatgccggcctctctgaggcaagagctcgaggatactatctcatcattgaaaagccaagtgaattttctgcagaagcgcgccagtatcctgcaggaagaactgacaacgtatcagggcaggaggtag

SEQ ID NO: 23457 - DNA, 867 bp, synthetic construct
  source 1..867: mol_type = other DNA; note = Synthetic coding sequence
atgagcagcagcatgtggtacatcatgcagagcatccagagcaagtattcactctcggaacgcttgatacgtacaatcgccgctatcaggagtttcccccacgataatgtggaagatttgatcaggggcggagcggacgtcaactgtacacatggtacccttaaacccttgcattgtgcttgtatggtctcagatgctgactgtgttgaactgcttctcgagaagggcgccgaggtcaatgcactggatggatacaatcggacagctttgcattacgcggcagaaaaggacgaagcctgtgtcgaggtcctgctcgagtatggagccaatccaaacgccttagacgggaaccgcgacactccactgcactgggcggccttcaaaaataatgcggagtgcgttagggcacttctcgaatccggtgcgagcgtgaatgcgctggattacaataatgataccccactctcctgggcagccatgaagggcaacctggaaagcgttagcatcttacttgattacggagcagaggtgcgagtaattaacttgatcggccagacaccgatatcgcggcttgtcgcactgttagtgagaggcctaggaactgaaaaggaggactcttgctttgaactgcttcacagagctgtgggacacttcgaactgagaaaaaacggcacaatgccaagagaggtggcaagagacccacagttgtgcgaaaagctcacagtgctgtgttcagcccctggcaccttaaagactcttgcaagatacgctgtgaggcgctccctgggtctgcagtacctcccagatgccgtcaagggcctgcctctcccagccagcctcaaggaatacctccttcttctggagtag

SEQ ID NO: 23458 - DNA, 1341 bp, synthetic construct
  source 1..1341: mol_type = other DNA; note = Synthetic coding sequence
atgcgggagatcgtgcacatccaggccggccagtgcggcaaccagatagggaccaaattttgggaggtgatatcggacgagcacgggattgaccctgccggcggttacgtgggggattccgccttgcagctggagcggataaacgtgtactataacgaatcgtccagtcaaaagtacgtgccgcgggccgctctcgtggacctggaacctggtactatggattctgtgcgcagcggtcccttcggtcaactgtttcggccagataattttatatttggacagacaggggcgggcaacaactgggctaaaggccactataccgaaggtgctgaactcgtggacgcagttctggacgtggtgcgcaaggaatgtgagcattgcgactgcctccagggctttcaactaacccattcccttgggggcggaactggatcgggaatggggactctgctaatctcgaagattcgggaggagtttcctgacagaatcatgaacacattctccgtgatgcccagtcctaaggtttccgacacggtcgtggagccatacaatgctacactgtcagtgcaccagctggtggagaacaccgacgagacatactgcattgacaacgaggcactttacgacatctgttttcgcacactgaaactgacaacgccaacgtatggcgatctcaatcatctcgtgagcgccacaatgagcggtgttactacaagccttagattccccgggcaactcaacgccgaccttagaaagttagcagttaacatggtgccatttccccggctccatttcttcatgcccggctttgccccacttacctcaagagggtcccagcaataccgcgccctgaccgtgccggagctcactcaacagatgttcgacgctcggaatatgatggcggcgtgtgatccccgacacgggcgctacctcacggtagctaccgttttcagaggcccaatgtccatgaaagaggtcgatgaacagatgctcgctattcagagcaagaattcctcatacttcgtcgagtggataccaaacaacgtgaaggtagccgtctgcgacatcccacctagggggctgaagatggcctccacatttataggaaactccacagccatccaggagctattcaaacgcatttcagagcaattttctgccatgtttaggcggaaagcattcctccattggttcaccggcgagggcatggatgagatggagtttacagaagcagaaagtaacatgaacgaccttgttagtgaataccagcagtatcaggacgcaaccgcaaatgacggcgaagaagccttcgaagacgaggaagaagagattgatggatag

SEQ ID NO: 23459 - DNA, 792 bp, synthetic construct
  source 1..792: mol_type = other DNA; note = Synthetic coding sequence
atgctgagcagcaagggcctgaccgtggtggacgtgtaccagggctggtgcggaccctgtaagcccgtagtgtctttgttccaaaagatgcgaatagaggtgggactggatttgctgcactttgctttggccgaggcggatcggttggacgtattggagaaatacaggggcaagtgtgaaccaaccttcctgttttacgcaatcaaagatgaagccctgtccgatgaagatgaatgcgtgtcacatggaaagaacaatggcgaagacgaagatatggtctcctctgagcggacttgtaccttagcaatcattaaaccggatgcggtagcacacgggaaaactgacgagattatcatgaagattcaggaagctggctttgagatcctgactaacgaggaacggacgatgaccgaagccgaggttcgtctgttttatcagcacaaagcaggcgaagaggcgttcgagaagttggttcatcacatgtgctctgggccctcacacctacttatcctgacacgtacggaaggctttgaggacgtggtgactacctggaggacggtaatgggtccccgcgacccaaacgtggctaggagagagcaacctgaaagccttagagcgcagtacgggaccgaaatgccttttaatgccgttcatggatcaagagaccgggaggacgccgaccgggaacttgctctgctgtttcctagtctgaagtttagtgacaaagataccgaggcaccccagggggaatcttcgactcagccacgcttaaagattaccgacctggattag

SEQ ID NO: 23460 - DNA, 1089 bp, synthetic construct
  source 1..1089: mol_type = other DNA; note = Synthetic coding sequence
atgctgaagaacaagggccacagcagcaagaaggacaacctggccgtgaacgccgtggccttgcaggatcatatcctgcatgacctgcagcttcggaatctcagtgttgccgaccactccaaaactcaggttcagaaaaaagagaataaatctctaaagcgtgatactaaagccatcatcgataccggcctgaaaaaaacaacacagtgtccaaagctcgaggatagtgagaaagagtacgtgctcgaccctaaaccccctcccctcactttggctcagaagctgggtttgattggaccgcccccccctcctctgtcctctgacgagtgggagaaagttaagcagagatcactgctccagggggattctgtgcagccttgtcctatctgcaaagaggaattcgagcttagaccgcaggtgcttctttcctgctcgcacgtttttcataaggcgtgtctgcaggcttttgaaaagtttactaataagaagacatgtcccctgtgcagaaaaaatcagtaccagacacgagtaatccatgatggggccaggttgttcaggataaagtgcgtgacgcgcatccaagcctactggcgagggtgcgtggttagaaagtggtacaggaacctcagaaagacagtgccccctactgatgctaagctgcgcaagaaattcttcgaaaagaagttcaccgagattagccatcggatactctgcagttataacacaaacattgaagagctattcgcagaaatcgatcagtgcttggccattaatcgaagtgtccttcagcagcttgaagagaagtgcggacatgaaatcacagaagaagaatgggagaaaatccaggtgcaagcccttagacgagagacccacgagtgcagcatctgtctcgctccactcagcgccgcagggggacagcgtgtaggggccggtcgccggtctagagaaatggcgctgctctcgtgcagtcatgtcttccatcacgcctgtctactggcgctggaagagttcagcgtgggagatcgcccaccgttccacgcctgccctttatgccggtcatgctaccaaaagaagatccttgaatgttag

SEQ ID NO: 23461 - DNA, 291 bp, synthetic construct
  source 1..291: mol_type = other DNA; note = Synthetic coding sequence
atgatcgagaagatgcagggcagccggatggacgagcagcggtgctccttccctccaccactcaaaaccgaagaggattatattccatacccttccgtccacgaagtgttaggcagagagggacctttcccactgatactgctgccacagtttggcggctattggattgaagggaccaatcacgaaatcacttctatcccggagaccgaacctcttcagtctccaacgacaaaagtgaagttagaatgtaaccctactgcccgcatctacaggaagcacttcctgggatag

SEQ ID NO: 23462 - DNA, 459 bp, synthetic construct
  source 1..459: mol_type = other DNA; note = Synthetic coding sequence
atggccggcctgccccggcggatcatcaaggagacccagcggctgctggccgagccagtcccaggcattaaggctgagcctgatgaatcgaacgcccggtattttcacgtcgtgattgccggcccacaggattccccgttcgagggaggcacctttaaactggagctgtttctaccagaagaatacccaatggcagctccaaaagtgcggtttatgactaaaatctaccaccctaacgtggataagctgggcagaatctgcctagacattctcaaagacaagtggagcccagctctgcagatacggaccgtgcttctctcaattcaggcactcctttccgctcctaaccccgatgatcctttagcgaacgacgtggccgagcagtggaagactaacgaagctcaggcaattgaaacagccagggcctggaccaggttgtacgccatgaacaatatttag

SEQ ID NO: 23463 - DNA, 3354 bp, synthetic construct
  source 1..3354: mol_type = other DNA; note = Synthetic coding sequence
atgtaccggagcagcgcccggagcagcgtgagcagccaccggcccaaagatgacgggggtggaggaccgcgtagtggtcgttcctccggttcaagctccgggcccgcccgaagatccagtccccccccaccaccctcaggatcaagcagtcgtacacccgccaggcggcctcgatctccatctggacaccgcggccggagggcaagcccaagcccacctagaggccgaagagtgtctcctagcccgcctagggcccgtagaggcagcccttcccccccgcgaggtcggcgtttgttcccgcccggccctgcgggattccgaggcagctcacggggagagtctcgcgctgactacgctagggacggcagaggcgaccacccgggagactccggatctagaaggaggtctcctggcctctgtagcgacagccttgagaaatcgttaagaatcaccgttggaaacgatcacttctgtgtctcaacccccgaacgcagaaggctgagcgaccgacttggatctccagtggacaacttagaggacatggatcgcgacgacttgacagacgattccgtgtttacccgctcctcccaatgctcacggggcctggaaagatacatatcacaggaggagggcccattgtctccttttctcggccaactagacgaagactaccgcacgaaagagaccttcctgcatcgctccgattactcgccacacatctcctgccatgacgagcttctgagggggacggaaaggaaccgagaaaaactgaaaggatattcaatccgcagtgaggagcgctctcgtgaggctaaacgtcctagatacgacgatacagtgaagattaactccatgggaggggaccaccccagctttacatctggaacccggaattataggcagcggagacggagcccctccccccgtttcctggatcccgagttccgcgagctggaccttgctcgtcgcaagagagaggaggaggaggaaagatctagaagtttgagccaggagttagtgggcgttgacggtggcggcacagggtgctcaatccctggcttatctggagttctcactgcttccgagccaggctattccctgcacagacctgaggaagtcagcgtaatgccgaaaaagtcaatcctgaaaaagaggatcgaagtggacataatggagccaagcatgcagttagagagcttttctagctcaacatctagcagccaggaccacccactctatagcggccatcctagcctgcctctgagcggtgccatagccgccttcgctagcgagatcgagaacaaaggcaccatggtggagaccgcacttaaggagccacaggggaacctttaccagtgggggcccttacctggtattccgaaagataactcacctctcagggagaagttcggcagctttctctgccacaaggacaacctcgatctcaaggccgagggacctgagagacacactgactttctgctcccacatgagcgcgcttctcaggacgggtctggattctcgcggattttaagcatgcttgccgactctactagtactcaggagaaaagacggaggtccttccccgacattgaggacgaagagaaatttctgtacggggacgaggaggaagatctgaaggccgaaagtgtgccaaagcctttgggcagttctgaaagcgaggtcatgcgccaaaaggcaagtagcctccctagctctgccccagctgtgaagcttgagagcttggaggaaacgaatcccgaatacgctaaaatccatgacctccttaagactatcgggcttgacatcggggtggcagaaataagtcagctggccgctaggacccaagagaggttgcatggtaagaaacctagccttaggagttcggccgatcggcggagcagcgtcgaccgatatttctcagctgatcactgttcatccgtcgatcaccgattttcggcagaccgctgctccagtgtggaccactgcttcagtgctgatcgcagatcgagcgatcctcacagactcgagagtcgggaggcccaccactcaaatacgcactccccagaggtgtcccatccccatccaccaagcccagtcgacccttatctccttaccaaaaattccccgccatttttgaaatctgaccaccctgtgggacacattagcggtcccgaagtcgtgggaagtggatttcagtctagtgtggccgtgcgatgtatgcttccatcagcccccagcgctccaattcgactcccccataccgccgccttgagccagttccatatgccccgggcctcgcagtttgccgccgcaaggataccgcccaactaccaggggccagcaatcccaccggcctcattcgacgcttatagacactacatggcatatgccgcgtcacgatggcccatgtatcctacgagccagccttccaaccacccggtgcctgagccccacaggattatgcctatcaccaaacaggccacccgatcccggcccaacttaagggtgattcctacagtaaccccagataagcccaaacaaaaggagagcctgcgcggaagtataccagccgcgcaggttcccgtacaggtgtcaattcccagtctcattagatacaatcctgagaaaatttcagacgagaaaaacagagcgtctcaaaagcagaaagttattgaggaacgagaaaagctaaagaatgaccgagaggcacgccagaagaagatgtactatttaagaacagagctagaacgtttacataagcagcagggggagatgctgcgtaaaaagcggagggagaaggacggacataaggatccactgctggtcgaggtgtctcgcctccaggacaatatcatgaaagacatcgccgaactgaggcaagaggctgaggaagccgaaaagaaacagtcagaactggataaagttgctcaaatactgggtattaatatctttgacaaaagccaaaagtccttatccgacagtagggagcctaccgagaagcccggcaaagcagagaagtccaagagtcctgaaaaagtgtcctcgttcagtaactcctcatctaacaaagagagcaaggttaataatgagaagtttaggacgaaaagccctaaacccgcagagtcccctcagtctgctacaaaacagctggaccaacctacagccgcctacgaatactacgacgcagggaatcactggtgcaaagattgtaatactatctgtggcacgatgttcgacttcttcacccatatgcataacaagaaacatacgcaaggccaattccagaaatcgtccgattttcagaaagaagggttgcagcaaacatttttgccacccgaacggcagggatag

SEQ ID NO: 23464 - DNA, 576 bp, synthetic construct
  source 1..576: mol_type = other DNA; note = Synthetic coding sequence
atgtacgtgtgcctgtgcgtgagcgtggccaaggtgaccatggccgatagggccgcggctgagagggcttgtaaagatcctaatcccatcatagatggaagaaaggctaacgtgaatttggcctatctgggggccaaaccaagaatcatgcaacctggattcgcctttggggtgcagcagctgcacccggcactgatccaacgtccgtttggaatcccggcccattatgtgtatccacaggcctttgtgcagcccggggtcgtgatcccccatgtgcaaccaaccgctgcggcagcatctacaacgccgtacatcgattacacaggagctgcctatgcacagtattccgcggccgccgccgcagcagctgccgcagcagcctacgaccagtacccttatgctgctagcccggcagcggccggttacgtcacggcaggtggttacgggtacgccgtccagcagcctatcactgccgcagctccagggacggccgctgcagccgccgccgcagctgccgctgctgctgcatttggccaataccagcctcagcaattgcagaccgataggatgcagtag

SEQ ID NO: 23465 - DNA, 330 bp, synthetic construct
  source 1..330: mol_type = other DNA; note = Synthetic coding sequence
atggccggcgcccccaccgtgagcctgcccgagctgcggagcctgctcgcgtcaggccgcgccaggctgtttgacgtgcggtccagagaggaagcagccgcagggacaattccaggcgccctgaatatccctgtgagcgaactggagtccgcactgcagatggaaccagccgcctttcaggccctctatagtgccgaaaaacccaagctagaagacgaacacttggtgttcttttgtcaaatgggtaaacggggcctccaagctacccaactggctcggtctctggggtacactggttacggagaagtatggcttctggctggccgttag

SEQ ID NO: 23466 - DNA, 630 bp, synthetic construct
  source 1..630: mol_type = other DNA; note = Synthetic coding sequence
atggccctgctggccgagcacctgctgaagcccctgcccgccgacaaacaaatcgagacgggccccttcctggaggccgtgtcacatttgcctccctttttcgactgcttgggttcccctgtgtttactcccatcaaagcagacatcagcggcaatatcacgaagattaaggccgtgtatgatacaaatccagcaaaatttcgtaccctacagaatatcttggaagtggagaaggagatgtatggcgctgagtggccaaaggtcggcgcaacccttgcactcatgtggctgaagcgcggccttcggtttatccaggtctttctgcaatccatatgcgatggggaacgggatgaaaaccatcccaatcttatacgagtaaacgccaccaaagcctatgagatggctcttaagaagtaccacggttggattgtccagaaaattttccaggctgcactgtatgccgccccatacaaatctgactttttgaaagccctaagcaagggtcaaaacgtgaccgaagaggaatgtctggagaaaattcggctgttcctggtcaactacactgccactattgatgtgatctatgagatgtacactcagatgaacgccgaactgaattacaaggtgtag

SEQ ID NO: 23467 - DNA, 474 bp, synthetic construct
  source 1..474: mol_type = other DNA; note = Synthetic coding sequence
atggaggaggcccagcggaagcggacccagctgcgggaggccttcgagcaactgcaggccaagaagcagatggccatggagaagagacgtgctgtgcagaatcagtggcagcttcagcaggaaaagcacctccagcatctcgccgaggtgtcagccgaggtcagggagagaaagaccggaacccagcaggagctggatcgcgtcttccagaaactagggaatttgaagcaacaggctgagcaggaacgcgacaaattacagagataccaaacattcttacagctgctttataccctgcaggggaagcttctcttccccgaggctgaagctgaagcagaaaacctccctgacgataagccccaacaaccaacgcgtcctcaggaacagtcgaccggcgatacaatgggacgcgacccaggcgtttcttttaaagctgtgggactgcaaccagccggagacgtgaacctcccatag

SEQ ID NO: 23468 - DNA, 639 bp, synthetic construct
  source 1..639: mol_type = other DNA; note = Synthetic coding sequence
atggaggtgctgcggcggagcagcgtgttcgccgccgagatcatggacgcttttgatagaagcccaaccgataaagaattggtcgcacaggccaaggcactcggccgggagtacgttcacgctaggctgctccgcgccggcctaagttggtctgccccagagcgggcggcaccagtgcctggtagattggcagaggtttgcgccgttttgctgcggcttggtgacgaacttgaaatgatccgcccttctgtctacagaaacgtcgcccggcagcttcacatatccctgcagtcagaaccggtggtcacagacgcctttttggcagtagccgggcacatattcagtgcaggaatcacttggggcaaggtggtgtcactgtacgccgttgcagccggcctggcagtcgactgcgtgaggcaggctcagcccgcaatggtgcatgctttggttgattgcctcggtgagtttgtccgtaaaacgttggccacttggcttaggcgcagggggggatggacagacgtgctgaagtgcgttgtttctactgaccctggtctgcgctcccattggcttgtcgccgcactatgctctttcgggcgattccttaaagctgcatttttcgtgctcctgcccgagaggtag

SEQ ID NO: 23469 - DNA, 2148 bp, synthetic construct
  source 1..2148: mol_type = other DNA; note = Synthetic coding sequence
atgagccagagcggcgccgtgagctgctgccccggcgccaccaacgggagtttgggaaggtccgacggtgtcgccaaaatgtctccaaaggatttgtttgaacagcgtaagaaatattctaactcaaatgtgatcatgcatgagacgagtcagtaccacgtccagcaccttgccacctttattatggataagagtgaggctatcacctctgtcgatgacgctatccgaaaactcgtgcaattaagcagtaaagagaagatctggactcaggaaatgctgctccaagtgaacgaccagagcctgcgcctcctagatattgaaagccaggaagagttggaggacttcccccttccaactgtccagcggagtcagacagtgctcaaccagctgcgttatcctagcgtactcttactggtctgtcaggactccgaacagtcgaagcctgacgtccactttttccactgcgacgaggttgaggccgagttggtacacgaggatatcgaatcagcattagctgattgccgtcttggcaagaagatgcggcctcagactctgaagggtcaccaggagaagattagacagagacaaagcatcttgccacccccccaggggccagcccctattccctttcaacatagggggggggactcacctgaggccaaaaaccgcgtcgggcctcaggtccctctttctgaacctgggtttagaaggagagaaagccaggaggagccacgcgctgtcctggctcagaagatcgagaaagaaacacagatcttgaactgtgccctcgacgatattgagtggttcgtcgcgaggctgcaaaaggccgcagaggccttcaaacaactgaaccagcgcaaaaaaggcaaaaagaaagggaagaaggcccccgccgaaggcgtcctaacactaagggccaggcctccatccgaaggcgaatttattgattgcttccagaagattaagcttgctattaacctgctggcaaagctgcagaaacacatccagaatcccagtgcggctgagctcgtccactttctgttcggcccgctcgacctcattgttaatacgtgcagcggaccagacatcgctagatcggtgagctgccccctcctcagtcgcgacgccgtcgattttctgaggggacatctcgtccccaaggagatgtcactgtgggagagcttgggtgaaagctggatgagacctcgcagcgagtggcccagggagcctcaagttcctctctacgtccctaaatttcacagtggatgggaaccacccgtagacgtgttgcaggaggcgccatgggaggtggagggactcgcctccgcgccgattgaggaagtgagtccggtgtcaagacagtcaattcggaattctcagaaacatagtcccacttcggaacctacacctcctggcgatgcattgcctccggtatcttctccacatacccatagaggctaccagcccacaccagccatggctaaatatgtgaagatcctgtatgatttcactgctcgcaacgccaatgagctgtcggtgctcaaagatgaagtgcttgaggtactggaagatggccgacaatggtggaagctccgctcccgttccggtcaggccgggtatgtgccatgtaatattttaggggaggcccggccagaagatgccggcgccccattcgaacaagcgggccagaagtactggggcccagcctctccgacgcataagttacctccatccttcccaggcaataaagatgagctgatgcaacatatggatgaggttaatgacgaactaatcagaaaaatttcaaacatccgtgcgcagccgcaaagacacttccgggtggagcgatcacaacctgttagtcagccattgacctacgagagtggacctgacgaagtgagagcctggctggaggctaaggcttttagtcctcgaatcgttgagaatcttggcatcctcactggcccacagttgttctctctgaataaggaggagcttaaaaaagtgtgcggcgaagagggggtgagagtctacagccaactgaccatgcagaaggcattccttgagaagcagcagagcggcagcgagctggaggaactcatgaacaaatttcactcaatgaaccagaggcgcggtgaggactcatag

SEQ ID NO: 23470 - DNA, 600 bp, synthetic construct
  source 1..600: mol_type = other DNA; note = Synthetic coding sequence
atggcctggccctgcatcagccggctgtgctgcctggcccggcggtggaaccagctcgatcgtagcgacgtggctgtcccccttactctgcatggctactcagacctggacagtgaggagccggggacgggcggcgccgcctcgagacgcggccagcccccagctggagcgagggacagtggcagagatgtgcctctcacccagtatcaacgagatttcggtctctggactactcccgcaggccccaaggatccacctccggggagaggtccgggcgctggaggaaggcgcggcaagtcgagcgcacagtcatccgcccccccggctcccggggcccgcggggtgtatgttcttcctataggcgatgctgacgctgcagccgcagtaacgacaagttatcgacaagaatttcaagcctggacaggcgttaagcccagtcgatccacaaagaccaagcctgcaagagtgatcaccacacacacaagcggctgggatagttcgcctggcgccggctttcaagtccccgaggtccggaagaagttcacccccaacccaagcgccatctttcaagcttcggccccccggattctcaacgtttag

SEQ ID NO: 23471 - DNA, 5106 bp, synthetic construct
  source 1..5106: mol_type = other DNA; note = Synthetic coding sequence
atgggcaacagcgacagccagtacaccctgcagggcagcaagaaccatagtaacaccattacaggagccaagcagattccatgttccctcaaaataagaggaattcacgccaaggaagaaaagagtttgcacggttggggccatgggagtaacggagcaggatacaagagccgctctctcgctagatcctgtctgagtcatttcaaatctaatcagccctatgcctctcggctcggcggacctacatgtaaggttagccgtggtgtagcttacagtactcaccgaactaatgcccctgggaaggactttcaagggatctctgccgccttttccaccgagaacgggtttcactctgtgggccatgagctcgcagacaatcatataactagccgcgattgcaatggccacctcctcaattgctatgggagaaacgaatccatagccagcaccccccctggcgaagaccggaagtcacccagggttttaattaagacgctcggaaaactggacggctgcttacgggtagaattccataacggaggcaatccctcaaaggtgccagccgaggactgctccgagcccgtgcagctccttcgttacagccccactctggcaagcgagacaagccctgtacctgaagccagacgcggatctagcgcggactcccttccctctcatagacctagcccaacagacagtcgtctacggtcttcgaagggctcttctctgtcctctgaaagctcctggtatgattcaccgtggggcaacgccggcgagctgagtgaggccgaagggtctttccttgcacctggtatgcctgatccatcactgcatgcctctttcccacctggagatgcgaagaagccattcaaccagagctcgagcctgagctcactgagagagctctataaggacgcgaatctggggagcctttcccccagcggtataaggctaagcgatgagtacatgggtacccatgcgtcgctttccaatcgagttagtttcgcttctgacatagacgttccctcgagggtcgcgcacggcgatcccattcagtacagttcatttacactcccgtgtaggaagcctaaggcgttcgtggaagacactgccaaaaaagactccctgaaagcaaggatgcgtagaatctcagactggactggtagcctttctagaaagaagagaaagctgcaggagcccagaagcaaggaaggctcagattatttcgactctcggtctgatggcctgaacaccgatgtacaggggtctagtcaggctagcgccttcctgtggtccggcggctctacacagatcctcagccaaagaagtgaatccactcatgccatcgggtccgaccctctccggcagaatatatacgagaacttcatgcgggaactggaaatgagtagaaccaatactgagaatatcgagacgtctaccgaaaccgccgaatctagttcagaaagtctgtcatcgctggagcagctcgatctgctgtttgaaaaagagcagggtgtggtccgcaaggccggctggctgttctttaagccactggtaacagtgcagaaagaacgcaagttagaactcgttgctcggcgaaaatggaaacagtactgggtaacacttaaagggtgcactctgttattttatgagacatacggtaagaattccatggatcaatcgtccgctcccagatgtgctctctttgccgaggattcgatcgtgcaatctgtgcccgaacatcccaagaaagagaacgtcttttgtctgagtaactcctttggtgacgtttacctgttccaggcaactagtcagaccgatctggaaaattgggtgaccgcagttcactctgcttgcgctagcctgtttgccaagaagcatggcaaagaagatacactgagactgctcaagaaccagaccaagaatttattgcagaaaatagacatggacagtaagatgaagaaaatggccgaactgcagctgtctgttgtctccgaccccaagaatagaaaggctatcgagaatcagattcaacagtgggaacagaatctggaaaaatttcatatggacctttttcgcatgagatgctatttagctagccttcagggaggggagttgccgaaccctaagtcacttctagctgccgcttcccgcccatcaaaactagcattgggacggctgggcatcctttcagtttcaagctttcacgccctggtgtgctccagggatgattctgccctcagaaaacgcaccctgtccctgacacaacgggggagaaataagaagggcatattttcatccctgaaaggcctggataccctcgcccgtaagggaaaggagaaacgtccaagcatcacgcaggtagatgagctcttgcacatttacggtagcaccgtggacggggtgcccagggataacgcgtgggaaattcaaacctacgtgcactttcaagataatcacggtgtcacagtggggattaaacccgagcatagggtagaggatatcttgaccctggcctgtaagatgcgccagctggagccatcccactacgggcttcagctgcgcaaacttgtcgatgacaatgtggaatattgcattcctgcaccctacgagtatatgcagcagcaagtgtacgatgagattgaagtgtttccattaaacgtgtacgatgtgcagctgacaaagaccggttctgtttgtgatttcggatttgcggttactgctcaagtcgacgaaagacaacatctatcaagaatcttcataagcgatgtcctgcccgacgggcttgcttacggagagggcctgagaaaaggtaacgagattatgactctgaacggcgaggcggtgagcgatctcgaccttaaacagatggaggctctgtttagtgaaaagagcgtgggcttaacgttgatcgctaggccccctgacacgaaagcaaccctatgcaccagttggtctgacagtgacctgttcagccgagatcagaaaagtctgctacccccgcccaatcagagccagttgctggaagagttcttagataatttcaagaagaatacagccaatgattttagtaatgttcctgacatcactaccggcctgaaaagatcccagacagatgggaccctcgatcaggtgtcccacagagagaagatggagcaaaccttccgctccgccgagcagatcaccgccctgtgccgatcattcaacgactcccaggcaaacggaatggaaggcccccgggagaaccaggacccgccccccaggtctctcgcccgccacctctctgatgcagacagattacgaaaggttatccaagagcttgtcgacaccgagaagtcttacgtgaaggacctctcttgtctcttcgagctgtacctcgagcctttacagaatgaaacctttttgactcaagacgagatggagagcctcttcggtagtttacctgagatgctggaattccagaaagtcttcctggaaaccttagaagacggtatcagcgcctcttcagattttaatactctagagactccatctcagtttcggaaattactgttctctctcgggggatccttcttatactacgctgaccatttcaaactgtatagcggcttttgcgccaatcatatcaaggtccaaaaggtgctcgaacgagccaagactgataaagcatttaaggcgttcctggatgctagaaacccaaccaagcagcactcttcgacactggaatcatacctcattaagcccgtgcagagagtattgaaatacccacttctgttgaaggaattagtttcattgaccgaccaggagtccgaggagcactaccatttgactgaggcgttaaaagcaatggaaaaggtggccagtcatatcaatgagatgcagaagatttacgaagactacggtaccgtattcgatcagctggtcgccgaacagagcggtactgagaaggaagttacggaattgagcatgggcgaactcctgatgcatagcacggtgtcttggcttaatccttttctttccctgggaaaagctaggaaagacctggagctgacagtcttcgtgttcaagagggccgtcattctggtgtataaggaaaactgcaagctgaagaaaaagctcccgtccaatagccgccctgctcacaacagtacagacctggacccctttaagttccggtggctcatacccatatctgcgctgcaagtccgactgggcaacccagcagggacagagaacaactctatttgggagctgatacacactaaatctgagattgagggccgccccgaaaccattttccagttgtgctgttctgattcagaatcaaagacaaatattgttaaagtgatcaggtcgatcctccgggagaacttcagacgtcacatcaaatgtgagctgcccctggaaaaaacatgtaaggatcgtctggtgcccctgaaaaatagagtgcccgtgtcggctaagctggcatcttctagatcactaaaggtgttaaaaaacagctctagcaacgagtggaccggcgagaccggtaaaggaacactgctggattccgacgagggttccctctcttcgggtacccagagctctggctgccctaccgctgaaggacgtcaggattcaaaatctacctcacccggaaaatacccccatccaggtctggccgatttcgccgataatctcatcaaagagagtgacattctgagcgatgaggatgatgatcaccggcagactgtgaagcagggcagccccacgaaggatatcgagattcaatttcagaggttgagaatctcagaggatccggacgtgcaccctgaggccgagcagcagccaggtcccgagtcaggtgagggccaaaaaggaggagaacagcccaaacttgtgagagggcatttctgtccaattaagagaaaagctaactctaccaagagagaccggggcacacttctcaaggcccagatccgacaccagtcactggactctcagtcggaaaatgccactatcgacctaaactccgtgctggaaagagaatttagcgttcagagcctgacaagcgtagtgtccgaagagtgtttctacgaaactgaatctcacggtaagtcatag

SEQ ID NO: 23472 - DNA, 3177 bp, synthetic construct
  source 1..3177: mol_type = other DNA; note = Synthetic coding sequence
atggacctgggccccctgaacatctgcgaggagatgaccatcctgcacgggggatttctcctggccgaacagctgtttcatcccaaggcactggccgagctgacaaagtccgactgggaacgggtcggccggccaattgtggaagctctccgtgaaattagttcagcagcagctcacagccagccattcgcctggaagaagaaagccctcatcattatttgggccaaggtactacagccccacccagtgacaccgtccgatacggagacgagatggcaagaggatctgtttttttcagtgggcaatatgatccccaccatcaaccacactattctgtttgagcttctgaaatccctggaggcgtcgggcctttttatccagcttctgatggccctgcctaccaccatttgtcacgcagagctggagcgatttttagaacacgttactgttgacactagcgccgaagatgttgcattcttcctggacgtgtggtgggaggtcatgaaacataagggccacccccaggatcccttgctgtctcagttctcagctatggctcacaagtatctcccagcactcgacgaatttccccacccccctaagagactccgtagtgatcctgacgcttgtcctaccatgcccctactcgccatgctcctgcgaggcctgacccagattcagagccggatactcggacctggtagaaaatgttgtgctctagcgaatttggccgacatgttgacagtcttcgcactgaccgaagacgatccccaagaagtttctgctaccgtctacctggacaaacttgcgaccgtgatctccgtctggaattctgatacgcagaacccttatcatcagcaggcactcgccgaaaaggttaaagaagcagagagggatgtcagcttgacttcactggccaaactcccctcggagaccatctttgttggatgtgaatttctgcaccacttgctccgggaatggggagaagaactgcaagccgtgttgcgttcatctcagggtacttcttacgactcttaccggctttgcgactccctgacctccttttcacagaatgctactttgtacctgaacaggacgtctttgtccaaggaggatagacaggttgtgtctgagctggctgagtgcgttagggactttctaaggaaaacctccactgttcttaaaaaccgtgccttagaggacattacagcctccatcgcaatggcagttatccagcagaaaatggatcgtcacatggaagtgtgttacatcttcgccagtgagaagaaatgggccttctcggacgagtgggtggcatgcctcggaagtaatcgagcactctttagacagcctgacctcgtcctgcggcttctggagaccgttattgatgtgagcaccgctgacagagcaatccctgaatcccagatcaggcaagtcatacatctcatcctcgagtgctatgcggatctgtctctgccaggaaagaacaaagtccttgcagggatcttgcggtcttggggcaggaaggggctcagtgaaaaactgctggcatatgtggaaggctttcaggaagacctgaatacgacgtttaatcagttgacacaatctgcttccgagcaggggcttgctaaggccgttgcatctgtggcccgccttgttattgtccaccctgaggtcacagtcaagaagatgtgctcacttgccgttgtcaatctgggcactcataagtttctcgctcagatcctaactgcgttccctgccctgcgattcgtggaggaacagggaccgaacagtagcgctacttttatggtaagctgtctgaaagaaacagtatggatgaaattttcaacacccaaagaagagaaacagttcctggaattgctgaactgtttgatgagcccagtcaagccacaggggataccggtggcagccctcctggagccggacgaggtcttgaaagaatttgttttgccgttcctcaggctcgatgtggaggaagtagatctaagcctgaggatcttcatccagacactagaggctaatgcctgtcgggaggagtattggcttcagacttgctctcccttccctctactgttctcactatgccagcttttggaccgctttagtaagtactggcaactccccaaggagaagagatgtttgtctctggacaggaaggatttggccattcacatcctcgaactgctatgtgagattgttagtgcgaacgctgagacttttagccctgatgtgtggataaaatctctgagctggctacacaggaagctcgagcagctggattggaccgtgggattacggctcaagtccttttttgaggggcattttaaatgtgaggtgcctgccactctatttgagatctgtaaactgagtgaagacgaatggacatcacaggcccaccctgggtatggagctgggaccgggcttctcgcatggatggagtgttgctgtgtgagcagtggcatctccgaacggatgctttcccttctggtcgtggacgtcggaaaccctgaggaagtccgtctgttctctaaagggtttctcgtggcattggttcaagttatgccttggtgcagtccccaggaatggcaaagactgcatcagctgacccggagactgctggagaagcagctgctgcacgtaccttactccctggaatatatccagtttgttcctctgttaaatctgaaaccctttgcccaggagttgcagctctcagtgctgttcctcagaacatttcagttcctctgtagccatagctgccgtgattggctcccactggaggggtggaaccatgtggtcaagttgctctgcggcagcctgacacgcctccttgacagtgtcagagccattcaggccgccggcccttgggttcaaggacccgagcaggatctgacccaggaagctctattcgtttacacccaagtcttctgccatgccctgcacataatggccatgctccacccagaggtgtgtgagccactgtacgtcttggcactggaaaccctaacatgttacgagacgctgtcaaagaccaatccttctgtatccagcctcctccaacgtgcccatgaacagaggtttctgaagtcaatcgcggagggtatcggccctgaggagcgtcgccaaacccttctacagaagatgagcagtttctag

SEQ ID NO: 23473 - DNA, 267 bp, synthetic construct
  source 1..267: mol_type = other DNA; note = Synthetic coding sequence
atgagcggcctgcgggtgtacagcaccagcgtgaccggcagccgggagatcaagtcccagcaatcggaggtgactcggattttagacggaaagcgcattcaataccagttagtggacattagccaggacaacgcactccgtgacgaaatgcgggctctggctggtaatcccaaggccactcctccccagatcgttaacggcgaccagtactgtggcgtgtgggcaggaggacggggtggaggcggctcagtgggacgtgggctgtag

SEQ ID NO: 23474 - DNA, 933 bp, synthetic construct
  source 1..933: mol_type = other DNA; note = Synthetic coding sequence
atggacggcagcttcgtgcagcacagcgtgcgggtgctgcaggagctcaacaagcagagggagaaaggccaatactgtgatgccacacttgatgttggcgggttggtgttcaaagcccactggagtgtgttggcttgttgcagtcatttctttcagagcttgtacggcgacggttccggcggtagtgtggtcctcccggccggtttcgccgagatattcggactcctgctggacttcttttatacagggcacctcgcccttactagcggtaatagggaccaggtactcctagctgcacgggagctgcgagttccagaagccgtggagttatgccagagctttaaacccaagacttctgttggacaggccgcgggtggtcagtccggccttggcccaccagcttctcagaatgtcaacagtcacgtaaaggaacctgccggactcgaggaagaggaagtgtctcgaaccctcgggctggtgccccgcgaccaggaaccccgcgggagccattccccccagagacctcagttacattctcccgcgcagtctgagggcccttcatctctttgtggaaaacttaagcaggcactgaagccgtgtccgctagaagacaagaaacctgaggattgcaaagtgccccctaggcccctggaggcagagggtgctcaactccagggcgggagtaacgaatgggaagtggttgtgcaggtcgaagacgacggggacggagattacatgagcgagccagaagctgttctgacccggcgcaagtcaaatgtaatccgaaagccatgcgccgcagagcccgcactgtctgccggtagcctcgcagcagagccggctgaaaatcgcaaagggaccgcggttccggttgagtgccctacttgccacaaaaaatttctgtctaagtattacttaaaggtccataattag

SEQ ID NO: 23475 - DNA, 600 bp, synthetic construct
  source 1..600: mol_type = other DNA; note = Synthetic coding sequence
atgagcagcggcaacgccaagatcggccaccccgcccccaacttcaaggctaccgcggtgatgcctgatggtcagtttaaagatatcagtctgtctgattataaaggcaaatacgtagtgttcttcttttatccactggactttacttttgtttgccccaccgagattattgccttctccgaccgcgctgaggaattcaagaagctcaattgtcaggttatcggtgcctccgtggactcccatttctgccatttggcttgggtcaatacgccaaagaagcaaggtggcttgggccctatgaacatccccttggtgagcgacccaaaaagaaccattgcacaggattatggcgtgctgaaagcggatgaagggattagtttcagagggctattcatcattgacgataagggtatactgcgccagatcactgtgaatgaccttcctgtggggagaagcgtggatgagacgcttagattggtgcaggcctttcagttcacagacaaacacggcgaagtctgccctgccggttggaaacccggcagtgacactattaaaccagacgttcagaaatcgaaggaatacttctccaaacagaaatag

SEQ ID NO: 23476 - DNA, 513 bp, synthetic construct
  source 1..513: mol_type = other DNA; note = Synthetic coding sequence
atgagcgtggccggcggcgagatccggggcgacaccggcggcgaggacaccgctgctccggggagattctcttttagtccagagcctaccttggaagacattcgtcggctgcatgctgagtttgcagcagagagggattgggagcagtttcatcaaccacggaacttgctgttggctttggtgggggaagtcggagagttagcagaattattccaatggaaaaccgacggcgagcctgggccacagggatggagtcccagagagcgggctgctctgcaggaggaactctccgatgtgctcatctaccttgttgcattagccgctcggtgcagagtggaccttcccttagctgtgctcagcaaaatggatattaacaggagacggtatcccgcacacctggccagaagttctagccgtaagtatactgagctgccacatggagctattagcgaagaccaagccgtgggaccagctgacatcccttgcgactcaaccggtcagacgtcaacctag

SEQ ID NO: 23477 - DNA, 702 bp, synthetic construct
  source 1..702: mol_type = other DNA; note = Synthetic coding sequence
atgagcgccaagcgggccgagctgaagaagacccacctgagcaagaactataaggcggtgtgtctggagctaaagcccgagcccacaaaaacgtttgactacaaggctgttaagcaggaagggcgcttcacaaaggccggagtcacacaagatttgaaaaacgaactgagggaggtcagagaggaattaaaggaaaaaatggaggagatcaaacagatcaaggacctcatggacaaagatttcgacaaactacacgagtttgtggaaattatgaaggagatgcagaaggatatggacgagaagatggatatcttgatcaatacgcaaaaaaattacaaacttccactccgccgggccccgaaggagcagcaggagctccgcctaatgggaaagactcatagggagccgcaactgcgccccaagaaaatggacggcgcttctggagtgaatggcgccccttgcgcactacataagaaaactatggcacctcaaaagactaagcagggctccctggatcctctgcaccactgtgggacgtgttgcgaaaagtgcctactttgcgcacttaagaacaactataacagaggcaatattcccagtgaggcaagcggactgtacaaggggggcgaggaacctgtaaccacacagccatcagtgggccatgctgtgcccgcccccaagtcgcagaccgaagggaggtag

SEQ ID NO: 23478 - DNA, 2196 bp, synthetic construct
  source 1..2196: mol_type = other DNA; note = Synthetic coding sequence
atgagcgtgaccctgaccagcgtgaagcgggtgcagagcagccccaatcttctcgctgctggacgagattcccagtctccagactctgcttggcggagttacaatgatgggaaccaggaaacactaaacggagatgcaacttactcttctctggccgccaaaggcttccggagtgtaagacccaacctgcaagataaaagatcccctacccaatcccagatcaccgtgaacggcaatagtggcggagccgtgtctcctatgtcttactaccagcgtcctttttcccccagcgcttactcgctgcccgcatccttgaactctagcattgtcatgcagcacggtaccagtttagattcaacagatacctacccacagcatgctcagagcctcgatgggactacctcatcctccatccccctctatagatctagtgaggaggaaaaacgagttaccgtgattaaggctccccactacccaggaatcggccctgtcgatgaaagcggtatccctaccgcgatccgaaccacggttgatcgcccaaaagattggtacaaaacgatgttcaagcagatccacatggtgcataagcccgacgacgacacggatatgtacaacacaccttatacctataatgccggtttatataatccaccttactctgctcagagccatccggccgctaaaacccaaacatacaggcctcttagcaaaagccattcggacaattccccaaacgcctttaaggacgcatcttctccagtccctccaccgcatgttcctcctcccgtgccaccactgcgccctagggatcggtctagtacagagaaacacgactgggatcctcctgatcgcaaagtggacactcgaaaattcaggtccgaaccccggagtatctttgaatatgagcccgggaaatcttccatcttgcagcacgagcggcccccacctctgcccaccaccccaacacctgtgccaagggagccagggcgcaagccattatcctccagtcggctgggggaggtcactggttctccctcgccgcctccccgtagcggggcccctacacccagcagcagggccccagcactgtctccgacacgccccccgaagaaaccactggattatgtccaggaccattctagtggcgtgtttaacgaggcctcgttataccagtcatcgatcgaccgatccctggagcggcccatgagtagcgctagcatggcttcagatttcagaaagcgcagaaaatctgaacctgcagttggaccaccaagagggctgggagatcaaagtgcttcaaggacttcacccgggagagtggacctgcccggatccagcacgactcttactaagagtttcactagcagcagcccttccagcccctctcgagcgaaggatcgagagtcaccccgcagttacagttccactcttaccgacatgggccggtccgcccctcgcgaacgccgcggcacccccgagaaggaaaaattgcctgcgaaggcagtttatgattttaaagctcagacatccaaggaactgtctttcaagaagggcgataccgtttacatacttaggaagattgatcagaactggtacgagggcgagcaccacggacgcgttggtatattccctatctcgtacgtggagaagcttactccgccggagaaagcccagccagctagacccccaccacctgcgcagccaggggagatcggtgaggccatagcgaagtacaattttaatgctgatacgaatgtggagctgagtttgcgtaaaggcgatcgggttattttattgaaacgagttgaccagaattggtacgagggcaaaatcccaggtaccaaccggcagggaatcttccctgtcagctacgtggaggtggtaaagaagaacactaagggagccgaagattaccccgatcctccgatacctcattcatactcatcggatcgcattcacagcctatcttcaaacaagcctcagcggcccgtcttcacacacgagaacattcagggaggcggggagccatttcaggcgctatataactacaccccccgcaacgaagatgaactcgagctacgcgagtccgacgttattgatgtgatggaaaagtgcgacgatgggtggttcgtcggaaccagtagaagaactaaatttttcggaacctttcctggcaattacgtgaagcgcctatag

SEQ ID NO: 23479 - DNA, 969 bp, synthetic construct
  source 1..969: mol_type = other DNA; note = Synthetic coding sequence
atgaccctggaggccatccggtacagccggggcagcctgcagatccttgatcagctactcctgcccaaacagagtcgatacgaagcagtaggatctgtgcatcaggcctgggaggcaattcgggctatgaaagtgcggggggcacccgccatagctctggtgggctgcctgtccctggcggtggaattacaggcgggcgccggcgggccaggcctggctgccctggtggcctttgttcgggacaaactttctttcttagtgaccgcgcgaccaacagccgtcaatatggccagggctgccagagatctggcggatgtagctgcacgcgaggctgagagggagggcgccactgaggaagcggtgagagagcggcgcgagacggagttgtgcgagcactgggaagaacacactcgccagcgtgagctgcccctcaggggcccgcttgggggcactgtgctggagacccggccctataatcagggcgctcgtctgaccgcgttcgagttggtgtacgagcagatacctgccaccttgatcaccgacagcatggtggccgccgcgatggcacacaggggtgtgagtgccgtggtggtgggggctgacagagttgtggccaacggcgacacagccaataaggtcggaacataccagttagctattgtggctaagcatcacggcatccctttttacgtagccgccccatcttcgtcttgtgatttaagactggaaaccggcaaagaaatcataattgaagaacgtcctggtcaggaattgactgacgtaaacggcgtccgcatcgccgctcccggaatcggggtctggaatcctgccttcgatgttacacctcacgacctaatcactggcggcatcatcaccgaattgggggtgtttgcccccgaagaactacgcacggccttgacaaccaccatttcctcccgggatggcactctagatggacctcaaatgtag

SEQ ID NO: 23480 - DNA, 5169 bp, synthetic construct
  source 1..5169: mol_type = other DNA; note = Synthetic coding sequence
atgggcaaccaggacggcaagctgaagcggagcgccggcgacgccctacatgaaggaggggggggcgccgaagacgccctggggccgcgagatgtggaggcgactaagaaggggagcggcggcaagaaggcgctgggtaagcacggcaagggtggcgggggtggcgggggggggggtgagagtggaaaaaagaagtcaaagagcgacagccgggctagtgttttctctaacctcagaataagaaagaatttgagcaaggggaagggtgccggaggctcaagagaagatgtgctagattcacaggccctccagacaggggagctggactcagctcatagcttgttgacaaagacccccgacttgagcctgtctgccgacgaggcaggtctgtctgatacagaatgcgcagatccgttcgaggttacaggccccggggggcccggccctgctgaagcgagagtcggaggtcgacccattgcggaagatgtggagacagccgccggcgctcaggatggtcagaggacatccagtggcagtgacacagatatctattcattccattccgcaacggaacaagaagatctgctctctgacattcagcaagccatccgtcttcagcagcagcaacagcagcagctgcagctgcagctgcagcagcagcaacaacagcagcaactgcaaggcgctgaggagcctgcggcaccccctactgccgtaagtccccaaccaggggcttttcttggtctagatagatttctgctggggcctagcggaggagctggagaggctcccggctcccccgatacagaacaagccctgagtgcgctttccgatcttcccgagtcactggccgccgagccgagagaaccacagcaaccacccagcccaggcggtctgccagttagtgaggcccccagcctaccagctgcccagcccgctgcaaaagattccccaagctccactgcattccccttccccgaagctggtcccggcgaggaagcagctggggcccccgtgcgcggggccggagacacagatgaagaaggagaagaagacgcgtttgaggacgcccctagaggatctcctggtgaggagtgggctccagaggtgggcgaggacgcaccccaacgcctgggggaggagccagaggaggaggcccaaggcccagatgctcctgctgccgcatccctgccgggctcacctgctccatcgcagagatgttttaagccttatccactgatcaccccgtgctatattaaaacaactacgcgtcagttatcttcccccaatcactccccatcgcaatctcctaatcagtctccccgcatcaagcgtcgtcctgaaccaagcctgagtcgagggtctaggacggcgctggcatccgtagccgcccccgctaagaagcaccgggcggatggaggactggccgcaggactttcccggtccgctgactggactgaggagctgggtgctcgcacaccacgggtcggcggtagcgcccacctgttggagcgaggcgtggcatctgatagtggtggcggggtgagcccggcgctcgcggccaaggcgagtggtgctccggctgccgcagacgggttccagaatgtgttcactgggcgtacccttctggaaaagttgtttagtcaacaggagaacgggccacctgaagaggccgagaaattttgttcgcggatcattgccatgggcctcctgctgccatttagcgattgcttccgggagccatgcaatcagaacgctcagactaacgctgccagctttgatcaagatcagctgtacacttgggctgctgtatcccagcccacccactccctcgactactcagagggccaattccccagaagagtcccaagtatgggccctcccagcaagccacccgacgaggagcacaggttggaggacgccgagactgagagtcaatccgccgttagcgaaactccacaaaagcggtcggatgccgtgcagaaagaagtggtggatatgaaatccgagggacaggcgaccgtaattcagcagctggaacaaaccatcgaggatctcaggactaaaatcgctgaactcgaaagacagtaccctgcacttgacacagaggttgctagcggacatcagggcttggagaatggagtgacagctagtggggatgtgtgtcttgaagccctgcgactggaagaaaaggaagtcagacatcaccgcatcctggaagccaagagcattcagacgtcacctaccgaggaaggaggggtgctcaccctacccccagttgatgggttacctggacggcccccttgcccccctggagccgaaagtgggccgcagacaaaattttgctccgaaatctccctgattgtgagcccacggcggattagcgtccagttggattcccaccagcctacccaatccatatctcaacctccacccccgcccagcctcttgtggtcagccggacaggggcagccgggtagccaaccgcctcacagtatttctactgagtttcagaccagccacgaacactctgtgagtagtgcttttaaaaactcctgcaacatccccagcccaccacctttgccgtgtacagagtcttcctcttccatgcccggcctcggcatggttcccccacctcctcctcctctccctggcatgaccgtccctactttaccttcaacagccatccctcaaccccctccattgcaggggacggagatgctgcctccgcctcctccgcctcttccaggggctggtattccaccacccccgccactgccaggtgccggtatactgcctctaccacccctcccgggcgctgggatccccccaccccctcccctccctggcgcggcaataccaccacctcctccattacctggcgccgggatcccgctgccaccccctcttccaggagctggaataccaccgccaccaccccttccaggtgccgggatcccgccacctcctcccctgcctggcgcgggaataccaccacctccacctctgcccggcgcaggaatccctccaccaccacctttgcccggcgcaggcatcccgccaccgccccccctgcctggagccggcattcctccccccccccctcttccaggagcgggaatacctccaccgccacccttgccgggagcaggtatcccaccacccccaccactaccaggagccgggattcctcctccgccacctttacccggtgccggaatacctccgccgccacctcttcccggagctgggatccctcctccaccccccctcccgggagcaggtataccacctcctcccccactgcccggcgtcgggatcccccctccacccccgctgcctggcgcgggcattcccccaccaccacctttgccaggggccgggatcccacctcccccacctctgcctggcgcgggtattccaccgcctcctcccctgccgagagtgggcattccccccccaccccctctgcctggcgcgggtattccccctccgcctcccttgcccggcgcaggcattcccccaccaccaccactgcccggagttggcatccccccccctcctccccttccaggagttgggatcccacccccacccccccttccaggtgccggcatacctccacctccacccctgccaggtatggggatccccccagctccagcccctcctctgccgccccctggtactgggattccaccacccccactcctgccagttagtgggccgccgctgcttccccaagtcggctctagtacactgcctacacctcaggtgtgcggatttctgccaccccctctcccatccgggttattcggcctggggatgaaccaagataaggggagccgcaaacagccaattgagccttgcaggcccatgaaaccattgtattggaccaggatccaactccactccaaaagagacagtagtacttcgctgatatgggaaaaaatcgaggagccatccatcgattgtcacgagttcgaggagttgttttcgaagactgcagtgaaggagcgaaagaagcccatctcggataccatcagtaagactaaggctaagcaggtcgttaaattactgagcaataaaaggtcacaggccgtgggcatactgatgtcctccctacatctggacatgaaggatatacaacacgccgtcgtcaacttggataactccgttgtggacctagagacacttcaggccctgtacgaaaatagggcccagagtgacgagttggaaaaaatagagaaacacggtcgatcatctaaggataaagagaatgctaaaagcttggacaaaccggaacagttcttatatgaattgtccctaataccgaatttctccgaacgagtcttctgtatactttttcagtcaacattttccgagtctatttgctccatcaggcggaaactcgagctgctgcagaaattgtgtgaaacattaaaaaacggaccgggagtgatgcaagttctggggctggtcctggctttcggcaactacatgaacggcgggaacaaaacaaggggccaggctgatgggttcggtctcgatattttaccgaaactgaaagacgtgaagtcatccgataacagccgtagcctgctgagctatatagtatcttactacttgcgcaatttcgatgaggacgcaggtaaagagcagtgtctgtttcccctgcccgaaccacaggatttattccaggctagtcagatgaagttcgaggacttccagaaagacctgaggaagttgaagaaggatctgaaggcctgtgaggtcgaagcgggaaaggtgtaccaagtctctagcaaggaacatatgcagccctttaaggagaacatggaacagtttattatccaggcgaagatcgatcaggaggcagaggaaaacagcctaaccgagacccacaaatgctttctcgagacgactgcttactttttcatgaaaccaaagttgggcgaaaaggaagtatcccccaatgcatttttctcaatctggcacgaatttagctccgactttaaggacttctggaaaaaagaaaacaaactactgctccaagagagagtgaaggaggctgaggaggtgtgcagacagaagaaaggcaagtctctgtataaaattaaacctcggcatgactccggaatcaaagctaaaatcagcatgaagacctag

SEQ ID NO: 23481 - DNA, 3048 bp, synthetic construct
  source 1..3048: mol_type = other DNA; note = Synthetic coding sequence
atgaccgtgagccagaagggcggcccccagcccacccccagccccgcgggccccgggacccaacttggaccaattactggggagatggacgaggccgactcggcgtttctcaagtttaagcagacagctgatgatagtttaagtctcacatcccctaatacggagagcatttttgtcgaggatccgtacaccgcatccctcaggagtgaaattgagtccgatgggcatgaatttgaagctgagagctggagcctggctgttgatgccgcttatgcgaagaagcagaagcgtgaggtggtaaagcggcaagatgttctttacgagttgatgcagacagaggttcaccacgtgcgtacacttaagattatgctgaaggtgtactcccgcgcccttcaggaggagctgcaattctcgtctaaggcaatcggccggttatttccttgcgctgatgacctcctagagacacactcccattttcttgcacggttgaaggagcgccgccaggagagtctagaggagggctcagaccgcaactacgttatacagaaaatcggcgacttgcttgtgcaacagttttctggagaaaacggggaacgcatgaaagagaaatacggtgtcttctgctccgggcacaatgaggctgtgagtcattacaagctcctgcttcagcagaacaaaaaatttcagaatctcatcaaaaaaatcgggaatttttcaattgtccgccgactcggagtgcaagagtgcatcctactagttacacagcgcattacaaagtacccagtgcttgtggagaggattatacaaaatacagaggcgggcactgaagattatgaggatttgacacaggccctgaacctgatcaaggacatcatttctcaggtggacgctaaggtgtcagaatgtgagaaaggacaacgactcagagagattgccggaaaaatggatcttaaaagttctagtaagttgaaaaatggtctgacgttccgtaaggaggatatgcttcagcggcagctgcacttggagggcatgttatgttggaagacaacctcaggaagactgaaagatatcttggctatcctgcttactgatgtgctgttacttctgcaggagaaggatcagaagtacgtctttgcgagcgtagattctaagcctcccgtaatttccctccagaaactcattgtgcgtgaggttgccaatgaagagaaagcaatgtttctcatctctgcctcactgcagggccctgaaatgtacgagatatacacttcgagtaaagaggacaggaacgcttggatggctcacatccagcgcgccgtcgaatcctgtccagatgaagaagaggggccattctccctgcccgaagaggagaggaaggtcgtagaagccagagcaactagactccgagacttccaggagcgcctcagtatgaaggatcagttaatcgcccagtctctcctggagaaacagcagatctacctggagatggccgaaatgggagggctggaggacctcccccagcctcgcggcttgtttagaggcggggatccctcagagaccctgcagggagaactcattcttaaatcagcaatgagcgagatcgagggaatacagtcccttatctgtagacagttggggagtgccaacgggcaggcagaggacgggggatcctccacgggtccccccaggcgggccgagacttttgcaggttatgactgtacaaattcacctacaaagaacggctcatttaaaaaaaaggtgtcaagcaccgatccgaggccgagggattggcggggtcctcctaacagccctgacctgaagcttagtgacagtgacattcccggctcatcggaagagtctccgcaggtggtggaagcccccggaacagagagcgacccccgactccccacagtcctcgaaagcgagcttgtgcagagaatccagaccctgtcccagctacttctgaacttgcaggccgtcatagctcaccaagattcatacgtggaaacacagagagctgctattcaggagcgcgagaagcagttcagactgcagagcacacgggggaatttactactggagcaggagagacagcggaacttcgaaaagcagcgcgaagagagagctgcactggaaaagttgcaatcacagctgaggcacgagcagcagcggtgggagagggagaggcagtggcaacaccaggagctcgaaagggcgggggctcggctgcaagagagagaaggcgaggctaggcagctgcgcgaaaggcttgagcaggaacgagccgagctggaaagacagaggcaagcttatcagcacgacctggagcggctccgagaggctcagcgggccgtcgaacgggagcgtgaacggttggagctgctgcggagactgaaaaagcagaatacagccccgggcgcattgccacccgacacattggcagaggctcagcccccgtcacatccaccttccttcaacggcgagggcctggagggcccgcgagtcagtatgctccccagcggcgtcggaccagaatacgccgaacgccctgaggtggctaggagggacagtgcacctacagagaataggctagcaaagtccgacgtgccaatacagctgttgtcagccacgaatcagtttcagagacaggctgccgtccagcagcaaatcccaactaagctcgccgcctccaccaaaggcggcaaggataaaggcggtaaatcccgcggatctcagcggtgggaatctagcgcttcattcgatctgaaacagcagctccttctgaataaattgatgggaaaggacgaaagtacttctcgtaaccgaaggtcactgtctcctatcctcccagggaggcattcccctgctccacctccagacccagggtttccagctccctctccacctcccgcagacagtccctcagagggctttagtttgaaagctggcggtacagccttactgcctgggccaccggcccccagccccctcccggcgaccccgctgtccgccaaggaggacgcatccaaagaagacgtcatcttcttctag

SEQ ID NO: 23482 - DNA, 2544 bp, synthetic construct
  source 1..2544: mol_type = other DNA; note = Synthetic coding sequence
atggaggccctgggccccggcggcgaccgggccagccccgccagctcaaccagcagcctggacctatggcatctctccatgagggccgattcagcttatagcagtttttctgccgcaagtggaggcccagagcccagaacccagtctcctgggacggatcttctgccctacctggactgggactacgtgagggtcgtttggggcgggccaggccctgctccaccagacgccgcactctgtacatctccccggcctagacctgctgtagctgccaggagtggccctcagcccactgaagtgcccggtactcctggacctctgaataggcaggccacccctttgctgtatgcactggcagctgaggctgaagccgctgctcaggcagcagagcccccgtccccccctgcttctcgagctgcttacagacagagactccagggcgctcagcgacgggtgctcagagagacaagttttcagaggaaggagcttaggatgtcactccctgcacgccttcggccgacagtaccagccaggccgcccgctacacatccacggtccgctagcttaagtcatcccggcggtgagggagagcccgcacgcagccgcgcacctgcacctggtaccgcgggcagaggacctttagccaatcagcagcgcaagtggtgtttctcagagcctggcaaactcgatagggtgggcagaggaggcggccctgcgagggagtgcctcggagaggcgtgttcatcgagtggcctgcccgggccggaacctctcgagtttcagcatccagcactggccaaattcgaggatcatgaagttggctggctgccagagactcagccccagggctccatgaatctcgactcgggatcattgaaactgggtgatgcttttcggccggcctcacgctctcgatccgcgtcaggggaggtgcttggctcctggggcggttccggcggcacaatccccatcgtccaagccgtaccccagggagcagagacgccacgaccactgtttcagaccaagctgtctaggttcttgccacagaaggaggctgcagtcatgtatcctgcagagttaccgcaatcgagccccgcggattctgagcagagagttagtgaaacctgcattgtccctgcttggttgccttctctccctgacgaagttttcctagaggaggccccactggtccgcatgcgcagtccccccgacccccacgcaagtcagggccccccggccagcgtgcatgcgagcgatcaaccatacggcactggactcgggcagcggaccggtcaggttaccgtgcccaccgaatacccactgcatgaatgccctgggacggccggggccgacgactgctggcaaggtgttaacggcagcgtcggtatctctcgccccacctctcatacccctaccggcacagctaacgacaatatccctaccatagaccccacaggcctgacgaccaatccccccactgccgccgagtcggatctgctgaagcccgtcccagctgacgccctggggttatcaggcaacgacacccccgggcctagccataatacagctcttgcacgagggacagggcagcccggatcaaggcccacatggccttctcaatgcctcgaagaacttgtacaagagctcgcgcgcttggacccctcgctgtgcgaccctttggcctctcaaccgtctcctgagcccccgttgggtctgctggacgggctgattccactggccgaggttagagccgccatgcgacccgcttgcggggaggccggggaggaagcggctagcacttttgaaccaggttcctatcagttttcatttacacaactcctgccagccccccgcgaggagacacgacttgaaaatccggctacccatcctgtgttagaccagccttgtggacagggactcccagcaccaaacaacagtatccagggcaagaaggtcgaactggccgccaggcttcagaagatgctgcaagatttacataccgaacaggagaggctgcagggagaggcccaggcgtgggctcgaaggcaggccgctttggaggctgcagtccgtcaagcttgtgctccacaggaactcgaaaggttcagtcgctttatggcagacctggaaagggtacttgggttactgctgctgctcggatctagactggctcgtgttcgtcgggccctagcacgggccgcctcagattccgacccggatgagcaacggctgagactgctgcagcgccaggaggaagacgccaaggaattgaaggagcatgtcgctagacgggagcgcgccgtccgggaggtgttggtaagagctcttcctgtggaggagttgcgcgtgtactgcgcactgctcgcaggcaaagcggctgtgcttgctcaacagcgaaacctggacgagagaatcaggttactccaggaccagctggacgcgatccgcgatgacctgggacaccatgctccctcaccctcccccgcaagaccacctggtacttgccctcctgtccagccacctttcccgctgctcttgacatag

SEQ ID NO: 23483 - DNA, 2502 bp, synthetic construct
  source 1..2502: mol_type = other DNA; note = Synthetic coding sequence
atgaagttcaccaacaccaaggtgcagatgatgcagaacgtgcacctagccccggagaccgacgaagatgacctgtacagtggctacaacgactacaaccctatctacgacatcgaagaattagaaaacgacgccgcattccagcaggccgtgaggacgtcacatggtagaaggcctcccatcacagctaaaattagttccacagcagtaacgagaccaatcgcgaccggttatgggtcaaagactagcctggcttcctcaatcggaaggccaatgacaggagcgatacaggacggcgtcacccggcctatgaccgctgtgcgagctgcaggcttcactaaagccgcgcttcgaggcagcgcctttgacccactatcccagtctagggggccagccagtcctctcgaagccaagaaaaaggattctccagaggagaaaataaagcagctggagaaagaagtcaacgaattggttgaagagagctgcattgccaattcgtgtggagatctgaaattggcattggagaaggcaaaggatgcaggcaggaaggaacgagtgttagtcaggcaacgagaacaagtcaccacccccgaaaatattaatcttgatctgacatatagcgtcttattcaacctggctagtcagtactccgttaacgagatgtatgcagaggcacttaatacctatcaggtgatcgttaagaacaaaatgtttagtaatgcaggaatactgaagatgaatatgggtaacatttaccttaaacagcgaaattacagtaaggcaatcaagttttatagaatggcactcgatcaagttcccagcgttaacaaacagatgaggattaagataatgcagaacatcggggtcaccttcatccaagccggccagtatagtgacgcgataaactcctacgaacatatcatgtccatggcccctaacttgaaggcaggatataatctgactatctgctacttcgcgataggggatagggaaaagatgaaaaaggctttccagaaactcattacagtgccgcttgaaatcgatgaggataaatacatctcgccgagtgacgacccacacactaatctagtgacagaggctataaaaaacgaccacttgcgccaaatggaacgagaacgcaaagcaatggctgaaaaatacatcatgacctccgccaaactcatcgcacccgttatagagacatccttcgccgccggatacgactggtgcgtcgaggttgtaaaagcgtcccagtacgtggaacttgcgaacgacctcgagataaataaggccgtaacttacctgcgacagaaggactacaatcaggctgttgagatcctgaaggttctggaaaaaaaagattcccgggttaaaagtgccgctgccaccaacctgagcgctttgtactatatggggaaagatttcgcgcaagcttctagctacgcggatatcgccgttaattcggacagatacaatcccgccgccctcactaacaagggcaatactgtgtttgcaaacggtgattacgaaaaggcagcagaattttacaaagaagctctacgcaatgacagtagctgcaccgaagcactctataacatcgggctgacttacgagaagctcaaccgtctagacgaagccctggattgtttcttaaagctgcacgccattctgcggaactctgccgaggttctctaccagatcgcgaatatctacgaactcatggaaaatccttctcaggccattgagtggctgatgcaagtggtgagcgttatcccgactgacccccaggtgctgtcgaaactgggtgaactgtatgacagggaaggagataagagtcaggctttccagtactactatgagtcataccgatattttccatgcaatatcgaagtcatcgagtggctgggtgcttattacattgatacccagttttgggaaaaagccattcagtactttgagcgagcttcactaattcaacccacacaggtgaagtggcagctaatggttgcttcttgttttaggaggtccgggaactatcagaaggctttggacacgtacaaagatacccatcgaaaattccccgaaaatgtggagtgtctaagatttctagttcgtctgtgcactgacctcggattgaaagatgctcaagagtatgcaaggaaactgaaaaggctggaaaagatgaaagaaatacgggaacagagaatcaaatctggccgggatggttcaggtggttctcggggcaaacgagagggcagcgctagtggggattcaggtcagaactacagcgctagtagcaaaggcgaaagactgagtgcgcggctgcgcgcattgcctggaaccaatgagccctacgagagcagcagcaataaggagatagatgcctcctatgtcgatccgctaggtccccagattgaaagacctaagactgccgccaaaaagaggattgatgaagacgactttgccgacgaagagttgggagatgacttgttgccagaatag

SEQ ID NO: 23484 - DNA, 918 bp, synthetic construct
  source 1..918: mol_type = other DNA; note = Synthetic coding sequence
atggacctgagcggcgtgaagaagaagagcctgctgggcgtgaaggaaaacaataaaaaatcaagcaccagggctccttcacctacgaagaggaaggaccggagcgatgagaaatcgaaggaccgatccaaagacaagggggctacaaaggaatctagcgagaaagacaggggcagagacaagacacggaaacgccgcagtgcttcatctggctcatcatctacccgatcgcggtcctcctctacatctagctctggctcgagcacttccacaggaagtagctccggttcaagtagctcaagtgcctcttcaaggagcggctcctcatccacgtcacggtctagtagcagctctagtagtagtggatcgccttccccaagtcgccgtcgccatgacaacagaaggcgtagccgatctaaaagtaaacctcccaagcgcgatgaaaaggaaaggaagagacgcagcccttcgcctaagcccaccaaggtgcacatcggtagactgacgcgcaacgtcaccaaagaccacattatggaaatctttagtacatatggtaagataaaaatgatcgatatgcctgtggagcgcatgcaccctcacctgtccaagggttacgcttatgtggagttcgaaaaccccgacgaagccgagaaagctttaaagcacatggacggtggtcagatcgacggccaggaaattactgcaactgctgtcctcgcaccgtggcctagacccccacctaggaggttctctccccctaggcgtatgctaccacccccaccgatgtggcgtcggtcaccccccaggatgcgtcggcgtagtcgctcccctcggcgacggtcccctgtgaggcggcgcagccggtctcccggccgccgtcggcatcgcagcaggtcatcttccaattcctccaggtag

SEQ ID NO: 23485 - DNA, 1119 bp, synthetic construct
  source 1..1119: mol_type = other DNA; note = Synthetic coding sequence
atggacgtgctgagccccctgagcttcatcaaggtgagccacgtgcggatgcaaggaatcctgttattggtattcgccaagtatcaacacttgccttacatacagattctgtcaacaaaaagcactccgacgggactgttcggttactggggcaataaaggcggggtcaatatctgccttaagctctatggctactatgtgtccatcatcaactgtcatctgcccccccatatttctaataattatcagagacttgaacactttgataggattttagagatgcagaattgcgagggtagggatattccgaatatcctggaccacgatctgataatttggttcggtgatatgaacttcagaatcgaggactttggactgcactttgtgagggagtcaatcaagaatcgatgttatgggggactctgggaaaaggaccagctgtcgatcgccaagaagcacgacccgctcttgcgggaattccaagaaggcaggcttctgttcccacctacgtacaagttcgatcggaatagtaacgactatgacacctcagaaaaaaagcggaaaccagcatggacagacaggatactgtggcggctgaaacgccagccgtgtgcaggcccagatacgcctataccccccgcgagccattttagcctatccctccgaggctattcctctcatatgacctatgggatcagcgatcacaaaccagtgtcaggtacgttcgacctagaacttaaacctttggtttccgctccccttattgtgctgatgcctgaagacctatggactgttgagaatgatatgatggtgtcttattctagcacgagcgactttccttcttccccttgggactggattggcctctacaaggtcggcctgagggatgttaacgattacgtatcgtacgcatgggtgggggactcaaaagtttcgtgctccgacaaccttaaccaggtttacatcgatatcagtaatatccctacgacggaggatgagtttctcctgtgctattatagcaactctctccgatcggtcgtcggaatttcccggcccttccagatacctcccggcagtctcagggaggacccactaggggaggcccagccccagatttag

SEQ ID NO: 23486 - DNA, 1692 bp, synthetic construct
  source 1..1692: mol_type = other DNA; note = Synthetic coding sequence
atgcggctggacctggccagcctgatgagcgcccccaagagcctgggctccgctttcaagtcctggcggctggataaagcaccttctcctcagcatacgttcccttcaacgagtataccaggcatggcattcgctctcttggctagtgtgccacccgtcttcgggctttacacttccttcttccctgtgctcatctactccctgcttggaaccggcaggcatctgtcaactggtacttttgcgattctgtccctgatgactggctctgcagtcgagcggctggtccctgagcccctggtgggcaacctgtctggcattgaaaaagagcaactggacgcgcaacgagtcggcgtggctgcagcggttgcgtttggaagcggagcgctgatgctcggcatgttcgttcttcagctgggggttctgagcacgttcctctcggagcccgttgtgaaggccctgacatctggagctgcactccacgtgctgctgagtcagctgccaagcttgttaggtctgagcctgccgcggcagatcggctgtttttccctctttaaaactctggcctctctgctgacggcgctaccacggtcttcccctgcagagcttaccatcagcgcgcttagcctggcattgctagtgccagtgaaggagctgaacgtccggttccgtgatcggcttcctacgccgatccccggtgaggttgtgctagtcctgctggcctccgtcttgtgcttcacaagctcagtggatactcgctatcaggtgcagatagttggactgttgcctggaggtttccctcaaccgctcctgccaaatctcgcagaactcccacgaattctggccgatagtctacccatcgccttagtctcctttgcagtgagcgccagtctggcttcaatccacgctgataagtacagctacacaatcgattcaaatcaggagttcttagcccacggcgcttccaacctgatctcgtccctgttttcttgcttccccaactccgcaacgcttgccactaccaatctcctcgttgacgcaggcggtaagacacagctagcaggcctgttctcctgcacagtcgtcttatccgttctgctgtggctggggccgtttttctactacttgccgaaagctgtacttgcgtgcatcaatattagcagcatgcggcaggtcttttgccagatgcaggaattacctcagttatggcatatttcaagagtggattttctgctccaagtgccaggcttgtgcatcttgagctaccctacccctctgtatttcggcacccgtgggcagtttcggtgcaatctggagtggcacctaggcctgggggagggggagaaagaaacgagtaagcctgacggccctatggtggcggtggccgaacctgtgcgagtcgtggttctggacttctctggggtgacattcgcggacgcagcaggagctcgggaagtagtccaagtgcgagaacgcctggcctccagatgtagggacgccagaatccgattacttttggcacaatgcaatgccctcgtgcagggcaccctcacacgtgtgggcctgctggatagggtgactcccgaccagctgttcgttagtgtgcaggatgctgctgcgtacgcactaggttctctcctccggggtagttctaccaggtccggaagtcaagaggcccttgggtgcggtaaatag

SEQ ID NO: 23487 - DNA, 2892 bp, synthetic construct
  source 1..2892: mol_type = other DNA; note = Synthetic coding sequence
atggccgagcggggcggcgccggcggcggccccggcggcgccggcggaggctctgggcagagaggaagcggggtggctcaatcaccgcagcagcctccaccgcaacagcaacagcagcagccaccgcagcagccaactccgcccaagttagcacaggctaccagctcatctagctcaacgtccgcagccgctgccagctcctcaagttcctccacctcaacgagtatggcagttgccgtggcaagcggctcggcacctccagggggcccagggccgggccggaccccggcgcccgtccagatgaacttgtatgcaacatgggaggtggatcgttcctcctcgtcatgtgtcccacgactgttcagtctgactctaaaaaagttagtaatgctgaaggaaatggacaaggacctgaatagcgtcgtcattgctgtaaaattgcagggatctaaacggattcttcgaagtaatgaaatcgttctgcctgctagcggactcgtcgagaccgaattgcaactgacattctcccttcaataccctcactttctaaagcgcgacgccaacaaactgcagatcatgctgcagagacggaagcggtacaaaaaccggaccattctcggatataagaccctggccgtgggcctcattaacatggccgaggttatgcagcatcccaatgaaggggccttggttttaggactgcactctaacgtgaaggacgtgagcgtcccggtagcagagatcaagatctattcactgagttctcagccaatcgaccatgagggaattaaaagtaagcttagtgataggtcaccagatatcgataattactctgaggaggaagaggagtccttttcctcagaacaggagggctccgatgaccctctccacgggcaggacctcttttatgaagacgaagaccttcgcaaggtgaaaaagaccaggcgaaagttaacttccacatctgcaattacaaggcaacctaacatcaaacagaagtttgtcgctttgttgaaacggtttaaggtgtcagatgaggtggggttcggtctcgagcatgtgagccgggagcagattcgggaagtagaagaggacctggatgagctgtatgatagcctggagatgtacaaccccagcgatagcggtcccgagatggaagagacagaaagtatcctctctacccctaagccgaagctgaagcccttcttcgagggaatgtcacagagtagttctcagacagagatcggctcactgaactccaaaggatcactgggcaaggatacaaccagccctatggagctagcggccctggagaaaattaagagtacatggattaagaaccaggacgacagcctgacagaaaccgacacactggagattaccgatcaggatatgtttggggacgcctcaacttctttggtggtgccagagaaggtcaaaacccccatgaagtcttccaagaccgatttgcaggggtcagcctccccatctaaagtcgagggtgttcataccccaaggcaaaaaaggagcacccccctgaaagagagacaactctccaaacctttgtctgaacggaccaatagtagcgacagtgagagatctccggatctgggccattctacccagatccctcggaaagtggtgtacgatcaattaaatcagatcctggtgtcagacgccgctcttcctgagaacgtgattctcgttaacaccactgattggcagggccagtatgtggctgaactcctccaggatcagaggaagcctgtggtttgtacttgttctacagttgaggttcaagcggtgctgtccgccctgttaaccagaatccaacggtattgtaactgcaattcctccatgccaagacctgttaaggtcgccgccgtcggaggccagtcatacctgtcgtccatactgcgcttctttgttaagagcttggcaaataaaacttctgattggctcgggtacatgcgctttctcatcattcctctgggctctcatcctgtcgcaaaatacctgggttcggtcgactccaagtactccagctcatttttggactccggatggcgagacctcttctctagatctgagccccctgtaagcgagcagttggatgtagcaggacgcgtgatgcagtatgtgaatggggctgctactacacaccagctacccgtggctgaggccatgcttacatgcagacataagtttcccgacgaagatagctaccaaaagttcattcccttcatcggtgtcgtaaaggtgggcctagtcgaggactctcctagcaccgctggcgacggcgatgattcacccgtggtttccctgaccgtgccatccacttctcctccatcctcttcaggtttgagccgggatgccactgcaacaccaccaagtagtccttccatgtcctccgcccttgcgatcgttggctctcccaatagcccttacggagacgtaatcggtctacaagtcgattattggctggggcatccaggcgaaaggcgccgagagggagacaagagggacgctagcagcaagaacactttaaaatctgtgtttagaagcgtccaggtgagcaggcttccacattccggcgaggctcagctgtcgggcacaatggctatgactgtggtcactaaggaaaagaataaaaaggtgcctaccattttccttagtaagaagccccgggaaaaggaggttgacagcaagtcccaggtcatcgaaggtatcagcaggctgatctgctccgctaaacagcagcagactatgctgagggtgagtattgacggggttgaatggtctgatatcaaattctttcagctggccgctcagtggcctacccacgtgaaacacttccctgtgggtttgttttctgggagcaaagcgacgtag

SEQ ID NO: 23488 - DNA, 546 bp, synthetic construct
  source 1..546: mol_type = other DNA; note = Synthetic coding sequence
atggaggagatccccgcccaggaggccgccggcagcccccgggtgcaatttcaatctcttgaaactcaatctgaatgtctcagccccgagccccagtttgtccaggatacagacatggagcagggtttaaccggagcccctccagtcccacaggtgccagccctgcccagggaaggcagccccggcgaccaggctgccgctctcctgactgctagatatcaggagttcgtcacattcgaggacgtggctgtgcatctcacacgtgaagagtggggttatctggatccagtccagcgtgacctgtaccgggaagtgatgctggagaattatggcaacgtggtgtccttgggaatcctcttgcggctgccaacgactaggatccacagcgttaatagttgccctgccctgtctcacacacaggcctcagcgttcagtggcgaaacactggcagtactgaccgcgggcatctccaaaaggtggccgaaatatcggctgcctatcgacatcgctcggccttgctccgagaccccattccctcggctgtag

SEQ ID NO: 23489 - DNA, 1410 bp, synthetic construct
  source 1..1410: mol_type = other DNA; note = Synthetic coding sequence
atggtgctggagggcaaccccgaggtgggcagcccccggaccagcgatctgcagcatcggggtaacaaaggctcatgcgttctgagcagccctggtgaggacgctcagcctggagaggaaccaatcaagtacggagaactgattgtcctgggatgctgtgaggaagggggcgaagagacagaggcacagcggggcgaggtaaccggcccccgggctcatagctgctataatgggtgtttagccagcggcgataagggccgacgccgctctaggctggccctctccagacgctctcatgccaacggtgtcaaaccggacgtgatgcaccatatcagtacgccactggtgtcaaaggcgctctctaatagaggacaacatagcatctcgtataccctgagtcgatctcactcagtcatcgtggagtatactcatgactctgatactgacatgtttcagataggtcgctcaactgagaatatgatcgactttgttgtgaccgatacttcaccggggggcggagctgccgaaggaccttctgcccaatcgacaatctcacgatacgcctgccgcattctgtgcgaccgccgccccccttataccgctcgcatatatgccgctggttttgatgccagttccaacatcttcctcggggaaagagcagccaagtggcgaactcctgacgggcttatggatggtctgaccaccaacggagtgctcgttatgcaccctgccggcggctttagcgaagacagtgctcctggcgtctggagggagatttcagtatgcgggaacgtatacaccctccgggattcaaggagcgctcagcagcgaggaaagttggtagagaacgaaagtaatgtgctgcaggacgggagtctgatcgacttatgtggagctacactgctgtggagaacgccagcaggcctcttgagagctccgacacttaaacagctggaagcccagcgccaagaggccaatgctgcacgcccccagtgcccggtcggactgagcactctggcgtttcctagcccagccaggggaagaacggcaccggacaaacagcaaccctgggtatatgtacgatgcggccacgtgcacgggtatcatggctggggttgccggcgggaacgcggccctcaggaacgagagtgcccactgtgccggctcgttggtccatacgttccactttggctggggcaggaggcaggtctgtgcctcgatcctggacctccaagccatgcctttgctccctgtggccatgtgtgctcagagaagacggccagatactgggctcaaacacccttgccacacgggacacacgcttttcacgcagcatgtcctttttgcggcgcttggctaactggagaacatgggtgcgtgcggctgatctttcagggtccactggattag

SEQ ID NO: 23490 - DNA, 3312 bp, synthetic construct
  source 1..3312: mol_type = other DNA; note = Synthetic coding sequence
atggccggcgccagcgtgaaggtggccgtgcgggtgcggcccttcaacgcccgggagacgagccaagacgcgaaatgcgtcgtcagcatgcaaggtaacacaacatccatcattaacccaaagcaaagcaaggatgcgcccaagtcatttactttcgactactcatactggagtcatactagtaccgaagatccccaattcgcgtcgcagcaacaggtctatcgggatatcggtgaagaaatgctgctccatgcctttgaaggctataatgtttgtatctttgcatacggacagaccggcgccggcaagtcctacactatgatggggcgacaggagcccggtcagcagggaatcgtgccccaattatgtgaagatttattttccagggtgtctgaaaaccagagcgcacaactgtcatacagcgtcgaagtctcatacatggagatatattgtgagcgagtgagggacttgttgaacccgaaaagccggggcagcctgagagtccgagaacaccctatcctgggaccttacgtgcaggatctaagcaaactcgccgtaacctcctatgctgacatcgctgatctcatggattgtggcaacaaggccaggacagtagctgcgaccaatatgaacgaaacctcaagccgcagccacgcagtcttcacaatcgtgttcacccaaagatgccacgatcagctgaccggcctggacagcgagaaggtgtctaagatctctctggtagatctggcagggtcagagcgggcagatagctccggagctaggggcatgaggcttaaagaaggagctaatatcaataagtccctcacaacacttggtaaagtaatcagcgccctggcagacatgcagtccaaaaagcgcaaaagcgattttatcccctacagggattctgtgctgacctggctcttgaaggagaatctgggcgggaattcaagaactgctatgatagccgctctgtctcctgcagatattaattacgaagagactttgagcacacttagatacgctgacaggactaagcagatacggtgcaacgcgatcatcaatgaggatccaaatgcccgcctaataagggagctacaagaagaggttgcgagacttcgggagctgctgatggcccaaggcttatcagcatcagcactagaaggcttaaaaacagaagaggggtctgttcgcggagccctccccgccgtgtcctctcctcccgctccagtatcgccaagtagcccaacaacccacaatggcgaactcgagccctccttctcgcctaacacagagtctcagattggcccagaggaggcaatggagcgtctgcaagagacagaaaagattatcgccgagctaaatgagacttgggaagagaagctgcgtaagacggaggctctgcgaatggagcgcgaagcattgctcgcagagatgggcgttgctgttagggaggacggaggtacagtgggagtgtttagccccaagaagacaccccatctggtgaaccttaacgaagaccctctgatgtctgagtgtctgttataccacatcaaggacggcgtaaccagagtgggacaggtcgacatggacattaagctgaccggacagttcattagggaacagcattgcctcttccgctcaataccccaacctgatggggaagtagtggtgaccctggaaccttgcgaaggcgccgagacttatgtgaatggcaaattagttactgagccactagtgctcaaaagtggcaaccggatcgtgatgggcaaaaaccatgtgtttaggttcaatcacccagaacaagcgcggttggagcgggaaagaggcgtccctcctcctccagggccccccagcgagcccgtggactggaacttcgcccagaaagagctgctcgaacaacagggcatcgacataaaacttgagatggaaaaacggttgcaagacctcgaaaaccaatatcgaaaagagaaagaggaagctgacctgttgcttgagcagcagcgcctctacgccgattcagacagcggcgatgacagcgataaaaggtcttgcgaggaatcttggcgacttatatcctcactaagggaacaactgccccctaccacagtgcagactattgtgaaaaggtgcggactgcctagctctggaaagaggcgcgcgccgagaagggtgtaccagattccacagcgacgacgcctgcagggtaaggatcctcgctgggccactatggcggacctcaaaatgcaggctgtgaaagagatctgttatgaggtggcccttgccgactttaggcatggtcgagcggagatcgaggcgctcgctgctctaaaaatgcgggaactgtgccggacttacggcaaacccgacggacctggagacgcctggagggctgtggctagggatgtatgggacacagtgggggaggaggagggcgggggcgcaggctcaggtggtggatctgaggagggcgctcgaggcgctgaggtggaagatctgcgggctcatatcgataagctgacaggtatattgcaggaagtgaagttgcagaattccagcaaagatcgggaacttcaggccctgagggataggatgctcaggatggaaagagtcataccactcgcacaggatcatgaagacgagaacgaagaaggcggagaagtgccttgggccccacctgaaggcagcgaagccgcagaagaagccgcgccgtccgatcgcatgccatctgcccgcccccccagccctcctctatcttcctgggaacgggtctcccggctaatggaggaagatccagccttcaggagggggagactccggtggcttaagcaagaacagttaagactccagggcttgcaggggtctggtgggcggggcgggggccttagacgcccgccagcccgcttcgtccccccccatgattgcaaactccgcttcccttttaaatctaatcctcagcaccgggagtcatggcccgggatgggaagtggtgaggccccaactcccctccagccccctgaagaagtgaccccccaccctgcaacgcctgcgcgccgaccgccgtctcccaggcggagccaccacccccggcggaattctctcgacggaggtggtcgctcccgcggcgcagggtcagcacagccagagccacaacacttccagccaaagaaacataatagctatccacaacccccccaaccgtatccagcccaacgtccaccgggaccccggtaccctccatacacgacgccccctcggatgaggaggcagagaagtgcccccgatctaaaggagagcggggccgctgtgtag

SEQ ID NO: 23491 - DNA, 1260 bp, synthetic construct
  source 1..1260: mol_type = other DNA; note = Synthetic coding sequence
atggccgagcccgtgggcaagcggggccggtggagcggcggcagcggagcgggtcgaggagggaggggaggatgggggggaaggggaaggcggcctagagcacaacgctcaccgagtaggggaactctggacgtggtgtcagtggacttagtaaccgatagcgatgaggaaatcctggaagtggcgacagccagaggcgcggccgacgaagttgaggtggagccaccagaacctccaggtcctgtggcttcccgggataactcaaacagcgatagtgagggcgaggatcggaggcccgctggtcccccgcgagagcccgtgagacgtcggcggcgactggtgctggacccgggggaggctccattagtcccagtttactctggcaaggtgaagtcatctctgcgtctgattcccgacgacctgtcactgctgaaattgtatccacccggggacgaggaggaggcggagctggccgatagctccggcctgtatcatgaaggttccccctcccccggaagcccatggaaaacaaagctgagaaccaaagacaaggaggaaaagaaaaagactgaatttctcgatcttgataattctcccttgtcccctccatccccgcgcacaaagagcaggactcacaccagggccctcaaaaagctgtctgaggtaaacaagcgtctccaagatctaaggtcatgcctatcacctaaacccccccagggtcaggaacagcaggggcaggaggatgaggtagtgctcgtggaaggacctacgttgcccgaaacaccccggctttttcccctgaagatacgctgtagggccgatttagtgagactgccattgagaatgtccgagcccttacaaagtgtggtagaccacatggcaacacaccttggagtgtcgccgtccaggatcctgcttttgttcggcgagaccgagctgagcccaacggctacccccaggaccctaaaacttggtgtggcagacattatagactgcgtagtactgacatcttctccagaagcgacagagacgtcacagcaactccagctacgagtgcagggtaaagaaaagcatcagaccctggaagtcagcctgtcaagggattcaccattaaagaccctgatgtcccattacgaggaagccatgggcctatccggtcggaaactgagctttttcttcgacgggacaaagctcagtgggcgcgaactccccgccgatctgggcatggagtcgggagacctcattgaagtgtggggctag

SEQ ID NO: 23492 - DNA, 384 bp, synthetic construct
  source 1..384: mol_type = other DNA; note = Synthetic coding sequence
atgcggcccctggacatcgtggagctggccgagcccgaggaggtggaagtccttgagcccgaggaagactttgagcaatttttactccctgtgataaacgagatgcgcgaggacatcgccagcctgactcgggagcacggtagggcatacctgagaaacagaagcaagctttgggaaatggacaacatgctgatccagattaaaactcaggtcgaggcctctgaagaatcagccctcaatcaccttcagaatccaggcgacgccgccgaaggaagggccgctaaaagatgcgagaaggctgaggagaaagccaaggagattgctaagatggctgagatgttagttgagctggtgaggcgcatcgagaaaagcgagagctcttag

SEQ ID NO: 23493 - DNA, 1263 bp, synthetic construct
  source 1..1263: mol_type = other DNA; note = Synthetic coding sequence
atgcccctgcaggtgagcgactacagctggcagcagaccaagaccgccgtatttctgtccctgccactgaaaggggtttgtgtcagagacacagacgtgttttgtactgagaactacctcaaagtgaacttccccccttttctgtttgaggccttcctgtacgcgcctatcgatgacgagtcttcaaaggccaaaataggtaatgatacaattgtgtttacactgtataaaaaggaggctgctatgtgggagacgttgtctgtcacaggcgttgacaaggagatgatgcagaggatccgggagaagtcaattctccaggcccaggagagggcgaaagaagcgactgaagctaaagccgcagctaagagagaggaccagaagtatgcgctgtctgtcatgatgaaaattgaggaggaggagagaaaaaagattgaggacatgaaagagaacgagaggattaaggcaactaaggcattagaggcttggaaagagtatcagaggaaggctgaggagcagaaaaaaattcaaagggaggaaaaactgtgtcaaaaggaaaagcagataaaagaggagcggaaaaaaatcaagtataaaagtctgactcgtaatctggcttcccgaaatctggcccccaagggccgtaacagtgaaaatatattcaccgagaaactgaaggaagacagcattccagcccccagatccgtgggcagcataaagatcaattttacgcctagggtgtttccaacagccctacgcgagagccaggttgcagaagaagaagagtggctgcataaacaagccgaggcacgcagagcaatgaacaccgacattgctgagctgtgcgacctgaaggaggaggagaagaaccccgagtggctgaaagacaagggcaacaaactatttgcaacagagaactacctcgccgccataaacgcatacaaccttgccatcaggctcaacaacaaaatgccactgctctatcttaatcgcgcagcctgccatctgaaactcaagaacctgcataaggccattgaagattcgtccaaagccctggagttactgatgccacctgttacagataatgctaatgccaggatgaaagcacacgtgcgccgcgggaccgccttctgccagttggagctgtacgtggaaggactgcaggactatgaggctgccctaaagattgacccctcgaacaaaatcgtgcagatcgatgcagagaagatcagaaacgtaatccaagggaccgaactgaagagctag

SEQ ID NO: 23494 - DNA, 348 bp, synthetic construct
  source 1..348: mol_type = other DNA; note = Synthetic coding sequence
atgcggtacgtggccagctacctgctggccgccctgggcggcaacagctccccaagtgccaaggatattaaaaagattcttgacagcgtagggatcgaggccgacgatgaccgcctgaacaaggtcattagcgaactgaacggcaaaaacatcgaagatgtcatcgcccagggcattgggaaacttgccagcgtccctgccggcggtgcagtggccgtttccgcagccccaggaagcgcggcccccgccgctggctccgcacctgctgctgcagaagagaaaaaggacgaaaagaaggaagagtctgaagaaagcgatgatgacatggggtttgggctgtttgactag

SEQ ID NO: 23495 - DNA, 1233 bp, synthetic construct
  source 1..1233: mol_type = other DNA; note = Synthetic coding sequence
ctgaaccgggcctgcttctgcgtgaccggcgtgcccgagctggaggtgatatgcggactacaacaggctgagtggccaaggctcggcctgagtcatctgggcgccgtcggtggcgggtgggggggcctacctacttctacttgggtgtccctgcatactcaggaggttgacctggcctctgaggtcgcattagaagtcgtgaggaccgctgagccgggtgtgtggctcgaggcacaggcacccgtcgccctggtggcacagccggaaccattgccagctaccgccggagtcaagcgtgaatcagtgggtatggaggttgcagtgttgaccgacgatcccctcccagtcgtggatcagcagcaggtcctcgcaaggcttcagcttctggagcagcaggtggtgggaggtgaacaagccaaaaacaaagacctgaaagaaaaacataaacgaaggaagaggtatgccgatgagcgaagaaagcagctcgtcgctgccctccagaacagcgatgaggactccggcgactgggtactcctgaatgtgtatgactccatccaggaggaggttagagctaagagcaaactgctggagaaaatgcagcggaagcttcgagctgccgaggttgaaatcaaagacttacaatctgaattccagcttgaaaaaatcgactatttagcaacaatccgtaggcaagagcgggacagtatgttgctgcagcagctgctcgagcaggtccaaccactgattagaagagattgcaactactccaacttggaaaaaatactgagggagtcctgttgggacgaagataatggcttctggaaaataccacatcccgttattacaaagaccagtctgcctgtggccgtaagcactggccctcagaacaagcccgctcgcaagaccagtgccgccgataacggcgaaccaaatatggaggatgaccggtaccgcctcatgctgtctagatctaacagtgaaaacattgcttcgaattactttaggagcaaaagggcctcccaaattctgtccactgatgcacggaagagcctaacgcaccataactctcctcctggactgtcctgccccttgtccaacaattccgcgatccctccgacccaggcccctgaaatgcctcagccccgccccttcaggctcgaatccctagacattcccttcactaaagccaagcgcaaaaaatcgaagagcaattttggaagcgagccactgtag

SEQ ID NO: 23496 - DNA, 1353 bp, synthetic construct
  source 1..1353: mol_type = other DNA; note = Synthetic coding sequence
atgcgggagtgcatcagcatccacgtgggccaggccggcgtgcagataggcaacgcatgctgggagctttactgcctggaacacgggattcaaccagacggccagatgccttccgacaagacaatcggtggaggagacgactcctttaacacctttttttccgaaaccggcgctggcaagcatgtaccacgggccgtgtttgtggacctcgagcctaccgttgtcgatgaggtaaggacaggcacttacaggcagttgttccatcccgagcagctgattactggcaaggaggatgcagcaaataactacgcaagaggccactatacaatagggaaggaaatcgttgatctggtgctggacagaatcaggaaattggctgacctttgtactggcctccaaggattcctgatctttcattcctttggaggtggaactggttccggttttgcttcactccttatggaacgcctctcagtcgactatgggaaaaaaagcaagttggagtttgccatctaccccgcccctcaggtgtcaactgcagtcgtggagccatataattcaatactgacaacccataccaccctcgaacacagcgactgcgcttttatggtggataatgaggcaatctatgacatatgtcgcaggaatctggatatcgaaaggcccacttatactaatctgaaccgcctgatcggacagattgtcagcagcattactgcctcactgcgttttgatggcgcattgaatgtggacttaacagaattccagacgaacctggtgccatatcctcgcatccatttccccctcgctacctacgcccctgtcatctctgccgagaaagcataccacgagcagctgtccgtggccgagattacaaacgcatgtttcgagcctgcgaaccagatggtgaaatgtgatcctcgccacggtaagtatatggcctgctgcatgctataccgcggcgatgtggtgcccaaagatgtgaatgcggcaatcgctaccatcaaaaccaagcgtacaatacaatttgttgattggtgtcccactgggtttaaggtgggcatcaactatcagccaccaacggtggtacccggaggagaccttgccaaagtgcagagagcagtgtgtatgcttagtaacaccacagccatcgcagaggcttgggccaggctggatcacaagtttgatctgatgtatgctaagcgcgccttcgtgcactggtacgtgggagaaggcatggaggaaggagaattctcggaggccagagaggacctggccgccctggagaaagattacgaggaggtgggagtggactccgtggaagctgaggcagaagagggagaggaatactag

SEQ ID NO: 23497 - DNA, 471 bp, synthetic construct
  source 1..471: mol_type = other DNA; note = Synthetic coding sequence
atgagcggcggcctgctgaaggccctgcggagcgacagctacgtggagctgtcacaatacagggaccagcacttccgcggtgataatgaggaacaggagaaactactcaaaaaaagttgcaccctgtacgtcggcaatctttctttctataccactgaggagcagatttatgagctattttctaaaagtggagatatcaagaaaatcattatggggctggataagatgaagaagactgcctgcggcttctgcttcgtcgagtactactctagagccgacgcagaaaatgcgatgaggtacataaacgggacccgcttggatgacaggattatcagaacagactgggacgccggcttcaaagaggggcgccaatacggcagaggacgcagcggaggccaggtgagggacgaatacagacaagactatgacgcaggccggggaggatatgggaaattagctcagaatcagtag

SEQ ID NO: 23498 - DNA, 996 bp, synthetic construct
  source 1..996: mol_type = other DNA; note = Synthetic coding sequence
atgggcggcgagcaggaggaggagcggttcgacggcatgctgctggctatggctcaacaacatgagggcggagttcaggagctggtgaatacgttcttttccttcctgagacggaaaacggatttctttatcggaggtgaggagggaatggctgagaaactgataacacagacattttctcaccacaaccaactggcccagaaaacacgcagagagaagcgagccaggcaggaggccgaaagacgtgaaaaggccgagcgtgccgcgaggctcgccaaagaagctaagtccgaaaccagtgggccgcagatcaaagagctgactgacgaagaggccgagagactccagttagagattgaccagaagaaggacgcagagaaccacgaagcgcagttaaagaatggctccctcgattccccagggaaacaggacaccgaggaagatgaggaggaggacgagaaggacaaggggaaacttaagccaaacctcgggaatggggccgacctgcccaactaccgctggactcagacgctgagcgaactggatttagctgtgccattttgtgtcaatttccgcctgaagggcaaggatatggttgttgatatacagagaaggcatctcagggtggggttaaaaggccagcccgccattatcgacggagagctgtacaacgaggtcaaagtggaagagtccagctggcttatcgaggatgggaaagtcgtgacagttcacctggaaaaaatcaataagatggaatggtggtctcgcttggtgtcatccgatcctgagatcaacacgaagaaaatcaatccagagaactccaaattgtcagatctggattcagagactcgcagtatggtggaaaagatgatgtatgaccagaggcagaaaagcatggggctgcctacatctgacgagcagaaaaagcaagaaatattgaaaaaattcatggaccagcaccctgaaatggacttcagcaaggcaaagtttaattag

SEQ ID NO: 23499 - DNA, 1860 bp, synthetic construct
  source 1..1860: mol_type = other DNA; note = Synthetic coding sequence
atggccggccccggcgtgcccggcgcccccgccgcccggtggaagagacatattgtgagacagctgcggctccgagatcgcacccagaaagcattatttctggagttggtgcctgcgtacaatcacttgttggaaaaggctgaactcctggataagttcagcaaaaaactgcagcccgaacccaactctgtcactcccaccactcaccaaggaccatgggaggaaagcgagctagattctgaccaggtgccttctttggtcgcactaagagtcaagtggcaggaggaggaggaaggcctgcggctggtgtgcggtgagatggcttatcaggttgttgaaaagggcgctgctctcgggacgctcgagtctgagctgcaacagagacagagccgcctggctgcactcgaagccagagtcgctcagttgagagaagcgcgcgctcaacaagctcaacaagttgaggagtggagagcccagaatgctgtgcagagagctgcctatgaagctcttcgtgcccatgtggggttgagagaggcggcactgaggcgattacaggaagaagcccgagacctactggagagactggtgcagagaaaagcccgcgccgccgccgaacggaatctgagaaatgagagacgcgagcgagcaaagcaggctagggtcagccaagagctgaaaaaggcagccaagcgcactgtatccatcagcgaaggcccagatactttgggagacggtatgcgggagcggagagagacactagcccttgcccccgaaccagaacctctcgaaaaagaggcatgtgaaaagtggaagcgaccattccgatcagcatcagccacatccctcactctgtcccactgtgtggacgttgtgaaaggtctactggattttaaaaagcggcgcggtcatagtattgggggggcacccgagcagcggtatcaaattatccccgtttgtgttgcagcacggctccccactcgagcacaggacgtcctcgacgcccatctgtcggaggtgaacgccgtgcgctttggaccgaatagctccttacttgccactggcggggccgacaggctgatccatctttggaatgtcgtggggagtaggttagaggcgaatcagacactggagggcgcaggtggctctatcactagcgttgacttcgacccgtcaggctatcaggtgcttgccgctacatacaatcaggcagctcagctttggaaggttggagaggcccagtccaaagaaactctgtccggacataaggacaaagttacagcggccaagtttaagctgacaaggcaccaggcggtgacaggaagcagggaccgtactgtaaaggagtgggatctgggaagggcgtactgttccagaaccattaatgtgctgtcttattgcaacgatgtagtctgcggggaccacattataatctctggacataatgaccagaaaattcgattttgggactctcgaggcccccactgtacacaggtcatccccgtccaaggccgtgttacgtccctgtcactaagtcacgatcagctgcacctgctgtcctgctctcgcgataatacactgaaggttattgatctgcgagtctctaacatccgtcaggtctttcgcgccgatggatttaagtgtggctctgattggactaaagcagtattctcgcctgaccgctcttatgctctggctggcagttgcgacggtgccctgtacatctgggatgtggacaccgggaaactggagagtaggctgcaaggcccacactgtgctgctgtcaacgcagtcgcttggtgttacagtggaagccatatggttagtgtcgatcagggcaggaaggtggtgttgtggcagtag

SEQ ID NO: 23500 - DNA, 5049 bp, synthetic construct
  source 1..5049: mol_type = other DNA; note = Synthetic coding sequence
atggagggcaacggcaccgagaacagctgcagccggacccggggctggctacagcaggataacgatgctaagccctggctgtggaaattcagcaactgcttcagccgcccggagcagactctcccccactctccacagaccaaagagtacatggaaaacaagaaggtcgcggtcgaacttaaggacgtcccaagccccctgcacgccggctctaagcttttccctgccgtgcccctccctgacatccggagtcttcagcagcccaagatccagttgtcatcggtgcctaaggtttcttgttgcgcccattgccccaatgaacctagcactagccctatgaggttcggaggaggaggagggggctcaggcggtacatcttcgctcattcaccctggcgcccttctggactctcagtcgacacggactatcacatgtcaggtgggttcgggatttgctttccagagtgcaagttctctccaaaacgctagcgccagaaataatctagcagggattgcatcagacttcccttccatgtgccttgagtccaacctttcctcatgcaagcatctgccttgttgtgggaagctccatttccagagctgccatggcaatgttcataagctgcaccagtttccatccctccaggggtgtacctctgccgggtactttccttgttcagattttacatcgggtgcccctggacatctggaagagcacatttctcagtccgaactaacaccccacctgtgtactaactctttgcacttgaacgtcgtcccacccgtctgtctgaaaggatctctttactgcgaagactgcttaaacaaacctgctagaaattccattattgatgcagctaaagtctggccaaacatccccccacctaacacccagccggcccctctcgctgtcccgttgtgtaacgggtgtggcacgaaggggacagggaaggagaccacattgctgctggctacaagcctagggaaggccgcctctaagttcggatcccctgaggttgccgtggctggccaggtcctcgaaaacctgccacctataggcgtgttctgggacatcgagaactgcagcgttccgtccggacgttccgcaaccgccgttgtacagcgcattagggagaagttcttcaaaggccaccgggaggccgaattcatctgtgtgtgcgacattagtaaggagaataaggaagtgatccaggaactcaataactgccaggtgactgtcgcacacataaatgcgacagcgaaaaatgccgcggacgataagctcaggcaaagcctgagacgcttcgctaatacccacaccgccccagcgactgtcgtgctcgtgagtacggacgtgaacttcgccctcgaactgtcagacctgaggcaccgccacgggtttcacatcatactggtccataaaaatcaagcttctgaagccctactccatcatgcaaacgagctgattcgatttgaggaattcatttccgacctgccccctagactgccccttaagatgccccagtgccacaccctgttgtatgtgtataatctgccagccaataaagatgggaagtcagtgagtaaccggttaaggcgcctgtccgacaactgtggaggaaaggtcctctccattacaggctgtagtgccatcttgcggttcatcaaccaggatagtgccgagcgggctcaaaagagaatggagaacgaggatgtctttggcaataggattattgttagcttcactccgaaaaaccgggagctttgcgagacgaaatcatctaacgccatagcagacaaagttaaatctcctaaaaagctgaaaaatcctaaattgtgcctaattaaagatgcgagcgaacaatcttcttctgctaaggccacacccggcaaggggagtcaggctaacagcgggtcagccacaaagaacactaatgttaaatcattgcaggaattatgcagaatggagtcaaaaaccggccataggaacagcgagcaccagcagggacacctgagactggtggtcccaacacacgggaactcatctgccgccgtgtctactccgaagaactccggggtagctgagccagtctataaaaccagccagaaaaaggaaaacttgtccgcgagatccgttactagctccccagtcgagaaaaaggataaagaagaaacagtctttcaggtgtcttatcctagcgcctttagcaaattggtcgcaagtcggcaggtctcacctttgcttgcgagccagtcatggtccagcaggtccatgtcccctaaccttttgaaccgcgcatctccgctcgcctttaacatcgctaattcctcatctgaagccgactgccctgatccttttgccaacggtgccgatgtgcaggtcagcaacatcgattatcgcctatcccgaaaagaattgcagcagttactgcaggaagcattcgccagacacggcaaagttaaatccgttgagctgagtccccacaccgattatcaattgaaggcagtggtgcaaatggagaatcttcaggacgccatcggagcagtcaattcgctgcataggtacaagattggatcaaagaagatcttggtttcactcgccacgggagccgctagcaagtctctttcgttactgtctgcagagacgatgtcagtacttcaggacgcacctgcttgttgtctccctttgttcaaattcaccgatatctacgagaagaagtttggccataagctgaatgtctctgacctgtacaagttgaccgacactgtagctatccgagaacagggtaatggtcgcctggtttgcttgcttccaagtagccaggctcgacagtcccctctggggtccagccaatctcatgatggaagttccaccaactgcagtcccatcattttcgaagagctcgaatatcacgagcccgtgtgccgtcagcactgctccaacaaagacttctcagagcacgagttcgatccggattcttacaagataccatttgtcattttgagcctgaagacatttgcaccccaggtgcactcactgctgcagacccatgagggaaccgtgcccctgcttgacccttggttactcagatcgaagagccctgtggggaatccacagcttattcaattcagcagagaagtcatcgaccttctgaagtctcaaccttcatgcgtgatcccaatctcccatttcatcccttcctaccatcatcacttcgctaagcagtgtcgggtctctgattatggatactcaaagttgatcgagctcctggaggcggttccacacgtgttgcaaatactggggatgggatctaagaggctgcttacgctgacgcacagggcccaggtgaagcgatttacccaggatctgctcaagctcctgaaatctcaagcctcaaaacaggtcattgtaagggagttctcccaagcctatcattggtgtttctcaaaggattgggacgttactgagtacggggtgtgcgaactgatcgatatcgtcagtgagattcctgacaccacaatttgcctctctcagcaggacaacgaaatggtcatttgtatacctaagagagagagaacacaggatgagatcgagcggacaaaacagttctccaaagacgtggtggacctactgaggcaccagccacacttccggatgccctttaacaaatttatcccctcctatcaccaccacttcgggaggcagtgcaagttagcctactatgggtttactaaactgctggaattgttcgaggccatcccggacactcttcaggtgctggagtgcggcgaagagaaaatactcaccttgaccgaggttgagagatttaaagccctggcagcccagttcgttaagttgctccggtcacagaaggacaattgccttatgatgacagatttgttgacagagtatgctaagacattcggttatacgttcagactgcaggactacgatgtgagttctatttcggcgctgacacagaagttgtgccacgtggtgaaagtcgcagatatagaatccgggcgccagatacaactgatcaaccgcaagagtcttcggtctttaaccgcccagctcctggtactgctgatgtcatgggaaggaacaacacacctttcagtcgaggagcttaaacgacattacgagtccactcataatacccccttgaatccatgcgagtatgggtttatgacactcactgaactgctgaagtccctgccttacctagtcgaggtattcaccaatgacaagatggaagagtgtgtaaaactgacaagcttatatctatttgccaagaatgtgcgaagcctcctacatacctaccactaccagcaaatatttctgcacgagttcagtatggcgtacaccaagtatgtcggcgaaactttgcagccaaagacatacgggcattcatcagttgaagaattgttaggagcaatccctcaggtcgtttggattaagggtcatggtcataaacggatcgtcgtcctgaagaatgatatgaaaagtcgtttgtcaagtctgagccttagtcctgccaatcacgagaatcagccgagcgagggcgaacggatcctcgaagtgccagagtcccatacagcgagcgaactcaagctaggggctgatggatcaggacccagccataccgagcaggagctgctccggttgacagacgacagtcccgttgacttgttgtgcgcacctgtgccctcctgtctgccatccccccagcttcgcccagatcctgtgatactgcagtcggcagacctgatccagtttgaagagcggcctcaagaacccagcgagatcatgattctgaatcaagaggagaaaatggaaattcccatcccaggtaaaagcaagacactaacctccgatagctcaagcagctgtatttccgcagcggtacccgtccctccttgtcccagcagtgagacaagcgagtctcttctctcgaaagatcccgttgaatcccccgcaaaaaaacaaccaaaaaatcgggtcaagctggccgctaacttcagtctggctcctataactaaactgtag

SEQ ID NO: 23501 - DNA, 735 bp, synthetic construct
  source 1..735: mol_type = other DNA; note = Synthetic coding sequence
ggcggcggctacgacctgaacctgttcgccagcccccccgacagcaactttgtgtgctctgtgtgtcacggggtccttaagcgacctgccagactgccttgcagccacattttttgtaagaagtgtattctgcgttggctcgcacggcagaagacatgcccctgttgccggaaagaagtgaagcggaagaaagttgttcacatgaataaacttagaaagactatcggaagacttgaggtcaagtgcaaaaacgcagacgcaggttgcatagtgacatgcccactcgcgcataggaagggccatcaggactcatgtccatttgagttgactgcttgccccaacgaagggtgtacctctcaagttccccgtggaaccctggccgaacatagacagcattgccagcaggggagtcagcagcgatgtccattgggctgcggcgctactttggaccctgctgagcgtgcgcgccataactgctaccgggaacttcacaacgcatggtcagtccgccaggagagaaggcgaccactgctactgagtctccttagaagggtgaggtggctggaccaggccacatccgtcgtacgccgagagttggcagagctttccaactttctggaggaggacacagccctccttgagggggccccccaggaagaggcagaggcagctcccgagggcaatgtgggagctgaggtagtcggcgaacctcgtgcaaacattccctgtaagtag

SEQ ID NO: 23502 - DNA, 705 bp, synthetic construct
  source 1..705: mol_type = other DNA; note = Synthetic coding sequence
ctgccctgcaagcggtgccggcccagcgtgtacagcctgagctacatcaagcgggggaagaccagaaactatctctacccaatttggtctccatacgcgtattacctgtactgttataagtacagaattacgcttagagaaaaaatgttgccccgctgctataagagcatcacgtacaaagaggaggaagacctcacgctccagcctcgatcttgcctgcagtgcgaatctctggtgggcctccaagaaggcaaaagcacagagcaagggaaccacgatcagctgaaagagctgtactcagcgggcaatctgaccgtcctcgctacagacccattactacaccaggacccggtgcaacttgattttcacttccgactaacatcacaaaccagtgcacactggcacggccttttgtgtgatcggcggctctttcttgacatcccctaccaagccttggatcaagggaacagggagtccttgaccgcaacattagagtatgtcgaggaaaagacaaacgtggactcagtgttcgtaaacttccagaacgaccgcaatgataggggggcgctgctgagggccttctcatatatgggattcgaggttgttcgacctgatcatccggcgttgcctcctctagacaacgttatcttcatggtctacccactagagcgggatgtaggtcacctcccctcagaaccgccctag

SEQ ID NO: 23503 - DNA, 2403 bp, synthetic construct
  source 1..2403: mol_type = other DNA; note = Synthetic coding sequence
atggccgccgccgccagcgtgaccggccgggtgacctgggccgcctcaccaatgaggtctctgggccttgggcggagactttcactgcctgggcctagactggacgcagtgacagccgcggtgaatccctctttgagtgaccatgggaacggtctggggcgcgggacccggggatcaggatgcagtgggggctcactggtggccgattgggggggcggtgccgcagccgcagccgccgttgccctcgctctggccccagccctcagtaccatgaggaggggatccagcgaatcagaattagctgcgagatgggaggccgaagccgtggcagctgcaaaagccgctgctaaagcggaagccgaagccaccgcagagactgtcgcggaacaggtgcgagtcgatgccggagccgccggagaacccgaatgtaaggccggggaagaacaaccaaaggttctcgccccagcacccgcacagccatcagcagccgaggaaggcaatacccaggtcctgcagcgacccccccccacgctcccccctagcaagccaaaaccggtgcagggcttatgtccgcacgggaaacccagggacaaaggacgaagttgtaaaaggagctcaggccacggtagtggggagaatggatctcagcggcccgttaccgtggactcgtccaaggctcgcacgagtctagatgccttgaagattagtattaggcaattgaagtggaaagaattcccttttggacgtcgtcttccctgtgacatctactggcatggcgtatccttccatgacaatgacatcttttccgggcaggtaaacaagtttccaggaatgaccgaaatggtgaggaagataactttgtcccgggctgttcgcactatgcagaacctatttcctgaggagtacaacttttatcccaggagttggattttgcccgatgagtttcaactgttcgtcgcacaggtacagatggtgaaggatgatgaccctagttggaaacccacattcattgtcaaacctgatggcggttgccaaggagacggaatctacctgatcaaggacccgagcgatatacgactggctggcacgctgcaatccaggcctgccgtggtccaggagtatatatgtaagcctctgttaatcgataagctaaaattcgacatccgactgtacgtgctgctgaagtccctcgatcccctggagatatatatcgccaaagacggcctgtctcgcttctgtaccgagccttatcaggaaccaacaccaaaaaacctccaccgtatcttcatgcatcttaccaattacagcctgaatattcattctgggaactttatccatagcgattccgcatctacagggtccaaaagaacattttcttcaatcctatgtcgcctttctagcaagggtgttgacatcaagaaggtctggtcggatatcatctctgtggtgatcaagacggtcatcgcgctgacccctgagctgaaagtgttctaccaaagcgatattcctacgggacgacccggtccaacctgctttcagattttagggttcgatattctgcttatgaagaatctgaaaccaatcctactggaggttaatgccaaccccagtatgcgaatcgagcacgaacacgagctctcacccggtgtgtttgagaacgtccctagtctggtggacgaggaagtgaaagttgccgttattagggatacactccgtcttatggacccactgaaaaagaaaagagagaaccaatcgcagcagcttgagaagccatttgccggtaaagaagatgctctggacggagaactgacttctgcaccagattgtaatgcaaacccagaggcgcacctgccctccatctgccttaaacaggtgtttcctaagtacgctaaacagttcaattacctgcgcttagtcgaccggatggcgaacttgtttatcagatttctcggtataaagggcacaatgaagctgggacccactggctttcgcacctttattaggagctgtaaattatctagttcaagcctctcaatggctgccgtggatattctgtatattgacattactcgaagatggaacagtatgaccttagatcagagggatagcggcatgtgcttgcaggctttcgtggaggctttcttctttctcgcacagaggaaatttaagatgctgccactgcacgagcaggttgcttctctcattgatctatgcgagtatcacttatcactgctggatgaaaagcgcctggtgtgcggcagaggcgtgcccagcggaggtcggccaccccacaggggaccccctcaggagccaagccccagtgcccagccagcgggagacaacccacctccacgcacctcctgcgcgaataagctttcccatccacggcatacactgagttag

SEQ ID NO: 23504 - DNA, 981 bp, synthetic construct
  source 1..981: mol_type = other DNA; note = Synthetic coding sequence
atgcgggagtgcatcagcatccacgtgggccaggccggcgtgcagattggaaatgcctgttgggaactgtactgtctggaacatgggatccaacccgacgggcagatgccaagcgataagacgattggcgggggggacgacagctttaacacattttttagcgagactggtgcgggtaagcacgtgcccagggccgtattcgtggacctggagccaaccgtaatagacgaagtgcgaacaggaacctataggcagctgtttcaccctgagcagctgatcactggcaaagaggacgccgccaacaactatgcaagagggcactatacgattggaaaagagattatcgacctggtgctagacaggatcagaaagctgaaaagtttttttgctacaaagcccaggattcattttccactcgccacctacgcaccggtgatatctgccgaaaaagcctaccacgaacagctgactgttgcagagattacaaacgcctgtttcgagcccgcgaatcagatggtgaaatgtgatcctcgtcacggcaagtatatggcttgctgtctgctgtataggggagatgtggtgccgaaggacgtcaatgccgcaatcgcaacaattaagacaaagcgtaccattcaattcgtagattggtgccccaccggctttaaagtcggcatcaattatcagcctcctacagttgttcccggcggggatctggctaaagtgcagagagcagtttgcatgctctctaacaccaccgcggttgcagaagcgtgggcccgtctcgatcataaatttgacctcatgcccctcagaaggatcatgagaaggctggagcagatcgtgctcacagagagaatgcgggttaagtcgatcaatctgtgtgctgtattactgcatagttttgtgctggaactgtcttacttctgcagcgtgaacgtttactgcaggaaattgctgataaagctgaagtttccattctag

SEQ ID NO: 23505 - DNA, 1005 bp, synthetic construct
  source 1..1005: mol_type = other DNA; note = Synthetic coding sequence
atggtgggccgggagaaggagctgagcatccacttcgtgcccggctcctgcaggctggttgaagaggaggtaaacatcccaaaccgccgcgttcttgtcacgggggcaacagggctgctgggtcgagcggttcacaaggagttccaacagaacaattggcacgctgtgggatgcggtttccggagggctcgtcccaaatttgaacaagtcaaccttctagattctaacgctgtccatcacattattcacgactttcaaccccatgtgattgtgcactgcgcagctgagcggcggcccgacgttgttgaaaaccagccagatgcagccagccagttgaatgtcgatgcatccggcaatctggcaaaagaagcagccgctgtgggagcattcttgatctacatttcctcggactatgtatttgatggcacaaatcctccttatcgggaggaagacatcccggcccctctcaacctttacgggaaaaccaaattggatggggagaaggcagtcttagagaataacctaggagccgcagttctcaggatacccattctgtatggtgaagttgaaaagctcgaggaatctgccgtgacggtcatgttcgataaggtacagttctctaacaaaagcgccaatatggaccactggcaacagcggtttccaactcacgtgaaagatgtggcgacagtctgccggcagctggccgagaagcgcatgctcgacccctctatcaaggggacatttcactggagcggtaatgagcagatgactaaatacgaaatggcctgtgcaattgccgatgcattcaacctgccaagttcccacctgaggccaattacagattcgccagttctgggggcccaacgccctcgaaatgctcagctcgattgcagtaagctcgagacattgggcatcggtcagcgaactccttttagaattggaattaaggagagcctttggcctttcttgatcgacaagaggtggcgtcagaccgtgttccactag

SEQ ID NO: 23506 - DNA, 513 bp, synthetic construct
  source 1..513: mol_type = other DNA; note = Synthetic coding sequence
atggccagcgaggccgagaagaccttccaccggttcgccgccttcggggaatcctcttccagcggcacagaaatgaataataaaaacttctctaaactatgtaaggattgcgggattatggacgggaagacggtgacaagtacggacgtggatattgtgttctcgaaagtcaaagctaaaaatgctagaacaataactttccaacagttcaaggaggccgtgaaggagctggggcagaagagatttaaggggaagtctcccgacgaagtgttagagaacatttatggactgatggagggaaaagatcctgccacaacaggggccactaaggcaactacggtgggcgctgtggacaggcttactgatactagcaaatacactggaactcacaaggagcggttcgacgaatcaggcaagggaaaaggaatcgcaggccgggaggaaatgaccgacaacacaggctacgtctccggctataagggtagcggaacatacgacaagaagacgaaatag

SEQ ID NO: 23507 - DNA, 3582 bp, synthetic construct
  source 1..3582: mol_type = other DNA; note = Synthetic coding sequence
atgtggcgggtgaagaagctgagcctgagcctgagccccagcccccagacaggaaagccctccatgagaacaccactgcgtgagcttacattgcagcctggtgcactaactaattcaggcaagaggagtcctgcttgctcgtccctcacaccttccctgtgcaagctgggactgcaagagggcagcaataattcctctccagtggactttgtgaacaacaaaagaacagacctcagcagtgagcacttctcccatagctccaagtggctggagacctgccaacacgaatccgatgaacagcctctggaccccatcccacagatctcctcaacacccaaaacttctgaagaagccgtggatcccttaggaaactacatggtgaagacaatcgtgctagtacctagccctctgggtcagcagcaggacatgattttcgaggcacgtcttgatactatggccgagaccaattccatcagtcttaatggcccgctgagaaccgacgatctggttcgggaagaagtggccccttgcatgggagaccgcttttccgaagtggcagctgtttctgaaaagccaatttttcaggagagccccagccatctgctggaggagtcccccccaaatccatgcagcgagcagttgcattgcagtaaggagagcctgagctctagaaccgaggcggtgagagaggacctggttccgagcgaatcaaacgcctttttgccatcttcagttctttggctatctcccagcactgcccttgcagcagatttcagggtaaaccatgttgaccccgaggaggaaatcgtggaacatggagctatggaagagcgcgagatgagattccccacccacccaaaggaatccgaaaccgaggaccaagctctggttagctccgtggaggacatcctgtcgacctgtttgacgccaaatctggttgagatggagtcacaggaggcacctggtccggccgtcgaagacgtcggtcggatactggggtctgatacggagtcatggatgtcaccgctcgcctggttggagaagggtgtcaatacctccgttatgctggagaatttaaggcagtccctgagtctgccgagcatgttaagggatgctgctattggtaccaccccattctcaacatgttctgttggcacctggttcactccgtctgcccctcaggaaaaatcaacaaacacttctcaaacaggcttagttgggactaagcactctacctctgagaccgaacagttgctgtgcggcaggccccctgatctgacagcacttagcagacacgacctggaggataacctcttgagcagtctagtcattcttgaggttctgagtagacagctgagggattggaagtctcagcttgcggttcctcacccggagactcaggacagctccactcaaactgataccagccactccggaatcaccaacaagctacagcatcttaaagaaagccatgaaatggggcaagctctgcagcaagctaggaatgttatgcagagctgggtgctgatctctaaggaactgatctctttactgcatctgtccttgcttcacctggaagaagacaaaaccaccgttagccaagaaagtcggagggcggagaccctggtgtgctgctgctttgacctgctcaagaaactgcgggctaaattacaatctctcaaagccgagcgggaagaagccaggcacagagaggaaatggctctgcgcggcaaagatgctgccgaaatcgttctcgaagcgttctgcgcccatgcatcccaacggataagccaactcgagcaagacctggcctccatgcgggaattccggggcttgctgaaagatgcccagacccaattggtcggcttacacgccaagcaggaggagcttgttcagcagaccgtttcactcacaagcaccctgcagcaggattggcggagcatgcagttagattacacaacttggacagccctgcttagccggtcgaggcagttgacagaaaaactgacagtcaagagccagcaggcccttcaggagcgcgacgtagctatagaggaaaagcaggaggtgtctcgggtcttagaacaggtcagtgctcaactcgaagagtgcaaaggacagactgagcaactggaactggagaacagcagactcgcgactgaccttcgcgcccaactgcaaatcctggccaatatggactctcagctcaaagagctccagagccaacacactcactgcgcacaagatctggcaatgaaggacgagctgctatgccagcttacccaatcaaatgaggagcaggcagcccagtggcagaaggaagagatggccttgaagcacatgcaagcagagttgcagcaacagcaggccgttctggccaaggaagtccgggatttaaaagaaacactcgaatttgccgatcaagaaaatcaggtggctcatctggagttgggccaggtggagtgccagctcaaaactaccctggaggttctgcgtgaaagatccttacaatgcgaaaatcttaaggacacagtggaaaatttaacagctaagttagcatcaactatcgcagataaccaggaacaggacttggaaaagactaggcagtactctcaaaagctgggcctcctcaccgagcaattgcagagcctcacactgttcctccagacgaaactgaaggaaaaaacggaacaagaaactctactcctgagcacagcttgccccccaactcaggaacaccctctgcctaatgatcgcaccttcttaggctctatattgacagctgtcgctgacgaagagcccgaaagcacaccagtgccacttttgggttctgacaagtccgccttcactcgcgtggcctctatggttagtctgcagccggccgaaaccccgggaatggaagagtctctggccgagatgtcaatcatgaccacggaactgcagtctctgtgttcattacttcaagaatcaaaggaagaggctatccgaactcttcagcggaagatctgcgagctgcaggcgcggctgcaagcccaggaggaacagcatcaggaggttcagaaagccaaagaggcggacattgagaaactgaaccaggccctttgtctgcggtacaagaacgagaaggaacttcaagaggtcatacagcagcagaatgaaaagatcctagaacagattgataagtctggcgagctgatctcgttacgggaggaggtcacacatctgactaggtccctgaggcgggctgaaacggaaactaaggtacttcaagaagcccttgctggccaacttgatagtaattgccagcctatggccaccaattggattcaagagaaggtctggctaagccaagaagtcgataaactaagagtgatgttcctggaaatgaaaaatgaaaaagaaaaacttatgataaaattccagagtcacaggaacattctcgaggagaaccttcgtcggagcgacaaggagttggaaaagctcgacgatattgtccagcacatctataagacgcttttgagtataccagaggttgtaaggggatgtaaggaactccaagggttgctagaatttctttcttag

SEQ ID NO: 23508 - DNA, 9141 bp, synthetic construct
  source 1..9141: mol_type = other DNA; note = Synthetic coding sequence
atgcggggccggcggggccggccccccaagcagcccgccgcccccgccgccgagaggtgtgctccggccccacctcctcctccccctcctcccacttcgggccccattggcggattacgttctcgccatagggggtccagtaggggacgatgggccgccgcccaggcagaagtggcccccaagacaaggctgtccagccctcgagggggatcctctagccgcagaaagcctcccccgccaccacccgctccgccatctacatcagctccaggcaggggcgggcgtggcgggggcggtgggagaacaggggggggaggtgggggggggcatcttgccagaacaaccgcggcacgtagagccgtgaacaaggtcgtttacgatgaccacgagagtgaggaggaggaagaggaagaggatatggtatctgaggaggaagaggaagaagacggcgacgccgaagaaacacaagacagcgaggatgacgaggaggacgagatggaagaggatgacgacgactctgactacccagaggagatggaagatgacgacgatgatgcgtcttactgtacggagagtagttttcggagccactccacttacagttctacccctggcagaagaaaaccacgcgtccacaggccccggtcccctatccttgaggaaaaagacattcctcccttggagtttcctaagagctccgaggacctcatggtgcccaatgagcacatcatgaatgttattgcaatttacgaagtgctgcgaaattttggaacggtgcttcggttgtctccatttcgatttgaggatttttgcgctgcactagtttctcaagaacaatgcacgctgatggctgagatgcacgtagtactcctgaaagccgtgctgcgggaggaagacacctccaacactactttcggtcctgcagatcttaaagactctgtgaacagcaccctttatttcatcgatggaatgacctggcccgaagtgctaagagtgtattgcgagtcagacaaagaatatcaccatgtgctcccgtaccaagaggcagaggactatccatatggtcccgtcgagaacaagatcaaagtcctgcagtttctggttgatcaattcctgacgacaaatatcgcacgggaggaactcatgtctgagggggtgattcaatacgatgaccactgtagggtttgccataaactaggagatctgctgtgctgcgaaacttgcagcgcggtctatcacttggagtgcgtgaagcctcctttggaggaggtgccagaagacgagtggcagtgtgaagtatgcgtggcacataaggtgcctggcgtgacagattgtgtggctgaaatacagaaaaataagccatatatccgtcacgagcctataggctatgatagatcaaggcggaagtactggtttctgaatcgacggttgataattgaagaggacactgaaaatgagaatgaaaaaaaaatttggtactattctacgaaggtacagctggcggagctgatcgattgtctggataaggattactgggaggctgagctgtgcaaaatcctggaggagatgcgcgaagagattcaccggcatatggacatcacagaggacctcactaacaaagcaaggggcagcaataaaagttttcttgcagcggccaatgaggaaatcctggagtccatacgtgcaaaaaagggcgatatagataatgtgaagagccccgaggagactgagaaagacaagaacgaaaccgagaatgactcgaaggacgctgaaaagaaccgcgaggagtttgaggatcagtccctggagaaggactcagatgataaaacccccgacgatgaccctgaacagggcaagagtgaggagcctaccgaggtgggggacaagggcaactctgtttccgccaatcttggggacaacaccaccaatgccaccagcgaggaaacgtctcctagcgaaggccgctcacctgttggatgcctttctgagaccccggactccagcaatatggccgagaaaaaagtcgcttcagagctacctcaggatgtaccagaggagcctaacaaaacctgtgagtccagcaacactagtgctacgacaactagcatccagcctaatcttgagaatagcaatagttcctcggagctgaattcatctcaatccgagagcgcaaaagccgcggacgaccctgagaacggcgagagggaaagtcataccccagtgagtatccaggaagagatagtgggggattttaagagcgagaaatccaacggagaactttctgagtcacctggcgccggcaagggcgcatccgggtccacccgcatcattacccggctacggaatcccgattctaaacttagccagcttaaaagccagcaggtcgctgctgcagcccatgaagccaataagctgttcaaagaggggaaagaggtgctggtcgtgaacagccagggggagattagtcgactctcaacaaagaaagaagtgataatgaagggcaatatcaacaattattttaaactgggtcaagagggcaagtatagagtctatcataaccagtatagcaccaattctttcgccctaaataagcaccagcaccgtgaagaccatgacaagcggaggcatctggcacacaagttctgcctcacacctgctggggagttcaagtggaatgggtccgtacacggttccaaggtgctcacaatttcaacgcttcgccttactataactcagctggagaataatattccgtcatcattcctgcaccctaattgggcgagccatcgtgctaattggataaaagccgtccaaatgtgttctaagcctagagagtttgcactcgccctggccatcttagaatgcgcggtaaaacccgttgttatgcttccaatctggagagagagcctggggcacacgcgactccacaggatgacttctatcgagcgggaggagaaggaaaaagttaaaaaaaaggagaagaagcaggaggaggaggagaccatgcagcaggctacgtgggttaagtatacgtttccagtgaaacatcaggtatggaaacaaaagggggaagaatatagggtgacgggatacggtggttggtcgtggatcagtaagactcatgtatatagatttgtccctaagctgcccggaaatacaaatgtaaactataggaaatctctcgaggggaccaagaacaacatggatgaaaatatggatgaaagcgacaaacggaaatgctctaggtctcccaagaaaataaaaatagaacctgactcagaaaaagacgaggtcaagggctctgatgctgcgaaaggagcagaccagaacgaaatggatattagcaaaattactgaaaaaaaggaccaagatgttaaggagctgctagacagcgattccgataagccctgcaaggaagaaccgatggaggtggacgatgatatgaaaacagagtcacatgtgaactgtcaagaaagcagccaggtcgacgttgtgaacgtaagcgaagggttccacctacgaacgagctataagaagaaaaccaagagtagtaaactggacgggctcctcgagcggaggatcaagcagttcacactggaggaaaagcaaaggctggagaagattaagctcgaaggtggcataaagggcattgggaagacttctaccaactcttcgaaaaatctttcggaatcccccgtcatcacaaaggccaaagaaggatgccagtcagatagtatgaggcaggagcagagtcctaatgccaataacgaccagccagaagacctaattcagggatgttcagagagcgatagctcggtgctgcggatgtccgacccctcacataccaccaacaagctctaccctaaagacagagtcctagatgacgtaagcatcagaagccccgagaccaagtgtcctaaacagaactcaatagagaacgatatcgaggagaaggtatccgacttggcgagccgtggccaggaaccctcaaagtctaaaacgaaggggaatgactttttcatcgatgactcaaaattggcttctgccgatgatataggaacactgatctgcaagaataaaaaaccgttgattcaggaggagagtgacactatagtgtctagctccaagagcgcgctgcactcctcggtcccaaaatccactaacgaccgggatgcgaccccactttctagggcaatggacttcgagggtaaactcggttgcgacagtgaatctaattcaactttggaaaacagctcagataccgtttccattcaggactctagtgaagaagatatgattgtgcagaatagcaatgagtccattagcgaacaatttcggaccagggagcaggacgtggaggtcctagagccgctgaagtgcgagctcgtgtctggggagtcaacaggcaattgcgaagatcgtctgccagtgaagggtactgaggctaatggtaaaaagccatcacagcagaagaagttggaagagagacctgtcaacaaatgctcggaccaaattaaactaaaaaatacaaccgataaaaagaacaatgagaacagggagtccgaaaaaaagggacaacggaccagtacctttcaaatcaatggcaaagataataagccgaaaatttatttgaaaggggaatgcctcaaggagatcagcgagtccagggtcgtgtccggaaatgtcgaaccaaaggtcaataatataaacaagatcatccccgaaaatgatatcaagtccctaacggtcaaggaaagtgctataaggccatttataaacggagatgtcataatggaagactttaatgagcgaaatagtagtgaaacgaaatctcacctactgtcgagttccgacgcagagggtaattaccgcgactccctggagactctgccttctacaaaagaaagtgatagtactcagacgacaacaccttcggcgagttgccccgagtcaaactctgttaatcaggtagaggatatggaaatagagacatccgaagtcaaaaaggtaacgtctagtcctataacctcagaggaagaaagtaacttaagcaatgacttcatcgacgagaacggcctccctatcaacaagaacgaaaacgtgaacggggagagtaaacgaaagaccgtcatcacagaagtaaccactatgacttccacggtggctaccgagagtaaaacagtaatcaaagtggagaaaggcgacaagcagaccgtggtatcttcaacagagaactgtgccaaatcaactgttaccacgacaaccacgacggttaccaaactgtcgacgccttctaccgggggaagcgtcgacatcataagtgtgaaggagcagtctaagacagtcgtgactacaaccgttacggatagcctgactactaccggcgggaccctcgtgacatctatgaccgtctccaaagaatacagtactagggataaagtaaagctcatgaaatttagtcggcccaaaaagacccgttctggtacggctcttccttcttatcggaagtttgtgaccaagagctccaaaaagagcatttttgtcctgcccaatgacgacttaaaaaaactggcaagaaagggagggattagagaagtgccctacttcaactacaacgccaagccagcccttgacatttggccgtacccctctccgcggccaacgtttgggattacctggaggtaccgactacaaacagtaaagagcctggccggcgtcagtctaatgttacggctgctttgggccagcctcaggtgggacgacatggccgctaaggctccaccaggtgggggcactactcgcacagagaccagcgaaacagagattactactaccgagattataaaacgtcgagacgtgggtccttacggaatccggagtgagtattgtataaggaagataatttgtcctatcggagttcccgagaccccaaaagagaccccaacacctcagcgtaaaggcctgaggagctctgctttgagaccaaagcggcctgaaacccctaagcaaacaggccctgtgatcattgaaacgtgggttgcagaggaagagttagaactgtgggaaattcgcgcctttgcagagagggtcgagaaagagaaagcacaggcggtggaacagcaggctaagaagcggctagaacagcagaagcctacggtgatcgctacttccacaacttctccaacatcctcaaccactagtacgatctctcctgcccagaaagtgatggtggcccctataagtgggtctgttactaccggaacgaaaatggtcctgacaactaaggtcggatcaccggctaccgtgacatttcagcaaaataaaaattttcaccaaactttcgccacctgggtgaagcaggggcagtccaacagcggcgtcgtacaagtgcagcaaaaggtactcggcattatccctagctcaaccgggaccagccaacagacatttacgagctttcagcccagaactgcaaccgtgaccattcgcccgaacacaagcggtagtggcggcaccactagcaattctcaagtcatcaccggaccccagatcagacctggaatgacagtgataaggacccccttgcagcagagcactttaggtaaggcaatcatacggacccccgtgatggtccaaccaggggcccctcagcaagtaatgacccagatcatccgggggcaacccgtttcaactgcggtgagcgctcctaatacggtgtcgtccacaccagggcaaaagagtcttacttctgcaacctcaacctcaaacatccagagctccgcttcccaaccgccccgcccgcagcagggacaggtcaaactgacaatggctcaacttacacaacttacgcaggggcacgggggaaaccagggcctgacggtggtcatccaaggtcagggccagaccaccggccagctgcagctcattccccagggggtgaccgtccttccagggccggggcagcagctaatgcaggcggcaatgccaaacgggactgtgcagcggtttctctttacaccactcgccaccacagcaactacagcatcgacgacaaccaccacagtttctaccacagctgcgggcaccggagagcagagacaatcaaagctgtccccccagatgcaggtacaccaggacaaaactttgccgccagctcagtcttccagtgtgggaccggcggaggcccagcctcagacagcccagccatctgctcagccacagcctcagactcagccgcagtcccctgctcagcccgaagtgcagactcagccagaggtacaaacacagaccacagtgagttcccacgtacctagtgaggctcaacctacgcacgcccagagttccaaaccccaggtggccgcccagtcccagccccagtcgaacgtgcaaggacaaagcccagtccgcgtgcaatccccctcacagactcggatccggccatccacccctagtcagcttagccctggccagcagtcccaggttcagacaaccacctctcaaccaatcccaatccagccgcacacgtctctgcagatccccagccagggccaaccacaaagtcagccacaggtccagtcctccacccagaccctgagctccggtcagactctcaaccaggtgacggtatctagtcccagcagacctcagctgcaaatccaacagccccagccacaggttatcgccgtcccccagctgcagcagcaggtccaggtgctaagccagattcagtctcaggtagtcgcccaaatacaggcacaacaatccggcgtgccccagcagattaaacttcagttacctatccaaatccagcagtctagtgctgtccaaacccaccagattcaaaacgtagtcactgtccaggcggcctccgtgcaggagcagctgcagcgtgtgcagcagttaagggaccagcagcagaagaagaagcaacagcagatcgagatcaagcgggaacatacattacaggcttccaaccagagtgagatcatccagaagcaggtagtgatgaaacacaatgcagttatcgaacatctcaagcagaaaaaatcaatgacaccggccgagagggaagaaaatcaaaggatgattgtgtgcaaccaggtaatgaaatatattttggacaaaatagacaaggaggagaaacaggctgccaaaaagcggaagagagaggagagcgtcgagcaaaaacgctccaaacagaatgctaccaaactgagcgctctgttattcaagcataaagagcagctgagagccgagattctgaagaagcgtgccctactggataaggatctccaaatagaggtgcaggaagaacttaaacgagacttgaaaatcaagaaggagaaagatctgatgcagctggctcaggcaactgccgtggcagcaccctgcccacctgtcactcccgctcccccggcccctcccgcacctcccccttccccgcctcctccacccgcagtgcagcacactggcctgttgtccacaccaaccctgcccgcagcctcacaaaagagaaagagagaagaggaaaaagactcttcatctaagtcaaagaagaaaaaaatgattagtaccaccagcaaggagaccaaaaaggacacaaagttatactgcatatgcaaaactccatatgatgaaagcaagttctatataggatgtgatagatgccagaattggtaccacggaagatgcgttgggatcctccagagcgaggcagagttgatcgacgagtacgtgtgtcctcagtgccagagcaccgaggacgcaatgaccgttctgacaccattgacggaaaaagactatgagggcctcaaacgggtgctgagatctctgcaagctcataaaatggcatggccgtttctcgagcccgtggaccccaatgacgcccccgattactacggagtgattaaagaacctatggacctcgctaccatggaggaaagggtccaacgacgctactatgagaaactaacagaatttgtcgcagatatgaccaagatcttcgataactgtcgctactataatccatcagactcacctttctatcagtgtgcagaagtactagagagctttttcgtacagaagctcaaggggtttaaggcttcccgcagccataacaacaagctccagtcaactgcatcatag

SEQ ID NO: 23509 - DNA, 927 bp, synthetic construct
  source 1..927: mol_type = other DNA; note = Synthetic coding sequence
atggccagcagcaacaccgtgctgatgcggctggtggccagcgcctactcaattgcacagaaggctgggatgatcgtccggcgggtgattgccgagggggacctgggtattgtggagaaaacctgtgccaccgatctgcagactaaggcagacaggctggcccagatgagcatttgcagctcactggcaagaaagttccctaagttgaccatcatcggtgaagaagatttgcctagcgaggaggtagaccaggaacttatcgaggacagccagtgggaggagatcctcaaacagccttgccctagtcagtactcggctattaaagaggaagatctggttgtatgggtggatcctttggatggaaccaaggaatataccgagggcctgctggacaacgtcaccgtcctaattggtattgcctatgagggcaaggcaatcgctggggtaatcaatcagccttattacaactatgaggctggccccgatgccgtcctggggcggactatatggggcgtcctaggcctgggtgcatttggtttccagctcaaggaggttcccgccggcaaacacattattaccactacccgctcacattctaataaacttgtcactgattgcgtggctgcgatgaatcccgacgcagtgttaagagtgggtggcgccggaaataagattattcagctgatcgaaggtaaggcgtctgcctatgtttttgccagccctggctgtaaaaaatgggacacttgcgctcccgaggttatcctgcacgccgtgggaggcaagctcacagatatccatgggaacgtgctgcaatatcacaaggacgttaaacacatgaacagcgccggggtgctcgcaaccctgagaaactacgattattatgctagccgtgtgcctgaaagcatcaaaaatgctctcgtgccatag

SEQ ID NO: 23510 - DNA, 1212 bp, synthetic construct
  source 1..1212: mol_type = other DNA; note = Synthetic coding sequence
atgagcggcagcgacggcggcctggaggaggagcccgagctgagcattaccctgacattaaggatgctgatgcatgggaaggaggtcggctctatcataggcaagaaaggcgagacagttaagaggattcgagagcagagttctgcgaggattactatttccgagggttcctgccccgagagaatcactaccataaccgggtccacagcagccgtctttcatgcagtgtctatgatcgccttcaaactggatgaagacttgtgtgcagcaccggctaacggaggaaatgtgtctaggccacctgtgactctgcgcctggtgataccagcctctcagtgcggctcattgataggtaaggcaggcactaaaatcaaggaaatccgagagacaaccggtgctcaggtacaggtagccggtgaccttctccctaacagtacagaacgcgccgtgacagtcagtggggttccagacgcgattattctctgcgtccgacaaatatgcgcggtaatactggaatctccgcccaaaggcgctactattccataccacccctcacttagccttgggaccgtgctgctcagcgcgaatcagggctttagcgtccagggccaatatggggcagttactccggccgaggtgaccaaacttcagcagctgtcgagtcatgcagtgccgtttgccactccctctgtagtccccggattagaccctgggactcagacatcctcccaggagtttcttgtacctaacgatttgataggttgtgtgattggccggcagggctcaaagatcagcgagataaggcagatgagtggcgcacacataaagatcggaaaccaggccgagggtgccggagagaggcatgtgacaatcaccggcagccctgtgagtatcgctctggcgcagtacctgataacagcgtgtctggaaacagccaagtcgacgagtggcggtaccccttcttcagctccagccgatctcccagcgcccttcagccctcccctcacggctcttcccaccgcccccccagggctcctgggaacaccatacgcaatatcactatcgaactttatcgggttgaagccgatgccgtttctggctctgccacccgcgtcacccgggcccccacccgggctggcagcatatacagctaagatggccgccgcaaacggatctaagaaagctgagcggcagaagtttagcccgtattag

SEQ ID NO: 23511 - DNA, 654 bp, synthetic construct
  source 1..654: mol_type = other DNA; note = Synthetic coding sequence
atgagcagcaaggtgagccgggacaccctgtacgaggccgtgcgggaggtgctgcatggaaaccagagaaaaagacggaaatttttggagacggtggaattgcaaatcagcctgaaaaattatgatccccagaaggataagcgcttctccgggacagtccgcttgaaaagcacaccaagaccaaagtttagcgtgtgtgttcttggtgaccagcaacactgtgacgaggcaaaagcagtagatatcccccacatggatattgaggcattaaagaaactgaacaagaataagaagctcgtgaaaaaactggctaaaaagtacgacgcatttcttgccagcgagtcactcatcaaacaaatcccacgaatcctgggtcccggattgaataaggcaggaaagttcccgagtctgctcacacacaatgaaaatatggttgcaaaagtagatgaggttaaatccactattaagtttcagatgaagaaagtcctgtgtctcgccgtggcagtgggccacgtgaaaatgaccgatgatgaacttgtgtacaatatccacctcgcggtgaatttcttagtcagtcttcttaagaagaactggcagaatgtcagagcgctttatattaagagtacaatggggaagcctcagagactgtactag

SEQ ID NO: 23512 - DNA, 3159 bp, synthetic construct
  source 1..3159: mol_type = other DNA; note = Synthetic coding sequence
atggagggcagcgagcccgtggccgcccaccagggcgaggaggcctcatgcagctcctggggcaccgggtctaccaataaaaacttgcccatcatgagtacagcctccgtggaaatcgatgatgcgctgtatagcagacaaaggtatgtgctgggcgatacagccatgcagaaaatggcaaaatcacatgtattcctgtcaggcatgggaggcttaggactggagattgcgaagaatctggtgctcgccgggatcaaggccgtcaccatacacgacactgagaaatgccaagcctgggacctgggtaccaattttttcctttcagaggatgatgtcgtaaataaacggaatcgggctgaggccgttctgaagcatattgccgaactgaatccgtacgtgcatgtcacgtcatcatccgtcccttttaacgagactacagatttgtctttcctcgacaagtaccagtgtgtggtgctgaccgaaatgaaactgccgctccagaaaaagatcaacgacttctgtcgcagccaatgtccacctatcaagttcatctcagcagacgtgcatgggatttggagccgccttttttgtgactttggggatgagttcgaggtactggacacaacgggagaggaaccgaaggaaatcttcatctcgaacattacacaagccaaccctggaattgtgacatgcttggagaatcacccacacaaactcgagaccggccaattcctgaccttcagggagatcaacggaatgaccgggctgaatgggtccatccagcagatcacagtcatctctcctttcagcttttccattggagatacaaccgagttagaaccatacctgcatggcggtattgctgtgcaagtgaagacacctaagaccgtgttctttgaaagcctcgaacgacaactcaaacatcctaagtgtctgattgtggactttagcaatcccgaggcccctctggaaatccatacagccatgctcgcactggaccaattccaggaaaagtattctcggaagccaaacgtgggctgccaacaggattccgaggaactattgaaactcgccactagcatctccgaaacgctggaggagaagcctgatgtgaatgctgatatcgtacactggcttagctggactgctcagggcttcctatcccctttagctgctgcggtcggaggtgtcgcttcacaggaggtgctaaaagctgtgaccggtaagttttctcccctctgtcaatggctctacttggaagccgccgacattgtggaaagcctcgggaaacctgagtgcgaagagttccttccaagaggggatcgttatgacgcccttagagcttgcattggcgatacactctgccagaagctgcagaacctcaacatttttcttgtgggttgtggcgcgattgggtgtgaaatgctgaagaacttcgctttgctgggagtggggactagtaaagagaaaggcatgattacagtcacagacccagacctgattgaaaaatctaacctgaacaggcagttcctcttcaggccacaccacattcagaaaccaaagtcttacacagctgccgacgccactctgaagattaactcccagattaagattgacgcacaccttaacaaagtctgtcctacgactgaaactatctacaacgatgagttttatacaaaacaggatgtaattatcacagcacttgacaacgtggaggcaagaagatatgtcgacagcaggtgcctcgccaatctgaggcctctgttggatagcggcacgatgggcacaaaggggcacactgaggtcatcgtgcctcacctcacagaatcttacaattcacatcgcgacccacccgaggaggagattcctttttgtactttgaaaagcttccccgctgcgattgaacacacaatccagtgggctcgggacaagttcgaatcatccttctcgcacaaaccatcactctttaataaattctggcagacatattccagtgcagaagaggtcttacaaaaaattcagagtggccacagcctggagggttgttttcaagtgatcaagctgctgtctcgacgtccccgtaactggtctcagtgcgtggaattagctcgcctgaaatttgaaaaatacttcaaccacaaggctctgcagttacttcattgctttcccctggatatccgcttaaaagatggcagcctattctggcagtcacccaagcgccccccctcccccataaagtttgatctgaacgagcctctccatctgtcgttcctacaaaatgcagccaagctgtacgccactgtctattgtataccgttcgctgaagaggacctgtccgctgacgcgcttctgaatatcctgtccgaagtcaagatccaagaatttaagccctccaataaagtggtgcagacagatgaaaccgcgaggaaacctgatcacgtgccaatttcttcagaggacgaaaggaacgcaattttccagctggaaaaggccatactatccaacgaggctaccaaatccgaccttcaaatggccgtgctctcatttgagaaagacgatgatcataacggccacatcgactttataacggctgctagcaatttacgggctaagatgtatagcattgagcccgccgatcgctttaagacaaagagaatcgccggaaagatcatccctgcaattgcaaccacaacagccacagttagcggactggtggccctggaaatgatcaaagtaaccggcggatatccctttgaggcttataagaattgttttctgaacctcgcaatccctatagtggttttcactgaaaccactgaggtgagaaaaacgaagataaggaatgggatctctttcacaatctgggatcgttggacagtgcacgggaaggaggattttaccctgcttgatttcattaatgccgtgaaggaaaaatatgggatcgaacctaccatggtagtgcaaggtgttaagatgctgtatgtaccagtcatgccgggacacgctaagcggcttaagctcacaatgcacaaactcgtcaaacctactactgagaagaagtatgttgaccttactgtcagtttcgctcccgacatcgacggcgatgaggacttaccaggtccgccagtgaggtattatttctcacacgacaccgactag

SEQ ID NO: 23513 - DNA, 1134 bp, synthetic construct
  source 1..1134: mol_type = other DNA; note = Synthetic coding sequence
atgctgcggctggtgcccaccggcgcccgggccatcgtggacatgtcctacgcgcgtcattttctagattttcagggcagtgccatcccgcaggccatgcagaaactcgtggtcacgcgactgagcccaaatttccgagaagccgtgaccctatcacgcgactgtccagtcccgttgcccggggacggagacctattggtcagaaatagattcgtgggcgtgaacgcttctgacataaactattcagcaggtcgatatgaccctagcgtcaaaccacctttcgacatcggcttcgagggaatcggggaagttgtagcccttggcctgagcgcttccgcccggtacactgtagggcaagccgtagcctatatggcacccggatcttttgccgaatacacggtggtacctgcatctatcgccacacctgtgccctcagtgaagcctgaatacctgacactgcttgtctcaggaaccaccgcctatatttcattgaaggagctcggtggccttagtgaaggaaaaaaagttttggtgaccgcagccgcaggcggtactggccagttcgcaatgcagctgtccaaaaaagccaaatgccacgtgatcggtacctgcagctcagatgaaaagagtgcattcctgaagtccctgggctgcgaccgccctatcaactacaagaccgagccagtcggtaccgtgctgaagcaagagtatccggagggagtggacgttgtgtacgaatccgttgggggggcaatgttcgatctggctgtggacgctctggctaccaaaggcagacttatcgtaattggcttcatatcgggatatcagacaccaacaggactgagccccgttaaagctggaacattacctgctaagctcctcaagaagtcggcttccgtgcaggggttctttctgaaccactatctgtccaaatatcaggctgccatgtcccatctcctagagatgtgtgtatctggggatttagtgtgtgaggtcgatctcggcgacctttcacccgagggccgatttacaggattagaaagtatatttagagcagtgaattatatgtacatgggcaagaatacaggcaagatcgttgtggagctcccacactcagtgaattcaaaactgtag

SEQ ID NO: 23514 - DNA, 2538 bp, synthetic construct
  source 1..2538: mol_type = other DNA; note = Synthetic coding sequence
atgagcaacagccggccccggagccggcgggacgccggcggcggcgcgggggctgcagggagggacgagctggtgtcccgctccctccagagcgctgagcattgtctcggcgttcaggacttcgggacagcatatgcacactacctgttagtccttagcctggcccctgaacttaagcatgacgtgaaggagacctttcagtacactctcttccgctgggcagaagagctagacgctctgagcagaatccaggatttgctaggctgttacgaacaagcgctggaactttttccggatgacgaggtgatttgcaactccatgggcgaacatctgttcagaatggggtttagggatgaggctgctggatatttccataaagcagtgaagctcaatcccgatttctccgacgcgaaggagaatttctatcgtgtggccaactggctggtagagcgctggcattttatcatgcttaatgacactaaaagaaacactatttacaatgctgctattcaaaaagcagtatgcctcggttcgaagtctgtgttggatatcggcgccggcaccggtatattgagtatgttcgctaaaaaagctggcgctcactccgtgtatgcttgcgagttgtctaaaactatgtatgaactggcatgtgatgttgtcgccgctaataaaatggaagcgggcatcaaactgctgcacaccaaatccctagacatcgagatccccaagcatattccagagagggttagccttgtggtgaccgagaccgtggacgctggtctcttcggggagggcatagttgagtccctcattcatgcctgggaacacctgcttctgcagcctaaaactaagggcgaatcagcaaactgcgagaagtatggaaaagtgattcctgcaagtgcagtcatcttcgggatggcggtggagtgtgcagagattaggcgccatcatcgcgtggggatcaaggacatcgcaggcattcacctccccacaaatgtgaaattccagtcacccgcgtattccagtgtagatacagaggagacgatcgaaccctacaccactgaaaaaatgtcccgagttcccggggggtatctggctctgaccgaatgctttgaaattatgacagtggactttaataaccttcaggagcttaaaagcctggccactaagaagcccgataaaatcgggatcccagttatcaaggaggggatactggatgcaatcatggtttggtttgtgctacagctcgatgatgaacacagtcttagtactagccctagtgaagaaacctgttgggagcaggcagtgtaccccgtccaggacctggccgactattggatcaaaccaggggaccacgttatgatggaagtaagctgtcaagattgctatctaaggattcagtccatatctgtcttgggcctggaatgtgagatggacgtagctaagagcttcacacagaacaaggaccttttgagcctgggaaatgaggccgagctgtgcagcgctttggcgaacctgcagaccagtaagcctgacgccgtggagcagacttgcattcttgagtcaacagaaattgcacttctgaataatattccttatcacgaaggcttcaaaatggcaatgtctaaagttttgtcctctcttaccccggagaaactctaccagacaatggatacacactgtcagaacgagatgtcgtccggcactggccagagcaacaccgtgcagaacatactggagcctttctacgtactcgacgtgtccgaggggttctcagtcctgcctgttattgcagggacactgggacaggttaaaccatacagctccgtcgagaaggaccagcaccggatcgccctggatttaatcagcgaggctaaccatttcccaaaagaaaccctggagttttggctgcggcatgtggaagacgaaagtgcaatgctgcagcgaccgaagtccgacaagctttggtccatcattattctggatgtgatagaaccgtcaggcctgattcagcaggaaattatggagaaggcagcgataagccgttgtttacttcaaagcggaggcaaaatattcccgcagtacgtcctgatgttcgggctgcttgtggagtctcaaacactgctggaagaaaacgccgtccaagggacggaaagaaccctaggacttaatatcgctccttttatcaatcagttccaggtgcctataagggttttcctcgacctatcatctttaccatgtattcctctatctaagccagtggagctgctccgcctggacttgatgactccatatcttaacacttctaaccgcgaggtcaaagtttatgtgtgcaagtcaggaagactcaccgcaatacccttttggtaccacatgtatttagacgaggagatcagactggacacaagctccgaggcttcacactggaaacaagcagccgtagtcctggataatccgattcaggtggagatgggcgaagagttagtgctgtctattcagcaccataagagcaacgttagcattacagtgaagcagtag

SEQ ID NO: 23515 - DNA, 756 bp, synthetic construct
  source 1..756: mol_type = other DNA; note = Synthetic coding sequence
atggccgacctgaccagcgtgctgaccagcgtgatgttcagccccagctcaaaaatgttcatcggaggtctatcctggcaaacctcacctgactcactgcgagactatttttcaaagtttggcgaaatacgggaatgtatggtgatgcgggatcctaccacaaagcggtcaagggggtttggattcgtgacattcgctgatcccgcctcagtcgacaaggttcttggccaacctcatcacgagctggatagtaagaccattgacccaaaagtggcatttccacgtagagcgcagcctaagatggttacccgcaccaagaaaatctttgtgggagggctatcagccaacaccgtggtcgaggatgttaaacagtatttcgaacagttcggcaaggttgaagacgccatgctgatgttcgataaaaccaccaataggcaccggggattcgggttcgtgaccttcgaaaacgaggacgtggtggagaaggtgtgcgaaatccactttcacgagataaataacaagatggttgagtgtaaaaaggctcagcctaaggaagtgatgtttcccccagggaccagaggtcgagcacgcggtctgccctatacaatggacgccttcatgctgggaatgggaatgctcggctacccgaattttgtggccacgtacggtaggggctaccccgggttcgcgccgtcttatggttaccaattccccgactacctcccagtgtcccaggatatcatattcatcaactag

SEQ ID NO: 23516 - DNA, 510 bp, synthetic construct
  source 1..510: mol_type = other DNA; note = Synthetic coding sequence
atggcccccaagcgggccaagcggcggaccgtggagggcggcagctcatctgtttttagcatgtttgatcagacccagatacaggagtttaaagaggcctttaccgtcatagaccagaatcgggacggaataattgacaaggaagacctgagagacactttcgctgccatgggccgcctgaacgttaagaatgaggaactggacgctatgatgaaagaggcatctggcccaatcaattttactgtgttcctgacaatgttcggcgaaaagttgaagggcgcagaccctgaggatgtcattaccggcgcgtttaaagtgctcgaccccgagggcaaggggacaatcaagaagaagttcctcgaggagttgctaactacccagtgcgatcggttcagtcaggaggagattaagaatatgtgggcagccttcccacctgacgtgggaggcaacgtggattacaagaatatttgctacgtgattacacatggcgacgccaaagaccaggaatag

SEQ ID NO: 23517 - DNA, 546 bp, synthetic construct
  source 1..546: mol_type = other DNA; note = Synthetic coding sequence
atggccaccgagcccgaggccgccgagcccgtggtgcccagcctggtcgaccgatatttcacgcggtggtataagcccgatgttaagggcaaattttgcgaagatcactgcatcctgcagcacagcaatcggatatgcgtgattacactggctgaaagccacccggttctccagtcaggtaagaccattaagtccattagttaccagatcagtacgaattgttcacgattgcaaaacaaagtgtctggaaaattcaagagaggtgcccagttccttacggagctcgcacccttgtgcaagatctattgctctgatggggaagagtataccgtgtcttcgtgcgtacggggtaggctgatggaggtgaacgaaaacattctgcataagcccagtattctgcaggaaaaaccctccaccgaaggatatattgctgtggtcctgccaaaattcgaagagagcaaaagcataacagaaggccttctcacgcaaaagcaatacgaggaggttatggtgaagcgcattaatgcaaccacagcaaccagctag

SEQ ID NO: 23518 - DNA, 2154 bp, synthetic construct
  source 1..2154: mol_type = other DNA; note = Synthetic coding sequence
atggagctgcggtgcggcggcctgctgttcagcagccggttcgactccgggaatctggcgcacgtggaaaaagtggagtcccttagcagcgacggagagggcgtgggaggtggtgcaagcgcactgaccagcggaatcgcctcctctcccgattatgaatttaacgtctggactaggcctgattgtgccgagactgaattcgaaaatggaaatcgctcctggttctacttctcggtaagagggggaatgccaggcaaactgataaagataaacatcatgaatatgaacaagcagtcaaaactttactcccagggtatggctcctttcgtgagaacgcttcccacgaggccacgctgggagaggattcgcgacaggcctaccttcgaaatgaccgagacgcagttcgtgctgtccttcgtgcatcgctttgtggaaggtaggggtgcaactacatttttcgccttttgttacccatttagttacagcgattgtcaagagttactgaaccagcttgaccagaggtttccagaaaatcaccctacccatagctcacctctagacacaatctactaccatcgggagctcctctgttacagcctcgacggcctccgagttgacttactaaccattacctcttgtcacggcttaagggaggatcgcgaacctaggctggagcagctttttccagacacctccacaccgcgcccatttaggttcgctggaaaaagaatcttttttttaagcagcagggtccaccctggcgagacaccgtcaagtttcgtattcaatgggttccttgattttattctgcgcccggacgaccctcgcgcccagactctgcggcgcctctttgtgtttaagctgatcccgatgctgaatcctgacggagtggtgagaggtcactaccgcactgacagtagaggcgttaacctgaacagacagtacctgaagcccgacgccgttctgcaccctgcaatctacggtgccaaggctgtgctgttgtaccatcatgtgcattcccggctcaattcccagagtagcagcgagcaccagccttcatcttgtttgcctcccgacgcccccgtgagtgatctggagaaggccaacaatctgcagaatgaggcgcagtgtggccacagtgccgaccgacacaatgccgaagcctggaagcagacggagccggctgaacaaaaactgaactcagtgtggataatgccacagcagtctgcgggtctggaggagtccgccccagacaccatcccccccaaagagagcggtgtggcttactacgtggacctgcatggacatgcatccaaacggggatgcttcatgtacgggaactccttcagcgacgaatccacacaagttgaaaacatgttgtacccaaagctcatctccctgaactctgcccacttcgacttccaagggtgcaactttagcgagaagaatatgtatgctcgcgacaggcgcgatggacagagtaaagagggatcaggtcgggtggctatttacaaggcttcaggtatcatccactcttatacacttgaatgcaattataacacagggagaagcgtgaacagtattcccgccgcttgccatgacaatggaagagcttcacccccacccccacccgcctttcctagtagatacacagtggagctattcgagcaggtcggacgggccatggccatagccgcactggatatggcggagtgtaacccttggcctagaatcgtgctctcagaacactcatcactgacaaatctccgagcttggatgttgaagcatgtacggaactctcggggcttgtcctctacactcaatgtgggcgtaaataagaagcggggcctacgaaccccccccaaaagccataacggcttaccagtgagctgctcagagaatactttgagcagagcaagatcattcagcactggaacgtccgccggagggtccagttcaagccagcagaacagtccacagatgaagaatagcccttccttccctttccatgggagtcgtcccgcagggctgcccggtctgggctcctcgacccagaaggtgacgcacagggttctgggaccagtgagggggaaacccgtctgggagccgcttcagcacgtgtttggctgcctgggtcattgctggggaaagtag

SEQ ID NO: 23519 - DNA, 678 bp, synthetic construct
  source 1..678: mol_type = other DNA; note = Synthetic coding sequence
atggtgatggccgagggcaccgccgtgctgcggcggaaccggcccggcaccaaggcccaggacttttataactggcctgatgaaagctttgatgagatggactctacccttgcagtgcaacagtacatccagcagaacattagggcagattgcagcaacatcgataaaattctggaaccgcccgagggacaggacgagggggtctggaagtacgagcatttaaggcaattttgtctagaacttaacggtctagcggtaaagctgcagagcgaatgtcatcctgacacatgcacacagatgacagccaccgagcaatggatcttcttatgcgctgctcacaagacacccaaggaatgtcctgccatcgattacacccggcatactctggacggtgctgcctgtttgctgaactctaacaaatacttcccatccagggtgagcatcaaagaatctagtgtagcaaagcttggctccgtctgccgtaggatatacaggatttttagccacgcttattttcatcaccggcagattttcgacgagtacgagaatgagacgtttctctgccaccgcttcaccaagttcgtcatgaagtacaacctcatgtccaaggataatctcatcgtgccgatcctggaagaagaggtacagaatagcgtgtcaggggaaagtgaggcctag

SEQ ID NO: 23520 - DNA, 1173 bp, synthetic construct
  source 1..1173: mol_type = other DNA; note = Synthetic coding sequence
atggccgcccagaaggacctgtgggacgccatcgtgatcggcgccggcattcagggatgcttcaccgcctaccacctggctaagcacaggaagcgcatcctgctcctggagcaattcttcctcccccactctcggggttcatctcacgggcagtcgagaatcattaggaaggcctacctagaggacttctacactaggatgatgcacgagtgttatcagatctgggcacagctggagcacgaagccgggacccaactccacaggcagactgggctcctcttactgggcatgaaagagaatcaggagttgaaaactatccaggccaatctgtcacgtcagagggtggagcaccagtgtctctcctccgaagaattgaaacagcgctttcctaatatcagactgcctcgcggagaagttgggctgctagacaattccggtggggtgatatacgcttacaaggcccttcgtgccctgcaggatgccattagacagttgggcggaatagtccgggacggggaaaaggtggtggagattaatcccggccttctcgtgacagtgaagaccacatcccgctcctaccaagccaagtccctcgtcattaccgccggcccgtggactaaccagctgctgagacctctggggattgagatgcccttacagacactgcggattaacgtatgctactggagggaaatggtcccaggttcttacggggtgagtcaggctttcccttgttttctgtggctcgggctgtgcccccatcacatttatgggctccccaccggggagtacccaggactcatgaaggtgtcataccaccatggtaatcacgccgatccggaagagagagactgccccaccgcacgcacggatattggagatgtccagatcctaagttcctttgtgagagaccatctcccggatcttaagccagagcccgccgtgatcgagtcctgcatgtatacgaacacccccgatgagcagtttatcctagatcgccaccccaagtacgacaacatcgtgattggcgccgggttctctggccacggtttcaaactcgcacccgttgtaggcaagatcctgtatgaactgagtatgaagctgacccctagctatgatctggcaccattccgaatctctcggtttccatctctcggaaaggcccatctttag

SEQ ID NO: 23521 - DNA, 135 bp, synthetic construct
  source 1..135: mol_type = other DNA; note = Synthetic coding sequence
atgagcgacaagcccgacatggccgagatcgagaagttcgacaagagcaaactaaagaaaacggagatgcaggagaagaatccactgcctagcaaggagacaatagaacaggagaagcaggctagcgagagctag

SEQ ID NO: 23522 - DNA, 1323 bp, synthetic construct
  source 1..1323: mol_type = other DNA; note = Synthetic coding sequence
atgcccatcccccccccccccccccccccccccggccccccccccccacctactttccatcaggctaatacagagcagcctaaactttcccgggacgagcagaggggacgtggagccctcctacaggatatatgtaaggggaccaagctgaagaaagtaacgaatattaatgataggtcagcaccaatcctagaaaaacccaaggggtcaagcggcggctatggtagcggtggagcagccctacagccaaaaggagggctgttccaaggtggggtgcttaaacttagaccggtcggggccaaagatggcagcgagaacctggccggaaaacccgctctgcagatcccctccagcagggctgctgcacccagaccgcccgtgagcgccgcaagcgggcgcccccaggatgataccgactcctccagagcatccctccccgaactccctcggatgcaacggccatccctacccgacctgtcacgaccaaataccacaagctccaccggcatgaagcattcctcaagcgctcctccacccccccctcctgggcgtagggccaacgctccaccgacacccttgcccatgcacagttccaaggcacccgcctacaatagggaaaagccccttccccccactccgggtcagagacttcatcccgggcgcgagggcccacctgcaccaccaccggtcaaaccccccccctcacccgtcaatatccgtacaggcccttctggacaatcacttgcccccccccccccaccatatcggcagcccccgggcgtgccaaacggcccttcctcccccacaaacgaaagcgccccagagctgccacagcgtcacaactcgctgcatcggaaaacccctggacccgtacgtggtcttgcacccccccctccaacatcagcatcacctagtctgctgagtaacaggcctcccccccccgctagggacccgccttcccggggggcagccccccctcctccacccccggtcatccggaacggcgcaagagacgcaccccctcctccacctccttaccgcatgcatgggtcagaacccccttcccgcggcaaacctcctccacctccgagccggacaccagcggggcccccgcccccacctcctccgcctctcaggaacggccacagggacagtatcaccacagtcagatcttttcttgacgattttgaaagcaaatattctttccatcctgtggaggacttccccgcccctgaagagtataagcacttccagcggatttaccctagcaagactaaccgggctgcacgcggtgcccctcccctgcctccgatcctgcgctag

SEQ ID NO: 23523 - DNA, 2703 bp, synthetic construct
  source 1..2703: mol_type = other DNA; note = Synthetic coding sequence
atgaactaccccggccggggcagcccccggagccccgagcacaacgggaggggaggcggagggggggcatgggagctgggatccgacgctcgcccggccttcgggggcggggtgtgttgctttgagcatctaccaggcggcgaccctgacgacggggatgtgccacttgccctcttgaggggagaacccgggttgcatctggcacctggcactgatgaccacaatcatcacctggcactagacccatgtctctcagatgagaattacgacttttcaagcgccgagagtgggagcagtctgcgctattactcagaaggcgaatctggaggaggcgggtcctcattgtcattacatccaccacagcaaccccccctagttccaaccaatagtggaggaggaggcgctacaggaggaagccccggtgaacgtaaacgcacacgcctgggcggtcctgccgctcgacatcgctacgaagtggtcactgagttgggccccgaagaggtgaggtggttctataaggaggacaaaaagacatggaaacctttcatcggctacgactccctgagaatcgagcttgcatttagaactcttctccaaaccaccggcgcgcgcccacagggcggcgaccgcgatggcgaccacgtttgcagtccgacgggaccagcctcctcaagcggggaagatgatgatgaagatcgggcctgtgggttttgtcagtctacaactggacatgaaccggagatggtcgagttggtgaatatagagcctgtctgtgtgcggggcgggctgtatgaagttgatgtgactcaaggcgaatgttacccagtgtattggaaccaagctgacaaaataccggtaatgagaggccagtggtttatcgatggaacttggcagcctctcgaggaagaggaaagcaacctgatcgagcaagagcatctaaactgcttcagaggacaacagatgcaggaaaacttcgacatcgaggtgagtaaatccattgatgggaaggatgcagtgcacagctttaaattgagcaggaatcacgtcgattggcacagcgtggatgaggtctacctgtacagtgacgccaccacctctaaaattgctcgtactgtgactcagaaactaggatttagcaaggcatcctccagtggtaccagactgcaccgggggtacgtggaagaggccaccctagaggataaaccttcgcaaacaactcatatagtatttgtggttcacggaatcggacagaagatggatcagggccgaattattaagaacacagcaatgatgagggaggccgcccggaagattgaagaacgacatttcagtaaccatgccacacacgttgagttcctgccagtcgaatggcgctccaaactcactctggacggtgatactgtggatagtattaccccagataaagtacggggtctcagggacatgctgaactcttcagcaatggatattatgtactacactagtcctctgtaccgcgatgaactagtcaaaggactgcagcaagagctaaataggctgtactctctgttttgcagcaggaaccctgactttgaagaaaaaggtggaaaggtgagcattgtaagtcatagtttagggtgtgtaattacatatgatatcatgaccgggtggaatccagttagactttacgaacagttgcttcaaaaggaagaggaactgcctgatgagagatggatgtcgtacgaagagaggcatctgctggatgagctgtacattacaaaacgccgcctaaaggaaatcgaagaaagactgcacggcctcaaggccagctcaatgactcaaacacctgctctcaaatttaaggttgagaactttttctgtatgggctctcctttggccgtattcctggccctgagaggcattcgccccgggaacacgggttcacaggaccacatccttcctcgagaaatctgtaataggctgttgaatatatttcaccccacggaccctgtggcttacaggctggaacccctgatccttaagcactacagcaacatctcaccagttcagatccattggtataacacctccaaccccctgccatacgaacatatgaagccctctttcctgaacccagctaaagaaccaacctcagttagtgagaacgaaggtatttctacgattccatcacccgttacatcaccagtcttgtcacggcgccactacggcgagtcaataaccaacatcggcaaagctagcatccttggcgcagcctccatcggcaaggggctcggaggaatgctgttctcgaggtttggaaggtccagcacgacacagtcatccgaaacatccaaagattccatggaagacgaaaagaaacccgtggcaagtccttccgcgacaacagttggtacccaaacactgccacacagctcatctggctttctggactccgcctacttcaggctgcaggagtcattctttaacttaccgcagctcttgtttccagaaaatgtcatgcaaaacaaagacaatgcccttgttgagttggatcacaggatcgatttcgaactgcgtgagggtttggtggagtcgagatattggtcagccgtgacttcacataccgcttactggtcctcattggatgtggctctctttttacttacgttcatgtacaaacacgagcatgatgacgacgctaaacccaacctcgatccaatctag

SEQ ID NO: 23524 - DNA, 1278 bp, synthetic construct
  source 1..1278: mol_type = other DNA; note = Synthetic coding sequence
atgaacaagatgcccgccggcgagcaggagtgcgagtacaacaaggaaggtaaatactacagcaagggtgtaaaactggttagaaagaaaaagaagatcccaggctaccggtggggcgacattaaaatcaacattatcggtgagaaagatgacctccctatccacttttgtgacaagtgtgacctccctattaagatctacggccgtataatcccatgtaagcatgcattctgctatcattgcgccaacctttatgataaggtcgggtataaagtatgcccaagatgtagatatcccgtcttgcgaatcgaagcccacaaaagagggagcgtgtttatgtgttccatagtgcagcaatgcaagaggacttacctgagtcaaaagagcttgcaggcccacattaagcggaggcataaacgtgccagaaagcaggttacgagcgcctccctggagaaagtgcgcccccatattgcaccccctcagacggagatttccgacattccgaagaggcttcaggatagggatcacctctcctatatcccaccagagcagcacaccatggtctcgttgccctccgtccagcacatgttacaggaacagcataatcagcctcacaaagatatccaggcaccaccaccagaactgtccctgagtctcccgttcccaattcagtgggaaactgtaagtatcttcacaagaaaacacggcaatttaacagtggatcacattcagaacaattccgactcaggcgcaaaaaaaccaacaccacctgattattatccagagtgtcagtcccagccagctgtctctagccctcaccatataatcccacagaaacaacactatgctccacccccctcgccttcctcccctgtgaaccatcagatgccctatccaccccaggacgtagttacaccgaactctgttagatcacaggttccagccctgacgaccacctacgatcccagcagcgggtatatcatcgttaaagtgccccctgacatgaactcgccgcccctgcgtgccccgcagtcacaaaacggaaatcccagtgccagtgagttcgcaagtcaccactacaacctgaatatactgccacagtttactgaaaatcaggaaaccctttctccgcagttcacccaaactgatgccatggaccatcgccgttggccagcatggaagcggctctcaccctgcccacccaccagaagcccaccaccttctacactacatgggagatctcaccatagccaccagaggagacacaggcgctactag

SEQ ID NO: 23525 - DNA, 1926 bp, synthetic construct
  source 1..1926: mol_type = other DNA; note = Synthetic coding sequence
atgggcccccccctgaagctgttcaagaaccagaagtaccaggagcttaaacaggaatgtattaaggattctcgactgttttgtgatcctaccttcttgcccgagaacgatagcctattttataatcgattactccccgggaaagtggtttggaagaggccacaggatatttgtgacgacccacatttaatcgtcggaaatatcagcaaccaccaacttacccaaggcagattagggcataagcctatggttagcgctttcagctgtctcgccgttcaggagtctcactggacaaaaaccatccctaatcataaggaacaagaatgggatccccagaagacagaaaaatacgccggtatattccacttcagattctggcacttcggcgagtggacagaagtggtcatcgatgatctcctgcccacaataaatggagacttagtttttagttttagtacctccatgaatgaattctggaacgcactgttagagaaggcttacgctaagctgcttgggtgttacgaggcattagacgggttaacgattactgatattattgtggactttacaggcactttggcggagacagttgatatgcagaagggacgctacaccgaactggttgaagaaaaatataagttatttggcgagctgtacaagacatttaccaaaggagggctgatttgctgttccattgaatccccgaaccaggaggaacaagaagttgagactgactggggcctgctcaaaggtcacacgtacactatgacagacatacgcaaaatccggttgggagagcgattagtcgaggtattcagcgccgagaaggtttacatggtgcgcctgaggaaccccctaggtaggcaggaatggtccggaccttggagcgaaataagcgaagaatggcagcagcttaccgcttctgatagaaagaatctgggtttggtaatgtctgacgatggtgaattctggatgagtctagaagacttctgtcggaacttccataaactgaacgtctgcagaaatgtcaacaaccccatcttcggccggaaggagctcgaatctgtcctgggttgctggaccgttgacgacgaccctctgatgaatagaagtgggggctgttataacaatcgcgacacctttctgcagaatccacagtacatattcaccgtgcccgaggatggccacaaggtcatcatgagtttgcagcaaaaggatctgaggacataccgtcggatggggcgtccagacaattacattatcggattcgagctattcaaggttgagatgaatcgtaaatttcgtcttcaccatctgtatattcaggagcgcgcagggacatcgacctacattgatacccgcaccgtgtttcttagcaaatacctgaaaaaggggaattacgtcctggttccaaccatgtttcagcatggacgcacgtctgaattcttacttagaatcttctcagaagtgcctgtgcaacttcgggaactgaccctagatatgccaaagatgtcttgctggaatctagccagaggataccccaaggtcgtgactcagatcacagttcactcagcagaggatctcgagaaaaagtatgccaacgagaccgtgaacccctacctggttataaaatgtgggaaggaagaggtgcgttcgccagtgcaaaagaataccgtgcatgcgatctttgatacccaggcgatcttttatcgaaggacgacagatattcctatcatcgtgcaagtctggaacagccgtaaattttgtgaccaattccttgggcaggttacccttgacgctgatccttcggactgccgggatctgaagtctctgtatctgcgaaaaaaagggggccctacagctaaagtgaaacagggacacataagtttcaaagttatcagttcagatgatctgacagaactgtag

SEQ ID NO: 23526 - DNA, 3180 bp, synthetic construct
  source 1..3180: mol_type = other DNA; note = Synthetic coding sequence
atggccgccgtggccggcagcggcgccgccgccgcccccagcagcctcttgctcgtggtcggatccgagtttggatctcccggactcctcacctacgtgctggaagaactggagagagggattagatcctgggatgtcgaccccggtgtgtgcaatttagacgagcagctgaaggtgttcgtgagtaggcatagcgccactttttcttctatcgtgaaggggcagcggagcctgcaccaccgcggcgataacctcgagacacttgtgcttctgaacccaagtgataagtcactttatgacgagctgaggaatttattattggacccagcgtctcacaagctccttgtgttagccggaccttgcctggaagaaactggggaactgctgcttcagaccggggggttttcacctcaccacttcctgcaggtcctgaaggatagggagattcgcgacatcttggcaaccacacctcctcccgtccaacccccaattctgaccatcacgtgcccaaccttcggcgactgggcccagctagctcccgctgtgccaggcctccagggggctttaaggttgcagttgcgtctgaaccccccggcccagcttcccaatagcgaaggactgtgcgagttcctcgagtacgttgctgaatccctggagccgccttcacctttcgaactactggaaccgccaacaagcggaggattcctgcggctgggtagaccatgctgctatatatttcctggaggtctcggtgacgcggcctttttcgccgtgaatgggtttaccgtcctggttaacggcggctctaatccaaaatcctctttctggaagttagtgcgccacctggatcgggtggatgccgtattagtaacacacccaggcgccgattccctcccaggcctcaattctctgttgcggaggaaattggctgagcggtcagaggtggccgccggaggaggctcctgggacgaccgactgagaaggctgataagccctaacttaggggtcgtcttttttaatgcctgtgaagcagcctctaggttggcgaggggggaagacgaggccgagttagccctgtccctactggcacagctcggcatcacgcccctgccactgagccgcggccccgttccggctaaacccactgtcctctttgaaaagatgggggtggggcggcttgacatgtatgtgctgcacccgccgtctgctggcgcagagagaaccctggcttctgtgtgcgctctgctagtgtggcatccagctgggccaggcgaaaaggtcgtgagggtgctcttccccggttgcactccacccgcttgtctcctggacggcctcgttcgtctacagcatctgaggtttttgagagaacccgtggtgacaccgcaggacctagagggcccaggccgcgccgaaagcaaagagtctgttgggtctagagattccagtaagagagaggggctgctcgccacccaccccaggcccggccaagaaagaccaggggtggcgaggaaagagccagctagggctgaggccccacgaaaaacagagaaggaggccaagacaccccgagagctgaagaaagatcccaaaccctccgtgtctagaacccaacctagagaggtgcgccgggccgcttctagcgtgccaaacctcaagaagaccaacgctcaggcggctccgaagccgcgaaaggccccatctacttctcactcaggcttcccgcccgtggccaacggtcctaggtcacccccctccctccgatgcggtgaagcctcccccccctctgccgcgtgcggatcaccagcttctcagctggtggcaactccttcactggagctgggaccaattccagcaggcgaagagaaagctctggagctgcccttagcagcttcgagtatccccaggccgcgaactccctcccctgaatcacaccgttctccagccgaagggtccgagcggctcagcctctccccacttcgaggaggggaagcggggcctgacgcaagtcctactgtgaccacccctaccgtgacaaccccaagcctgcccgccgaggtcgggtcccctcatagtaccgaggtcgacgagagtctgtctgtgagtttcgaacaagtcctgccacccagcgctccaacctctgaggccgggctgagcttgcccctcagaggcccgagggcgcgaagatccgccagtccccatgatgtggacctttgcttggtaagcccgtgtgagttcgaacaccgaaaagccgtgcctatggcccctgccccagcctcccccggttccagtaacgattccagcgctagaagtcaagagagggccggcggattgggggcagaggagactcctcccacaagcgtgagcgagtctctgccaacactgtccgattcagaccccgtcccactcgcccctggtgcggccgatagtgatgaagacaccgagggctttggagttcctagacatgacccgctacccgacccactaaaggttccacctccactccccgacccgagctccatttgtatggtggatccagaaatgctgccacctaagacagcccggcagactgagaatgtgtcgcggacccgcaaaccccttgcccgaccaaacagccgagctgccgccccaaaggcaaccccggttgcggcggccaaaactaagggcttagccggtggggacagggcaagtagacccctctccgctagaagcgaaccctctgagaaaggggggcgggcaccactctcccgtaagagcagtacacctaagacagcgactaggggaccatctggttcagcttcttccaggcctggagtgtcagccactccaccaaagagccctgtgtacctggatcttgcctaccttccatctggcagcagcgcacaccttgtcgatgaggaatttttccagcgggtcagggcgctgtgctacgtcatttcaggacaggatcagaggaaagaagagggcatgagagccgttctcgacgccttactggccagtaaacagcattgggacagagacctgcaggtgaccctgattccaactttcgactccgtcgccatgcacacttggtacgccgagacccatgccaggcaccaggctctaggaatcactgtgctggggtcgaacagtatggtgtcgatgcaggatgatgcattcccggcatgtaaagtcgagttctag

SEQ ID NO: 23527 - DNA, 4734 bp, synthetic construct
  source 1..4734: mol_type = other DNA; note = Synthetic coding sequence
atggaggccggcagcgtggtgcgggccatcttcgacttctgccccagtgtctctgaggaactgcctttgtttgtgggtgacatcattgaagtcctcgcagtggtggatgagttttggttgctgggaaagaaggaggacgtgaccggtcagttccccagttcgtttgttgagattgtcacaattcctagcttaaaggagggcgagcggctctttgtctgcatttgcgagttcacatcacaggagctggacaacctgcctcttcataggggtgacctcgttatattagacggcataccgaccgccggatggttgcaaggtaggtcttgttggggcgccaggggattctttccctccagttgtgtccgggaactgtgcctaagctcccagagcaggcagtggcattcacaatcagcactgttccaaatcccggagtactccatgggacaggccagagctctgatggggttaagtgcacagctggacgaggagctcgatttccgagagggagacgtgatcacaatcatcggagtccccgaacccggatggttcgagggagaactagaagggcgccgggggatctttcctgagggcttcgttgagctgttaggaccactgagaactgtggatgagtctgttagttccggcaatcaagacgactgcatcgttaatggggaggtagacacaccggtgggcgaggaagagatcgggccagacgaggacgaggaagaacccggaacctatggggtggccctgtaccgcttccaggcgctcgaacctaatgaactcgactttgaagtgggggataaaatccgcatactggcaactctcgaagacggatggctcgaggggagcctgaaaggcaggaccggtatattcccatacagatttgtgaaactgtgccccgatacgagagttgaggagactatggccctcccacaggagggaagcctcgcacggatcccggagaccagcctcgattgcttagagaacacactgggcgtagaggagcaaaggcatgagacttccgaccacgaagctgaagagccagattgtatcatcagcgaggcaccaacctctcctctgggccaccttactagcgagtatgacaccgataggaactcctatcaggatgaagataccgctgggggccccccacgttccccaggggtggaatgggaaatgcctctcgccactgatagtccaacctctgaccctacagaagtggtaaacggcatttcctctcagccccaggtgccgtttcatccaaatttgcagaaaagtcaatactattctacagtgggaggctctcacccgcactccgaacagtaccccgatctgctgcctttggaagcgagaaccagagactacgccagccttccaccaaagcgaatgtacagccaactcaagaccctacagaaacctgtcttgcccctttataggggttcgtccgtttctgcaagccgcgtagttaaacctaggcaaagctccccacagcttcataacttggctagctacaccaaaaagcaccacacaagcagcgtctatagtatttcggagcggcttgagatgaaacctggcccccaggcgcagggcctcgtcatggaagccgccacacactcacagggggatggatccacggatctggattccaaactgacacagcagctgattgagttcgagaaaagcctggcggggccagggacggagcctgacaaaatcctgcgtcacttttctattatggacttcaactccgagaaagatattgttcggggatcatctaagttgatcaccgagcaggaactcccggagcggcgtaaggccttgcgccctccaccccccaggccttgtactcctgtcagcacatcaccacatctgttggtggaccagaacttaaagccggctcccccgctggtggtcagaccatcccggcccgcgcccctgccaccatccgcacagcagagaacaaatgcagtgtcacctaagttgctctccaggcaccggccaacgtgcgagacactcgaaaaagaaggacctgggcatatgggcaggtcgcttgatcagacgtcaccatgcccacttgtcctagtgaggatagaggaaatggaaagggatctcgatatgtacagtagggcccaagaggagctcaacctcatgctagaagaaaaacaggatgaatcctcccgtgcagaaactcttgaagatctaaagttttgtgagtccaatattgaatccctcaatatggagctgcagcaattgagggaaatgacacttctgagctcacagtcaagctccctggtggccccttccggctctgtcagtgcggaaaaccctgaacagcgcatgttggagaagcgggcaaaggtcatcgaagagcttctgcagaccgagagagactatattcgggacctggagatgtgcattgagcgcattatggtccctatgcaacaggctcaggttccaaacatagattttgagggcctattcggcaacatgcaaatggtgattaaggtttctaagcagcttctggctgccctggaaatcagcgatgctgttggtcctgtgtttctgggacaccgagacgagttggaagggacctataaaatttactgtcaaaatcacgacgaggccatagccctgctggaaatttacgagaaggatgaaaagattcaaaaacacctccaggattcattggctgaccttaagtctctgtacaacgagtggggatgtacaaactatatcaacttaggtagcttcctcatcaaacccgtacagagagtcatgcgctatcctctgctgctgatggagctcctaaactctacccctgagtcccaccccgacaaggtccctttgaccaatgccgtactggcggtgaaggagataaatgtaaatataaacgaatataaacgccggaaggacctggttttaaagtatagaaaaggagatgaggattcactcatggaaaagatcagcaagttgaacatccattccattatcaaaaaatcaaatagggtgagctcacatctgaaacacctcaccggcttcgctccccaaatcaaggacgaggtgttcgaggagacagagaaaaactttaggatgcaggaacgactgataaaatctttcatccgggacctgtccctttatctgcagcatatccgagagtccgcctgtgtgaaagtggtggcagctgttagcatgtgggatgtgtgtatggagcgagggcatcgggatttggagcagttcgagagagtgcatcgatatatctctgatcagctttttactaacttcaaagaacgtaccgaaagacttgtgatcagccctttgaatcagctgctgagcatgtttactggacctcataaacttgttcaaaagcgcttcgacaagctccttgatttttataattgtacagagcgtgcagaaaaacttaaagacaagaaaacccttgaggaacttcaatccgcccgaaacaactatgaggcccttaacgctcagctgcttgatgaactgccaaaatttcaccagtacgcccaagggctttttacaaactgtgtccatgggtacgccgaggcccattgcgatttcgtccaccaggctctggagcagctgaagcccctcctctctctgctcaaggttgcggggagggaaggaaaccttatcgcaatctttcatgaggagcactctcgtgtgctccagcagctgcaagtgtttaccttctttccagagagcctacccgccacaaaaaaacctttcgaacgcaaaacgatcgataggcaatctgcacggaaaccactgctgggtttgcctagttacatgctgcagtccgaggagcttagggcctctctgctggcgaggtatccccccgaaaagctgttccaagcagaacgtaattttaacgctgcccaggacctcgatgtgtcgcttctggaaggtgaccttgttggcgtcatcaaaaagaaagacccgatgggttctcagaacaggtggttaatcgataatggcgtgaccaaaggcttcgtgtattcctcattccttaaaccatacaacccaaggcggagccatagtgacgcctccgtgggaagtcactcatctaccgaaagtgagcacggttcaagttctccccggttccctagacagaattcaggtagcaccctcacgtttaatccatcgtctatggctgtctcctttacttcaggaagctgccagaaacagccgcaagatgcgagcccacctccaaaggaatgcgatcaaggcacgttaagtgcttcactcaatccttctaatagcgagtcaagccctagccggtgccccagcgacccagattccacctcacagccacggagcggcgactccgccgacgttgcaagagacgtgaaacagccaacggcgaccccccggtcttacaggaactttagacatcccgagattgtggggtactctgtgcccggacgaaacgggcagtcacaagacctggtgaagggatgcgcccgcaccgcccaggcacccgaggaccggtctaccgagccagacggttctgaagccgagggcaaccaggtttattttgccgtgtatacgttcaaggcaaggaaccctaacgaactgtcagtatctgccaaccagaaactaaaaatcctggaattcaaagatgtgacagggaacactgagtggtggttggccgaggtgaacggtaaaaaggggtatgtgcctagcaattacattcggaagactgagtatacgtag

SEQ ID NO: 23528 - DNA, 3186 bp, synthetic construct
  source 1..3186: mol_type = other DNA; note = Synthetic coding sequence
atgctgcggaccgccggccgggacggcctgtgccggctgagcacctatctcgaggagctcgaggccgtggaactaaaaaagtttaagctatacctcggtacagccactgagttgggagaagggaagatcccttgggggagtatggagaaagccggcccactggaaatggcgcaactcctcattacccatttcgggccggaggaggcttggagactggcattatcaacattcgagagaatcaatcggaaggatctttgggaaagagggcagagagaggacctcgtacgggacaccccccccggtgggccctcttctttagggaaccagagcacctgcctccttgaggtttcgcttgtgactccaaggaaggacccacaagagacataccgagactacgtgcgcagaaagttccgactaatggaggaccggaacgctcggcttggagagtgcgttaacttaagccaccgctatactcggctgcttttagtgaaagagcactcaaatcctatgcaggtccaacaacagcttctggataccggaagggggcacgctaggactgtcggtcatcaggcgtctccaatcaagattgaaaccctctttgaaccggacgaggaaagacctgaaccacctcggactgtcgtgatgcagggggccgccggaatagggaagtctatgctggcccataaggtgatgcttgattgggcagatgggaaactgttccagggaaggttcgattatttgttttacatcaactgtcgcgaaatgaatcagtccgccacggaatgctccatgcaagatctcatcttttcttgttggcctgagcctagtgctccgttgcaagagttaatccgcgttcctgagcgcttgttgttcatcattgatggcttcgatgagttgaagccgagtttccatgacccgcaaggtccttggtgtctgtgctgggaggaaaagcgacctacagagttgcttctgaattcactgatacggaaaaagctccttcccgagctctccctactcattactacgcggcctaccgcgctggaaaaactgcataggctgctggagcaccctaggcatgtggagatacttggattttcagaggcagagcgtaaagagtacttttacaaatacttccataacgctgaacaggccggtcaggtttttaattacgtccgcgataatgaacctctgttcacaatgtgtttcgtaccattggtgtgctgggtggtatgtacatgccttcaacaacagctcgaaggaggaggcctactgaggcagaccagccggacaactacagcagtgtacatgctgtacttactctctctcatgcagccaaagccaggagcgcccaggttacagcctcctccaaaccaacgcggtctctgctccctcgccgcggacggtctctggaaccagaagatcctttttgaagagcaagacctgaggaaacacggattagacggcgaggatgtatccgctttcctaaacatgaacatttttcaaaaagatatcaactgcgagaggtactacagcttcattcatctctctttccaagagttctttgcagcaatgtattacattttggacgagggggaagggggtgcaggtcctgatcaggatgtcactcgccttttgactgaatacgcgttcagtgagagatctttccttgccctcacaagtcggttcctcttcggcctcttgaacgaggagaccagaagtcacctagagaagtctctgtgttggaaggtgtccccgcatattaagatggacttgttacagtggatccagtccaaggctcagtctgacggaagcactctgcagcaaggtagcttagaattctttagttgtctctacgaaattcaagaggaggagtttatccagcaagctctgtctcattttcaggtcatcgtcgttagtaacatcgcttcaaaaatggaacacatggtttctagcttctgcctcaagcgttgccgatcggctcaggtgctccacttatatggtgcaacctatagcgccgacggggaagatagggcaaggtgttctgcaggcgcccatacattgcttgtacagttgccagaacggaccgtgttactggacgcatactcagagcacctggccgcggccctgtgtactaaccccaaccttattgagctgagcctgtacagaaacgccttgggcagcaggggtgtgaagctactgtgtcaagggctccgtcaccctaattgtaagctgcagaatctccgcttgaagcgctgccgcatctcttctagcgcctgcgaggacctgtccgctgccctgattgctaataaaaacctgactagaatggacttatcaggtaacggcgttggcttcccaggaatgatgctactgtgtgagggcttacgccatcctcagtgtaggcttcagatgatccaacttcgaaagtgccaactcgaaagtggcgcatgtcaggagatggcttccgtgttgggaactaaccctcatctcgtggagttggaccttactgggaatgctctggaggatctcggcttaagattgttgtgccagggtctgcgccacccagtatgccggctgcgaaccttgtggctcaagatctgccgcctcaccgccgccgcctgtgacgaacttgcttccacgctttctgttaaccaaagcctcagggagttggacctaagcctcaacgagctgggtgacctaggggtcttgcttctgtgtgagggactgaggcaccccacctgtaaacttcaaactctgaggctggggatctgccggctcgggtccgctgcctgcgagggacttagtgtggtactgcaggctaaccacaacctgagagagctcgatctaagtttcaacgacctcggcgactggggattgtggctactggccgaggggctgcagcatcctgcctgcaggcttcagaagctctggctggattcctgtggcctgactgctaaggcttgtgagaatctctatttcaccctgggaattaatcaaaccctgacggatttgtatctcaccaataacgcattgggggacacgggcgtccggttgctatgcaagcgactgtctcatcccggctgcaaattgcgtgttctgtggctcttcggcatggatctcaataagatgacgcattctcggttggcggcactcagggttaccaagccatacctagacattggctgctag

SEQ ID NO: 23529 - DNA, 3963 bp, synthetic construct
  source 1..3963: mol_type = other DNA; note = Synthetic coding sequence
atggccaacgacagccccgccaagagcctggtggacatcgacctgtcatcactgcgcgacccggcaggcatcttcgagttggtcgaggtggtcggaaatggtacgtacggtcaggtgtacaaaggccgccacgttaaaactggccagctggccgccattaaggtgatggatgtgaccgaagacgaggaggaagagattaaattagagattaacatgttgaagaagtactcccaccataggaacattgccacatattatggcgcattcattaagaagtcaccgcccggacatgatgatcagctttggctggttatggaattctgtggggcagggtccataactgatctcgtcaagaatacaaaggggaatacccttaaagaagactggattgcttacatctcaagagagatcctgcgagggctggcacacctgcacatccatcacgtgattcacagggacatcaaagggcagaacgtcttgctcactgagaatgcagaggtgaagctcgtcgattttggggtgagcgcacagcttgacagaacggttggacgacggaatacctttataggtacaccatactggatggcccctgaagtcatcgcctgcgatgagaaccctgacgcaacctatgactaccggagtgatctctggagttgcggaattacagctatcgagatggccgaaggggccccaccattgtgtgacatgcatcccatgcgagctctctttctgatcccaagaaacccacccccccgcctgaagagcaagaagtggtcaaaaaagtttttctcttttatcgagggctgcctcgttaaaaactacatgcagcggcctagcaccgagcaacttttgaaacacccatttatcagggatcagcccaacgagaggcaggtcagaatccagctgaaggatcatatcgataggactaggaagaaacggggcgaaaaagatgagactgagtatgaatattctgggtccgaggaggaagaggaggaagttccagagcaggagggagaaccttcaagtattgttaacgttccaggggagtctaccctccgtagggatttcctgcgactgcaacaagagaataaagagcgctccgaggccctcaggcgccagcagctcttgcaggagcagcagctgcgggagcaggaggaatacaaaaggcagctcctcgcagagagacagaaacggatcgagcagcagaaggagcagcgaaggcgactggaggaacagcagagacgagagcgggaggcaaggcggcagcaggagcgcgagcagagacgtagggaacaagaagaaaaacgccgcctcgaggagctcgagaggcggagaaaagaagaggaggagcgaagaagagccgaggaagaaaagaggagagttgagcgcgaacaggagtacattcgccggcagctggaagaagaacagagacacctcgaagtgttgcagcaacagctgctgcaggaacaggctatgctcctcgagtgtagatggcgcgagatggaggagcacagacaggctgaacgcctgcagagacagcttcagcaggaacaggcatacctgctatccctccaacatgatcaccggagaccacatccccaacactcacaacaaccccctcctccccaacaagagcggagcaaaccatccttccacgcccctgaaccaaaagcgcattacgaacctgctgatcgggctagggaagtggaggataggttcaggaaaaccaaccactcctcaccggaagcacagagcaaacagaccgggagggtcctggagccacccgttccctccagaagcgaaagcttcagtaacggcaattccgagagcgtgcatccggccctgcaacgccctgctgaaccccaagtgcaatggagccatctggctagcttgaagaataacgtatctccagtgtctcgtagtcacagcttttctgatccttcaccgaagttcgcacatcatcatctaagaagccaggacccttgcccccccagcagatctgaggtgctctcgcaaagcagcgacagtaagagtgaagcccccgatccaacccagaaggcctggagtcgcagtgactcagatgaggttcctcccagagttcctgttagaacgacctcacgctccccagtgctgagtaggcgagacagcccactgcaaggcagtggtcagcaaaactcccaggccggccagcggaactccaccagctcaatcgagcctagattactgtgggaaagagtggaaaagctcgtccctagaccaggctctggaagttcctcaggatcctcgaattccggaagccagcctggcagccaccctggctcccagtctggcagtggcgaacggttcagagtcagatccagcagcaagtctgagggatcgcctagtcagcggctggagaacgccgtcaagaagccagaagacaaaaaagaagtctttcggcctctgaaacccgccgtgcgaatcgatctgactgcactagccaaggagctgcgcgctgtagaggatgtgcggccaccacacaaggtgacagactactcttcaagtagcgaggaatccggcacaaccgatgaggaggacgatgatgtggagcaggaaggggccgatgagagcactagcggaccagaggacacgagagccgcaagttcccttaacctctccaatggagaaaccgaatctgttaaaactatgattgtgcacgatgacgtcgaatccgagccagccatgactcccagtaaggaggggaccctgattgtgcgtcaaacccagtctgcatccagtacgctgcagaagcacaaaagcagctcttcatttactccattcattgacccccggctgcttcagatctctccttctagcggaacaaccgttacatctgttgtgggtttcagttgcgatgggatgcgaccagaagccatccgccaagacccaacccgtaagggctctgtcgtgaacgtaaatccaaccaatactagaccccagtctgacacccctgagatcagaaagtacaaaaagcgattcaattccgagatcctctgtgccgccctgtggggcgtgaatctgctggtcggcaccgagtcagggctgatgcttctcgacagatccgggcaaggcaaagtataccccctgattaaccggagaaggttccaacagatggatgtgttggaagggctaaacgttctggtcacaatcagcgggaaaaaagataaactgagagtgtactacctgagttggttgaggaataagatcctacacaatgatccggaagtggagaagaaacaaggttggacaactgtcggggacctcgagggatgtgtgcactacaaggtcgtgaaatatgagagaatcaagttccttgtcatagctctcaagtcatctgtggaagtgtatgcttgggcacctaagccctatcataagttcatggcgtttaagtccttcggcgaactggtgcacaagccgcttctggtagatcttaccgtggaagaagggcaacgtctcaaggtgatctatgggagctgcgctggatttcacgccgtggatgtggatagtgggtccgtctacgatatctatctccccactcacattcagtgcagcatcaaacctcacgcaatcatcattctccctaataccgatggtatggagttgctcgtgtgttatgaggacgagggagtgtatgtcaatacgtatggccggattactaaagacgtggtgcttcagtggggagaaatgcccaccagtgtagcatatattcggagtaaccagaccatgggatggggggaaaaggctattgagatacgatcggtggagaccggccacctagatggcgttttcatgcataaacgggctcagaggttaaaatttttgtgcgagcggaacgataaagtgttctttgccagtgtaagaagcggggggtcatcccaggtgtactttatgactctcggccgcacgagcctgctgtcttggtag

SEQ ID NO: 23530 - DNA, 606 bp, synthetic construct
  source 1..606: mol_type = other DNA; note = Synthetic coding sequence
atgtacaccctgctgagcggcctgtacaagtacatgttccagaaggatgaatactgtattttgattctgggcctcgataatgcaggaaaaaccacctttttagaacagtccaagaccaggttcaataagaattacaagggaatgagtctgtcgaaaattacaaccaccgtgggtctcaatatcggtactgtagacgtcggaaaagcccgactgatgttctgggatctgggcggtcaggaagaacttcaatcgctgtgggacaagtattacgccgaatgtcatggtgtgatctatgtcatcgatagcacagatgaggagcgattggcagaatctaagcaggccttcgagaaagttgttacttcggaagctctgtgtggagtccccgtgttggttctggcaaataaacaggatgtagaaacctgtctgtccattccagatattaagaccgcatttagtgactgtaccagtaaaatcggacggcgtgactgcctgactcaggcatgcagtgctttgactgggaaaggagtgagggagggtatcgaatggatggtgaaatgcgtagttcgcaacgtgcacaggcctcctcgccaaagggatatcacctag

SEQ ID NO: 23531 - DNA, 1329 bp, synthetic construct
  source 1..1329: mol_type = other DNA; note = Synthetic coding sequence
atgcggggcgccatggagctggagcccgagctgctgctgcaggaggctcgcgagaatgttgaagccgcccagtcataccgacgcgagctcggacacaggctggaggggctgcgggaagcaaggcggcaaatcaaagaatctgcgtcgcagactagagacgtattgaaacagcatttcaacgatttgaaggggacattgggcaagctgttagatgaaaggctcgttactctgctgcaggaagtagacacaattgaacaggagactattaagcctttggacgattgccagaaattaatagaacatggcgttaacaccgccgaagacctggtccgcgagggcgagattgctatgctggggggtgtgggcgaagagaatgagaagctatggagctttaccaaaaaagcatctcacatccagttagacagtctgcctgaagtgcctcttctggttgatgtcccttgtctgtccgcccagttagacgactccatactaaacattgtgaaggaccatatcttcaagcacggcacagtggcttctcgcccccccgttcaaatcgaggaactcatcgagaaacctggaggaatcatcgtgagatggtgcaaggtggacgacgactttactgctcaggactatcgcttacagttccggaagtgcacctctaatcactttgaagacgtctatgtgggttctgaaacagaattcatagtattacatattgaccctaacgtcgattatcagtttagggtatgcgccagaggcgacggaaggcaggaatggtcaccatggtccgtacctcagatcggccattcaacactcgtgcctcacgaatggaccgcagggtttgaaggctattcactgtcctcaaggaggaacattgccctgcggaatgatagcgaatcatcaggtgtcctgtactctagggcaccaacctatttctgcggtcagactctcacatttcgggtggaaacagtaggccagccggacaggagagattccatcggagtctgcgcagagaagcaggacggttacgattcactccaaagggaccaagccgtgtgcattagcaccaatggcgcagtgtttgtgaacggcaaggagatgaccaaccagctccccgctgtgacaagcggctctaccgtgactttcgatattgaggctgttacactcggaaccaccagtaacaacgaaggtggtcatttcaaattacgggtcaccatctcctctaataaccgggaggtggtgttcgactggttgctcgatcagtcatgcggttccctctattttggatgtagtttcttctaccctgggtggaaggttcttgtgttttag

SEQ ID NO: 23532 - DNA, 1428 bp, synthetic construct
  source 1..1428: mol_type = other DNA; note = Synthetic coding sequence
atggccgccctgaccaccctgttcaagtacatcgacgagaaccaggacaggtacattaagaagctagccaagtgggtggccatccagagcgtgtccgcttggcccgagaaaagaggagaaattcggagaatgatggaagtggccgctgccgatgttaaacagctcggcgggtcagtggagcttgtcgacatcggtaagcagaagctgcccgatgggtcggagattcccctgccacccattctcttgggtagacttggatctgacccacaaaagaagacagtctgtatctacggacacttggatgttcaacctgccgctttggaggacggttgggattccgagcccttcactctcgttgaaagagacggcaagctatacggccggggttccaccgatgacaaaggacctgtggccgggtggatcaacgccctggaagcataccagaagacaggacaggagatacccgtgaatgtgcgcttttgtctggaagggatggaggaatccggctcagagggtctggacgaactgatctttgcccggaaagatacattttttaaagatgtggattatgtgtgtatcagcgacaactactggctcgggaagaaaaagccctgcatcacatacggcttgcgcggaatatgctacttctttatcgaagtggagtgtagtaacaaagatctgcacagtggagtctacgggggctcagtgcacgaggccatgacagacctaatcctgttaatggggagtctggtggacaagcggggaaacattctcatccctggtattaacgaggctgtggccgctgtaacagaagaagaacacaagctgtatgacgatatcgacttcgatatcgaggagtttgccaaggacgttggcgctcagatcttgctgcacagccacaagaaggacattctcatgcatcgctggaggtatccgtctttgtcgctccacgggattgaaggagcgttctctggctccggcgcaaaaaccgtgatccctagaaaagtggtcgggaagttctcaataagactcgtgccaaacatgaccccagaggtggtcggggagcaggtgaccagctatctcacaaaaaaatttgccgagctgaggtcccccaacgaatttaaagtctacatggggcatgggggtaagccatgggtcagtgatttcagccacccccactatcttgctgggagacgtgccatgaagacggtctttggagtggaacctgacctgacccgcgagggcggctccatccccgtgactctgacttttcaggaagccacagggaagaacgttatgctgttaccagttggctctgctgacgatggtgcccattcccagaacgagaagctgaataggtataattacatcgagggaacaaaaatgctggccgcctacttatacgaggtaagtcagctgaaagactag

SEQ ID NO: 23533 - DNA, 6291 bp, synthetic construct
  source 1..6291: mol_type = other DNA; note = Synthetic coding sequence
atggccgaggtgaccgtgccccgggtgtacgtggtgttcggcatccactgcattatggcgaaggcatccagcgatgtgcaggtatccggctttcacagaaagatccagcacgtcaagaacgagctgtgccatatgctgtccttggaagaggtagctcccgtgctgcagcagacccttctacaggataacctgctcggaagggtccatttcgaccaattcaaagaggcattgatcctcatcttgtctcggacactgtctaacgaggagcactttcaggagcccgattgtagccttgaagcacaaccaaaatatgtacgaggagggaaacgctacgggagacggagcttgcctgaattccaggaaagcgtcgaggaatttccggaagtgacagtgattgagccgctggacgaggaggctaggccaagccatattcccgccggagactgcagcgaacactggaaaacgcagcgttcggaagagtacgaagcagaaggccaactgaggttctggaatccagatgatctgaacgccagccaaagtgggtctagccctcctcaggactggatcgaagagaagttgcaagaagtatgtgaggatctgggcattaccagagacgggcacctgaatcgaaagaagctggtatcaatatgtgagcagtatgggctgcagaatgttgatggcgagatgctcgaggaggtttttcataacctcgatcctgatggcaccatgtcagttgaggattttttctacgggctgttcaagaacggaaaatcactgacaccctccgcatcaacaccttacaggcagttgaagcggcatctcagcatgcagagctttgacgaatcaggcaggcgtactaccacatcaagcgcaatgacctccacgattggctttagggtcttctcatgtctggacgacggaatgggacacgcatcagtcgagcggatcctcgacacatggcaagaagaaggtatcgagaactcacaggagattctgaaggccctggatttctcgctggatggtaatattaatctgaccgagctgacattggctctcgagaatgagctgttagtgacaaagaattcaatccatcaggctgccctggcctcattcaaagctgaaattaggcatctcctggaacgggtcgaccaggttgtacgggagaaagagaagctaagatcagaccttgacaaagcagaaaaactcaaaagtctgatggccagcgaagtcgacgaccaccacgccgccattgagagaagaaacgaatacaatttgcgcaaactcgatgaggaatacaaggaacggatcgccgctttgaagaatgaactgcgcaaggagagagagcaaattttgcagcaggccgggaaacagcgccttgagctggaacaggaaatagagaaggctaagaccgaggaaaactacattcgcgaccggctggcactctcactcaaggaaaacagtaggcttgagaatgagctcctggaaaatgctgagaagctggcagaatacgagaacctgactaataaactccagcgcaatctcgagaacgtcctcgccgagaagtttggggatctcgatccgagctcagcagaattcttcctgcaggaggaaagacttactcagatgaggaatgagtatgagcgccaatgtcgggtgttgcaagatcaggtggacgaactgcagagcgagctggaggagtaccgagcccagggcagggtcctgagactgcccctgaaaaattcaccttcggaggaagttgaagcgaattccggaggcatagagcccgaacatggcctcggaagcgaagaatgcaaccccctcaacatgtccattgaagcagaactggtcatagaacagatgaaagaacagcaccatagagacatttgttgtctgcgtttagagctcgaggataaggtgaggcattatgagaagcaactcgatgagacggtggtttcatgtaagaaggcccaagagaacatgaagcaaaggcacgaaaatgaaacacacaccttagagaagcaaatttctgacctcaagaacgagatagctgagcttcaaggccaagctgctgtgttgaaagaggcccaccacgaggcaacgtgtcgacacgaggaagagaagaaacagctgcaagttaaactcgaagaggagaagactcatcttcaggaaaagttgcggctccagcacgaaatggagttgaaggccaggttaacccaggcccaggcttctttcgagagggaaagggagggtctacagtcaagcgcatggacagaagagaaggttagggggttgacacaagagctggagcaatttcatcaagaacagctcacaagtctcgtcgagaaacatactctcgaaaaggaggagctgcgcaaagaactgcttgagaaacaccaaagggaattacaggaaggaagggagaaaatggagaccgagtgtaatagaaggacctcccagatagaggcccagttccaatcagattgtcagaaggtgaccgagaggtgtgaatctgcactccagagtctggaaggtaggtatagacaggaactgaaagatctgcaggagcagcagcgagaagagaaaagtcagtgggaattcgagaaagatgagctcacgcaggagtgcgccgaggcacaagagttacttaaagaaacactgaaaagagagaagacaaccagcctagtcctgacacaggagagagagatgttagaaaagacctataaggagcaccttaattctatggtggtggaacgtcaacagctgctgcaggacctggaggacctgcggaacgtgtccgagactcagcagtcacttctgagtgatcagatcctcgaactgaaatcaagccacaaacgagaactacgagaacgggaggaggtgctgtgtcaggctggtgcctcagagcagctggcaagccagcgattagaaagacttgaaatggagcatgaccaagagagacaagagatgatgtctaaactcttagccatggagaacatccataaggcgacctgcgaaacagcagaccgcgaacgcgcagagatgtccactgaaatctctcgattacaatcgaagattaaagagatgcaacaagcaacctccccattgtcgatgcttcagagcgggtgccaggtgattggagaagaggaagttgagggcgatggggctctctctcttcttcagcagggcgagcaattgctcgaagaaaacggagacgtcctgttgagtctgcagagggctcatgagcaggccgtgaaagaaaacgtgaagatggctaccgagatttccagactgcaacaaaggcttcagaaattggagcctggtctagtaatgagcagctgcctggacgaaccagcaaccgaattcttcgggaacactgcagaacagactgaacaattcctacagcagaacagaaccaagcaagtagagggtgtgacacgcagacatgtgctgtcagacttagaggacgacgaggtaagagacctggggtccacaggcacttccagcgtccaaaggcaggaagtcaagatcgaggaaagtgaggcttcagtcgagggcttctccgaattggagaattctgaagagacccgcaccgaaagttgggaattgaaaaaccagatctcccagctccaggaacagctcatgatgctgtgtgccgattgcgatcgagcctctgaaaagaagcaggaccttttattcgacgtctctgtcctaaaaaagaaattgaagatgctcgagcgcattccggaggcttctccgaaatacaaattattatatgaagacgtgagcagggaaaatgactgtttacaggaggagctccgtatgatggagacccggtatgacgaggctctagaaaataacaaggagctaacagccgaagtttttcggctccaggacgaactcaagaaaatggaggaggtgaccgaaacatttctgagcctcgaaaagagttacgatgaggtgaaaatagagaatgaaggcctgaacgtcctcgttttgcggctgcagggcaaaatagagaaactgcaggaatccgtagtccagagatgcgattgctgcctttgggaagcatcgctggagaatctggaaatagagcccgacggtaacatcctgcagctgaaccagacactcgaggagtgtgtgcctcgcgtgcggtctgtgcaccacgtgatagaggaatgcaaacaagaaaaccagtatctggaagggaatactcaactcttggaaaaagttaaggcccatgaaattgcttggctacacgggactattcagacccaccaagaaagaccacgagttcagaaccaggtcatcttagaggagaacacgactcttctcggtttccaggataaacactttcagcaccaggccaccatcgccgaacttgagctagaaaagacaaagctccaagagctgacccgcaagcttaaggagagagtgactattctagtgaaacagaaagatgtgctgagccacggcgagaaagaggaagaactgaaggctatgatgcatgatttgcagatcacatgcagcgagatgcagcagaaggtcgagctacttagatatgagtccgagaagctgcagcaagagaattctatactgcggaatgaaatcactacgctgaatgaggaggattcaatttccaatctgaagcttggcaccctcaacggcagccaagaggagatgtggcaaaaaacagagactgtgaagcaggaaaacgcagcagtacagaaaatggtggagaatctgaaaaaacagattagcgaactgaagataaaaaaccagcagctagacctcgagaatacagagctctctcaaaagaacagtcagaatcaggagaagctgcaggagctgaatcagcgattgactgaaatgttgtgtcagaaagaaaaagagccgggcaatagcgccttagaagaacgtgagcaggaaaagtttaacctgaaggaggagctcgagcgctgcaaggtgcagtcctctactctcgtcagcagtttagaggccgaactgagcgaagtcaagattcaaacacacatagtccaacaggagaatcatttgctcaaggacgaactggaaaagatgaagcagttgcaccgttgccccgatttgtcggacttccagcaaaaaatatcctcggtattgtcctataatgaaaaactcctcaaggagaaagaggcactatcagaggaactgaactcgtgcgtagataaactcgcgaagtctagtcttttggagcacaggattgccaccatgaagcaggagcagaaatcctgggagcatcagagcgcctcactcaaatcacagctggtcgcatcccaagagaaagtgcagaacttagaagatactgtgcagaacgtcaatttgcagatgagccgcatgaaatctgaccttcgggtcacccagcaggagaaagaagctttaaagcaggaagtcatgtcgctgcataaacagctgcaaaacgctggaggcaaatcatgggctcctgagatcgctacgcacccttccggacttcataatcaacagaagaggctgagctgggataaactggatcatctaatgaacgaggagcagcagctgttgtggcaggagaatgaacgcctccagacgatggttcaaaacactaaagccgagctcactcacagcagagagaaggtgaggcaactcgaatctaatctgttgcctaagcatcaaaaacatctgaacccttcaggaactatgaatcccactgaacaggaaaagctgtcactgaaacgggaatgtgatcagtttcagaaagagcagtcaccagccaataggaaagtgagccagatgaattcactggaacaggaactcgaaactatccacctggagaatgaaggtttgaagaagaaacaggtcaagttggacgagcagctgatggagatgcagcatcttagaagcactgcaacaccttctccgagcccccacgcctgggacctgcaactgctgcagcagcaagcctgcccaatggtgccacgagagcaatttttacagctgcagaggcagcttctgcaggcggagagaatcaatcagcacctgcaggaggaactggagaatcgcacatccgagaccaacaccccccagggtaatcaggagcagctggttacagtgatggaagaacgtatgattgaggtggaacaaaaactaaaacttgtcaaaagactgttacaggagaaagtgaatcaactgaaagagcaggtttctctcccgggtcacttgtgctccccgacgtcacacagcagtttcaattcaagcttcacaagcctctattgtcactag

SEQ ID NO: 23534 - DNA, 1176 bp, synthetic construct
  source 1..1176: mol_type = other DNA; note = Synthetic coding sequence
atggccgccctgaccaccctgttcaagtacatcgacgagaaccaggataggtacattaaaaagctggccaagtgggttgccatccagtctgtcagtgcctggcccgagaaacggggcgaaattcgcaggatgatggaagttgccgccgctgacgtgaagcagctcggaggatccgtggagctggttgacatcgggaagcagaaggaaataccagtgaacgtccgattctgcctcgaggggatggaagaatctgggtcagaagggttagacgagttgatattcgctagaaaggatacattcttcaaagacgtggactatgtctgtatttccgataattactggctaggcaaaaagaagccctgcatcacttatggactgcgaggcatctgttacttcttcattgaggtcgagtgctcaaataaagacctccacagtggcgtctacggtggcagcgttcatgaggctatgaccgacttaatcttgttgatgggaagcctggtggataagcgcggcaatatactgatcccaggcattaacgaggcagttgcggctgttaccgaagaagaacataaactctatgacgatattgactttgacatagaagagttcgccaaggatgtgggggcacagattctccttcactctcacaagaaggacatcctgatgcataggtggcgctacccatcgctgagcctgcacggcatcgaaggagctttttcagggtcaggcgcgaagacggtaatcccaagaaaggtggtcggtaaattttccataagactggttcccaacatgactccagaggttgtgggcgaacaggtgacgagttatttaaccaagaaatttgccgaactcagaagcccaaacgaattcaaagtttatatgggacatgggggtaaaccatgggtgtccgatttctcgcacccccattacttggccggccgcagagccatgaagaccgtgtttggcgtggaacccgacctcacgcgtgaagggggctctataccagtgactctgacttttcaggaagccacgggtaagaacgtaatgctgctcccagttggctcagccgacgatggggcccatagccagaatgaaaaactgaatcgatacaactacatcgaaggcacaaaaatgctggccgcctacttgtacgaagtgtcccagcttaaggattag

SEQ ID NO: 23535 - DNA, 5970 bp, synthetic construct
  source 1..5970: mol_type = other DNA; note = Synthetic coding sequence
atggacgaggtggagcaggaccagcacgaggcccggctgaaggagctgtttgacagctttgataccaccggaacaggctcactggggcaagaggagctgacggacttgtgccatatgctgtcactcgaagaagtcgcccccgtgctccagcagaccctgttgcaagataacctacttggacgcgttcactttgaccagtttaaagaggccctcattctaatcttatcacgtacattgagcaatgaggagcatttccaggaaccagactgcagtttagaggctcagccaaaatatgttagggggggcaagcgttacggacgacgcagcctgcccgaatttcaagagagcgttgaagaatttcctgaggtgacagtcattgagcctctcgacgaggaagcgaggccatctcacattcccgcgggagactgttcggaacattggaagacacagagatctgaagagtatgaagccgaaggccaactacgattttggaaccccgatgatttaaatgccagtcaaagcggcagctctccacctcaggactggattgaggagaagctgcaggaggtatgtgaggacctgggaattactagggacggccacctcaaccggaagaagctggtgtctatttgtgaacagtatggcttacaaaacgtagatggggagatgctggaggaagtcttccacaatctggatcctgacggaactatgtctgttgaggactttttttacgggctcttcaagaacggcaagtccctgacaccttctgcctccactccctaccgccagttgaaacggcatctgtctatgcagagctttgacgagtccggacggaggaccacaactagctcagctatgacatctaccatcgggttccgcgtgttttcttgcctcgatgatgggatgggccacgcttccgtcgagcgaattttggatacttggcaggaggaaggaatcgagaacagccaggaaatactcaaagccctggacttttcactagacgggaacattaacttgacggagcttacactggcactggaaaacgaacttctggtcacaaaaaactccatccaccaagcagccctagcttcctttaaggcagaaattagacatctgctggagagagttgatcaggtggttagggagaaagagaagcttagaagcgatctggataaagcagagaagctgaaatcactgatggcttcagaggtagatgaccatcatgcagccatcgaacgccggaacgagtacaacctacgcaaactcgatgaggaatacaaggagaggatcgctgcactgaaaaacgagctcaggaaggagcgcgagcagatacttcagcaggccggcaagcaaaggctggaactggaacaggagatcgagaaggctaagactgaagaaaattatatccgggatagattggctctgtcactgaaagagaactcccggttagagaatgaattgttggagaacgccgagaaactggctgaatacgagaacttgactaataagctgcagagaaatctggagaatgtactggctgagaaattcggcgacttggatccatctagtgcggaattcttcttacaagaagaacgcctgacccagatgcgtaacgagtacgagaggcaatgcagagtgcttcaggatcaggttgacgagctgcagtccgaactggaagagtatagggcgcaggggcgggtcctccgtctccccttaaagaatagcccaagcgaggaggtggaagccaactccggtggtatagagccagagcacggcctggggtccgaagagtgtaatcctttgaacatgagtattgaggcggaactcgttatcgagcagatgaaagaacagcaccaccgtgacatttgctgtctgcggctggagctggaagacaaggtccggcactacgaaaaacagctggatgaaacagtagtatcctgtaagaaagcgcaggagaacatgaagcagagacatgaaaacgaaacacacaccctggaaaagcagatctcagatcttaagaacgaaattgccgaactgcaggggcaagccgctgtgctcaaggaagcccatcacgaggcaacctgccggcatgaggaggaaaagaagcagctgcaggtgaagttggaagaggaaaaaacgcatctacaggagaagttaagattacagcacgaaatggaattgaaagctagattaacccaggcccaggcctcctttgaaagagagagagaaggccttcagtcctcagcatggaccgaagaaaaggtgcgcggcttaactcaggagcttgaacagttccatcaggagcagctcacatccctggttgaaaaacatacactggagaaagaggaattacggaaggaactgcttgaaaaacaccaacgggaactgcaggagggtagagagaagatggaaaccgagtgtaacagaagaaccagccaaatcgaagcccagtttcagtcggactgccaaaaagtgacggagagatgcgagagcgctttgcagagtctggagggtcgatatcgtcaagagcttaaagatctgcaggagcagcagcgcgaagaaaagtcccagtgggagttcgaaaaagatgaacttacccaggaatgcgctgaagcccaggagcttctgaaggagacccttaagagagagaaaacgacttcacttgtgttaacccaggaaagagagatgttggagaagacatacaaggagcacctgaactccatggtcgtggagcgacagcaacttctgcaggacctagaagacctgcgcaatgtcagcgagacccagcagtctctgttatctgatcagattctagaactgaagtctagtcacaaaagagaattgcgtgaacgggaagaggtcctatgccaagccggggccagcgagcagctggcctcccagaggctcgaaaggctggagatggagcacgatcaagagcgccaagagatgatgagcaagctgttagctatggaaaacatccataaggctacatgtgagacggctgatcgagagcgggccgaaatgagtaccgagatctcccgtctgcagagtaaaatcaaggaaatgcagcaagccactagcccgttaagtatgttacagtccggctgccaggtcattggtgaagaggaagtagagggtgacggtgctctgagtttacttcagcagggcgaacagttactcgaggagaatggcgatgtgttgctgtctctgcagagggcccacgagcaggcagtcaaggagaacgtgaagatggctacagagatcagcagattacagcaaaggctgcaaaaactggagccagggctggtaatgtcatcgtgtttggatgagcccgcaaccgagttttttggaaacaccgctgaacagacggaacagtttttacagcagaacagaacaaagcaagtggagggcgtgacgcggaggcacgtactctcggacttggaggatgacgaggtccgcgacctgggctctactggcacatcctctgttcaacggcaggaggttaaaatcgaggagtcagaagcgagtgtggagggattttccgaactggaaaacagcgaggaaacccggactgagagttgggaactgaagaatcagataagccagctgcaggagcagttaatgatgctgtgcgctgactgcgatcgtgcatctgaaaaaaagcaggatttactttttgatgtgtcagtcctcaagaaaaagctgaaaatgcttgagcgaataccggaggcctctccgaagtacaagcttctgtacgaagatgtgtccagagaaaatgattgtttgcaggaagagctccggatgatggaaaccagatatgacgaggctttagaaaataacaaggaactcactgccgaggtgtttagactgcaggatgaactgaaaaaaatggaggaggtgaccgaaacctttttgagcctggagaagtcttatgacgaggtcaaaattgagaacgagggactaaacgtgctggtactgaggctccaaggtaagatcgagaaacttcaggagtccgtggtccagcgatgcgactgctgtctgtgggaggcaagtctggagaatctcgaaattgagcccgatggtaacatcctgcaacttaatcaaactctcgaagaatgcgtgcctcgagtgcgtagcgtccaccatgtcatagaagaatgcaagcaagagaaccagtatttggagggcaatactcagcttctggaaaaggtgaaggctcatgaaatcgcctggctgcatggaactatccagactcaccaagagcgccctagagtgcaaaatcaggtgattttggaggagaacacgacccttcttgggtttcaagacaagcatttccagcaccaggctaccattgccgaactggagctcgaaaagacgaagctgcaagagttaactcgcaaactgaaagaaagagtgaccattttggtgaagcaaaaggatgtgttgtcccatggagagaaggaagaagagttgaaggctatgatgcacgatctgcagataacttgcagcgaaatgcaacagaaggttgaacttctccgatatgagagcgaaaaacttcagcaggagaactccatcctaaggaatgagatcaccactttaaatgaagaggactccatcagcaacttgaagttgggaacactcaacggcagtcaggaagaaatgtggcagaagacggaaactgtcaaacaggagaatgcggcggtgcagaagatggtggagaatttgaagaaacaaatttccgagctgaaaatcaagaaccagcagctggatctggaaaatactgagttgtctcagaagaattcccagaatcaggagaaattacaggagctcaaccagcggctgaccgaaatgctgtgccagaaggagaaagagcctggaaacagcgccctggaggagagagaacaagagaagttcaacctgaaagaggagttggagaggtgcaaggtgcaaagctcgactctagtgtcatcactggaggccgaacttagtgaagtgaagatacagacccacattgtccaacaggaaaatcatctcctcaaagacgagctggagaagatgaagcagctccatcgttgccccgacttatctgatttccaacaaaagatatcctccgtactttcttacaatgagaagctgctgaaagagaaggaagccctatctgaggagttgaactcttgcgtcgataagcttgctaagtcttccctgctcgagcatcgaatcgccacaatgaagcaagaacagaagagctgggagcaccagtcagcgtcactcaagtctcagctagttgcaagccaagaaaaggtccagaacctggaggacacagtgcagaacgtgaatctgcagatgagccgcatgaaatcggacttacgtgtgacccaacaggagaaagaagcactgaagcaggaggtgatgtccctgcacaaacaactgcagaatgctgggggcaaaagttgggctccagagatcgcgacccatccatcaggactccacaaccagcagaagcgcctttcatgggacaaactggaccatctcatgaacgaagaacagcaactgctctggcaggaaaacgaacgtctgcagaccatggttcagaatacaaaggcagagctcactcactcccgcgagaaagtgaggcagctagagtccaacctgcttcctaagcaccaaaagcatttgaacccctcgggaaccatgaaccccaccgaacaagaaaagttatccctaaaacgtgagtgtgatcaatttcagaaggagcaatcccccgctaaccgtaaggtctcacagatgaatagcctcgagcaagagttagaaacaattcacttggaaaatgaaggactgaaaaagaagcaagttaagctggacgagcagctaatggagaactccgtggttgggtcctctcgggagggctgcagttctttacccgagatcgtgtgtgaagatgcggcacctgaggtgcattgcgacgcttag

SEQ ID NO: 23536 - DNA, 915 bp, synthetic construct
  source 1..915: mol_type = other DNA; note = Synthetic coding sequence
atgggccagtgcgtgaccaagtgcaagaaccccagcagcaccctggggagcaagaatggcgatcgggagccctcaaataaaagccatagtagacgtggggcgggacatcgagaggagcaggtccctccgtgtgggaagcctgggggtgatattctggtgaatggcaccaagaaagctgaggcagccactgaagcctgtcagctgcctacatcatccggagacgcaggcagagagagcaagagtaacgcagaggagtcatccctccagcgcctggaggaactgttccgccggtacaaagatgagagagaggatgcaattctggaggaaggcatggaacggttttgtaacgatctctgcgtcgaccccactgagtttcgcgtcctgctcctcgcctggaagttccaggcggctacaatgtgtaagtttacacgcaaggaattctttgacggttgcaaagcgatctcggccgatagcattgacggtatctgtgccagattcccctcactccttaccgaagcaaagcaggaggataagtttaaggacctctaccggtttacttttcagttcggcctggacagcgaggaagggcaacggtccctccatcgtgaaattgctatagccctgtggaaactggtcttcacacagaataatcccccagttctggatcagtggctgaacttcctcaccgaaaacccgagcggtataaagggcatatcgcgggacacctggaacatgttcctgaactttactcaagtaattggccccgacctgtccaactatagcgaagacgaagcctggccatccctcttcgatactttcgttgagtgggagatggaacgcaggaaacgcgagggggagggcaggggagctctgtcctctggtcccgaggggttatgccccgaagagcagacttag

SEQ ID NO: 23537 - DNA, 1914 bp, synthetic construct
  source 1..1914: mol_type = other DNA; note = Synthetic coding sequence
atggccgccatggccgtgggcggcgccggcggcagccgggtgagctctggacgcgatctgaactgcgttcccgaaatcgcggataccctgggtgccgtagcgaaacaaggcttcgatttcctatgcatgcccgtgtttcatccccgttttaaaagagaatttatccaagaacccgccaagaatagacctggcccccagactaggagcgatctgctgttgagtggtagagactggaacacactgatcgtcggtaagctcagtccttggattcggcctgactcaaaagtcgaaaagatccgacggaactcagaagctgctatgctacaggaactgaatttcggtgcctacctgggccttcctgcctttttgcttccactgaaccaagaggataacaccaacctcgctcgagtgctaacaaatcatattcacactggccatcactcctctatgttttggatgcgggttccattggtcgcccccgaggaccttcgagatgacattattgagaatgcccccaccacgcataccgaggagtactctggagaggagaaaacgtggatgtggtggcacaactttcggaccctgtgtgattactcaaaacgaattgccgtggcattagagattggtgccgatttgccaagcaatcacgtgatcgatagatggttgggcgagcctatcaaggcggccatactccccaccagtatatttctgaccaataaaaaagggtttcctgtccttagcaaaatgcaccagcggttgatttttcggctattgaagttagaagttcagtttattatcacaggcacaaatcatcactccgagaaagagttctgttcctatttgcaatatctggagtacctttctcagaataggccaccaccgaacgcgtatgaattgtttgccaagggctacgaagattatttgcagtcaccccttcagcctctgatggataatctggagtcacagacttacgaagttttcgagaaggacccaattaaatattcccagtaccagcaggccatctataagtgtctgctggacagagtccccgaggaagagaaagataccaacgtacaagtgctgatggtgctgggtgctggaagaggccctctggttaatgccagcctgagagcagccaagcaggcagatcgccgcatcaagctttatgctgtggagaagaacccaaacgctgttgtgactctcgaaaactggcagttcgaggaatgggggagccaggtgacggtggtgtcttctgacatgagggagtgggtcgcacccgagaaagcggatattatcgtgagtgagttacttgggagctttgcagacaacgaacttagtcccgaatgcttggacggggcgcagcactttctcaaagacgatggggtgtccattcccggggaatacacctcctttctggcacccatctcttcctccaaattgtacaatgaagtgcgtgcttgcagagaaaaagacagagatcctgaagcacagttcgaaatgccctatgtggtcaggttacacaacttccaccaactcagcgcccctcaaccttgctttactttctcccaccctaacagagacccgatgatcgataacaaccgctattgcacccttgagtttccggtggaggtgaacactgtgctccacggttttgctgggtatttcgaaacggttttgtaccaggatattaccttgagcatcaggccagagactcactcgccaggcatgttctcctggttccctatacttttcccaattaaacagccgattactgtgagggaaggacaaacaatctgcgtgcggttttggagatgctctaattctaagaaagtatggtatgaatgggctgttacggcacccgtgtgttccgccatccacaatccaacagggaggagctatacaataggcctgtag

SEQ ID NO: 23538 - DNA, 1041 bp, synthetic construct
  source 1..1041: mol_type = other DNA; note = Synthetic coding sequence
atggcccccggcagcgtgaccagcgacatcagccccagcagcacctccactgctggtagctctcgctcccccgagagcgagaagcccggaccttcacatggaggcgtccctccaggcggcccaagtcactctagcctaccagtgggtcggaggcacccccctgtcctgcgaatggtgctggaggcattacaggccggcgagcaacgaagagggacatccgtcgctgcgataaagctctatatcctgcataagtatcccaccgtggacgtcctccgatttaaatacctgctcaagcaggcccttgctacagggatgcgacgcggactgctcgcccgtccgctcaactctaaagcccgcggggctaccggctcatttaaattggtacctaagcacaaaaaaaagatccagccacggaagatggcccctgcaactgctccccggcgcgcaggggaagccaaaggtaagggacccaaaaagccttctgaggctaaggaggacccgcccaacgtgggcaaggttaaaaaagccgccaaaaggccagcgaaagtacagaagccaccaccaaagccaggagcggcaactgagaaggctcgcaaacagggcggagccgctaaggatacgcgcgcccagagtggagaagctcgtaaagtccctccaaagccagataaagccatgcgcgccccaagcagcgctggtggcctctcccgaaaagcaaaagctaaggggtccagaagctcccagggagatgccgaagcatacagaaaaaccaaggctgaatcaaaaagctctaaacctacagcctctaaggtgaagaatggcgccgcaagtccaaccaaaaaaaaggtggtggccaaggcaaaggctcccaaggccggtcagggaccaaacacaaaagccgccgctccagcgaaggggtctgggtccaaagttgtgccggcccacctgtcccgtaagactgaggcaccaaaagggccacgtaaagccggattgccaatcaaagcttcatcttcaaaggtgtcctcacagcgcgctgaggcctag

SEQ ID NO: 23539 - DNA, 1869 bp, synthetic construct
  source 1..1869: mol_type = other DNA; note = Synthetic coding sequence
atggccatggcccccagccccagcctggtgcaggtgtacaccagccccgctgcagtggcagtatgggagtggcaagatggcctcggaacctggcacccttattctgccactgtttgctcttttattgaacagcagtttgtgcagcagaaaggtcagcggtttggacttggctccttagctcatagcatacctctgggccaggcagacccctcactcgccccctacatcatagacttgccaagctggacgcagtttcggcaggacaccgggaccatgagggcagttagacgtcatttatttccccagcactccgcccctgggaggggcgtagtgtgggaatggctcagcgatgatgggtcttggacggcctatgaagcgagcgtgtgcgactatctggaacaacaggtggcccgaggtaatcagttggtggatttggccccgctgggctacaattacactgtgaactataccacgcatacacagacaaacaaaacctcgagtttttgccgttcggtacggaggcaggccgggccaccatatccagtcaccacaatcattgccccgccagggcatactggggttgcctgctcttgtcaccaatgcctcagcggtagccgcaccggcccggtaagtggcaggtaccgtcacagtatgacaaatctccccgcctatcccgtgccacagcatccgccgcatcgaactgcgtccgtttttggtacacaccaggccttcgccccatataacaaaccttcgctgtctggcgccaggagcgcccccaggctcaataccacaaacgcttggggcgcagcaccacccagcctaggctcgcaaccactgtaccgctccagtttgtcgcatctgggtccacagcatttgccccctggctcgtcaacgagcggggccgtcagtgcgtccttgcctagtggcccctctagttccccaggctcagtaccagcaactgtgcccatgcagatgcctaaaccgtctagagtgcagcaggcgcttgccggaatgacaagcgtccttatgagcgccatcggactgccagtctgtctgagtagggccccccagccgaccagccctcctgccagtagacttgcctcaaagtcccatggctccgtgaaacgcctgcgaaagatgtccgtaaagggggcaacccccaagcctgagccagaaccggagcaggtaattaaaaattatactgaagaactgaaggtgcctcccgacgaagattgcataatctgtatggaaaagctgtctacggcttcaggctattctgatgttactgactcgaaggccataggcagcctcgccgtgggacatctgacaaaatgctcccatgcgtttcacctgctatgtctcctggccatgtactgtaacggaaacaaggatggaagcctccaatgtcccagttgcaaaaccatttatggcgaaaagactgggactcaaccccagggtaagatggaggttctccggtttcaaatgtcacttcccggccacgaggattgtggaaccatactgatcgtttatagcattccgcatggtatccagggtcctgagcatcctaaccccggtaagcccttcacagctcgcggtttccctaggcagtgctacctgcctgacaacgctcagggtcggaaggtccttgaactgcttaaagtggcctggaagagaaggctcatattcacagtcggcacttccagcactaccggtgagactgataccgtggtctggaatgagatccatcataagacggagatggaccggaatatcactggtcacgggtatcccgatcctaactatctgcaaaacgtcctggcggaactggctgcccagggagtgactgaggactgcctggagcaacagtag

SEQ ID NO: 23540 - DNA, 786 bp, synthetic construct
  source 1..786: mol_type = other DNA; note = Synthetic coding sequence
atggccgccaccgcccgggaggacggcgccagcggccaggagcggggtcagcgagggtgcgagcattacgatcgaggatgcttactgaaagcaccatgttgcgacaagctctatacatgccgcctgtgccacgacaataatgaagaccatcaactggaccgcttcaaagttaaagaagtgcagtgtatcaactgcgagaaaatacagcacgcccagcaaacttgcgaggagtgttctacgctatttggcgagtactactgtgatatctgccacctgttcgacaaggacaaaaaacagtaccactgtgaaaattgcggcatctgcaggattggcccgaaggaggatttcttccactgtcttaaatgcaacctgtgtctggccatgaacttgcaggggagacataagtgcatcgagaacgttagccgccaaaattgtccaatctgccttgaagatatccatacctcacgagtagtggcccacgtgctgccttgtggacacctgctccatcgtacctgctacgaagaaatgctgaaggaaggatatagatgccctctatgcatgcactctgcgctggacatgacacggtactggaggcagttggacgacgaagtagcacagaccccaatgccctctgaataccagaacatgacggtggacatcctgtgcaacgactgcaacggcagaagcacagtgcaatttcacatcttgggaatgaaatgtaaaatttgtgagtcctataacacagctcaggccggcggccgccgaatcagtctggaccaacagtag

SEQ ID NO: 23541 - DNA, 1983 bp, synthetic construct
  source 1..1983: mol_type = other DNA; note = Synthetic coding sequence
ctgagcctgcccagcgtgacctacctgctgctggaggtgatccccgacagcatgaggaagcaggaagtccgcaccggacgtgaggccggacagggccacggcacaggaagtccagcagaacaagttaaagcactgatggatctactcgctggcaaggggagtcaaggaagccaggctcctcaagcattagatcggacacccgacgcgcctctcggaccgtgctctaatgactcaagaattcagaggcatcgtaaagctctcttgagcaaagtggaggcaactcggggcggaggacatcctgctagaacagtggcactcgacagactgttccttcccctgtcacgtgtttccgtgcctcctcgcgtgtctattacaatcggagttgccggaatgggaaaaactaccctggttaggcacttcgtgcggctgtgggcccatggtcaggtggggaaagacttctctctagtccttcccctgactttccgagatctaaatacgcacgagaagctgtgtgccgatcgactcatttgttctgtgtttcctcacgtgggcgagccgtcactggccgtggccgtgcctgccagggctttactcatcctggacggattggacgaatgccggactccactagacttcagtaatactgttgcctgcaccgacccaaagaaagagattcctgtcgatcatctgattactaatataatccggggtaacctgttccccgaggtgagtatctggatcacctcaaggccgtctgcttccggccagatccccggggggctggtagaccggatgaccgaaattagaggctttaacgaagaagagattaaggtctgcttagagcagatgtttcctgaagatcaggctttactcggctggatgctctcacaggtccaggcagacagggccctatatctgatgtgcacggtccccgcattttgcaggctcaccgggatggcactcggtcacctgtggagaagtcggaccggtccacaggacgctgagctctggccccctcgcaccttgtgcgagctgtattcctggtacttcagaatggccctgtccggcgagggacaagaaaaaggcaaagcctcacctcgtattgagcaagtcgcccacggagggagaaagatggtcggaacgctcggacggttggcatttcacggactgctcaagaagaaatacgtgttttatgaacaggatatgaaagcttttggcgttgatctagccctgctgcagggagccccctgttcttgttttctacagcgcgaagagaccctggcctctagtgtagcttattgtttcacacacctgagcttgcaagaatttgtggcagctgcctactattacggtgcatcgcgccgcgccatcttcgatttattcacagagtctggagttagttggccacgcctgggtttccttactcacttccgttctgctgcccagcgggctatgcaggcagaagatggaagattagatgttttcctcaggtttctgtccggcctgctgtcacccagagtgaatgctctgttggccggatccctcctcgcacagggcgagcatcaggcttaccggacccaagtagcagaactcctccaagggtgccttagacctgacgctgccgtgtgcgcgagagccattaacgtgctgcattgtctccatgaactgcagcacaccgagctggcaagatctgttgaggaggcgatggagtcgggggctctagccaggctcaccggccccgcccacagagccgcccttgcgtatctcttacaggtttccgatgcctgtgctcaggaggctaatctgagccttagtcttagtcagggggtgctccagtccttacttccccagctgctgtactgtcgcaagctcagatggatccctggtcagggcgccggggccggggaaggagctgaggaacgcgctgaggcggttcctagcccacccccttcttttagcgtgagccttctagggctcccttag

SEQ ID NO: 23542 - DNA, 1152 bp, synthetic construct
  source 1..1152: mol_type = other DNA; note = Synthetic coding sequence
atgctgagccggaagaagaccaagaacgaggtgagcaagcccgccgaggttcagggcaagtacgtcaagaaggagacgtccccactgctccgcaatctgatgccatcatttatacgccacggtccaacgattcctagacggaccgacatttgcttgcctgactctagcccaaacgccttctccacttccggagatgtggtgtccaggaaccaaagctttttaaggacccctatccaacgtactcctcatgagataatgaggagagagagcaacagactgtccgcacccagctatctggcccgttccctagccgacgtcccccgagagtacggatccagccagtccttcgttacagaggttagcttcgcagtcgagaacggtgattccgggtcccgctattactactcagataatttcttcgatgggcaaagaaaacggccgcttggggaccgagctcatgaggactacagatattacgaatacaatcatgatctgttccagagaatgccccaaaaccagggccgtcacgcgagcgggatcgggagagtggccgcaacaagtctcggtaatctgacaaaccacggctctgaggatctgcctttgccacctggttggtctgtcgactggacgatgagaggccgcaagtattacatcgatcacaacactaacacgacgcactggtcacatcccctagagcgcgagggcttgccgccagggtgggaaagggtggagagctccgaattcggcacttattacgtagaccacacaaataagaaggctcaatacaggcacccatgcgcaccgtcggttcccaggtatgaccaaccaccaccagttacttatcagccgcaacagacagagcggaaccaatcacttctcgtgcctgccaacccataccacaccgctgagattcccgattggttgcaggtttacgcccgagcgcccgttaaatacgaccacatccttaagtgggaactgttccaattggcagaccttgacacatatcagggaatgctgaaactcttgttcatgaaggagttggagcagattgtgaaaatgtatgaggcataccggcaagctctcctcaccgaactggagaaccgaaaacagcgacagcagtggtacgctcaacagcacgggaagaacttctag

SEQ ID NO: 23543 - DNA, 2376 bp, synthetic construct
  source 1..2376: mol_type = other DNA; note = Synthetic coding sequence
atgagcaaccagcaggagaagtacgaggcccagaacatcgtgaactccacagaggaatcagacgacgcttttgatactgtgaccatccctgtgccctcagaagaaccacaggaaagtgaccaaacagaggagcacgagtccggtattgaacagttttccgagtcccacgcgattcacgtggaggagcagtccgatcagagtttttcgagtctggaacctgacaatgaacaacttatggaggaggttatctcacccaggcaggtatcttatactcctcaacatcacgaaaagcagtacgcaatgcaacgccccaatgacgatagcctggccttcctggacaagatcaagtccgttaaggagagcctgcaggagtcagtggaggattcactggcgaccgtgaaagttgtgctgattcccgtgggtcaggagattgtcatccctttcaaagtggataccattttgaaatacctgaaagaccatttcagccacctattgggtatcccccattctgtgctgcagattcggtatagtggtaagattctcaagaacaacgagaccttggtgcagcacggggtcaaacctcaggagatcgtgcaagtggagatattcagcaccaatcccgatctctaccctgttagacgcatagacgggctgacagatgtctcacagattattactgtaacggtccagactggtctagaccagtatcagcaagtgcctgtggagatagtaaaatcagatttccataagccattcctgggtggttttcggcataaagtgacaggggttgagtaccacaacgccggaacacagaccgtgcccaaacgcattcctgagcggctgagtatcttttgtcgcgatacacagactgtgttccagaagaaaaatctgcaacagacgacgaacactacatctacccagatgactaatatcggtgtgtacgtgagcaacatgacagacaagttagtgacgcccgggaaatacttttcagccgctgagtaccacgcccagcggcttaaggctgtgattgtaattcaaacatattaccggcagtggcacgccaagatcttcgtcgaaaatcttcggcggcagaagagtctgagactcgagtgggaaacgcagcaggagttgcgtaaaatcagagagaaagaagagtggataaagcttgattatcaccgccgccacaatccaaagactaacgaagacttcgagttcctctacaacgccttagagttttggagacaggaggagcttacaagaatcaaccaatcattcacaggtgctgaacgcaaggcagccctatgtgagctgctggaaaaggagacccagatcatcgcgagcattgggagacaccgctatatcgcatatatggctaatcaagaagcggcaattcaggccttcctggacaaatgctccgcacccaagatctggcgtacaccgaacggaaaaacaatcgagatggatacgcagttcacaatcagagcacgagagcttcagaatatctacaagtgcatcatgctgaagaacatcagccaggacgaaaggcttgatgtgctgctgaccctgaagcacaccgtgaaggagcacgagtgtaaattgacgcaagagatcttggagttgattgacagagaggtggatctcatgatgcgcggagtgaaacaccacaacctggagggtctacggaagcggattgccaccctgtttttccactacattaagactccacttttcaatcctgaggtcgccaaatacctgaaggtccctcaggatcccttgaaattctacaaaaagatatatttctgccatagttgccagctgtatctgccatcaaccgagttttctgtgagcagcacctcaaggagaatctatcgctgtcgcaattgtatcaacctgcaaaatgaagcccaaaagcgcgagtccttccttaaatataaatgcctgcttcaacagttatactatacggaagccgattatgaggatgacagcaagattgcatttctgatgcagcttcaggatatccagtacttgaccgagaatatttgggcaagccagtcagtcttgtctgcctgtgacaatttgagtgacctagtcatggtgcgctggaataaatcactggagtggagcccgtggaactgtattctcctgaccaaggacgaggccgcagcacatttaaaattgaccagcatcgaggagggctacgaaagaagctttattcacaaaataaagcataaacacattctggcaaaaaactatttttcgcaggtgcctgtgctagcgtcattcattctcgatgatggtgagatcgatgaaattagatggaagtaccactcggacactacccccaaaattatcgagagccagaggccaccacactag

SEQ ID NO: 23544 - DNA, 1767 bp, synthetic construct
  source 1..1767: mol_type = other DNA; note = Synthetic coding sequence
atgagcagctgcgtgagcagccagcccagcagcaaccgggccgccccacaagatgaactgggcggacggggcagctcttctagcgaatcccaaaaaccctgtgaagctcttaggggactcagttccttaagtatacaccttgggatggaatcctttatcgtggtcactgagtgtgagccggggtgcgcagtcgatctcgggctggcacgggatcggcctctggaagctgacggtcaggaagtacctctagacaccagcgggagtcaggccaggccccacttatcgggtaggaaactatcactgcaggagagaagtcagggcggactcgccgcaggcggcagtctggacatgaatggtcgatgtatttgtccatccctcccttattcaccagtttcctcgccacagtcttccccccgcctccctcgacgccctacagtggaatcccatcatgtatctatcaccgggatgcaggattgcgtgcaactgaatcagtacacactcaaagatgagatcggcaagggtagctatggagtggttaagctggcctataacgagaatgataatacttattatgcaatgaaggttctgagcaagaagaagctgatcaggcaggccgggttcccgagacggccaccacctcgaggcaccagacctgctcctgggggatgtattcaaccacgcgggcccatagagcaggtttaccaggagatcgcgattctgaaaaaactcgatcatcctaatgtggtgaaattagtggaggtcctggatgacccgaacgaagaccacttgtacatggtcttcgaactcgtgaatcaagggccagtgatggaagttccaacactaaagccattgtcagaagaccaggcccggttttacttccaggatctgataaaggggattgaatacctccattaccagaagatcattcatcgcgatattaaaccttctaatctgcttgtgggggaggatgggcatattaagatagccgattttggcgtgagtaatgaattcaaaggctcggatgccctgttaagcaatactgttggaacaccggcattcatggctccagaaagcctgtccgagaccagaaagattttctcgggcaaagccttagacgtgtgggccatgggagtgacgctctattgcttcgtgttcggtcagtgcccctttatggacgaaagaatcatgtgcctccactctaagatcaagagccaggcactggaattccctgaccagccagatatagccgaagaccttaaggatctcattacccggatgcttgataaaaatccagaaagccgcatagtggttcccgagattaagttacatccctgggttactagacacggcgccgagccactccctagcgaggatgagaactgtaccctggtagaggtcacggaggaagaggttgagaattcggtcaagcacatcccatctctggccacagtaattctggtaaaaaccatgataagaaagagaagtttcggcaaccctttcgagggatctaggcgcgaggagcgcagtctctcggctccaggcaatctcttaactaagaagcccactagagagtgtgaatcactctccgagctgaaagaggccaggcaacgtaggcagccaccagggcaccggccagcgccaagaggcggcggagggagtgccctcgtgcgcggctccccgtgcgtggagtcgtgttgggccccagcccccggaagccctgcacgaatgcaccccctccgtccggaagaggctatggaacctgagtag

SEQ ID NO: 23545 - DNA, 2052 bp, synthetic construct
  source 1..2052: mol_type = other DNA; note = Synthetic coding sequence
atggccctgagcaagcgggagctggacgagctgaagccctggatcgaaaaaactgtgaaacgtgtcctgggtttcagcgaacccaccgtcgtgactgcagcacttaactgcgtgggcaaaggcatggacaaaaaaaaagcagccgaccacctgaagccctttctcgacgactcaacactaagattcgtggacaaactcttcgaagctgtggaagaaggtaggtctagtaggcattccaaatccagttccgataggtcccgaaaaagagagctgaaggaagtcttcggggatgatagcgaaatctccaaggagtctagcggagttaagaaacgcagaatccctaggtttgaagaagtcgaggaggagccggaagtcatccctgggcccccttcggagtctcctggcatgctaacaaaattgcagattaaacaaatgatggaggctgccactcgtcagatcgaagagcgaaaaaagcagctcagttttatctcgccccccactccccagcctaagactccctccagttcccaacccgagcgactgcccatcggaaatacgatccagccgtctcaggccgcaacatttatgaacgacgcaatcgagaaggcccgcaaagcagccgagcttcaagcacgcatccaggctcagttggccctcaaacccggactcatcggcaacgcgaacatggtcggtttggcaaacctgcacgctatgggaatcgctcctcctaaggtcgaattgaaagatcagacgaagcctacgcccttgatactggacgagcagggcagaactgtggacgctacaggcaaagagattgagctcacgcaccgcatgccgacattaaaagccaacatccgcgctgtcaagagagaacaattcaagcaacagctgaaggaaaagcccagcgaggacatggagtcgaatacctttttcgacccaagagtgagcatcgcaccctctcagaggcagagacgtaccttcaagtttcatgataagggcaaattcgagaaaatagcacagcgcctgcggacaaaggcccagctggaaaagctccaggccgagatatcccaggctgctagaaagacaggcatccacacaagcacccggctggcactcatcgcgcctaaaaaggaattgaaggaaggggacataccagagattgagtggtgggatagctatatcattcctaatggcttcgatctgaccgaagagaaccccaaacgagaagactacttcgggattacaaatttggtagagcaccctgcgcagcttaatccgccggtcgacaatgatacacctgtgaccctgggcgtatacctgaccaagaaggagcagaagaaactccgccgccagaccaggcgagaggcacagaaagagcttcaagagaaagtcagattggggctgatgcctccaccagaacccaaagtgaggatctctaacctcatgagagttctgggaaccgaagccgtgcaagaccccacaaaggtggaagcccacgtgcgcgcacaaatggccaagcgtcaaaaagctcacgaagaagcaaacgcggctcggaagctgaccgcggaacagcggaaagtgaagaaaataaaaaaacttaaggaggatatatcacagggagtccatattagcgtgtatcgtgttcggaacctgtctaacccagccaagaaatttaaaatcgaagcgaatgctggacagttgtacctgacaggcgttgtcgtgctccataaggatgtcaatgtggtcgtagtggaaggtgggcccaaggcccagaaaaagttcaagagactgatgctgcaccgaattaagtgggacgagcaaacttctaatactaagggagacgacgacgaggagagcgacgaagaggctgtaaaaaaaacaaataaatgtgtcctggtctgggaaggcacagctaaagatagatcattcggcgagatgaaatttaaacaatgccctacagagaacatggccagagagcatttcaaaaagcacggcgccgagcattattgggacctggccctgagcgagtcggtgctggagagcacagactag

SEQ ID NO: 23546 - DNA, 1938 bp, synthetic construct
  source 1..1938: mol_type = other DNA; note = Synthetic coding sequence
atgagcgacaagagcgacctgaaggccgagctggagcggaagaagcaacgccttgcccagatccgcgaagagaagaaaagaaaggaagaagaacggaagaagaaggaggccgatatgcagcagaagaaagagccagtacaggatgactcagacctcgaccggaaaagacgggaaacagaagctctgttgcagtccatcggcatctccccagagccaccactcgttcagcccctccacttcttgacatgggacacatgttactttcactacctggtgccaacacccatgagcccaagctcaaagagcgtgtcaaccccctctgaagccgggtcccaggactctggagatcttgggccgctcactaggacacttcagtgggacaccgatccttctgttttacagttacagtccgattcagagctcggaaggcgcctacataagctgggggtctcgaaagtaacacaagtggactttctccctagggaagtcgtcagctactccaaagaaacacaaactcctctggcaacacaccaatccgaggaggatgaggaggatgaagagatggtcgagagcaaggtagggcaagacagcgagcttgagaaccaggacaaaaaacaagaagtcaaggaagcaccccctagggaactgactgaagaggagaagcaacagatcctgcactcagaggaattcctcatctttttcgatcggaccatcagggttatagagcgagcacttgctgaggactcagatattttctttgattattcaggacgagagctggaggaaaaggatggagacgtgcaagccggggctaatttgtccttcaatcggcaattttatgacgaacattggtcgaaacacagagttgtgacatgcatggattggtctttgcaatacccagagcttatggttgcaagctacaataataatgaggatgccccccatgagcctgacggcgtggccctcgtgtggaacatgaagttcaaaaagacaaccccagaatatgtcttccactgtcagtcatctgtgatgagtgtctgctttgctcgatttcacccgaacttggttgtcggcggaacgtacagcggccaaatcgtcctgtgggacaaccgaagccacagaagaacaccagttcagaggacacccttgtctgctgcagcacacacgcatcctgtgtactgtgtcaacgtggttggcacccagaatgcccataacttgatcacagttagcaccgacgggaaaatgtgcagctggagcctcgatatgctgtctaccccgcaggagtcaatggaactcgtgtacaacaagtctaagccagtagccgtgactgggatggcgtttcctacaggagacgtgaacaacttcgtggtgggctccgaagagggaactgtgtataccgcctgtagacacggatccaaagctggcattggcgaggtgttcgaagggcatcagggtcccgtaacgggaatcaactgccatatggccgttgggcctatagacttctcccacctgttcgtgaccagctcttttgattggacagtgaagctgtggacaaccaaacacaacaagccgctgtatagttttgaagacaacgcggactacgtgtacgatgttatgtggagccctgtgcacccagctctgttcgcgtgcgttgacggaatgggccgcctggatctttggaacttgaacaatgacacagaggtgccaactgctagcgttgctattgaaggcgcgtcagcattaaacagggtgaggtgggcccaagctggcaaagaagtagcggtgggcgactctgaggggcgcatttgggtgtatgacgtgggcgagttagccgtgccccacaacgatgagtggaccagatttgctaggactcttgtggagattagagccaatcgcgccgacagcgaagaagagggaaccgttgaactctccgcttag

SEQ ID NO: 23547 - DNA, 7806 bp, synthetic construct
  source 1..7806: mol_type = other DNA; note = Synthetic coding sequence
atgaagcggaaggtggtgaacacccacaagctgcggctgagccccaacgaggaggcttttattctgaaggaggactacgagaggagaagaaagcttcgcctcctacaggtgagggagcaagaacgcgacatcgccctgcagatcagggaggacatcaagcagaggagaaaccagcagtttacacggctcgccgaagaattacgagcagaatgggaggaatctcagactcagaagatacaaaacctggagaagctttacctagctagtttacgatcaatgggcgaggggcatcgccaggcgaaggaaaatgagccagatctggacgctttagcacaaagagctgccgagcggaagaggaaagccgacctgcgacacaaggaggcattaaaagttcagaagaaccagaaagagatcctgctgaaacagaagacctggcatattaaggcacgtaaagaggccctcctggtggaaaaggaacgatccgcaaagattacaagcttgcccccgccccccccaacgctgtttgaaaacatagaggtgaagagaatctcagctgtgaagactaattctagtacgtatcatcacctacacaccttcgtgaacagggagactgacacaaagagacctgacgctagattggccgccgaagaggaggccaagaggcttgaggaactgcagaagcaagcagcccaagagcggatggagaggttcgagaaagcccacgtccggggtttccaggccatgaagaaaattcatctggcccagaaccaggagaaactaatgaaggagctgaagcagttacagcaagaagacctcgccaggagaaggcaaactgtcgcacagatgcccccacagctggtggaactaccctacaaacggtcagagatgaaagaggattggcaacgggagttagagtttgcatttgaggatatgtacaacgccgaccggaaagtgaaaggcaacctaatcctgcacttggagcctgaaccacttccaaccgtcacaaaccagatccaagatgaagagttggatctgagcatggaacaagaaaacctgggggctgccgaagatttgcccgtgacggaagcagagatctgcagttcagaaacagatgtgccactcgtgatgaagacccagcagatcccaagcaaggtgctgttcaaaaaactcctcaacaagattagaagccagaaaagtctctggaccatcaagtcaatgtcggaagatgagtcagagatgataaccacagtgtcggaaatcgagtcgaaagcgcccacagttgagtccggtaccattgcatccaaagaacgcactttgtcttctggacaggagcaggtagtagaatcagacacgttaactatagagagtggtcctctggcctcagaagacaaacctttgagctgcggcacaaattccgggaaagaacaagagatcaacgaaaccctccccatcactactgtggcacagtcctccgtccttctgcatccccaggaagccgccgctagaatcaggatgagcgcccggcagaaacagatcatggaaattgaggagcagaagcagaagcagcttgaattgctggaacaaattgaacagcaaaagctccgcctcgagactgactgtttccgcgcccagctggaggaagaaaagcgcaagaagacacagcccaccggagtagggattgcccctgcatcttgtcccgttatctctgacgaagattcccacaggcagatgatacgaaactaccagcatcagctgctgcagcaaaacaggctgcacagacaatccgtggagactgccaggaaacagctactcgaatatcagacgatgttgaagggtagatgtcctagtgtgtcagctcccagcctgattactgatagcgtgataagtgtaccgtcatggaaatcagagaggccaaccgccatttcagaacactgggaccagggtcaaagacttaagctcagccctaacaaataccagcctattcagcccattcaaacctcaaagctggagcaggaccacttccaagtagccaggcagaaccacttcccccagaggcaggtggagacaactgagaccttacgggcgagcgacatactaacaaatcaggccctcgaaagtcaggagcatcttcgacaatttagccaaactgagacccagcagcgcgactacaagctcgtcccaaaagatagtgaaacgctctctagggctctttctcacgatcgccagcttattagccaggacgccaggaagatctccgagacatttggagccactacgttccagagcctcgagtctcagcagctgttctcagagaactccgaaaatattagttaccacttgactgaacctagctcattcgtcccactggtgcctcagcacagtttttccagtctgccagtaaaggtggaaagcggaaagattcaagaacccttttcagccatgagcaagtcaaccgtgtcaacctcccatagtatcatctcacagatgcatgaccgtccgctgctcccttcagagaacatcactgcccaacagggaaacatgaaggccttacaggagcagcttgatttgcagaagaaggtactccaggcgacacaggaagctcaagagcagctgctactatgcaagcaaaaggaagtagaacagcaaaccggcctttcagtcttcctgcccctagtgaccccagatagttcagctctcctcccttccgccaaggctgatctgggccgtattcaggaaagctcacccaccaaaaacaatatagctgtgtcctctgaccaccatgtgataagccagctgcaagataagcgcctatctctgtcgcagcccatactgtcccagcagaataattttaaatttctgcaggagcagctgaatattcagaaagactcactccaggctaggcgcgaagcccaagaggtgctctatgtgcacaagcagtcggagctggataggagagtttgtagtgagcaggccgaaccatcctttccttttcaagtggctcaacataccttcacctcgctcccatccgctgacactaaatctggcaagattcaggagcagcatagttccaaatccgaaaagggcttggtgagctgccaatctgacatcccaatttcccaggacggatcccttagcttcttgcagcaattccttcccctgcacgattccctcaagttattgcaggaacaattaacaaagcaacgcgacacactccaagctcgccacgaggcgcaggttgagctgttgctgcaccgtcagagggacctcggggactctaaatctgggttggtgagctcctcatcatccccagtggttgtgcagcacagcgtggctagtcaggcctccgcaaaggccgagcccagaaggattcaggaactgtacctgagcgaaaaagagaatgtaggtccttcctgccacctgatcattccaacctttcaagacaagtctctgtccttcccacagcactcgctggcccaacaggaaaacctaacaattcttcaggagcagagccagatccagcgcgtgatcttgggtgctaaagaggggacccaggagtttgtgcatacagagagcgagctcgaaaaacggatctcctctgaacaaaccgggaccagtagctctctctctcaagtggacgagagtgaacggtttcaagagtgcatcagcatcaagtcggactccactattccacttagtcaccccaagattcctagatgtcaggaaaggttgctcagagtttctcagcacatgctccccctgcaggacaatctggaagaacatcaggcatggctcgatacagagaaagaggctttccacttttcccagaagacacaggagaacaccagctccgagcaaacagggagcagcagcttcatcccccaactggtccagctgagctttacctcactcgcaagcgctgaatctggaactatacttgaacctctgtttacagagtctgagtccaaaatattctcaagtcacctgcagatcccccagcttcaagaccgcctcttaaggatcagtcaactgatccagcctcaacaggacaacttgaaggcattgcaggagcagctggccacacagcgcgaggccatcattctcgctagacaggaggcccgagaggaattactgctccatcaatcggaatgggaaggaaggattagcccggagcaggtggacacaagttctttaccactggtgcctcagcacagttttgcttcattgcctttgaacgagtcagaacgcaaccaggaaccatgttcaattaactctgataatatagtctcttctggacactctgagattcccactctgcctgacggtttacttggtctaagtcacctggtcctgccacagcaggataacctgatcgctctcgaggaacacctccatgcccagactgactttctcccttccattgaaaagactcaaaaagagttagtactgtcaaaaccgtgcaaattcgaagagaaggttagctctgaacactttatccagtcccatcacggtgatcttcaggccctgcaacaacagttggacacccaaaagaaggccatccgcagcatacaggaggtgcaagaggagctcctgctacagcgcctttccgagctggagaaaagagtatcttccgaacaggtctgtagctcatcattcgtctctcaggtgccagtagccgattcggaacggacccagaagtcatttcctacgaagagtaatgacacactgcctagtagccatagggagatcccccgcctgcaggatcggctgttgagcttgagtaaaccgattttaccacagcaggacaatatgactgcacagctggatgcccagcgcgaggttatgtattcctacgagaagcctcaggaagagctgagtttgaacaagcagagaaaattaaacaaatcagagtccgctgaacacactatcccttcactgtttctacccaaagaaacagaacatagctttattcccctgccctttgctgaggcaaaaccaaagagtacatgtgaattatacagttcccagaatgagcacgccgcaccgccctcaaacccggtcatccctggctttcaggataggttactaagcttcagccagagcgtcttgacccagcaggataatctgggcctgcagaagcaactggacctgcagcgggaggtgttgcattacagtcagaaggctcaggagaagctgttagtgcagcgtcagactgctctgcagcagcagatccagaagcacgaggagacactaaaagatttcttcaaggattcccagatcagtaaacccactgtggagaatgacttaaagacacagaaaatgggacagctgcgggattggtttccaaatactcaggatcttgctggaaacgaccaggagaatatcagacatgctgaccgaaacaattccgacgacaatcatcttgcctccgaggacactagcgcaaaacaatccggagagcatttagaaaaggacctcgggcggagaagcagcaaaccccctgtcgctaaagttaagtgcggtctggatctaaaccagcatgagttgtcagcgatccaagaggtagagtcacccgctatcgggcgaacttccatcctgggtaaacctgggatttacgaagaccgggaccctctccgtgtgtccatctccagagagcagtcctttttcggctcaccgctggctcatgatccattctcctgcctccagctggtcggccaggaaaacgtgtgtggtgatgattacgatgaggctgtaaagctcaaagaatcagtggtcgaaaatcatgccgttttgagttatgccgttgaggaagaacacgcctatcttggccccaccgtgaagcctgacgataaagccaaaacactgtcctacgagcccttgagctcagcaacagtgagcaccgggagtttgctatcatatgagaatactgatctctcattaaccgacccggagtccttcagcgagcatatggacgacagcaaacaggagtccaccacatctaaggaggaggagacaaacattatatcatcaatcgttccctccacccaggacatttatcagcggcagaatagcagtgatgttcacaagagtcttctgccagcggtggatgaaaccacatgcggtcacacacacttccagcaaatgatcgataaatatatcaacgaagccaatctgatccccgagaagacggatctgcaggagctcgaacacatttttccgaatctccaccaccagctctttaagccattagagccacatccagactttgatctgtccagctcttcgagtggcatctctcccgacaatagggacttctaccagaggtccgacagcagttctgaatcacattgtgccacggggttgtccaagtctacagtctacttcaccgctctgcgcagaacatccatgcattcttcactaaacacgtcaccaaatcaacagccagacaccaacctggcgcacgtaggcgcacactcttttgcaacggagaacattatcggtggtagtgaacagtgcttcgaacagcttcagccagagtattctagtcaggaagagtcacagcacgccgacctcccatctatcttcagcatagaggctagggacagttcccaaggaatgaagaatcagaattatccctcagaagaacacacagagatcctgcagaacaagaagaaaattgtccacttccagctaagcattgggaacctatcctctgtgtatagttcgagtgacgaagccaacgtgttcgatcaattaaacgtgcaacattcaacgccctgtggctctaattcttccgagtgctccactaaacaccaactggaatctaggaaggaatccatggggtttgaggagttaagtaagaggggcgtagtaactatgttgcaatcacagggtctgatcgaggacaataagaatgagacatgccgcgtactggacattaacccacaagtggaagaaacagactcccgtctgtgcgtccgcaccgttgagatgggcacttccatacaagcgccctactctctgacgacacagaatgaaaaatacttcgaaaattctgcagagacggatatacctaagatcacaaaaaagctatctcaactcggggaatctgaactctttgcctcgagcgggtctttcagcttgcagagcagcatccctgtgtgggaaactgaaaccggccatgggatcatggaggagccagagctgacactcatcagcactaccgacacatctatcgcagaaatggactttgccaatctgacactggaggagaaaagcgaaaacgaggctaaatgcttctttcaggtgagcgagttcctacccctcgtgtccgcaaccgaagctagcgactatcctgcagtaagcgagctgtccatcgaaaagcctaggacggcttccacagaaaccccacggcgcctcacaccagtcccagggagtctccaggaagcatttattaagcgcaaaaagtccttcatggaacggagtcaccaacggcagaaagaaattagaaataagatccatgtctcagagaacagccagatcaagaccgtgaaagagaaacccagtatatcttcttccgtgtcccgactgaaaggggtgaataaggtccgtgcctcctttcctgaggacagaaaaacgactcaggcattgcgacatcagcgcggactccggctgtacaatcagctcgccgaggttaaacagcaaaaggaggagaagaccaaacaagaggcctacgcgcagaatcgcgcccgggctaaggaattccataaaaagactctggaaaaactgcgggctaaaaatacttgttag

SEQ ID NO: 23548 - DNA, 2397 bp, synthetic construct
  source 1..2397: mol_type = other DNA; note = Synthetic coding sequence
atggccgccagcctgcccggccccggcagccggctgttccggacctatggcgccgccgacggacgcagacagcggagaccgggacgggaggcagcacagtggttcccgccgcaggatagacgacggttttttaattcaagcggcagttctgacgcatctatcggcgatccttcacaatctgatgaccctgacgatccagatgaccctgactttccaggttcccctgtgcggagaagacgcagacggcctgggggacgcgtgcctaaggacaggccaagccttacagtcacgccgaaaagatggaagttacgagctagaccttctctgaccgtgaccccaagacggctggggctgcgggctaggccgcctcagaaatgctccacaccttgtggccctctccgccttccgccttttcctagtcgggattctggacggttgagccctgatctgagtgtgtgcggacagccccgggatggtgatgaactgggaatctccgcctccttgtttagttccctggccagtccatgtcccggctcccctactcccagagactcggtgatttccattgggacaagcgcatgcctggtggccgcctctgccgtgcctagtggactgcacctgcccgaggtctcgctcgaccgggcctccttgccgtgcagccaagaagaggcaactgggggagcaaaggacactagaatggtgcatcagacaagggcgagcctcagatccgtcctgtttgggctcatgaatagcggaacgccagaggattccgagttccgcgccgatgggaaaaatatgagggagagctgctgtaagcggaagcttgtggtgggaaatggaccagaggggccaggcctcagcagcactggcaagagacgcgccacgggccaggactcgtgccaggaacgcgggcttcaggaggcagttcggcgagagcatcaagaggcttctgtgcccaaagggcgcatagtgcctcgagggatcgaccggcttgagcggacacgttccagtcggaagagcaagcatcaagaggccacagagacctcgctgttacactcacaccgcttcaagaaggggcagaagttggggaaggactccttccccacccaggacctgacaccgctgcaaaacgtgtgcttttggacaaagacgcgcgcctcattttcctttcataagaagaaaatagtgaccgacgtgagtgaagtctgctccatctacactactgctacatctctatcagggtcactgctttctgaatgctcaaaccggcccgtaatgaaccgtacttcaggggcccctagctcttggcactcgtcctccatgtatttactctcgcccttaaatacgttgagtatcagtaataagaaagcttcagacgcggagaaagtttacggagagtgttcacagaagggacctgttccctttagccactgtctgcccaccgagaagctgcagcgttgtgagaaaatcggcgaaggggtgttcggcgaagtcttccagaccatcgctgaccacacacctgtagccatcaaaatcatcgcaattgagggacctgatctcgtgaacgggagccatcagaaaacgttcgaagagattcttcctgagatcatcatctcaaaagagctgagtcttctgtctggcgaggtatgcaatcgaaccgaaggcttcataggcctcaactcagtccattgcgtgcagggcagttaccctccactgctgctgaaggcctgggaccattacaattctacaaagggaagcgccaacgaccggcccgacttttttaaagatgatcagttgtttattgtgttagaattcgaattcggaggtatcgacctggagcagatgcgaacgaaactcagtagcctggcaactgccaaaagcatcctccatcagcttacagcttcgttggccgtggcagaagcatctctgagattcgagcaccgggatctgcattgggggaacgtcctactcaagaaaacctcacttaagaaactccactacacactgaatggcaagtcaagcactataccatcctgcggactccaggtgagtatcatcgactacacactttctcgtctcgagagggacgggattgtcgtgttctgcgacgtcagtatggacgaagacctttttaccggggatggggactatcaatttgacatttacaggctaatgaaaaaggagaataacaatcggtggggcgaatatcacccatactctaacgtcctgtggctgcactacctgacggataagatgctgaagcagatgacgttcaagaccaagtgtaatacacccgccatgaaacaaatcaaaaggaaaattcaggagtttcaccggaccatgttaaacttctcctcagccaccgatctactgtgccaacactcactctttaagtag

SEQ ID NO: 23549 - DNA, 765 bp, synthetic construct
  source 1..765: mol_type = other DNA; note = Synthetic coding sequence
atggtgcgggaggccaacatcaagcaggccaccgccgagaagcagctaaaagaagcccagggaaaaattgacgtgctgcaggcggaggttgcagcacttaaaaccttggtattgtcttcttcccctacttcccctacacaggagccattaccaggggggaagacaccattcaagaaaggccacaccaggaataagtccacttctagcgccatgtctggatcacaccaagacctctccgtgatccaaccaattgttaaggactgtaaggaggcagacctttctttgtataatgaattcagactgtggaaggacgaacctacaatggacagaacttgcccattccttgacaagatttaccaggaggatattttcccctgtctgactttttcaaagagcgaactagcctccgctgtcctggaggcagtggagaacaatactctgagtatcgaacccgtgggactgcagccaatcagatttgtgaaggcatccgctgtcgaatgtggcggacctaaaaaatgtgctttaactggacagtctaagtcttgcaagcatcgtatcaaactgggtgactcctcaaactattactacattagtcctttttgtcgatacaggattacttctgtctgcaatttcttcacctacataaggtacattcagcaaggcttggtaaagcagcaggatgttgatcagatgttctgggaagtgatgcaattgagaaaagaaatgtcgttagcaaagctcgggtactttaaggaagaactttag

SEQ ID NO: 23550 - DNA, 1077 bp, synthetic construct
  source 1..1077: mol_type = other DNA; note = Synthetic coding sequence
atgtacgccagccagtggttcctgaccctgttcaccgccaagttcccactctgtatggtgtttcacattatcgatctgctgctgtgcgagggccttaacatcatcttccatgtcgccctcgctctgctgaaaacatccaaggaggacctgttgcaggctgattttgaaggggcacttaagtttttccgggttcaactgcccaagcgctatcgggctgaggaaaatgcccgccggcttatggagcaggcttgcaatattaaggtgcctacgaaaaagctgaaaaagtacgaaaaggaataccagaccatgcgcgaatctcaacttcagcaagaggatcctatggacaggtacaagagagaaaatagaagattacaggaggcaagcatgcgcctggagcaagaaaacgatgacttggcccatgaactggtcactagtaagatcgccctgcgaaacgacttggaccaagccgaggacaaagctgacgtgctgaataaagagctgctgcttaccaagcagcgcctcgtcgagaccgaagaagagaagcgaaaacaagaagaggagaccgcccagctcaaggaagtgttccggaaacaacttgagaaagccgaatacgaaatcaaaaaaaccactgcgattatcgctgaatataaacagatatgtagtcagttgagcaccaggttagaaaagcagcaagctgcctcaaaagaggaattggaagtcgtcaaaggcaagatgatggcctgtaaacactgctcagacatattttccaaagaaggcgccctaaaactggccgccacagggcgtgaggaccaaggaatcgagacggatgacgagaaagattctctcaagaaacaactgcgggagatggaactcgaattggcccagacaaagcttcaactcgtggaggcaaaatgcaaaattcaggagcttgaacatcagcggggcgcactcatgaatgagatccaggctgctaaaaatagttggttctctaagactctaaacagcatcaaaacagctacaggcacacagcctctgcagccagcccctgttacacagccaccaaaggaatcaacttag

SEQ ID NO: 23551 - DNA, 2436 bp, synthetic construct
  source 1..2436: mol_type = other DNA; note = Synthetic coding sequence
atgcccctgagcagccccaacgccgccgccaccgccagcgacatggacaaaaattccgggtcgaatagttcaagtgcaagttccggaagctctaagggtcagcagcctccacgaagcgctagtgctgggcccgccggtgagtctaaacccaaatctgacggcaaaaatagttctgggagcaaacgttacaaccgcaaaagggaactcagttacccgaaaaatgaaagctttaacaaccaatctcggcgctcctcctcacaaaaatcgaagacttttaacaaaatgcccccacaaagaggcggggggagctcgaagcttttctcctcaagcttcaacggaggccgtcgtgacgaggtggccgaggcacagagagcagaatttagccctgctcagttcagcggaccgaaaaaaattaacctgaatcacctgctcaattttacttttgaacctcgaggccaaactggacactttgaaggctctggccatggaagctggggtaagagaaacaaatggggacataaacctttcaacaaggagctctttctgcaagcaaattgccagttcgtggtttcagaagatcaagactataccgctcatttcgcagaccctgacactctggtgaactgggactttgtcgagcaggtgaggatatgttcacacgaagttcccagttgtccgatatgcttgtaccccccgacggcagccaagatcacaagatgcgggcatattttttgctgggcgtgtatacttcattacctctcccttagtgagaaaacgtggagtaagtgtccaatttgttacagctccgtccacaagaaagatctaaaaagcgtcgttgccaccgagtctcatcagtacgtagttggtgacacaataaccatgcagctcatgaagcgggagaaaggcgtgctggtggctctgcctaagtccaaatggatgaacgtagaccaccccatccacctgggggacgagcagcatagtcagtacagcaagcttctgctggcgagtaaggaacaggtcctgcacagagtggtcctggaggagaaggtagcgctagagcagcagctggccgaggaaaaacatacacccgaatcgtgcttcatcgaagctgccatacaggagctgaaaaccagagaggaggccctgtcaggactcgccggctcaaggcgagaagttacaggggtggtggctgctctggagcagctggttcttatggcccctctcgccaaagagtcagtttttcagccgagaaaaggtgtgctggagtacctgagtgcctttgatgaagagaccaccgaggtgtgtagtctcgatacaccatcccggcctctcgccctgcccctggtggaggaggaggaggctgtatcggaacccgagccggagggccttcccgaggcatgcgacgatcttgaactagccgatgataatctgaaggaggggactatctgcacagagtcctcacagcaggaacccattaccaagtcaggctttactcgcttaagttcctcaccatgttattacttctatcaagctgaagatggtcagcacatgttcctgcatcccgtgaatgtccgctgtctggttagggagtacggtagtctggagagatcccccgagaaaataagcgctactgtcgttgagatcgccggctattccatgtctgaagacgttagacaacgccaccgatatcttagtcacttgcccctcacatgcgagttttccatctgtgagcttgccctccagccaccggtcgtgtccaaagagacattagaaatgttcagtgatgatattgagaagaggaagcgccagaggcagaaaaaggcaagggaagaacgtaggcgagagcggaggatagaaattgaagaaaacaaaaaacagggcaagtaccccgaagtgcacattcccttggaaaacctacaacagtttccagctttcaacagctacacatgcagctctgactcagcactgggccctaccagcaccgagggacatggagccttgtcaatctctccgctttctaggagcccaggcagccacgctgacttcctgctgacccctttgagccccaccgcttcgcagggcagtccttctttctgcgtaggatctctggaagaagactctccatttcctagctttgctcagatgctgagggtcgggaaagcaaaagctgatgtatggccaaaaaccgcgcccaagaaggacgaaaactcgctggttcctccagcacccgtggactcagacggcgaatcagacaacagcgacagggtccctgtcccgagtttccaaaatagcttttcccaggcaatcgaggcagcctttatgaaattggacactcctgcaaccagtgacccgttgagtgaggagaaagggggcaagaagaggaaaaagcagaaacaaaaactgttgttttccacctccgtcgtgcatactaaatag

SEQ ID NO: 23552 - DNA, 5826 bp, synthetic construct
  source 1..5826: mol_type = other DNA; note = Synthetic coding sequence
atgaagaccagcgacctggtgcccagcttcggctacttcatccggtccccagagaaacgcgaacctattgcacttattaggaaatctgacgtgagcagaggtaacctggagaaggagatggctcatctcaatcacgatctgtactctggtgacctcaatgagcaaagtcaagcacaactcagcgagggctctatcacacttcaggtggaggcggtggaatcaacaagccaggtggacgagaatgacgttaccctcaccgcagacaagggcaagaccgaggacaccttcttcatgagcaataagccccagcgctataaggacaagttacccgactctggggatagcatgttacggatctctacaattgcctccgccattgctgaggcaagcgtgaacaccgatccttcacagctcgcagccatgatcaaggcgctatccaataagaccagagacaaaacttttcaagaagatgagaagcaaaaggattactcccacgtgcgacatttcctccccaacgatcttgaaaagtccaatggcagtaatgccctggatatggaaaagtacctgaagaaaactgaggtctccaggtatgagtctgccttggagaacttttcacgagccagtatgagcgacacctgggatctgtccctccctaaggagcagacaacccaggatatccatccagtcgatctatctgccacttccgtctccgtgcgggctcccgaagaaaacaccgccgcgatagtttatgtcgaaaacggggaaagtgagaatcaggagagttttcggacgatcaatagcagcaacagtgttaccaaccgtgaaaacaactccgccgttgtcgacgtgaaaacttgtagtattgataacaaactgcaggatgtcggcaatgatgagaaggccaccagcatctctacaccctccgactcctattcatcagtgaggaatccccgtattacatccctttgtctccttaaagattgtgaggagattcgcgataatcgagagaatcaacgacaaaatgagtgtgtgtcagaaatctccaattcagagaaacacgtaacctttgagaaccaccggatagtgtcccctaaaaattctgatctaaaaaacacctctcccgagcatggcggcaggggctccgaggatgagcaggagagttttaggccctcaacctcccccctttcccacagtagcccatccgaaattagcggtaccagcagcagcgggtgtgcactcgaatcctttggatccgcggcccagcagcagcagcctccgtgcgaacaagagctgtcccccttggtgtgttccccagcaggcgtctctcgcctcacgtacgtgtccgaacctgagtccagttaccccaccacagctaccgacgacgcacttgaagatcgcaaaagcgatataacctccgaattgagcacaaccattatccaggggagcccagctgctctagaggagagagctatggagaaactgagggaaaaggttcccttccagaatcggggaaaaggaacattgtctagtattatccagaataattcggatacccggaaagcaactgaaaccacctccctgtcatccaagcccgagtacgtcaaaccagattttaggtggtccaaagacccgagcagcaagagcggcaacctcctagagaccagcgaggtgggttggacctccaatcccgaagagctggatccaataaggctggccctgttaggtaagagcggcctgtcatgtcaggtcgggagcgctacatcccatccagtatcatgccaggaacccattgacgaagaccaaagaatctcacccaaggataagagcacagctggaagggaattctccggtcaggtttcccaccagacaacttctgaaaatcagtgcacccctatacctagctcaaccgtgcattctagtgtcgccgacatgcagaacatgcctgccgcggtccatgccctgctgactcagccaagcctgtccgccgccccattcgcccaacggtacctcggaaccctgccttccacgggttccactaccctccctcagtgtcacgcgggcaacgctactgtctgcggattttctggcggcctgccttatcccgccgtcgctggggagccagtgcagaacagcgtggccgtggggatatgcctcggtagcaacattggctccggttggatggggacttcctccctgtgcaatccgtactcaaacactctgaaccagaacctgctgtcgacgactaaaccatttcccgtgcccagcgtgggaacaaactgtggcatcgaaccctgggatagcggcgttaccagtggactaggctctgttcgcgtgccagaggaactgaaattgccgcacgcttgctgtgttggcatagcttctcagacccttctgtccgtgctgaatccaacggaccgctggctgcaggtgtctattggtgttttatctatcagtgtgaatggggagaaagtagacttgtcgacatatcgttgtctagtgttcaagaataaggccattattagaccccatgcaactgaggagatcaaagtgctgttcattccttcttctccgggcgtttttcggtgcactttttctgtcgcaagttggccctgttccaccgatgctgaaactattgtccaagctgaagcactggcctctaccgtaaccttgactgccatcgctgaatcgcccgttattgaagtcgagactgagaagaaggatgtcctcgacttcggggacctgacatacggaggatggaaggctctcccactgaagctgattaaccgcacacacgccaccgtgccaatccggcttattattaacgccaatgcagtcgcatggagatgtttcactttctccaaagaatccgtgcgggcccctgtggaagttgctccttgcgccgatgtcgtaactaggttggccggaccctccgtcgtcaatcacatgatgcccgcttcttatgacggtcaggaccctgagtttctgatgatctgggtcctgtttcacagcccaaagaaacaaatatcctcttcagatattctggacagcgcagaggagtttagtgccaaggtcgacattgaagtcgacagccccaacccaacaccagtgctgcgaagcgtcagtctccgcgcccgtgccggaattgccaggattcatgctccaagggatctgcaaaccatgcattttctggccaaggtggcttcctcacgcaagcagcacctccctcttaagaatgctggaaacattgaggtgtacttagatattaaggttcccgagcagggctctcatttctccgtggacccgaagaacttacttctgaagccgggagaggagcatgaagtgattgtgtccttcacgccgaaggaccctgaagcctgcgaggagcgaatcctgaagatctttgtgcaaccttttggaccacagtatgaagtcgtgctaaaaggcgaggttatcagttcaggtagcaaaccattatctccgggaccttgccttgacataccaagtatcctgtctaataagcagttcctggcatggggcggcgttccactcggccgtacccagcttcagaagcttgccctgcgaaataactcagcctccactacacagcacttgaggctgttgataagagggcaggaccaggactgctttcaactccagaatacattcggaagcgagcaacgattaactagcaattgtgaaatccggatccatcccaaggaggatattttcatctcagtgctgtttgcacccactagactcagctgcatgcttgcccgcctggaaattaaacaactgggcaaccgcagccagccgggtatcaagttcactatcccgctgtccggctacggaggcacttccaatttaatccttgaaggcgtgaaaaaattgagtgatagttacatggtaacagtgaatggtctggttcccgggaaagagtccaaaattgtgttcagtgtgcgcaacacgggctcaagagccgccttcgtcaaggcagtcggctttaaggattcacagaaaaaggttttgcttgatccgaaggtgctaagaatattcccagataaattcgttctcaaggaaaggacccaagagaatgtgacactgatctacaacccatctgataggggaattaacaacaaaacagccacagagctgagcacagtatatctcttcggaggtgatgagatatctcgtcagcagtaccgtcgggcattgcttcacaaacccgagatgatcaagcaaattttgcccgaacatagtgtgttgcagaacatcaactttgtggaggccttccaagacgagctgctagtgacggaagtctacgatcttccccagagaccaaatgacgtgcagcttttctacggttctatgtgtaagattatcctaagcgtgattggcgaatttcgtgattgcatatcgtctcgggagttccttcaacccagtagcaaagcatcgctggagtctacctcagacctcggcgcctctggcaagcacggcggaaacgtgtccctggatgtcctcccagtgaagggcccccagggcagtcccctgttgagccgagccgcccggcctcccctggatcagttggccagtgaggagccctggacggttctgccggaacatttgatcttagtcgcaccaagtccctgcgacatggcaaagactgggcgattccagatagtgaataatagcgttcgacttctgagattcgaattgtgctggccggcacattgtctgaccgtcacccctcagcatggctgtgtcgcccccgagtccaagctgcagattttggtgtcgccaaactcttctctgtccacaaaacaatccatgtttccctggtcagggctgatatatatccattgcgacgacggccagaagaaaattgtgaaggtgcagatcagagaggacctgacacaggtagaactgctgacaagactgaccagcaagccattcgggattttaagtccagttagtgagccttccgtcagtcacctggtaaaacccatgacgaaaccaccctcgaccaaagtggagattagaaataaatcaatcacttttccgaccactgaaccaggagaaacctccgaaagttgcctggagttggagaaccatggcactaccgatgtaaaatggcatttatcctcccttgctcctccctatgttaagggggtggacgagagtggcgatgtgtttcgggccacttatgccgcctttcgatgtagtccaattagtggcttattagagtcccacggcattcagaaggtgtcaattaccttcttgccacgagggagaggcgactatgcccaattttgggacgttgaatgccatcctttaaaggagcctcatatgaagcacactctgaggttccaactgagcggacaaagcatcgaggccgaaaacgagccagaaaatgcttgcctgtccaccgactcgctgatcaagatcgatcacttggtgaagcccaggcggcaggcagtatccgaggcgtctgcccgaataccagagcaactcgatgtaaccgcgcggggggtttacgccccagaggatgtctacaggttccgacccactagcgttggagagagccgtactttgaaggtgaaccttcgaaataattcctttattactcattctctgaaattcctgtcgcctcgggaaccattctacgtaaagcattccaaatactctctgagggctcagcattacataaacatgccagtccagtttaagccaaaaagcgccggtaagttcgaggccctgctagtaattcagacggacgaggggaaatctatcgccatccgtttaatcggcgaggccctcggcaagaactag

SEQ ID NO: 23553 - DNA, 4167 bp, synthetic construct
  source 1..4167: mol_type = other DNA; note = Synthetic coding sequence
atggcccccggctgcaagaccgagctgcggagcgtgaccaacggccagtcgaatcaacccagtaatgagggggacgccatcaaagttttcgtgagaattcgacccccagcagaacgtagcggatccgctgatggcgagcagaacctgtgcctgtccgttttatcctccacgagcctacggttgcacagcaaccccgagcctaaaaccttcacgttcgatcatgttgctgacgtagataccacacaggaatctgtatttgcaacagtggccaagtcaatcgtggagtcctgtatgagcggatacaatggcaccatttttgcttacggtcagaccggttccggtaagacctttacgatgatgggccccagcgagtcggataatttttcccataatttgaggggtgtgataccgcggagctttgagtacctcttttctctgattgatcgagagaaggagaaagctggggcaggtaagagtttcttgtgtaaatgctctttcattgagatttacaatgaacagatctatgacttactggattccgcatcagcgggtttatatctgcgtgagcacatcaaaaagggcgtctttgtggtgggcgctgtggagcaggtggtaacaagtgcagccgaggcctatcaggttctatctgggggatggcgcaacagaagagtcgcgtccacaagtatgaacagggaatcttcccggagtcacgcggtgttcaccattaccattgagtctatggaaaaatccaacgagattgtgaatattcgaaccagcctgctgaacttggttgatcttgcggggtcagagcgccagaaagatacgcatgcagaaggcatgcgcctgaaggaagccggtaacattaacaggagcctttcttgtctcggtcaggtgataacagcgcttgttgatgtcggtaacggaaagcagcggcacgtttgttatcgggatagcaagctgacctttctgctgcgggattcactgggggggaacgcaaagacagcaatcatcgccaatgtgcatcctgggtcgagatgcttcggagagaccctgtccacattgaattttgctcagagagcaaagctgattaagaataaagccgtggttaatgaagacacacaaggaaatgtgtcacagctccaagccgaagtgaaacgccttaaagagcagcttgccgaacttgcttccggacagacaccacccgagtcctttctgacgagagacaagaagaaaactaactatatggagtacttccaagaggcgatgctgtttttcaagaagtcagaacaagaaaagaagtctcttatcgagaaggtgactcagttggaggacctgactctaaaaaaggaaaagttcattcaaagcaacaagatgatcgtgaaattccgggaagaccagatcattagactcgaaaagctgcacaaggagagtcgagggggatttctgccagaagagcaggacagactgctgtctgaattaaggaacgaaattcagactctgagggagcagatcgaacatcacccacgcgttgccaaatacgccatggaaaaccactccttaagagaggagaacagaaggcttcgcctactcgaacctgttaagcgcgcccaagagatggacgcgcagacaattgctaaactggagaaggctttcagtgaaattagcggcatggagaaaagtgacaaaaaccagcagggtttctcccccaaagcccaaaaagagccctgcttgtttgctaacacagagaagctgaaagctcagttgctgcaaattcaaacggaactcaacaactcgaagcaggagtatgaggaatttaaggagctgacccgcaaacgccagctggagctggagagtgagctgcagtcccttcagaaggcaaacctcaatctagagaacctgctggaggctacgaaggcttgtaagcgccaggaggtgtctcagttaaacaaaattcacgccgaaaccttgaaaatcatcactacccctaccaaagcctaccagctgcattctcgcccggtgcccaaactgagccccgagatggggtccttcggatccctctacactcagaatagttctattctggataacgacattcttaacgagcccgtgcctcccgagatgaacgagcaggcctttgaggctatttcagaagagttgagaaccgttcaggagcaaatgtcagcgctgcaagctaaactggacgaagaggaacacaaaaacctgaaactgcagcagcacgttgataagctagagcatcacagcacacaaatgcaggaacttttcagttctgaacgaatcgattggacgaagcagcaagaagaacttctctcccaactgaacgtattggagaagcagctccaagaaacacagacgaagaacgattttttaaagagcgaagtacatgacctgcgagtggtgctgcattccgccgataaggaactatcttctgtgaagttagaatactcgagcttcaaaacgaaccaggagaaggagtttaataaactgtccgaacggcacatgcacgtgcaactacagctggacaatctgcgacttgagaacgagaaactcttggaatccaaagcatgtctgcaggattcctacgacaacttgcaggagataatgaaattcgagatcgatcaattatcaagaaatctccagaactttaagaaagaaaacgaaaccttgaagtctgatttaaataatctgatggaactgctggaggccgagaaagagagaaacaacaaactgtcactgcagtttgaagaagacaaagagaatagcagcaaggaaatccttaaagtcctcgaagctgtaaggcaggagaagcagaaggaaactgccaagtgtgagcagcagatggccaaagtccaaaaactggaagaatctctgcttgcaactgagaaagtgatctcttcgttagaaaagagtagggattccgacaaaaaggtggtagcggatttgatgaaccagatccaagagcttaggaccagtgtgtgcgagaagaccgaaactatcgatacactgaagcaagagctcaaggatatcaattgcaaatacaacagcgccctggtagacagagaggagagccgagtactcatcaagaagcaagaagtagatatcctcgacctaaaggagacattacggctgcgcatactgagtgaagacattgagagggatatgctctgtgaagatctggcgcatgctaccgagcaattgaatatgctgactgaggcatctaaaaagcattctggtctcctacagtccgcccaagaagaactcactaagaaggaggcactgatccaagagcttcagcacaagctcaatcagaaaaaagaagaagtggagcagaagaagaatgaatacaactttaaaatgcggcagctggagcatgtgatggactctgcagccgaagacccacagagtcctaaaacgcccccgcatttccagacccacctcgcaaagctcctcgagactcaggagcaggagattgaagacggccgagcttcgaaaacaagtctggagcacttagtcaccaagctgaacgaagaccgtgaggtgaagaatgccgagatcttacggatgaaggaacagctgagggagatggagaacttaagacttgagagccagcagttgattgagaagaactggctgttgcaagggcaactggacgacattaagaggcagaaagaaaatagcgatcagaaccacccagataatcaacagctcaagaacgagcaagaggagtccatcaaagagagactggcaaaatctaagattgttgaggaaatgctcaaaatgaaggctgacttagaagaggtacaaagcgctctatacaacaaagagatggagtgcctccggatgactgatgaagtagaaagaacacagactctggaatcaaaagcttttcaagaaaaggagcagctgcgcagcaaacttgaagaaatgtacgaagaacgggaacgaacctcccaggaaatggagatgttgaggaaacaggtggagtgtttggctgaagagaacggcaaactcgtgggacaccagaacctccaccagaagattcagtatgtggtgaggctcaagaaggagaatgtacgcttggcagaggaaacagaaaaattgagagctgagaatgtgttcctcaaggagaaaaagcggagcgagagctag

SEQ ID NO: 23554 - DNA, 4767 bp, synthetic construct
  source 1..4767: mol_type = other DNA; note = Synthetic coding sequence
atgctgccccccaagcacctgagcgccaccaagcccaagaagagctgggcgccaaacctgtacgaacttgactccgatctcaccaaggaaccagacgtgatcatcggcgagggtcctacagactcagagtttttccaccagcgattccgtaacctcatttacgtcgagttcgttggtcccaggaagaccttaatcaagctaagaaacctgtgcctagactggctgcagcccgaaacaaggacaaaggaggaaatcatagagctgctggtgctcgaacagtaccttaccatcatccccgagaaactgaagccttgggtgcgcgccaaaaagccggaaaactgcgagaagctggtgactctcctggaaaattacaaagaaatgtatcaacccgaagacgataacaattcggacgtgaccagcgatgatgacatgaccagaaatcgccgcgagtcttccccccctcattccgttcactcattctctgatagagactgggaccgcagaggtcgttctagggacatggaaccacgcgatcgctggagccacactaggaatccacggagccggatgcctccacgggatctgtctttacctgtggttgccaagacctccttcgagatggatcgcgaagacgacagagattctagggcatatgagtccagatcccaggatgctgagagttatcagaacgtggttgatctggccgaggacagaaaacctcataatactatccaggacaatatggagaattacagaaagttgctcagtctggtccagctggccgaggacgatggccatagtcatatgacccagggccattctagcagatcgaagcgtagcgcgtacccaagcacgtctcgtggactgaagaccatgcccgaggccaaaaagtcaactcatcgtagaggaatctgtgaggatgagtcatcccacggggtaatcatggagaagtttatcaaagacgtctcccgatccagcaagtccggacgcgcgagagaaagctctgaccgttctcagcgattcccgagaatgtctgacgacaattggaaggatatttccctcaataagagggaatccgtgatacagcaacgtgtttatgaaggtaacgcttttaggggcgggtttcggttcaactctacgttagtaagccggaagcgggtcttagaacgcaaacgcaggtatcattttgatactgacggaaaggggagcattcacgatcagaaagggtgtcctaggaaaaagccattcgagtgcgggagcgaaatgcgcaaggccatgtcagtatcctctttgtcaagtctgagctccccaagctttacagaaagtcagcccattgatttcggagcgatgccttacgtgtgtgacgagtgcggcagatctttctctgtcatatcagagtttgttgagcatcagattatgcacacccgagagaacttgtacgagtacggtgaaagctttattcatagcgtggcagtgtccgaagtgcagaagtcccaggtgggcgggaagcgatttgagtgcaaggactgtggagagacttttaataaaagtgccgccctggccgagcatagaaagatccacgcacgtggatatcttgtagagtgtaagaaccaggagtgcgaggaggccttcatgccttcacctacattcagcgagctccagaagatctatggtaaggataaattttatgagtgtagggtctgcaaggagacgtttttgcactcctcagccctgattgaacaccagaagatacacttcggtgatgacaaggacaatgaaagggagcatgaacgggaacgagagcgggagaggggcgagactttcaggccaagtccagcactgaacgagttccagaagatgtatgggaaagagaagatgtatgagtgtaaggtgtgtggggagaccttcctgcatagcagcagcttaaaggagcatcagaaaatacatacacgagggaacccattcgaaaataaagggaaggtctgtgaggagacattcatacctggtcagagcctgaagagaaggcagaagacgtacaacaaggagaagctgtgtgactttacagacgggagggacgcatttatgcagtctagcgagctgtctgaacatcagaagatccactctaggaaaaatctcttcgaggggcgcggatatgagaaaagtgtcattcattcaggaccattcactgaaagtcaaaagagccacaccataacacgccctctggagagcgacgaggacgaaaaagccttcacaatctctagtaacccatacgagaaccagaagatacccacaaaggagaatgtatatgaagcaaaatcctatgagaggtctgtcattcactcactagctagcgtggaggcacagaagtctcactctgtggccggaccctccaaacccaaggttatggctgagagtacgatccagagcttcgatgctattaaccaccaacgggtccgcgccgggggcaacaccagcgaaggtcgcgagtatagcaggtccgtcattcactccctggtggccagtaaaccccccaggagccataacggcaatgagctggtggagtcaaacgaaaagggggaatccagcatctatatatccgatttaaacgacaaaaggcagaaaatccccgctcgggaaaacccctgcgaggggggctcaaaaaacagaaactacgaagacagtgtgatacaatcagtgtttcgggctaaaccccaaaaaagcgttcctggcgaagggagcggggagttcaagaaagacggggaatttagcgtcccctcatccaacgtgagagagtaccagaaagctcgcgctaagaagaaatacatcgagcatcggagtaatgagacttcagtgatccatagcctgccatttggagagcagacatttaggcctaggggcatgttgtatgagtgtcaggaatgtggggagtgttttgctcattcttcagacctgacagagcatcaaaaaatccacgatcgcgagaagccatctggaagcagaaactatgaatggtccgtgatccggtccctggcccctacggatcctcaaaccagctacgctcaggagcaatatgctaaggaacaggctcggaacaagtgcaaggacttccggcagttcttcgctacaagcgaagatctaaacactaaccagaaaatctatgatcaggagaaaagccatggagaagagtcccagggagagaacactgacggggaggagactcacagtgaagaaacgcacggacaggagaccatcgaagacccagtcatccagggcagtgacatggaagatccacagaaagacgatcctgacgacaaaatctatgagtgcgaggattgtggactgggatttgtggacctgaccgacctgaccgatcaccagaaggtgcatagtcgaaagtgcctggtggactcacgggagtacacacattcagttattcacacgcacagcatctcagagtatcagcgtgattatacaggcgaacaattgtacgagtgtcctaagtgcggggagtccttcatccattctagttttttattcgaacaccagcggatccacgaacaggaccagctgtattcgatgaaagggtgcgacgatggctttatcgccctgttgccaatgaagcctcgccgcaaccgcgctgccgagaggaaccccgctctcgccggctctgcaattcgatgcctgttgtgtggccaaggattcattcatagcagtgctttaaatgaacacatgcggctgcaccgggaagacgatttgttggagcagtcacaaatggcggaagaggccatcatcccagggttagcactaaccgagtttcagcgcagccagaccgaggagcgccttttcgaatgtgctgtgtgcggcgagtcgttcgtcaaccccgctgagttagccgatcacgtgacggtacataaaaatgagccctatgaatacggtagcagctacactcacacctcgtttcttacagagccgctcaagggtgctatccccttttacgagtgtaaggactgcggtaaatccttcatccactctacggtgttgacaaaacataaggagctgcacctggaggaggaggaggaggatgaggctgcagctgctgccgctgcagcagctcaagaggtagaagcaaacgtgcacgtccctcaggttgttctgaggatccaggggcttaatgtcgaggctgcggaaccagaagtggaggcagctgagccagaagtcgaagcagcggaaccggaagtggaggccgccgagcccaacggcgaagctgaaggcccagatggagaggccgccgagcctattggcgaagctggccagcctaatggagaagcagagcaacctaacggagatgcggatgaacccgacggcgccgggattgaggatccagaggagagggcagaagagcccgagggcaaggccgaggaaccggagggcgacgcagacgaaccggacggtgtaggaatagaggacccagaagagggcgaagatcaagagatccaggtggaggagccttattacgactgtcacgagtgtaccgaaacttttaccagcagcacagctttttctgaacacctgaagacacatgcttcaatgattattttcgaacctgccaacgcctttggagaatgcagcgggtatatcgagcgggcctccacgtcgactggcggggcaaatcaggctgatgagaagtatttcaaatgtgatgtgtgtggccagctctttaacgacaggctgtccctggctcgccatcagaatacacacactggctag

SEQ ID NO: 23555 - DNA, 2508 bp, synthetic construct
  source 1..2508: mol_type = other DNA; note = Synthetic coding sequence
atgggcaactacaagagccggcccacccagacctgcaccgacgagtggaagaagaaggtgtccgaatcctacgtgatcactatcgagcgcttggaagacgatctgcagattaaagagaaggaactcacagagctcaggaacatctttggcagcgatgaggcgttcagcaaagtgaacctgaattaccggaccgaaaatggcctcagcctgctgcatctatgctgtatatgcggcgggaaaaagtcgcacatcaggacgctaatgctgaaagggctccgcccttcccggctgacccgtaatggcttcaccgcgcttcatttagccgtttataaagacaatgccgaactgattacaagtctgctgcacagcggcgccgatattcagcaggtgggctacggcggcctgacagcccttcacatagccacaatcgccggtcatctagaagccgccgatgtgcttctgcaacatggagcaaatgtcaatattcaggatgccgtattctttaccccactgcatatagctgcttattatggacacgagcaggttacccgcctactcctgaagttcggcgccgacgtgaacgtgagtggcgaagtcggggataggcctctccatctcgcatcggcgaaaggctttctgaacattgccaaactgctgatggaggaagggagcaaagcagacgtgaacgcccaggacaatgaggatcacgttccccttcacttttgtagcagattcggccatcacgacatcgttaaatacctccttcagagtgatctggaagttcaacctcacgtcgtgaatatttacggcgacacaccgctgcacctggcttgctacaacggtaaatttgaagtggccaaggaaataatacagatctctggaaccgaatcactgactaaggagaacattttctcggagacagcctttcacagcgcctgtacctacggaaaatccatcgatctagtaaagtttcttttagaccagaatgtcatcaatatcaaccaccaggggagagacggtcacacagggttgcacagcgcatgctaccacggtcacataaggcttgtccaattcctgcttgacaatggagctgacatgaatctagtggcgtgtgatccctctcgaagctctggtgaaaaggatgagcagacctgtctcatgtgggcctacgaaaaaggccacgacgcgatcgtcacgctgctgaagcattacaaaaggccccaggatgagctgccgtgcaatgaatactcccagcccgggggcgacggtagctatgtgtccgtgcctagcccattaggaaagattaagagcatgactaaagaaaaagcagatatattactccttagagcgggtctacccagccattttcacctgcaattgtctgagatcgaattccacgaaattataggcagtgggtccttcggaaaggtttacaagggtaggtgtagaaataaaattgtcgccataaagcgatacagggctaacacctactgcagcaagtcagatgtggatatgttttgtagggaagttagcattctgtgccagctgaatcacccctgcgtgattcagttcgtgggagcctgtctcaatgacccatcacaattcgcgattgtgacgcaatatatctcaggcggttctctcttctcactcctccacgaacagaaacgtattctggaccttcagagtaagctgatcatcgccgtggatgtagccaaaggcatggagtatctgcacaaccttacgcagcctattattcacagagatcttaattcgcacaacattttattgtatgaggatggacatgccgttgtggcggattttggggaatccagatttctccagagcctcgatgaggataacatgactaaacagcctggcaacctgcgctggatggcacctgaggtattcacacaatgcacaaggtacaccataaaggccgacgtcttctcatacgcactatgcctctgggagattctgacaggggaaataccttttgcccacctgaaaccagcagccgctgcagccgacatggcatatcatcacatcaggccccccatagggtacagtatcccgaagcccatttcaagtctccttataagaggctggaatgcctgtccagagggcaggcctgagtttagtgaggttgtgatgaaattggaggagtgcctatgtaatatcgaactcatgagcccagcctcatccaacagctcaggcagcctgtcaccctctagttcgtctgattgtcttgttaaccggggtgggcctggtcggagccacgttgctgctttaaggagtcggttcgagctggagtacgctctaaatgcccgaagttatgctgctctaagccagagcgcaggtcaatattcctcccagggcttatccttagaggagatgaagcgcagcctacagtataccccgattgacaagtacgggtacgtgtctgaccccatgagttcaatgcactttcactcatgtaggaattccagctctttcgaggacagctcctag

SEQ ID NO: 23556 - DNA, 1767 bp, synthetic construct
  source 1..1767: mol_type = other DNA; note = Synthetic coding sequence
atgaacaccagcatcccctaccagcagaacccctacaacccccggggatcgtctaatgtcattcaatgttaccgctgtggtgacacttgcaaaggagaggtagtgcgagtccacaacaatcattttcatattcgttgtttcacctgtcaagtgtgtggctgcggcctcgcgcagtctggctttttcttcaagaatcaagaatatatatgcacacaggattatcaacagctgtacggcactcgatgcgattcatgtcgagacttcattaccggagaggtgatttctgcgctggggcggacgtaccaccccaagtgtttcgtatgttcgttatgcaggaaaccgttcccgataggagataaagtgacattctccggcaaggagtgcgtgtgccagacctgtagccagtccatggcatcaagcaaacctatcaaaatacggggcccttcccactgtgcagggtgtaaggaggagatcaaacacgggcagtcccttttagcgttggataaacagtggcatgtgagttgcttcaagtgtcagacctgttccgttatcttgactggggagtacatctcaaaggacggggtaccctattgtgagtccgactatcacgcacagttcggcatcaagtgcgaaacatgcgatcgttatatcagcggaagagtcctggaggctggggggaaacactaccaccccacctgtgctcgttgcgtccgctgccatcagatgttcaccgaaggcgaagagatgtacttgacaggcagtgaggtttggcaccccatctgtaaacaagctgccagagcagagaaaaagttaaagcaccgtcgcacctccgagacaagcataagtcctcccggatcatcgatcggatcacccaacagggtcatctgcgatatctacgagaatctggatctcaggcagcgaagagctagctctcccggatacatcgactcccctacatactcccgacagggtatgagcccgacattttcccgtagcccgcaccattattatcggagcgccggcgactccaatatttaccgcaaaccccctatatataaaaggcacggggacctgtccacagcaacgaaatctaaaacaagcgaggacatcagtcaaacgtcaaaatactctcctatatacagccctgatccttattacgcctctgaatcagagtactggacatatcatggttcccccaaagtacctcgagctaggcgttttagttcaggtggcgaggaggacgatttcgataggagtatgcacaaacttcagtccggcatcggccggctaatactgaaggaggagatgaaggctcgctcatccagctacgccgacccgtggacccccccaaggtctagtacctcttccagggaagccttacataccgccgggtacgaaatgtccttgaatggaagtccacgctctcattatctggccgattcggaccctctgatcagcaaatccgcttcactgcctgcctacaggagaaatggccttcacaggacccccagcgccgatctgttccactacgatagcatgaacgccgtgaattggggaatgcgggagtataaaatttacccatatgaactgctactagtcaccacccgcggccgcaaccggctgcccaaagacgttgatcggacgcgcctcgagaggcatctgagtcaggaggaattttatcaggtgtttggcatgaccatttctgagttcgaccgcctggcactttggaagcggaacgagctgaaaaagcaggccaggctgttctag

SEQ ID NO: 23557 - DNA, 1050 bp, synthetic construct
  source 1..1050: mol_type = other DNA; note = Synthetic coding sequence
atggccatccccatcaccgtgctggactgcgacctgctgctgtacggacggggccaccggaccttagatagattcaagcttgatgacgtcactgacgagtacctcatgagcatgtatggctttccacgtcaattcatttattacttagtagagctcctaggagcaaacctcagtaggccgactcagaggtcgcgcgccatttcacctgaaacgcaggtgcttgccgccctcggcttttacacatccggatccttccagactaggatgggagacgccattgggatttcacaggcctctatgagccgttgcgtggcaaatgtgaccgaggctttagtggagcgcgcgtcacagtttatcagattccctgcagatgaggcttcaattcaggccctgaaagatgagttctatggactagccggcatgcctggcgtcatgggggtcgtagactgcatacacgtggcaataaaagctcctaatgctgaggatctttcttatgttaacagaaagggcttgcacagcctcaattgcctgatggtgtgcgatatcagagggactctgatgacagtcgaaacaaattggccggggtccctgcaggattgtgccgttctgcagcagtcctccctctcgagtcagtttgaagcagggatgcacaaagacagttggctactgggggattcatcattttttctacgcacttggctgatgacccctcttcacattccggagaccccagcagagtacagatataacatggctcatagcgccacccattccgtgattgagaagacattccgaactctgtgtagcaggttcaggtgtctagatggcagtaagggagcattgcaatactcgcctgaaaagtcaagccacatcatcttggcatgttgtgtactgcacaatatctcccttgaacatggaatggacgtctggtccagtcccatgactgggccaatggagcagccaccggaagaggaatacgagcatatggagtcactcgatctggaagcggacaggatccggcaagagctaatgctgactcacttctcctag

SEQ ID NO: 23558 - DNA, 1794 bp, synthetic construct
  source 1..1794: mol_type = other DNA; note = Synthetic coding sequence
atgagcagcaagggcagcagcaccgacggccggaccgacctggccaacggatcattgagtagctccccggaggagatgtctggggctgaggaaggccgcgaaacaagcagcggaatcgaagtggaggcttctgatctcagtctctccctgaccggcgacgacggcggacctaaccggactagcaccgagtccagaggtactgacaccgaatcgagcggggaggacaaggattcagattctatggaagataccggacattattccataaacgacgagaacagagtgcacgaccgctctgaggaagaggaggaggaagaggaggaagaagaggaggagcagcctcgacgaagggtgcagcgtaagagggcgaacagggatcaggacagcagcgacgatgaacgggccctcgaagactgggtgagcagtgaaacgtcagccctgcctcgtccaaggtggcaggccctcccagcgctgcgcgagagagagctggggtcatcggctcgcttcgtgtatgaagcttgtggggctcgagttttcgtgcagcggttcaggttacagcatggtctggagggccatacaggatgcgtgaatactctgcactttaaccaacgaggcacttggctggcatctggaagcgatgatctgaaagtcgtcgtgtgggactgggtgcgaagacagcctgtgctggatttcgaaagcgggcacaagtctaacgttttccaggctaagtttctgccaaatagcggggactctacactcgctatgtgtgcccgcgacgggcaggtgcgggtggctgagctgtccgcaacacaatgttgcaagaacacgaagagggtggcccagcacaaaggggcgtcacacaaactggccctcgaaccggactctccttgtacattcctgagtgcaggcgaagatgcagtggtcttcaccatcgacctccgccaggaccgacctgcaagcaaacttgtcgtgaccaaggaaaaggaaaagaaagtggggttgtacaccatttatgtaaaccccgctaacacacatcagttcgccgtggggggccgcgaccagttcgtgagaatctatgaccaaagaaaaattgatgaaaacgaaaacaatggggtgctgaagaagttctgtccacaccacttggtgaacagcgaaagcaaggcgaacatcacttgcctcgtctacagtcacgatggtaccgaactccttgcctcgtataatgatgaggatatctatcttttcaattcctcccacagcgacggggctcaatacgttaaacggtataagggccatagaaacaatgctaccgtgaagggcgttaacttttacgggcccaagtcagagtttgtcgtgtccgggtcggactgtggccacattttcctgtgggagaagtcttcctgccagatcattcaatttatggaaggcgacaagggaggcgtggttaactgtttggaaccccatccccacttgccggtgcttgccacctccggactggaccatgacgtcaaaatatgggcgcccacggctgaggccagcaccgaactaaccggactgaaggatgtgatcaaaaaaaataagcgcgaacgggatgaagactcgttgcaccagactgatctcttcgacagccatatgttgtggtttctgatgcaccaccttagacagagaagacatcacagacggtggcgggagcccggggttggggccaccgatgccgatagcgacgagtctcctagcagctccgacacgtccgacgaggaggaagggcctgatcgcgtacaatgcatgccgtcctag

SEQ ID NO: 23559 - DNA, 933 bp, synthetic construct
  source 1..933: mol_type = other DNA; note = Synthetic coding sequence
atgagccagcagctgaagaagcgggccaagacccggcaccagaagggactgggtgggagagcccctagcggcgctaaacccagacagggtaagagctctcaggatctccaggcagagatcgagccagtcagtgccgtctgggcattatgcgacggctatgtctgctacgagcctggaccacaagccctgggcggcgatgatttctctgactgctacattgaatgcgttatacgcggagagttcagtcagccgatattggaagaggattctctgttcgaatcactcgagtacctgaagaaagggtctgaacaacagctttctcagaaggtctttgaggcatcatccctagaatgcagcctcgaatacatgaagaagggcgtgaaaaaagaactcccacagaagattgtgggcgagaactccttagaatacagtgagtatatgactggcaaaaagctgcctcccggcggcatacccgggatcgacttaagcgatccaaagcaactcgcagagtttgcccgtaagaagcctcctataaacaaggagtacgactctctgtcagccatcgcttgccctcagtctggctgcactcggaagttgcggaaccgggcggcacttaggaaacacctcctgatccatggccctcgcgaccacgtgtgcgcagaatgcggcaaggcctttgttgagtcctccaaactgaaaaggcacttcctggtacatacaggagaaaaaccgtttagatgcactttcgaaggctgcggcaaaaggttctctttggacttcaaccttcgcactcacgttagaatccacactggtgaaaagaggtttgtgtgtcccttccagggatgtaaccggcggttcatccagtctaataacctcaaggcacatatcctcacccatgcgaacactaacaagaatgagcaggaggggaagtag

SEQ ID NO: 23560 - DNA, 1149 bp, synthetic construct
  source 1..1149: mol_type = other DNA; note = Synthetic coding sequence
atgctgcggtggaccgtgcacctggagggcggcccccggcgggtgaatcacgctgcagtcgcagtcggccacagagtttattcttttggcggttactgcagcggcgaagattacgagaccctgcggcagatagatgtccatatctttaacgcagtgtccctccgctggacaaaactgccaccagtgaagtctgccataagagggcaagccccagtggtcccatacatgagatacgggcactctaccgtcctgattgatgacacagtgctcctttggggcggacggaatgacacagagggggcttgcaacgtcctctatgccttcgacgtgaacacacataaatggtttactcccagggtctctggaaccgttcctggtgccagggacggacatagtgcctgtgtgctgggcaaaataatgtatatcttcggcgggtacgagcaacaggcagactgtttttctaatgatatccacaaattggatacctctaccatgacctggacgctgatctgcacgaaaggctctcccgcccgttggcgggactttcattccgccacaatgctgggctcgcatatgtatgtgtttggcggccgcgcagatcgattcggcccgtttcactccaataacgagatctattgcaacaggatcagggtgttcgacacacggacagaagcatggctggactgtccacctacccccgtcctccctgagggtcggcgatcccatagcgcctttgggtacaatggtgaactgtacatctttggcggctataacgcccggctgaataggcactttcacgacctgtggaagttcaaccccgtgagttttacgtggaagaaaatcgaacccaaaggaaaaggtccctgtcccagacgccgccagtgttgctgcatcgttggcgataaaatagtgctattcggcggcacctcccctagcccagaagaaggtctgggggacgagttcgatttaatcgaccatagtgatttgcacatcctcgacttttcaccatctctgaagacactgtgtaaactcgctgtaattcagtacaatctggaccagtcctgcctgcctcatgacattagatgggaattaaatgccatgacaactaacagtaatattagtaggcccatcgtgagcagccacggatag

SEQ ID NO: 23561 - DNA, 1827 bp, synthetic construct
  source 1..1827: mol_type = other DNA; note = Synthetic coding sequence
atggccgccgccgccgccgccgtgggccccggcgccggcggcgccggttccgctgtccccggcggggccggaccatgcgcaacagtgtctgttttccccggcgctcggctcttgaccatcggagacgccaacggcgaaattcagcggcacgccgaacaacaggctttaagactggaagtacgggcaggacccgactccgccggcattgccctgtactcccatgaagacgtgtgtgtgttcaagtgctctgtaagcagagaaactgaatgtagcagagtcggcaaacagtcctttatcatcaccttgggttgcaatagcgtgttgatacagtttgcaacccccaatgatttttgttctttctacaacattctcaagacctgtaggggacatacacttgagcggtccgtcttttccgaacgcacagaagaatctagtgccgttcaatatttccagttctacgggtacctgtcacagcagcaaaatatgatgcaggactacgtgcgaaccggtacatatcagagagctatcctgcagaatcacaccgattttaaagataaaatagtgcttgacgtgggatgtgggagtggaatcttgtcattctttgccgcccaagccggtgcccggaaaatttatgcagtggaagcttctacaatggctcaacacgctgaggtgctagtcaagagtaacaatttgacagacagaatcgtggtcattcctgggaaagtcgaggaggtgtcattacccgaacaagtggacatcatcatttccgagcctatgggctatatgctttttaatgagcgcatgctggagagctatctgcatgctaaaaaatatttgaaacctagcgggaacatgttccccacaatcggtgatgtccacctggctccctttacagatgagcagctgtatatggagcagttcactaaagccaatttctggtatcagccaagctttcacggcgttgatctgtcagcattacggggcgcagccgtggacgaatattttcgtcaaccagtcgtggacaccttcgatattagaatcctgatggcgaaatccgtcaagtacacggtaaacttcctcgaagccaaagagggagacctgcacaggatagaaatcccatttaagtttcatatgctacattccggcctggtacatgggctcgctttctggtttgacgtggcatttatcgggtcaattatgaccgtgtggttgtccaccgcacccacagagcccctgactcactggtatcaggtgagatgcctattccagtcacctctcttcgctaaggcaggagacaccctgagtggaacttgcctactgatcgcaaataagcgccaaagctatgatatatcaatcgttgcacaggtggaccagactggctccaaaagcagtaatcttctcgatctcaagaaccctttctttcgctacacaggcaccactcccagtcccccacctggttcacactacacgtcaccgtcagagaatatgtggaatacggggtccacctacaatctgagttccgggatggctgttgcaggaatgcccacggcctatgatttaagcagcgttatcgcaagcggatcttccgtggggcacaataacctgatccccctggccaatactggaatagtcaaccatactcacagcaggatgggatccatcatgagcacaggcattgtgcagggcagttcgggggctcagggctcaggaggcggtagtacctccgctcattatgcagtgaattcacagttcacaatggggggacccgctatatcaatggcctccccaatgagcatacccactaataccatgcactacggatcatag

SEQ ID NO: 23562 - DNA, 2913 bp, synthetic construct
  source 1..2913: mol_type = other DNA; note = Synthetic coding sequence
atgcagagcaccgacctgggcaacaaggagagcggcaagatctggcaccgcaagccatcacctgctacccgcgatggcatcatcgtaaatatcatccacaacaccagcgattatcatcctaaagtactgagattcctgaacgtagccttcgatggcacaggagactgcttaatcgccggcgaccaccagggcaatatctacgtcttcgaccttcacggcaatcggttcaacctggtgcaaagaaccgctcaggcatgcacagccctggcctttaacttgagacggaagtcggaatttctcgtcgccctggctgactacagtattaaatgctttgacaccgtgacaaaggagttagtcagctggatgagaggacatgagtctagcgtgttcagtatttcagtccacgccagcggaaaatatgcaatcactaccagcagtgacacagcccagctgtgggatctcgatacctttcagaggaagaggaaactgaacattcggcaatcagtggggattcaaaaggttttctttctcccgctcagcaataccattctctcgtgttttaaagataacagcatcttcgcctgggagtgcgacacacttttttgcaagtaccagttgcctgcaccccctgaatcctcctccatcctgtacaaggtgtttgctgtgaccagggatgggcgcatcctcgccgccggaggcaagtctaaccatctgcacctttggtgtttagaggcccgtcagctattccggatcattcagatgcctacaaaggtgcgcgccattcgccacttagagtttctgccagactcctttgatgctgggtctaaccaagtgttaggcgtattgtctcaggatggtatcatgcggttcatcaatatgcaaacttgcaagctattgttcgaaatcggaagcctcgatgaaggcatctcctccagtgcaatctcccctcacggaaggtatattgcctctattatggaaaacggaagcctcaacatttactccgttcaggcactcactcaggagatcaacaaacccccacctcctcttgtcaaggtgattgaggacctgccgaaaaataagctgtcctctagtgacctgaagatgaaagttacatctggcagagtgcagcagcccgccaagtcccgtgaatccaaaatgcaaacacggatcctcaagcaagacctgaccggcgattttgagtccaagaagaacgagctgccagacggcctgaacaagaagaggctgcagatattactcaaaggttatggtgagtaccccaccaagtacagaatgttcatctggcgcagcttgttacagcttccagagaatcacaccgccttttctaccctcatcgacaaaggcacgcacgtggccttcctgaatctccagaagaagtaccctattaagtcccgaaagctgctccgggtgcttcaaaggaccctgagtgcacttgcacactggtcggtgattttttccgatacgccctaccttcctctgctcgcttttcctttcgtgaaattgtttcagaacaatcagttaatctgttttgaggtcatcgccacactgattattaactggtgtcagcactggtttgaatactttcctaaccctcccatcaatatcttgagcatgatcgagaacgttttagcatttcatgataaggagctcctacagcactttatcgaccacgacattacatcccagctttacgcctggcctctgctggagactgtgttctcagaggtcctcactcgtgaagagtggctgaaactctttgacaacattttttctaatcacccgtctttcttgctgatgacggtggtcgcctataatatttgcagtcgaaccccacttctgtcctgcaaccttaaggacgatttcgagttcttcttccaccaccggaacaatttagatatcaacgttgttatacggcaggtgtatcaccttatggagactacccctacggatattcaccctgactctatgctcaacgtgttcgttgcgctcacgaaagggcagtatcctgtgttcaaccagtaccctaagtttattgtcgattatcagacccaagaacgtgagagaatccgcaatgacgaactggattacctcagggagcggcagacagtggaggatatgcaggccaaagtagaccagcagcgagtggaggatgaggcctggtatcagaaacaggagctgctccgcaaggccgaagagaccaggagagagatgctcctgcaagaggaagaaaagatgatccagcagcggcagaggttagccgctgtgaagagagagttgaaagtcaaggaaatgcatctccaagatgcagctcgcaggaggtttctgaaattacagcaggaccaacaggagatggagttaaggcgactcgatgacgaaataggacgcaaaaatctgaccgaaaatcaggaagctctcgcgaaggagatgagggccgacgccgatgcttatcggcggaaggtggacctggaggaacatatgttccataagctgatcgaggcaggagaaacacaatcacagaaaacgcaaaaatggaaagaagctgaaggcaaggagttccggttaaggagtgccaaaaaagcctcagccctatctgatgcatctcgtaagtggttcttgaaacaggaaattaacgccgcagtggaacatgccgaaaatccatgtcacaaagaagaaccccgattccaaaacgaacaggactcaagctgcctgcctcgaacttctcaactcaacgatagctctgaaatggacccttccactcagatttccctgaatcggagggctgtcgagtgggacacaacaggacagaatttgatcaagaaggttagaaacctcagacaaaggcttacagccagagcacgccatagatgccagaccccccatctgttggctgcctag

SEQ ID NO: 23563 - DNA, 648 bp, synthetic construct
  source 1..648: mol_type = other DNA; note = Synthetic coding sequence
atgagctgcaccatcgagaaggccctggccgacgccaaggccctggtggagcgcctccgtgatcatgacgatgccgctgaaagtctcattgagcagaccaccgctctgaacaaacgcgtcgaggccatgaagcagtatcaagaagaaattcaagagcttaacgaggtggcccggcaccggcccagatccacactggtgatggggatacagcaagagaacagacaaatcagggaactgcagcaagagaataaagagctcagaaccagcctggaggaacatcagagcgccctggagctgatcatgtccaagtaccgtgagcagatgttccgcttgctgatggctagcaagaaagacgaccccggaataattatgaaactgaaggagcaacattccaaggagctgcaggctcatgtcgaccagatcaccgaaatggccgcagtcatgcgcaaagctatcgagatcgatgagcagcagggctgtaaagaacaagaacgcatttttcagctggagcaagagaataagggactgagagagattctgcagatcacccgcgaatccttcttgaacctcaggaaagatgacgcaagtgagagtacttccctgtcagctctcgtgacgaatagcgacctttccctgagaaaatcttag

SEQ ID NO: 23564 - DNA, 2676 bp, synthetic construct
  source 1..2676: mol_type = other DNA; note = Synthetic coding sequence
atggccgtggcccgggtggacgccgccctgccccccggcgagggctccgtggtgaactggtctggccaagggctccagaagctcggcccaaatctcccttgtgaagctgatattcatacactcattctcgataaaaaccagataataaagctggaaaacctcgaaaaatgcaaaagactgattcaactctccgtggccaacaaccgtttggttcggatgatgggggttgccaaactaacactgctccgggtgctcaatttacctcacaattctattggatgtgtggaaggcctcaaagagctcgtccatttggaatggctcaacctggctggaaacaacctgaaggctatggagcagatcaacagctgtactgcgctccagcacctggatctcagtgacaataacatctcccagatcggggatctgagcaaactggtgtcacttaaaaccctgctcctccacgggaacattatcacctctctgcgcatggctcccgcatacctgcctcggagcctggctatcctttccctagccgaaaatgaaatccgggacctgaacgagatcagctttctcgcctctcttacagagcttgagcagctttctattatgaacaatccctgcgttatggcgaccccttccattcctgggttcgactacaggccttacatagtgagttggtgtctgaatttgagggtcttagatgggtacgtcataagccagaaggaaagcttaaaggctgagtggctctacagccaaggcaagggacgagcataccggccgggacagcatatccagctcgtacagtatcttgccaccgtttgtcctctgacctcgacactgggcctacagaccgctgaggacgctaagctagaaaaaatcctctctaagcagcggtttcaccagaggcagctcatgaaccagagccagaacgaagagctaagccctctggtgccggtcgaaaccagggcgtccctcataccagagcattcaagccccgtgcaagattgccagatctcccaggagtccgaacctgtgatacaggtgaactcgtgggtcggaatcaattcaaacgacgaccagttgttcgcagtgaaaaacaactttcccgcttccgttcacacaacacgatatagtcgaaatgacttacacctggaggatatccagactgacgaagacaaactcaattgcagtctcctctcatctgagtccacttttatgcctgttgcctccggtctctcacccctgagcccgaccgtcgaacttcggctgcaaggcataaatcttggtctcgaggatgatggcgtggccgacgaatccgtgaaagggctcgaatcgcaggtgttggataaggaagaggagcagccactctgggctgctaatgagaatagcgtgcagatgatgcggtcagagattaacaccgaagtgaacgagaaagctggtctgctcccctgtcccgaacccaccataatctccgcgatactaaaagacgataatcatagcttgaccttttttccagagagcacagagcagaaacagtccgatattaaaaagcctgaaaacacgcaaccagaaaataaggagacaatcagccaggccacttctgaaaaactgccgatgatcttaacccaacggtctgtggctctgggccaggacaaggtggcactgcaaaaactaaacgacgccgccacaaagttgcaggcctgttggcgggggttctacgcgcggaactacaaccctcaggcaaaagatgttcggtacgaaataagactccgccggatgcaggagcatattgtgtgtctcacagacgaaatcagacggctgaggaaagagagagatgaggaacgcatcaaaaagttcgtgcaggaagaagcattcagattcctctggaaccaaaagtggggtctggccatccttccaaggccagtatcgaatttttgggcacaggccgtctttcctcctcagccgccaaaagtccgaagcctgcaagtctggcagcagactgtggatcaacggctctcaagctggcataccgatgtgccacccattagctccacactggtgcctagcaaacatcctcttttcacccaatcccaggaatctagctgtgatcagaacgctgattggtttatagcgagcgacgtcgctccacaggaaaaaagtcttccagagtttcctgactccggatttcactccagcctcacagagcaagtgcatagcctgcagcactccctcgactttgaaaagtcaagcactgagggatctgagagttccattatggggaactctatcgataccgtgcgctatggtaaagagagtgatctgggcgatgtctccgaggagcacggggaatggaataaagagtcttcaaacaatgagcaggataattcgctgttggaacagtacctcaccagcgttcaacagttggaagacgctgatgaacggaccaattttgatacagaaacacgcgattctaaactacacatcgcctgctttcccgtccagttggacacactttccgatggcgctagcgttgacgagagccacggcatcagccccccacttcagggcgagatatcacagacccaggagaatagcaagttgaatgcagaggtccagggccaacagccagaatgcgactctacctttcaactgctgcatgtgggagtgacggtgtag

SEQ ID NO: 23565 - DNA, 828 bp, synthetic construct
  source 1..828: mol_type = other DNA; note = Synthetic coding sequence
atggccgagcccgccagcgtggccgccgagagcctggccggcagcagggccagggcggcaagaaccgtcttgggacaggtcgtactgccaggggaagagctattattacccgagcaggaggatgccgaaggtcccgggggcgcagtggaacgaccactctcactgaatgcgagagcctgcagccgcgtgcgcgtagtgtgtggccctgggctgcgtcgatgtggtgaccggctgctcgtcaccaagtgcggaagacttaggcacaaggagcccggatcgggctcaggcggcggcgtctattgggtggactcccagcaaaagaggtatgtcccggtaaaaggggaccatgtcattggcatagttaccgcgaagagtggcgatatcttcaaggttgacgtggggggatcggagccggcctccctgtcctatctgtccttcgagggcgcgaccaagcgcaataggccgaacgtccaggtcggcgacctcatttatggtcagttcgttgttgccaataaagacatggagcctgaaatggtttgtattgacagttgtggcagagctaatggtatgggagtgatcggacaggacggtctgctctttaaggttaccctcggacttatcaggaaattactcgctcccgattgtgaaatcatacaggaggtgggcaaactctaccctcttgagatcgttttcggtatgaacggaaggatctgggttaaggccaagacaatccagcagactttgatccttgcaaacatcttggaagcttgtgaacatatgacaagtgatcagcggaagcagatattttccagactcgccgagtcctag

SEQ ID NO: 23566 - DNA, 1620 bp, synthetic construct
  source 1..1620: mol_type = other DNA; note = Synthetic coding sequence
atggccaccagcgcccccctgcggagcctggaggaggaggtgacctgcagtatttgtttggattacctgagagatcctgtcaccatagattgcggccatgtattctgtagatcctgtactacggatgtccggcccatttcgggatctaggccagtatgcccactctgcaagaagccctttaagaaagagaatattcgcccagtgtggcagcttgccagtctcgtcgaaaacatcgaacggttgaaagtggacaagggccggcaacctggcgaagttaccagggagcagcaggatgcgaagctctgcgagcgccacagggaaaaactccattattactgtgaggacgatggcaaactcctctgcgtaatgtgtcgggagtcgagggaacatcgaccccatactgccgtgctgatggagaaagccgcccagccacatagagagaagatactgaaccatctgagcaccctgagacgcgaccgggacaaaatccaggggttccaggccaagggggaggctgacatcttggctgccctgaaaaaactgcaggaccagcggcagtacattgtcgccgagtttgaacaagggcatcagtttcttagggagcgggaggagcacctgctcgaacagctagctaagttggaacaagaactgacggaaggccgggaaaaattcaagtcgagaggcgttggagaacttgctcgactcgccctggtaataagtgaactggaaggcaaagcccagcagccggccgcagagcttatgcaggacaccagagatttcctcaaccgttatccacgaaaaaaattctgggttggaaaaccaatcgcacgcgtcgtgaagaaaaagaccggcgaattttccgacaaactgctgtccctgcaacgaggactccgcgagttccaaggcaagttgctgagagatctggagtacaagaccgtgagcgttacactggaccctcaatctgctagcggatacttgcagttatctgaagattggaagtgtgtgacttacactagcctctataagtcagcctacttacatcctcagcagttcgattgcgagcctggagtacttggcagcaagggctttacctggggcaaggtgtattgggaggtcgaggtcgaacgggagggctggagcgaggacgaggaggaaggcgatgaggaagaggagggcgaagaagaggaggaggaggaggaagccgggtacggagatggctacgatgactgggaaactgatgaagacgaggaatcactcggcgatgaggaggaagaagaggaagaagaagaagaagaagtgctcgagagttgcatggttggggtggcaagagactcagtgaagagaaagggggatctgtccctacggccagaagatggcgtttgggccttaaggctttcttcatctggcatttgggccaacactagccctgaagcagaactttttccagcgctgcggccaagaagggtgggaatcgcactcgactacgagggcggcacagtaacattcacaaatgccgaatctcaggagctgatttatacatttacggctacttttacacgccgcttagttccctttctctggttaaagtggccagggacaagactcctgctgaggccctag

SEQ ID NO: 23567 - DNA, 1233 bp, synthetic construct
  source 1..1233: mol_type = other DNA; note = Synthetic coding sequence
atgttcaacaacgagctgatggccgacgtgcacttcgtggtgggcccccccggcgctactagaacagtgcccgcccacaaatacgtactcgctgttggatcaagtgtattctacgccatgttctatggggatctggctgaggttaaaagtgaaattcacattcccgacgtagaacctgctgccttcttaattttgctgaagtatatgtattcggatgagattgacctcgaggctgatacagttctggcgactctatatgcagccaagaaatatatcgttccggcacttgccaaggcgtgcgtgaactttctggagaccagccttgaagccaaaaatgcttgcgtgctcttgagccagagcagactcttcgaagagccagaacttacccaacgttgttgggaagtgatcgatgcgcaagctgagatggctctccgtagcgaaggtttctgtgaaatcgaccggcagacactggagattatcgtcacacgcgaagctctgaatacaaaggaagctgtcgtgttcgaggcggtgttaaattgggctgaggcagagtgtaaacgacagggactaccgatcacgcctcggaacaagaggcacgtgctgggacgcgcgttatatctcgtgaggatccccactatgacacttgaggaatttgctaacggagctgcacagagcgacatccttaccctggaagagacccatagcatttttttgtggtatacggccaccaataaacctcgcctggactttcccttaaccaaaagaaaagggttggccccacagcggtgtcacagattccagtcctcggcctacaggagcaatcagtggagatatcgcggcagatgtgatagcattcagttcgccgtggacaggcgggtgtttattgccggactgggcctttacggatcctcatctggaaaagcggagtattccgtcaaaattgagcttaagcggctcggcgtcgtattagctcaaaacttgactaaattcatgtcagatggtagttctaatacatttcccgtatggttcgagcatccggtacaggtggagcaggacacgttttacacagcaagcgctgtgctggacggaagtgagctttcctattttggccaggaaggaatgacagaggtgcagtgcggtaaagtggcctttcagttccagtgcagttcggactctaccaatggtacgggtgtccagggcggtcaaatccccgaactcatcttctacgcttag

SEQ ID NO: 23568 - DNA, 966 bp, synthetic construct
  source 1..966: mol_type = other DNA; note = Synthetic coding sequence
atgcgggccctggccgccctgagcgccccccccaacgagcggctgctcccacgcgaccccgctgcaactagggatcccgatgccgctcggcccgcgagaaggtccgcagttgaacggttggctgccgaccgtgcaaaatatgtccggggccgccccggtactgggagaggagttgcctctgagggttccggaccaggtgctatcaagtgccccggcaatgaccctgggcctcctgcaagagcgcccgctcccgttgctagacgtgccatcgctcgcaagccgctgaggcccgatagcctaataatttaccgccaaaaatgcgagttcgtgaggggaagtggtgccgacggccctcgggccagtttagtgaagaagctgtttcagggacccgggaaagacaaagctccagtcccgcgcacaggagacgagggcaaagctggcaacccagaaacagtccctacaactcccggcccggccgccgatccagccattccagaaacacccgcccctgcagcccgctccgccgcgccctcaagtgtgcctgctgcaccaccaggtccagagccccgcgtcgtccgcaggagaggactacagcgctctcagtcagacctttccagcaggtactctgcagcattggcagagtccgacacctttttccagtactgcgggctggatccagaagtagtcgaggccctgggacgcgagaactttaccgcgggctccgactgcgtaactctaaaggtgcggtccgtgtctgttgcaacatctggctccgggttttccagacatagcggaggagatgacgaaggtttgcaggaagaggagcttatagaacaggttcccagtactacatccgtgattgaaagaaatgcccggatcatcaagtggctgtacacgtgcaagaaggctaaagaaacccctagccaggaacagtctcgaacgaggggttccaagccctcaagatag

SEQ ID NO: 23569 - DNA, 945 bp, synthetic construct
  source 1..945: mol_type = other DNA; note = Synthetic coding sequence
atgagcgagaacgccgcccccggcctgatcagcgagctgaagctggcagtgccttggggacacattgccgcaaaagcatggggcagcctgcagggccctcccgtgttgtgcttgcatggatggctggataatgctagcagctttgaccggcttattccactgctgccccaggacttttactatgtggctatggatttcggaggtcatggactgtcatctcattacagccctggcgtgccgtactacttacagacattcgtgtctgagatccgccgggtggtggcggccctgaagtggaaccggttctctatcctgggtcactcctttggcggtgttgtcgggggcatgttcttttgtactttcccagaaatggtcgataagctgatcctcctcgatacccccttgttcctactggaatcagacgagatggagaacttgctgacttacaagcggcgagcgatcgagcacgtcttgcaggttgaggcgtctcaggagccatctcacgtgttcagtctgaagcaactgcttcagcgtctcctgaaatccaatagccacctgtcagaagaatgtggcgagcttctgcttcagcgagggacgaccaaggtggctactggactggttttgaatagggatcagaggcttgcctgggctgagaacagcatagacttcataagcagggagttgtgcgcgcatagtatcagaaagctccaggcacatgtactgctgatcaaggccgttcatggctactttgattccaggcagaactattctgaaaaggagagcttgtcctttatgatcgatactatgaaaagtaccctgaaagaacagtttcagtttgttgaggtgcccggcaaccactgcgtgcatatgagtgagccgcaacatgtggcttccattatatcctctttcctccagtgtacacatatgctccctgcccagctgtag

SEQ ID NO: 23570 - DNA, 3945 bp, synthetic construct
  source 1..3945: mol_type = other DNA; note = Synthetic coding sequence
atggccagcaagggcgccggcatgagcttcagccggaagagctaccggctgacgtccgatgccgagaaaagcagggtgaccggcatagtgcaggaaaagttattgaacgactacctgaacagaattttcagttcctccgagcacgcaccaccagctgcgacatcgcgcaaacccttaaatttccagaacctgcctgaacatctggaccaactcctccaggttgacaacgaggaggaagagagccagggacaggttgaaggaaggctcggccccagtacagtcgtactcgatcacaccgggggcttcgagggacttctgctcgttgatgacgacctgctgggggtgattggtcactctaactttggcactatccgttccacaacatgtgtgtacaaagggaaatggctttatgaagtcctcataagctctcaggggctgatgcaaatcggatggtgcacgatcagctgcaggtttaaccaagaagagggtgttggtgatacccacaattcttatgcctatgatggcaaccgtgtcaggaaatggaacgtgactaccactaactatggcaaagcttgggctgcaggcgacatagtttcgtgcctcatcgacttggacgatgggaccctgtcattttgcttgaacggggtttccctcgggaccgcctttgagaacctttcacgaggtcttggtatggcttactttccagccatctcactcagctttaaagagtctgtcgcgttcaattttggctcccggccgcttagatatcccgttgccggatataggccgctgcaagatccgccctccgctgaccttgtgagggcacaaagactgctgggatgctttcgggctgtgctgtcagtggagcttgatccagtggaggggcggctgctggacaaggaatcatccaagtggcggttgcgagggcagccgactgtgctcttgactttggcccacatttttcatcattttgcgccgctcctgagaaaagtctacctggtcgaagctgtcttaatgagcttcctcctgggcatcgtcgagaaaggaacacccactcaggctcagtctgtggtccaccaggtactggatctgctgtggctgtttatggaggactacgaggtgcaggattgccttaagcagctgatgatgagcctattgcgcctatatcggttcagccctatcgtcccagatctcggcctccaaattcactatttacggcttacaattgcaatcctgcgtcacgaaaagtccaggaagttcctgctctccaacgtactctttgatgtcctacgatctgttgtttttttctatatcaagagccccttgcgagtggaagaagccgggttacaggaactgatacctaccacctggtggccccactgctcctcacgcgagggcaaggaaagtactgaaatgaaggaggagacagcggaggaacggttaagaaggagggcatacgaaagaggttgccaacggctgaggaagcgtatcgaggtggtggaagagctccaggtgcagattctgaagttgctgctggataataaggatgataacggtggcgaggcttctcggtacatctttctgacaaaatttagaaaatttctccaggagaacgccagcggccgcggcaacatgcctatgctgtgccctcccgagtacatggtgtgttttctgcaccggctgatctcggcccttaggtattactgggatgagtacaaggcttcaaaccctcacgcctccttttccgaggaggcctatatcccgccacaggtcttctataacggcaaggtagactattttgatctccagagacttggaggactcctgtcacatcttaggaaaacacttaaagacgacttagccagcaaggcaaatatcgtgatagaccctctggagttacagagcaccgctatggatgatctcgacgaggatgaagaacctgctccagctatggcacaacgcccgatgcaagccctcgcagtgggcgggccccttccgcttccgcggcctggatggctgagctcaccgaccttgggcagagccaacagattcttgagcaccgccgcagtaagtctcatgactcccagaagacctctgagcaccagtgaaaaggtgaaagtccgcactctgtccgtggagcaacggactagggaggacatcgagggctctcactggaacgaagggcttctcttgggtagacctcctgaggagcctgaacagccattaactgaaaacagcttgctggaggtgctggacggtgcagtgatgatgtacaacttgtctgtgcaccagcagctaggtaagatggtcggcgtaagtgatgacgtgaatgaatacgcaatggctctcagagatactgaagataagcttaggcgatgcccaaagcggcgcaaagatatcctagcagagctgaccaagtcccagaaagtcttcagcgagaagcttgatcatctctctcggaggctcgcgtgggtccatgccaccgtatacagccaagaaaaaatgctcgatatctattggcttctgcgggtttgtctgcgaaccatcgaacacggggatcgaaccggctccttatttgcgtttatgccagagttctatctcagcgtggctatcaattcgtatagcgcactcaaaaattacttcgggcccgtccactcgatggaggagcttccaggctatgaagagactctgacacggctggccgcaattctggctaaacacttcgcagacgctcgtattgtggggactgatattcgcgattccctaatgcaagcacttgcctcctacgtatgttatccacactctctccgggccgtcgagaggatcccagaggagcagaggatcgcaatggtgcgcaacctgctcgccccctatgagcaacgcccatgggcccagacaaattggattctcgtgcgactctggcgcggatgtggtttcggctaccgctacacgcggctgccgcatttgctcaaaactaaactggaagacgctaacttaccctccttacagaagccatgcccatccacccttctccaacagcatatggccgacctgctacaacagggacctgatgtagctccgagctttctcaactccgttctgaaccaactcaattgggcattctcggagttcataggaatgattcaggagatccagcaagctgcggagcgtttggaacggaactttgttgactctcgacagcttaaagtgtgtgccacttgcttcgatctgagtgttagccttctgagagtgcttgagatgacaattactctagttcccgagatctttctcgattggacacgcccaacaagcgagatgctgttgcgccggttggcacaattactgaatcaggtcttgaatcgggtcacagctgaaagaaatctgttcgatcgggtggtgacactgaggcttcccgggctggaaagcgtcgaccactatccaattttggtcgcggtaactggtattttagtccagctcttggtcagaggtccagcatctgagcgtgaacaggccacgtcggtactgctggccgacccgtgctttcagctaagatcaatctgctaccttttaggccagcctgaaccacccgcacctggaaccgccttaccagctcccgataggaagagattcagcctacagtcttacgcagactatatatcagccgacgagctagcccaggtggagcagatgctggcccatcttaccagcgcttctgcccaggccgctgctgcctccttgccaacgtcggaggaggatctctgtcctatctgctatgcgcacccaatcagcgccgtttttcagccttgcggacacaagtcgtgcaaagcatgtatcaatcagcacctgatgaataataaggattgctttttctgtaagaccaccattgtgtcagtcgaggactgggaaaagggagctaacacctcgaccacaagtagtgccgcgtag

SEQ ID NO: 23571 - DNA, 2646 bp, synthetic construct
  source 1..2646: mol_type = other DNA; note = Synthetic coding sequence
atggccggcgccgccccccgggtgcggtacctggccggcttctgctgtccgctaggaggcttggccgcaggaaaacccagagtgctatgccatgaggcggaagtgtttttatcaacaggttcagagctggtgtacgtatacgaccaggaggggggcttgctgactgccgcctttagattcccggatcaagtctggcacctggagctgctggcccctcgaagacttctctacgccctgtgtgcaagaaggggactatactgcctgtccctcgatcacccaggacggtcacggagtacctcccaagacgaccgggattctgaagatggcgaccagccctcccccgtgattcctgtcgatcccgacgcttgcattctgccagatgccgccctgtgtgcttttaccctgcttgattctgtgttggtgaccctggtccagggaccagccaggtggaagatgcagctgtttgagcaaccttgtccaggcgaggacccacggcctggtgggcagatcggtgaggtagagttgagcagctacacgcctcctgctggggttcctgggaagcctgcagctccgcactttctgcccgtcttgtgcagcgtaagccctagcggaagcagggtgccccatgacctgctggggggctctggaggctttaccctggaggacgctctgttcgggctcctctttggggctgacgcgaccctgctgcagtctcccgtggtgctatgtgggctgcctgatggacaactctgctgcgtgattcttaaggccttggttacgtctcgatctgctcccggcgatcctaatgctctggtgaagatcttgcaccacttggaagagcccgtgatctttattggcgcccttaagactgagccccaagccgcggaggcagctgagaatttcctgcctgacgaggacgttcattgcgattgtctcgtggcatttggccaccatgggagaatgctggccattaaagctagctgggacgaatcaggtaagctagtgccagagctaagggaatattgcttgccaggaccggtcttgtgcgccgcttgcggaggaggaggcagggtgtatcacagcacgcctagcgacctctgtgtggtggatttgtcgagaggctctacacctctgggccccgagcagccagaagaaggtccgggcggccttcccccaatgctgtgtccagccagcttaaatatatgttccgtcgtaagcttaagcgcatcccccagaacccacgaaggtgggaccaagttattagccctttctgctaagggccggctgatgacctgttccctcgacttggatagtgaaatgcccggacccgcccgtatgacaaccgaatccgcagggcagaaaattaaggagctactctccggcatcggcaacatctcagaaagagtcagcttcctgaagaaagctgtcgaccaaagaaataaggcgctgacaagcctcaacgaggcaatgaacgtgtcctgtgcactcctcagttctggcaccggtcctcgcccaatctcctgcactaccagcactacctggagcagactccaaactcaggacgtgctcatggctacttgcgtgctcgagaactcgagcagcttttcattggatcagggttggaccttgtgtatccaggtcttaacatcaagctgcgctctggacctagattccgcttgttctgcaattacttacaccatccccgtcgaccagctgggtccaggcgcacggagggaagtcaccctgcctctcggacctggtgagaacggtgggctggacctgccagtgactgtgagttgcactctgttctattctctgagggaggtcgttggcggtgccctggctccgagcgattccgaagacccattcctcgatgagtgcccatcagacgttctgccagaacaagaaggtgtttgtttacctctctctcgccacacagtggacatgctgcaatgcctgcggtttccagggctggccccccctcacaccagggcgccgagccccttgggccccacaagggatccagtggccaccttcttagagacatgtcgcgagccagggagtcaacccgcaggacccgcaagcctgcgtgcagaatacctgccaccttccgtcgcttcaatcaaggtgagcgcagaactccttcgggctgctctgaaggatgggcattcaggcgtacccttgtgttgcgctaccctgcagtggcttctggcggaaaatgcggccgtcgatgtggttcgtgctcgcgcactctcctctatacagggcgtcgccccagatggcgccaatgtgcatctcatcgtgcgcgaggtcgctatgaccgatctgtgtccggctgggcctattcaggcggtcgaaatccaggtggagtcctcgtccctcgccgatatctgtcgggctcaccacgccgtcgttgggaggatgcaaaccatggtcactgagcaagccacgcaggggagcagtgccccggatctgcgcgtgcagtacctccgccagatacatgccaatcacgaaaccctgttgagggaggtccagactctgagggatagactgtgcacggaagacgaagcctcctcctgtgccactgcccagcggctgctgcaggtgtatcggcagctgaggcacccctccctcatcctgctctag

SEQ ID NO: 23572 - DNA, 471 bp, synthetic construct
  source 1..471: mol_type = other DNA; note = Synthetic coding sequence
atgggcgacaagaagagccccacccggcccaagcggcagcccaagcccagctcagacgaaggctattgggattgctcagtgtgtacattccgcaacagcgcagaagccttcaagtgcatgatgtgcgacgtgcgaaaaggaacaagcacacggaaagagaagaaagataaggtagagaaggaaaaatccgagaaagaaaccacatcaaaaaagaacagccataagaaaacacgccctcgactgaagaatgtggatcggagcagtgctcagcacctcgaagtgacagttggtgacctgacagtcatcattactgacttcaaagaaaagaccaaatccccaccagccagtagcgcagccagtgccgatcagcacagtcaatcggggagctcctccgataatacagagcggggtatgagcaggagcagttcgccacggggagaagccagctctctgaacggagaatcccactag

SEQ ID NO: 23573 - DNA, 777 bp, synthetic construct
  source 1..777: mol_type = other DNA; note = Synthetic coding sequence
atgtgcgccctggagatggccgtgctggagatccagaccaacggcgatacaagagtgaccgaagaggccatcgctcgagctcggcacagcttgtctgatcccaatatgcgcgaatttatattgtgctgcctcgcccgcgaccctgcccggcgtccgtctgctcactcactgctgttccatagggtactgttcgaagtccactctctcaagctgctcgccgcacactgttttattcagcaccagtacctgatgcccgagaatgtggtcgaggagaagacaaaggccatggatttgcacgcagtcctggcggaactgcccagaccccgcaggccacccctccagtggcgttactccgaagtgagcttcatggaactggacaaattcctagaggatgtccgtaacggaatctatcccctgatgaattttgcggccacacggcccctcggtctacccagggtccttgcaccgcctcccgaagaggtgcaaaaagccaaaacacccaccccagaaccattcgactccgagacaaggaaggtgatacagatgcagtgcaatttggaaaggtctgaagataaagcccgttggcatctaacactccttcttgttctcgaggaccgccttcaccggcagctgacttacgacctgttgccgactgattccgcccaggaccttgcttccgaattagtgcattatggcttccttcatgaggatgatcggatgaagctggccgcatttctagagtccacctttcttaagtatcggggaacacaggcttag

SEQ ID NO: 23574 - DNA, 564 bp, synthetic construct
  source 1..564: mol_type = other DNA; note = Synthetic coding sequence
atgctgggccggtaccgggagtacagcaacggccaggccggcgccatcgaacacctcaaggagtccttagaacaaagcattgatcagctcagaagtcagcgcctgctgaggaactccggcggccgatcaatttcagttacgagtctgagcgctagcgatctggacgggggaacgggcagcgagctgcaccattttcccccaaccagcccccttaaagactatggcgacccacaggggataaaacggatgcggagtcgcaccggggtgcgattcgttcaagagacagacgacatgacccagctacatgggtttcatcagagcctgagagacctgagctcagagcaaatcagacttggcgacgatttcaacagagaattgtctcgtcgatcaagaagcgacgccgagacaaagagagcactcgaggaattaactgagaagctgaacgaagcacagaagcaggaggtattcttcgtgaagagcttgggtaaggttaaaatccaatgcctgagctccgcagaggtggacaatgtgtttcccataaatgtttggcagtgtggcatctag

SEQ ID NO: 23575 - DNA, 927 bp, synthetic construct
  source 1..927: mol_type = other DNA; note = Synthetic coding sequence
atgatggacgtgagcggcgtgggcttccccagcaaggtgccctggaaaaaaatgtcagccgaagagctcgaaaatcagtattgtccatcacgttgggtagtcaggctgggcgccgaagaggccctacggacatacagccagatcgggatagaggcaaccactcgcgcgagggcaactcgtaaaagcctcttgcatgtcccctacggcgacggcgagggagagaaggtagacatctacttccccgatgagtccagcgaggccttgcccttctttcttttttttcacgggggatactggcagtcgggaagcaaagacgagagtgcttttatggtgcaccccttaacggctcaaggcgtggctgtggtcattgtggcctacggcatcgcgccaaagggcaccctcgaccatatggtcgaccaggtcacacgaagcgtggctttcgtccagaaacggtatcctagtaacaaagggatttacctctgtggacactcagctggagcccatctcgccgccatgatgttgttagctgactggacgaagcacggggtgaccccaaaccttaggggcttcttcctcgtgagcggtgtgttcgacctggaacctattgtttatacctcccagaacgtcgcgttgcagttgactcttgaggacgcacagcggaactccccccaacttaaggtggctcaggctcaaccggtggatccaacttgcagggtacttgtggtcgtgggacaattcgactccccggagttccaccgacagtcatgggagttctaccaggtcctgccagtccagaccctctgccagggcgaatggaaagcttctttcgaagaattacatgacgtagaccacttcgaaattgtcgaaaatctgacccagaaggacaatgtgctaacccaaattatcctgaagaccattttccaatag

SEQ ID NO: 23576 - DNA, 1461 bp, synthetic construct
  source 1..1461: mol_type = other DNA; note = Synthetic coding sequence
atgagcggcagcacccccttccagatgcggctggtgcacctggacctcaagggagcacctcctaaagttagctatttgagcgaaatttttcctctgttcagagccttgggagctaatggtctcctgatagagtacgaggatatgtttccgtatgaaggcccgctgcgcctattgcgtgccaaatacgcctactcaccgagcgagatcaaggaaatcctgcacttggccggactcaacgaacttgaggtgattccccttgtgcagacgtttggtcatatggaattcgtgctgaagcacacggctttcgcccatctgcgcgaagtgggatcatttccctgcaccctcaacccacatgaagccgaaagtcttgctctcgtcggagctatgatagatcaagttctcgagctgcacccaggcgcccagcggctgcacattgggtgcgatgaggtttactatcttggagaaggagaggcatctaggcggtggctgcagcaggagcagaactcaaccggaaaactctgcctctctcacatgcgggccgtcgcatcaggcgtgaaagctagaagaccatccgtaacacctcttgtgtgggatgatatgttgcgcgatctccccgaggatcagttggccgcctccggagtgcctcagctcgtggaaccagttctctgggactacacggccgacctggacgtgcatggcaaagtccttcttatgcaaaagtatcggcgttgcggcttcccccagctctgggcggcatccgcattcaagggcgctaccgggccgtctcaggcagttcctccagtagaacaccacctgagaaatcatgtccagtggctccaagttgccggatcaggcccaactgacagcctgcaaggaatcattttgacagggtggcagcgctatgaccactattccgtcctttgtgaactccttcctgctggcgttcccagcctggcggcctgtctgcagctgctccttcgcgggggctttgacgaagacgttaaagccaaagtggagaatctgctggggatcagttccctggagaaaaccgacccggtgcgcgagggggcaggctctttccctggctcgaacatcctggccctagtcacccaggtctcccttcacctgcggagcagcgttgatgctcttctggagggaaaccggtacgttactggttggtttagcccttaccatagacagaggaagttgatccatccggtgatggtacagcacatccagcctgctgctctcagcttgctggctcagtggtccacattagtgcaagagctcgaggccgctcttcagctcgctttctatcccgacgcagtagaggagtggcttgaggaaaatgtgcatccaagcctgcagaggctgcaggccctcctgcaagatctctccgaagtgagtgccccccctctgccccccacatccccaggccgcgacgtcgcccaggacccttag

SEQ ID NO: 23577 - DNA, 240 bp, synthetic construct
  source 1..240: mol_type = other DNA; note = Synthetic coding sequence
atgagcagccagcagcagcagcggcagcagcagcagtgccccccccagcgcgcccaacagcagcaagtgaaacagccttgtcagccacctcccgttaaatgccaagaaacctgtgccccgaagactaaggatccatgtgctccccaggttaaaaagcaatgcccaccaaagggtacaattataccagcccaacagaagtgccctagcgcccagcaggccagcaaaagcaaacagaagtag

SEQ ID NO: 23578 - DNA, 822 bp, synthetic construct
  source 1..822: mol_type = other DNA; note = Synthetic coding sequence
atgggccagaaggtgaccggcggcatcaagaccgtggacatgcgggacccaacctatagacctttaaaacaagagctgcagggcctcgactactgtaaacctacccggctcgaccttctgctggacatgccaccagtctcatatgatgtacaattgctgcactcctggaacaataatgaccggagcctgaatgtcttcgtgaaggaagatgataagttaatttttcaccggcatccggtcgcccagagtacagatgccatacggggtaaggtaggttacacccggggcctgcacgtgtggcaaattacttgggccatgcgtcagagaggtacccacgctgtggtgggggtggctactgccgacgcacccctacattctgtgggatataccaccctggtgggcaacaaccacgaaagctggggttgggatctggggagaaatcggttgtaccatgacggcaagaaccagccatctaaaacgtatcccgctttcttggaaccagatgaaaccttcattgttcccgactctttcctcgtggcactcgacatggacgacggtacgcttagctttatcgttgacggacagtacatgggcgtcgcctttcgtggactcaaaggcaaaaaactgtatcccgtggtgagtgccgtctgggggcattgtgaaatccgaatgagatacttaaacgggttggatcctgaaccattgccattaatggacctttgcagacgttctgtgcggctggccctcggtagggaacgactgggtgaaatccacacactgcctttgcccgccagtctaaaggcttatttgctgtatcagtag

SEQ ID NO: 23579 - DNA, 3315 bp, synthetic construct
  source 1..3315: mol_type = other DNA; note = Synthetic coding sequence
atgggcaacgccgccggcagcgccgagcagcccgccggccccgccgctcccccccctaagcagcccgctcccccaaagcagcccatgcccgccgcaggcgagctggaggaacgcttcaatcgcgccctgaattgcatgaacctgcccccagataaagtgcaattgctctcacagtacgacaacgagaaaaaatgggaactaatttgtgatcaagagcgtttccaggttaagaatcccccagctgcatacatacaaaagctcaaatcctatgtagatactggaggcgtgtctcgcaaggttgctgccgattggatgtccaacctggggtttaagagaagagtgcaggagtccactcaggtgctccgagagctcgagacaagcttgaggacgaaccatattggctgggttcaggaatttctgaacgaggaaaatcggggactggacgtgctcctcgagtatttggccttcgcccagtgctcagtgacttacgatatggaatcaaccgataacggagcaagcaattctgaaaaaaacaagccgctggagcaatcagtggaagatcttagcaaaggacctcccagcagcgtgccaaagagtcgccacctgaccattaaactgactcctgcccattcccgtaaagccctgcgaaatagtcggatcgtgtcccagaaggatgacgtccatgtgtgcatcatgtgcttaagggcgattatgaattatcaatcaggtttcagcctggtcatgaatcatccagcgtgtgttaacgagatcgcgctgtcactgaataacaagaacccccgaaccaaggctcttgtgctggagcttctcgccgcagtttgcttggtgagaggcggacatgatatcatcctcgctgcctttgacaattttaaggaggtgtgtggagagcagcaccgattcgagaaactaatggagtacttccgcaatgaggatagcaacatagactttatggtagcctgtatgcagttcatcaatattgtggtccacagcgtggagaacatgaatttcagggtgttcctccagtacgagttcacccatctggggctcgatctctacctggaaaggctgcggcttacggagtccgacaaactgcaagtgcaaatccaggcctatctggacaacatttttgatgtgggagctcttctggaggacaccgagacaaagaacgctgttctcgagcatatggaggagctgcaggagcaggtggcactcttgaccgaacggcttcgagatgctgagaatgagtccatggcaaaaatcgccgaactcgaaaaacagctgagccaggcaagaaaggagctggaaacactaagagagagatttagcgagtctacagccatgggacccagcagaaggcctccagagccagagaaagcgcccccagctgctccaaccagaccctcagccctcgagttgaaggtcgaggaactggaagagaaagggctcatccggatcctcaggggccccggagatgcagtatcgatagaaatcctgcccgtagccgtggcaacgccttccggaggagatgctcccactcctggagtcccaaccggctcacccagccctgatctcgcccctgccgcagagcccgcgcctggagcagcgcccccgccgcctccaccactgcctggattgccctctcctcaggaagctcccccatccgctccacctcaggctccccctctcccaggtagtcccgagccccctcccgcccctccactgcccggtgatctacctccgccaccgcctccacctcctccaccacctggtaccgatggacccgttccgcctccacccccaccaccaccacctccccccggaggaccaccagacgctctgggacgacgcgacagcgagctcggcccgggagtcaaggccaaaaagcccatccagacaaaattccggatgccacttcttaattgggtcgccctcaagccctcccaaatcaccggaacagtattcaccgagttaaatgatgaaaaggtcctgcaggagcttgacatgagcgactttgaggagcagttcaagacgaagagccagggcccttccctagacctgagcgcactcaagagcaaagcggcacagaaggcaccgtccaaagccacgctgatcgaggccaacagagctaagaatctcgccataacactgagaaagggaaacctgggagccgagcgtatctgccaggccatagaggcttacgatctgcaagccctcggactcgattttctggaactgctcatgaggtttctcccgaccgaatacgaacggtctcttattacacggtttgaaagggaacagagacccatggaggaactgtcagaagaagacaggtttatgctgtgctttagtagaatccctcggctcccagaaagaatgactacattgacgtttttaggaaatttccccgacaccgcacagcttctgatgccccagctcaacgccattatcgcggcctccatgagtattaagagctccgataaacttaggcagatcttggaaattgtcttagcctttggtaactatatgaactcatcgaaacgcggagctgcctatggctttaggctgcaaagcctcgacgctctattagagatgaaatcaaccgaccgaaagcagactctgctccactacctggtaaaagtcattgcagaaaaatacccccagttgacggggttccattctgatctgcattttttagataaggcaggctctgtaagtcttgatagtgtcctggctgatgttcgtagcctccagcggggactcgagctcacgcagagagagttcgttcgccaggacgactgtatggtcctgaaagagttcctgcgagcaaattctcccacaatggataaacttttagctgatagcaagactgcacaggaggccttcgagagcgtcgtggagtacttcggggaaaatcctaagaccacctcccccgggctgtttttttctctgttctctaggttcattaaggcctacaagaaggctgaacaggaggtggaacaatggaaaaaagaagccgcagcccaggaagctggcgccgatacccccggtaaaggggaacctccagctcccaaatcacccccaaaagcccgccggcctcaaatggaccttatctccgagctgaagaggcgtcaacagaaggagcccctcatctacgagtcagatcgtgatggagccattgaggatataataacagacctgcgaaaccagccttatattagggctgacacagggcggcggtccgcaagaagacgacctccaggaccccccctgcaggttacttccgacttaagcctgtag

SEQ ID NO: 23580 - DNA, 603 bp, synthetic construct
  source 1..603: mol_type = other DNA; note = Synthetic coding sequence
atggaggagaagcccagcaaggtgagcctgaagagcagcgaccggcaggggtctgatgaggagtcagtccacagcgatactagggacctttggacgacaaccaccctgagtcaggcacaactgaacatgcctctcagtgaagtctgtgaagggttcgacgaggaagggagaaatatttctaagacccgaggctggcattcacctggccgcgggagcctagacgaaggttataaggctagccataaaccagaagaactcgatgagcacgctctcgttgagcttgaactgcatcgtgggtcgtcaatggaaatcaatctgggagaaaaggacactgctagtcagatcgaggccgaaaaatcaagctctatgagctccttaaacatcgccaaacatatgccacacagggcctactgggcggagcagcaaagtcgtctcccactgcccctaatggaactgatggaaaacgaggctctggagatactgaccaaggccctgcgatcttatcagctgggaatcggtcgagatcactttctaaccaaagaattgcagagatacatagagggactgaagaagcggaggagcaagcgtctgtacgtgaattag

SEQ ID NO: 23581 - DNA, 1044 bp, synthetic construct
  source 1..1044: mol_type = other DNA; note = Synthetic coding sequence
atgaagctgaccagcgagaagctgcccaagaaccccttctacgccagtgtgagtcagtatgcagccaagaaccagaaattcttccaatggaaaaaggaaaagacggactatacccacgctaatctggtcgacaaggccctccaactattaaaagaaagaatcctgaaaggggacacccttgcctacttccttcgggggcaactgtacttcgaggaggggtggtacgaggaagctctagagcaattcgaagagataaaggaaaaggaccaccaggctacgtaccaactcggggttatgtactacgatggactgggcacaacactcgacgccgaaaaaggtgtagactacatgaagaagatcctcgattccccctgcccaaaagcaagacacctgaagttcgccgccgcctataaccttgggagggcctattacgaggggaaaggagtgaaaaggtccaacgaagaggccgaacgcttgtggctcatcgccgccgataatggcaatcccaaggcaagcgtcaaggcccagtctatgctggggctctactattcaaccaaggaaccaaaggagctcgaaaaggccttctactggcatagtgaagcctgcggcaacggcaacctcgaaagccaaggtgcgctgggcctcatgtatctctacgggcagggcatccggcaggacactgaggcggccctgcagtgcttgagagaagccgctgaaaggggcaatgtttatgcgcaaggtaacctggttgagtactattataaaatgaaattctttacgaagtgtgtggcattctctaagaggatcgcggactacgatgaggtgcacgacatccctatgattgcccaggtcacggactgtctaccagagtttattggcagagggatggccatggcctctttctatcacgcaagatgtttgcagttaggactaggcatcacaagggacgaaaccaccgctaaacattactattccaaggcatgtcggcttaatcccgccctggccgatgaactgcacagccttctcattcggcagcgtatttag

SEQ ID NO: 23582 - DNA, 3525 bp, synthetic construct
  source 1..3525: mol_type = other DNA; note = Synthetic coding sequence
atgcccctgcccttcggcctgaagctgaagcggacccggcggtacacagttagctcgaagtcgtgtcttgtggctcggatccagctactcaataatgagttcgtcgagttcaccctcagcgttgagtctaccggacaggagagtttggaggcagtcgctcagcgtttagagctgagggaagtcacatacttctccctctggtattacaataagcagaatcagcggagatgggtggacctcgaaaaacccttgaaaaagcagttagataagtatgccttagagcctaccgtctactttggcgtcgttttttacgtgccttctgtgtcgcagctacagcaagaaataacacgttaccagtattacctccaactgaagaaagacatcctggagggtagtattccatgtaccttggaacaggcaatccagctggccgggctggccgtccaggctgactttggagactttgatcaatatgaatcacaggactttctgcaaaaatttgctttattccccgtggggtggctgcaggatgagaaggtgcttgaagaggctacccaaaaagtggcgctactgcatcagaaataccgaggactgaccgcacccgacgcggagatgctgtatatgcaggaagtagagagaatggacggctacggagaagagagttacccagctaaggactcacaggggagcgatattagtatcggtgcgtgtttggagggcatttttgttaagcataagaacggtcgacacccagtggttttccgatggcacgatatcgcaaatatgagtcataacaagagtttcttcgcgcttgaactcgccaacaaggaggagacaattcagtttcaaactgaagatatggagacagctaagtacatttggaggctatgtgtcgctaggcacaaattttaccgactgaaccagtgcaacctccagacacaaaccgtcaccgtgaaccccattcgacgcaggagctcttcgaggatgtctctgccaaagccacagccatacgttatgccccccccaccccagctgcactacaacggacactatacagaaccatatgccagtagccaggacaacctctttgtgccaaaccaaaatggctactactgtcactcccagacgagtctcgatagggcacagattgacctcaacggccgcatcagaaatggttccgtgtattctgcccattctaccaactcactgaataaccctcaaccttaccttcagccatcccccatgtcctctaaccccagtatcacaggttcagacgtgatgcggccggattacctgccttcccatcggcacagtgccgtaatccctccttcttacaggcctacccccgactacgaaaccgtcatgaagcagctaaatcggggcctcgtccatgccgagaggcagagtcatagcctacgcaatctcaatatcggttcttcatacgcttattcacggccagctgcgctggtctattctcaacctgagattagggaacacgcccagctcccatcccctgctgctgcgcactgccctttttcactgagctactcattccactcaccatccccatacccctaccccgccgaacgtcgcccagtcgtgggagccgtgtcggtcccagaactgaccaacgcacagctgcaggcccaggattaccctagccccaatatcatgcggactcaggtgtaccgtcctccaccaccctatccaccacccaggcccgccaattccacaccagatttgagtcgacacctttatatctcttctagtaaccccgacctgataacccggagagtgcaccactccgtccagacctttcaggaagactcactgcctgtggcgcactcccttcaggaggtatccgaaccactgacagctgcccggcacgcccagctccacaagcgcaactccatcgaagttgccggtctttcccatggattagagggactcagactgaaggagagaactctgtctgcatctgcagccgaggtggctccacgcgctgtttccgtcggaagccagccttctgtcttcacagagcggacccagcgggaaggccccgaagaggcagagggactcagatacggacacaagaagagtctctccgacgccactatgctcatccatagttcggaggaggaggaggacgaagactttgaagaagagagcggggcccgcgctccacccgctagggcacgtgagccccggcccggtttagcgcaagaccctcccgggtgcccccgggtgctgttggccgggcccctacacattcttgaaccgaaggcccatgtgcctgacgcagagaaaaggatgatggacagttccccagtacgtaccacagcagaggctcagaggccatggcgagatggattgcttatgccatccatgtccgagagcgacctgaccacctccggtcgctacagagcaagaagggattccctgaaaaaaagaccagtgtccgacttactcagcgggaagaagaatatagttgaaggcttgcccccactgggaggcatgaagaagacaagggtggatgccaaaaaaatcggccccctcaagctagcggctctgaatggcctgtccctcagtcgggttcctctgcccgacgaaggcaaggaggtggccactcgcgctactaacgatgagcggtgcaagatactcgaacaacggctggagcaaggaatggtgttcaccgagtatgagcgcattctgaaaaaaaggttggtcgatggtgagtgctcaaccgcccgccttcccgaaaacgcggaacgaaatcgatttcaggatgtgttgccgtatgatgatgtgcgggtcgagttggtgcccactaaggaaaacaatacgggctacatcaatgccagccacattaaggtgagtgtaagtggcatcgaatgggattatattgcaacacagggacccctacaaaatacgtgccaagatttttggcagatggtgtgggaacagggcatcgccatcattgccatggtcacagctgaggaggagggaggccgggagaaatctttcaggtactggccccggctcggctcccggcacaatacagtcacatacgggcgttttaaaattaccacaagattccgtacggactccgggtgctatgctacaacagggttaaagatgaagcatctcctgacaggacaggaacggaccgtctggcacctgcagtacaccgattggcctgaacacggctgtcccgaggacctgaaaggattcctgtcctatctcgaggaaatccagagtgtcagaagacatactaactcaacatccgatccacaatccccgaaccctcctctgctagtccattgctccgcaggggttggacgaacaggagtggtgattctcagtgaaattatgatcgcttgtttagagcacaatgaggtacttgacattccccgagttctggatatgctgcgtcagcagcgcatgatgctcgtgcaaacgctttgccagtatacctttgtgtatcgagtgctcattcagtttcttaaatctagcagactcatctag

SEQ ID NO: 23583 - DNA, 2235 bp, synthetic construct
  source 1..2235: mol_type = other DNA; note = Synthetic coding sequence
atggccgccgacaagcccgccgaccagggcgccgagaagcacgaggggactggacaatccagcgggattacagatcaggagaaggagctgtccaccaacgcattccaggcattcacatcaggaaactatgatgcctgtttacagcatctcgcctgtctgcaggatatcaacaaggacgattataaaatcatccttaacacagcagtggcggagttttttaaatccaaccagaccaccacagataacttgagacagacactgaaccagctgaagaaccaagtccactctgcggtcgaagaaatggatggtcttgacgacgtggagaactcgatgctctactataaccaggctgttatcctgtatcaccttcgtcagtacacagaggcaattagcgttggcgaaaaactgtaccagtttattgaacctttcgaggagaaattcgcacaggccgtgtgttttctgttggtcgatctctatatcctgacttatcaggctgagaaagcactgcatttattggcagtcctcgagaagatgattagccaagggaataataacaagaacgggaagaatgaaaccggaaataacaacaataaggacggctccaatcataaggccgagtccggcgctttaattgaggccgctaagagcaaaatccatcagtataaagtcagagcttatattcagatgaaaagcctgaaagcttgtaaacgtgagatcaagagcgtaatgaacacagccgggaattccgcgccatcgttgtttctgaagtccaattttgagtatctacgcgggaattatcgcaaggctgtgaagcttctgaactcatctaatatagctgagcaccccggcttcatgaagaccggggagtgccttcgatgcatgttctggaacaacctgggatgcatccattttgcgatgtccaagcacaacctgggaatcttctacttcaagaaagcgctgcaggaaaatgataatgtctgcgcccaactcagcgcaggctccaccgatcccggcaaaaaatttagtggtcgtcccatgtgtaccttactcaccaataagcgatatgagctcttgtataactgcggaatccagctcctgcacattggaagacctctggcagctttcgagtgtctcatcgaagcagtgcaggtctaccatgcgaacccgcggctgtggctgagactggccgaatgttgtatcgccgccaataagggaacttcagaacaggaaaccaagggccttccctccaagaagggcattgtgcagtctatcgtaggccaaggctaccatcgaaaaattgttctggcaagccaatccattcagaacaccgtgtacaacgacggacagagctctgctatacctgtggccagtatggaatttgcagctatctgtctgcgcaatgccctcttgctgctgccggaagagcagcaagaccctaagcaggaaaatggcgccaaaaatagcaaccaactcggagggaacaccgagagttctgagagtagcgaaacatgctcgagcaaaagtcatgatggagacaaatttattcccgcacccccatcctcacccctccgcaaacaggaacttgaaaacttaaaatgttccatcttggcatgctcagcgtacgtggcgctcgctctaggggacaatctgatggcccttaatcatgctgataaactcctccaacagccgaaacttagcggtagtctgaaatttctggggcatctctacgctgccgaagctctgatttccctggatcgcatttctgatgctatcactcacctgaatcctgaaaacgtgaccgacgtgagcctcggtatatcctctaacgagcaagaccaggggtccgataagggcgaaaatgaggcaatggagagttcaggcaagcgggccccgcagtgctatccctcttccgtcaattcggccagaactgtcatgctctttaatttggggtcagcctactgtttacgctcggaatacgacaaagcaaggaaatgcctacatcaggcggcctcaatgatccatcccaaggaagtcccacctgaagcgatcctgttagccgtgtatctggaattgcaaaacgggaacacacagctagctcttcagatcattaagcgaaatcaactactacctgctgtgaaaacccattcagaggtcagaaagaagcctgtcttccaaccagtgcatcctatacagccaatacagatgccggcctttaccaccgtgcaacgcaagtag

SEQ ID NO: 23584 - DNA, 363 bp, synthetic construct
  source 1..363: mol_type = other DNA; note = Synthetic coding sequence
atgcacccccccccccccgccgccgccatggacttcagccagaacagcctgtttggttacatggaggacttgcaggaactcacaattattgagcgcccggtgaggaggtccctcaagacacctgaggaaattgaacgcctgactgtggatgaagacctctccgacatcgagcgggccgtctacttgctgagtgcaggccaagacgtccagggaacttctgtgattgccaatcttccgttcttaatgcggcaaaacccaacggaaaccctgcggagggtgcttccgaaggtccgtgtccacgaagatgcgcatctattcattcagagagtttggatctcccatatgtttgtgcagagagtttag

SEQ ID NO: 23585 - DNA, 1335 bp, synthetic construct
  source 1..1335: mol_type = other DNA; note = Synthetic coding sequence
atgcgggagatcgtgctgacccagatcggccagtgcggcaaccagatcggagccaagttctgggaggtcatcagtgatgagcacgccattgactccgctggaacttaccacggggacagtcatttacaactcgaaaggataaacgtatactataatgaggcaagcggcggccgatacgtgccccgcgccgtgctcgtggatcttgaaccaggcactatggactcagttcggtctggcccttttggccaggtctttaggcctgacaacttcatttttggacagtgcggtgctggtaacaattgggccaagggtcattacaccgagggagccgagctaatggaatcagtgatggatgttgtccggaaggaggctgagtcttgcgactgcctccaagggttccagctcacgcactctttaggtgggggtaccggatctggtatggggaccttgctactcagtaagatccgcgaagagtatcctgatagaattatcaacacgttctccatcctgcccagccccaaagttagcgatacagtggtggagccatataacgcaacactttccgtgcaccagcttattgagaatgctgacgaaactttttgcatcgacaatgaagccctctacgatatctgtagcaaaactttaaagctgccgactccaacctatggcgacctgaatcatcttgtatctgccaccatgagtggggtcactacctgcctgagatttccaggacagcttaatgcagacctcaggaaattggccgttaacatggtacctttccctcggctccatttctttatgccaggctttgcaccgctgacgtcacgaggttcacagcagtaccgtgcccttaccgtagcagaactaacccagcaaatgtttgatgccaagaacatgatggccgcttgcgacccaaggcatggcaggtacctgactgctgcagcaatcttcagggggaggatgccgatgcgggaagttgacgaacaaatgttcaatattcaagacaaaaattctagttatttcgcagattggctgccaaacaatgtcaagacagccgtttgtgacatcccacccagaggtcttaaaatgtctgcaacctttatcggcaataatactgcgattcaagaactgtttaaacgggttagtgagcagtttacggccatgttcaggaggaaggcctttctgcattggtacactggggagggaatggacgaaatggagttcactgaggccgaaagtaatatgaatgatctggtttctgagtatcagcaatatcaggacgcaaccgctgaggaggaagaggacgaagaatacgccgaagaggaagtcgcatag

SEQ ID NO: 23586 - DNA, 915 bp, synthetic construct
  source 1..915: mol_type = other DNA; note = Synthetic coding sequence
atggccaagatcgagaagaacgcccccaccatggagaagaagcccgaattgtttaacattatggaagtggacggcgttccgacccttatcctgagtaaagagtggtgggaaaaagtttgcaatttccaggccaagcctgatgacttaattttggcgacttaccccaagagtggcacaacctggatgcatgagattctggatatgatcctaaacgacggggatgtggagaaatgcaaaagagcccagaccctggaccgtcacgccttcctcgagttaaagtttccgcacaaggagaagcctgacctggaattcgtcttagagatgtcaagcccgcagctcattaagactcacctgccctcacacctgatccccccttccatctggaaggagaactgcaaaatagtttatgtggcaaggaatcctaaggactgcctggtgtcatactaccactttcataggatggcatcctttatgcccgatccccagaacctggaggaattttacgagaagttcatgtctggcaaagtggttggagggtcctggtttgatcacgttaaagggtggtgggccgccaaagatatgcatcgaattctgtatctattctatgaggacatcaagaaagatccgaagagagaaattgagaaaattctcaaatttctcgagaaggatatcagcgaagaaattctgaacaagatcatttatcatacttcatttgatgtgatgaaacagaatcctatgaccaactacacgactctgcccacatctattatggatcattcaatttctcccttcatgcggaagggcatgcccggcgattggaagaactacttcaccgtcgcccagaacgaggagttcgataaagattaccagaagaagatggccgggagcactctgacattccgaacggaaatttag

SEQ ID NO: 23587 - DNA, 216 bp, synthetic construct
  source 1..216: mol_type = other DNA; note = Synthetic coding sequence
atgtgcggcagctactacggcaactactacggcacccccggctacggcttctgtgggtacggcgggctgggctatggttatggcggacttggatgtgggtacgggtcttgttgtggctgcggattccgccggctgggctgtggatatggctatggatcccgctcattgtgcgggtacggctacgggtgtggatctggttccgggtactactactag

SEQ ID NO: 23588 - DNA, 2094 bp, synthetic construct
  source 1..2094: mol_type = other DNA; note = Synthetic coding sequence
atggacaagaagagcaccgccgagaagctgggcaaggagctgggccttcaggccaaagagttatccgccgtgcattcttcccaccatgagattggcgtcaacgatagtaacctgttttctctagagatgagggaaccactggaatccagcaatacgaaaagcttccactccgcggtcgagatcaagaaccgctctcagcacgagctcccctgtttccagcaccacgggatagatacacctacatccctccagaaaaggtccgcctgttgcccgccctctctgttgcgcctcgaggagacggcttcctccagtcaggatggtgatccgcaaatctgggatgatttgccattctcagagtcactgaataagtttcttgcggttttggaatcggagattgcagttacccaggccgacgtgagctcgcggaagcatcatgttgacaacgatatcgataaatttcatgccgatcatagtcgtctgtctgttaccccacagaggaccacaggcgccctgcatacccctccaatcgcactccggagttcgcaagtaattgtgaaagcgaactgcagtaaggatgacttcctcttcaattgcaaaggcaacctgtccccaagcgtggagaaagaatctcaacccgataataaagtcgaagccgtttcagtgaaccacaacggtcgtgatatgagcgaatactttttgcctaacccatatttgtccgccctgtcttcttcttccaaggaccttgagacgattgtgacattgaaaaaaacaattaggatatcaccgcaccgcgagagtgaccatagcagccttaacaataaatacttgaacggctgcggagaaatctctgtcagcgaaatgaacgaaaaattgaccaccctgtgttacagaaagtataatgatgtgtctgacctgtgtaaactagagaataagcaatattgccgatggtccaagaaccaagacgactcttttacaatctgcaggaaactgacttatccactggagaccttgtgcaattcccccaatcggtcgactaacactctcaaagagatgccttggggtcatattaataataacgtcactcaaagctatagtattggctacgaaggatcatacgatgccagtgcggatttgtttgatgacattgcaaaagagatggatatagccacagagatcactaaaaaaagccaggacatcttgctgaagtggggtacgtccctagccgagtcccacccttccgagagcgattttagtcttagaagcctcagcgaagacttcattcaaccttctcagaagttgtcactgcagtcactcagtgatagccgccactcccgaacatgcagtccaacgccacacttccaatctgatagcgagtataacttcgaaaattctcaagacttcgtgccctgcagccagtcaacacctatttcgggctttcaccagacaaggatacacggcatcaatcgagcgtttaaaaagcccgtattctatagtgacttggatggcaattatgagaagattcggatctttccagaaaacgataagcagcaggctagccctagctgtcctaaaaacataaaaaccccttctcaaaagatcagatcacccatagtctccggcgtgtcacaacccgacgttttcaaccactaccccttcgctgagtgtcacgagaccgatagcgatgagtgggtgccacccactacacaaaaaatctttcctagcgacatgctgggtttccagggaataggccttggcaagtgcctggctgcctaccactttcccgaccaacaggagctcccccgtaaaaagttgaaacatattcggcaggggactaataagggactcatcaagaagaaactaaagaacatgcttgccgccgtagtgacaaaaaagaagactcacaagtacaactgtaaatcatccggctggatctccaaatgtcctgacattcaggtgctggccgctccacagctgcatcccattctcgggccagattcctgtagtgaggtgaaatgttgcctgccattttcagaaaaggggcctccatctgtttgtgagaccaggtctgcatggtctccagaactgttctcctag

SEQ ID NO: 23589 - DNA, 306 bp, synthetic construct
  source 1..306: mol_type = other DNA; note = Synthetic coding sequence
atgagcaacacccaggccgagcggagcatcatcggcatgatcgacatgtttcataaatatacgggccgcgacggtaagattgagaaaccgtcattgctgactatgatgaaggagaactttcccaactttctgagcgcctgcgacaaaaaagggatccattatctagcaaccgtatttgagaagaaggataaaaacgaagacaaaaagatcgacttcagcgaatttttgtccctgctgggggacatcgccgccgattaccacaaacagagccacggtgctgccccatgtagcggtggcagtcagtag

SEQ ID NO: 23590 - DNA, 678 bp, synthetic construct
  source 1..678: mol_type = other DNA; note = Synthetic coding sequence
atggccgtgcggagcctgtgggccggccggctgcgggtgcagcggctgctcgcatggtctgcagcttgggagtcaaagggatggccactcccattttccacggccacacaaaggactgccggcgaagactgcaggtccgaggaccctcccgacgagctaggccctcctttagccgagagggccctgcgggttaaggccgtcaagctggagaaagaagttcaggacctgaccgtgaggtatcagagagccatcgccgactgtgaaaatatcagaagacgtacacagcgatgtgtggaggacgccaagattttcgggatccagtccttttgcaaggatttggttgaggtggccgacattctggagaagacaactgagtgcatctccgaggaatctgagccagaagatcagaagctaaccttagagaaggtgtttcgtggtctgttactccttgaagcgaagctcaagtccgtgttcgccaaacatggactcgagaaattgacccccataggggataagtacgaccctcacgagcacgaactgatctgtcacgtgcctgctggcgtgggcgtgcagcctggcacagtggcactagttagacaagacgggtacaagctccacggccggactattcggctcgccagagtcgaggtcgccgtcgagtcccaacgaaggctttag

SEQ ID NO: 23591 - DNA, 1203 bp, synthetic construct
  source 1..1203: mol_type = other DNA; note = Synthetic coding sequence
atgaccaccaagaacctggagaccaaggtgaccgtgaccagcagccccattcgaggcgccggcgacggtatggagaccgaggagccacccaagtcagtggaggtgacttcgggtgtgcaatccagaaaacatcatagtttgcaaagtccctggaagaaagccgtgccgtctgagtcccccggagtcctccagctgggtaagatgctgacagagaaggcaatggaagtcaaggcagtgcggatcttggtgcctaaggctgctatcacccacgatatccccaataagaacaccaaagtgaaatcccttggccaccacaagggggaattcctaggacagtccgagggggtaattgagcctaacaaagagttgtcagaggtgaagaacgtgctggagaagcttaagaatagcgagagacggcttctccaggacaaggaggggctgtctaaccaactccgcgtccagacagaagtaaatagagaactgaagaaactcctggtggcctctgttggggacgatctccaataccatttcgaacggctggctcgggagaagaatcagcttattctagagaacgaagctctgggcaggaataccgcccaactctccgaacaactagagcggatgtccatccagtgcgacgtctggcgcagcaaatttttggccagccgagttatggcagatgagctgaccaactcacgagcagcgctgcaacggcagaaccgcgacgcacacggagctattcaggacctgctgagcgagagagagcagttcagacaggagatgattgcgacccagaagctcctagaagaactgttggtgtccctgcaatggggtcgggaacagacctactccccgtcagtgcagccccatagcaccgcagagcttgcactcaccaaccataagctagccaaagccgtcaacagccatctcctggggaacgttggaataaacaaccagaagaagattccaagcacagtggagttctgtagcaccccagcagagaaaatggctgaaacggtgctcaggatcctcgacccagttacttgcaaggaaagtagcccagacaaccctttcttcgagagctcccccacaacacttctggctaccaagaagaacatcggacgcttccatccctatacgaggtacgaaaatatcaccttcaactgttgtaatcactgtaggggagagttaatcgccttatag

SEQ ID NO: 23592 - DNA, 735 bp, synthetic construct
  source 1..735: mol_type = other DNA; note = Synthetic coding sequence
atggaccccggcgccgccctgcagcggcgggccggcggcggcggcggactgggcgccggttcgccagccctgagcggcggacaggggcggcgtagaaagcagcccccacggccggctgacttcaagttgcaggttataatcattggcagccgcggtgtaggaaagacttcattgatggaacgcttcaccgacgacaccttttgtgaagcttgtaagtccactgtgggggtagacttcaaaatcaaaacagtggagctgagggggaagaagattcggctgcagatatgggacaccgctggccaggaaagatttaacagtatcacatccgcctactaccggtcagcaaagggtattattctcgtgtacgacatcacaaagaaagaaacgttcgacgatctgcctaaatggatgaaaatgatcgataagtacgccagcgaagacgcggaactcttgttggtagggaacaagctcgactgtgaaacggacagagaaattacaagacagcagggagagaagttcgcacagcagataaccgggatgagattttgcgaagcctcggcaaaagataatttcaatgtggatgagatatttcttaagctggttgatgacatcctgaagaagatgccactggatatcctgcgcaatgaactcagtaattccatactgtctctgcaacctgagccagagatccctccagaattgcctccccctcggccccacgtgcggtgttgctag

SEQ ID NO: 23593 - DNA, 1158 bp, synthetic construct
  source 1..1158: mol_type = other DNA; note = Synthetic coding sequence
atggccctgccccacgacagcaacgagaccagctacctgctgccccccaataacgaggattggggcaggcagactatacctgactttgtatacggacagaaagaccttatggccgagggaatccagtggcctaggaacgctccaggtatacccgatgcactgcctcaaagcccgttcgacgcagcactgtgtagtgcatggaaacaaagagtggagttaggtctgttccgatataggctacgcgagctgcagacacagatccttccaggggcagtaggttttgtcgcacagctcaacgttgaacgcggagtgcagagacgcccgccccagactatcaaaagtgtcagacaagccttcgaccctgttcagtttaattttaataaaattagaccaggcgaggttctctttcgattacatcgcgagcccgatttaccgggtacattactccaggaggatatcctggtcgtcattaatgtgtcacctctagaatgggggcatgtgttactcgtcccagaaccagcgcggcagctgcctcagcgcctgctccccggtgctttgcgggcggggattgaggctgtactcctgtctctgcatcccgggtttagagtggggtttaactctcttggcggcctggcctccgtgaatcacctgcacttacacgggtactatctggcccaccgacttcccgtggagcaggcaccctccgagcccctcgatccaggcggccacctgcacctgctgcaagatttgccggctcccgggttcctgttctatacgagaggcccggggcctgacctggagagccttattagtcgcgtgtgtagggcaacagactatttaactgaccacgaaatagcacataatcttttcgtcacaagaggggctcctccaggaaaaaccagcccatcaagtgccctgaccggagtgagagtaattctctgggcccgcaaaagtagcttcggcatcaaagacggtgaggcattcaatgtggctctatgcgagctggcaggccatttgcccgtaaagacttcccaagacttttcttcccttacagaggcagccgccgtagctctgatacaggactgccggttgcccccttcgcaggccgaagatgtccaagccgccctggtggcactgatgtcacaagaggaacagtag

SEQ ID NO: 23594 - DNA, 192 bp, synthetic construct
  source 1..192: mol_type = other DNA; note = Synthetic coding sequence
atgctgtgcgacaacttccccggcgccgtgttccccggctgctactggggctcatacggttaccctcttgggtactccgtggggtgtggatacggcagtacgtactcacctgttggctacggcttcggttacggctacaatgggtgcggcgcattcggctatcgcaggtacagcccattcgccctgtattag

SEQ ID NO: 23595 - DNA, 1083 bp, synthetic construct
  source 1..1083: mol_type = other DNA; note = Synthetic coding sequence
atgctgggcagcggcttcaaggccgagcggctgcgggtgaacctgagactggtgattaataggcttaagttgcttgaaaaaaaaaagacggagttggcgcagaaggcaagaaaagagatagccgattacctcgccgccggaaaggatgaacgcgccaggatacgggtggagcacataatcagggaagattatcttgtcgaggccatggaaattctggagttgtactgcgatctgctcttggccagattcggcttaatccaaagcatgaaggaactcgactccggcttggcagaatctgtgagcacgctgatctgggcggcaccaagactgcagagtgaggtggccgaacttaaaatagtggcagatcagttgtgcgcaaagtatagcaaggagtacggcaagctctgccgaacaaatcagattggaacggtgaatgaccggctgatgcataaattgagtgttgaagcaccgccgaagatcctggtcgagcgttacctcattgaaattgctaagaattataacgtcccttacgaacccgattctgtagtgatggctgaagcgcctcccggagtcgaaaccgaccttattgatgtcggcttcacagacgacgtgaaaaaaggtggaccggggagaggcggcagtggaggctttactgcccccgtgggaggtccagacggaacagttcctatgcccatgcctatgcctatgccaatgcctagcgccaatacaccgttctcatatccgctcccaaaaggtccgtccgatttcaatggactccccatgggaacatatcaagctttcccgaatatccatccaccccagatacccgcaactccaccctcctatgagagcatgacgcttatgctaataagaatcagtctgctgcatagactgcttgtactcgatccgtcccaaaaacccttgcagagctttctccccgatctgcaaattacaatgactactttgagttaccagtcttgccacctctgtcagacccactatcagctgcacttgctggtcccagcccctcagcatttgaaaactcttaccctgatgatctttcccgggggactcaaaagctag

SEQ ID NO: 23596 - DNA, 528 bp, synthetic construct
  source 1..528: mol_type = other DNA; note = Synthetic coding sequence
atgcccaagcggagctgccccttcgccgacgtggcccccctgcagctgaaagtacgggtgagtcagagggaactgtccaggggcgtgtgcgctgaaaggtattcccaagaagtgtttgagaaaacgaaaaggctgctctttctgggcgcccaggcctacctggatcatgtctgggacgaagggtgcgcggtagtgcatctgcctgaaagccccaaaccaggtcctacgggagctccccgcgccgctcgtggccagatgctgataggccccgacggtcgtttaatccggagcctgggccaagcctcagaggcggatccctcaggagtcgccagcatcgcctgctcgtcttgcgtgcgtgctgtcgacggcaaagccgtctgcgggcagtgcgaacgggcactttgcggccagtgcgtgcgaacctgctggggttgtgggtcagttgcttgtactctatgcggcctggtggactgctctgatatgtatgaaaaagtgctctgcacaagctgcgcgatgttcgagacgtag

SEQ ID NO: 23597 - DNA, 366 bp, synthetic construct
  source 1..366: mol_type = other DNA; note = Synthetic coding sequence
atggaggccgaggtggacaagctggagctgatgttccagaaggccgaatcagacctagattatatccaatataggctggagtacgaaattaagacgaatcatccggactccgcaagcgaaaagaaccccgttactcttctaaaagagttgagtgttatcaaaagcaggtaccagaccctgtacgctcgattcaagccagtagccgtcgagcagaaggaatctaaaagtcgcatctgtgccacagtgaagaagaccatgaatatgatccagaagctgcaaaaacagacagacctcgagctgagccccttaaccaaggaggagaaaacagccgccgagcagtttaagtttcacatgccagacctctag

SEQ ID NO: 23598 - DNA, 1968 bp, synthetic construct
  source 1..1968: mol_type = other DNA; note = Synthetic coding sequence
atggtgaccaccctgggccccaagatggccgccgagtggggcggcggtgttgggtattccgggtctggacccggccgaagccggtggcgctggagcggaagtgtgtgggtcaggtctgtgttgctcttgctcggcggactaagggcttccgccacttccacacctgtctcccttggaagttctcccccttgccgacatcatgtaccctcggacacagaagtaatcaataaggtgcacctcaaggcaaatcacgttgttaagcgagacgtcgacgaacacctgagaatcaaaaccgtgtacgacaagagtgtggaagaactccttcccgaaaaaaaaaacctggtgaaaaacaagctttttccacaagcaatcagctacttagagaagacgtttcaggttcggagacctgctgggaccatcttacttagtagacagtgtgctacaaatcaatatctccggaaggaaaacgatccacatcgctattgcaccggcgagtgcgcggcccacacgaaatgcggacctgtgatcgtacccgaagaacacctgcagcaatgtagagtgtatagaggaggcaagtggccccatggtgcagtaggagtccccgaccaggaaggcatctccgatgccgattttgttctgtacgtgggggccctggccacagagcggtgcagccacgagaacataatctcctatgctgcctactgccagcaggaagcaaacatggaccggcccatcgccgggtatgccaacctgtgtccaaatatgatcagtacccagccccaagaattcgtcggcatgctctccaccgtgaaacacgaggttattcatgctcttggattttcggctggactttttgccttttatcacgacaaggatggtaacccccttacaagccggtttgccgatggcctccctccatttaactactcacttgggctctatcagtggtctgacaaggttgtgagaaaagttgagagactgtgggatgtgagagacaataaaatcgtgcgacatacagtttatctgttagtgactcccagggtagttgaggaagcgcggaagcactttgactgtcccgtgcttgagggaatggagctggaaaaccagggcggggtcggtaccgagctcaaccattgggagaaaaggctcctcgagaatgaagcgatgacaggctcccacacgcagaacagggttctcagccgaatcactctagcgttgatggaggacacagggagacagatgctgagcccctactgcgacactctgcgctccaatcctcttcagctgacctgcaggcaggaccagcgggctgtggctgtctgcaatttgcagaaatttcccaaaccactgcctcaggagtatcaatactttgatgaactctccggcattcctgcagaggacctgccttactatggcggcagtgttgaaatcgctgattattgccccttttcacaggaattcagttggcatctcagtggcgagtaccaacggtcaagcgactgtcgcatcttggagaaccagccagagatcttcaaaaactatggggccgagaaatatggcccccactccgtctgcctcatccagaaatctgccttcgtcatggagaaatgcgaacggaagctttcttaccccgactgggggtcaggatgctatcaggtctcatgttctccccaaggccttaaagtctgggtgcaggatacatcctatctttgctcaagggcaggccaggttctgcccgtctccatccagatgaacgggtggatccatgacgggaatctgctttgtccctcttgttgggacttttgtgagctttgcccacctgagaccgacccccccgcaacaaacctcacacgagccctgcctctggacctctgttcttgcagttcatccctcgtggtgacgctttggcttttgctcggcaacctctttccactgttggcaggttttttgctgtgcatctggcactag

SEQ ID NO: 23599 - DNA, 408 bp, synthetic construct
  source 1..408: mol_type = other DNA; note = Synthetic coding sequence
atgggccgggtgcggaccaagaccgtgaagaaggccgcccgggtgatcattgagaagtactatacaaggctaggcaacgacttccacaccaacaaaagggtgtgtgaggaaatagccattattccctccaagaaactgaggaataaaattgccggctacgtaactcatctgatgaaacggattcagcgcggaccggtgagggggatcagcattaagttacaggaggaggagcgagagcgccgtgacaactacgtgccggaggtgagtgccctcgaccaggaaattattgaagtcgatcctgacaccaaggagatgctgaaactattagacttcggcagcctaagtaatctccaggtgactcagcccactgtgggaatgaatttcaaaacgccaagggggcctgtctag

SEQ ID NO: 23600 - DNA, 1119 bp, synthetic construct
  source 1..1119: mol_type = other DNA; note = Synthetic coding sequence
atgaaccactgccagctgcccgtggtgatcgacaacggcagcggcatgatcaaggcaggtgttgcaggatgtagggaacctcagttcatctatcccaatattataggcagggccaagggccaatctagggctgctcaaggcgggctggaactgtgtgtaggggaccaggcccaggactggcgaagttccctgttcatctcttaccctgtcgaacggggcctcatcaccagctgggaagatatggagataatgtggaaacatatctacgattataatttgaagctaaaaccctgtgacggtcctgtattgataacagagccagcactgaatccactggctaacagacaacagattactgagatgttcttcgaacacttgggtgtgcccgccttttatatgtcaattcaggcagttctggcgttgttcgccgcaggtttcaccacaggactggtgttgaatagcggcgcaggcgtaacgcagagcgtgcccatttttgaggggtactgcctgcctcacggtgttcagcagctggacctcgctggactggatcttaccaattatttgatggtgttaatgaaaaatcacggcataatgctactctccgccagcgatcggaagatcgtggaggacatcaaggaatccttttgctacgttgccatgaattatgaggaagagatggcaaagaagccggattgtctggagaaggtgtaccaattgccagatgggaaagtcatccaattgcatgaccagctcttttcctgcccggaggcccttttcagcccatgccacatgaaccttgaggcacctggcattgataagatctgcttctcaagcatcatgaaatgcgataccggcctgcgcaattcctttttttccaatatcatcctcgctgggggctcaacctctttcccggggttagacaaacgtttagttaaggacatcgctaaggtcgcccccgccaatacagctgtacaggtgatcgccccccctgaaagaaagatttctgtgtggatgggagggagtattctggctagcctatcagcttttcaggacatgtggatcacagcggccgaatttaaggaagtcggccccaatatcgtccatcagagatgtttttag

SEQ ID NO: 23601 - DNA, 3072 bp, synthetic construct
  source 1..3072: mol_type = other DNA; note = Synthetic coding sequence
atggacgccaacagcaaggacaagccccccgagaccaaggagagcgcaatgaacaacgccggcaacgctagcttcattctgggcaccggaaagatcgtgactccccagaagcacgctgaactgccacccaatccatgcacgcccgataccttcaaatctcccttgaatttttctacagtgaccgtggagcagctgggaattacccccgaatcatttgtacgcaattctgcgggaaagtcctcttcctatctgaaaaaatgcagacggaggtctgccgtcggagcacggggatcgcccgaaactaatcaccttatcaggtttattgccagacagcagaacatcaagaatgctcgtaagtcccctttggcccaggattctccatcgcaggggtcccccgccctctaccgcaatgtgaacaccctgagggagagaatttcagcctttcagtccgcctttcactccatcaaggagaatgagaagatgacaggatgcctggagttttccgaggcgggaaaggaatccgagatgactgacctgacgaggaaagagggcttgtctgcatgtcagcagtccggtttccccgctgtactcagcagtaaacgccgaagaatctcttaccagcgagactcagacgagaatctgacagacgcggagggcaaagtcatagggctgcagatttttaatattgataccgaccgggcctgtgctgtcgagacgtcagtcgatctctctgaaatttctagcaagctcggttccacccagagcgggtttctagtagaagaatcactccctctcagtgaactgaccgagaccagcaacgccctgaaggtggcagactgcgttgtcggtaagggaagcagcgatgctgtttcccccgatacctttacagcggaggtgtcttcagacgctgtccccgacgtccggtcacccgctacaccagcttgcaggagggacctccctacccccaagacattcgttctgagatcagtgctgaagaagccttcagtgaagatgtgtctggagagcttacaggagcactgtaataacctgtacgacgatgatggtacccatccgtctctgattagtaacctgcccaattgctgtaaagaaaaggaggccgaggatgaggagaacttcgaagcacctgcattcctcaatatgcggaaacgcaagagggtcacttttggtgaggacctgtcccccgaagtatttgacgaatccttgcccgcaaataccccacttaggaaaggagggactccagtctgtaaaaaagacttttccggcctgtccagcctcctgttggaacagtctccagttcctgagcctctacctcaacccgatttcgatgacaagggcgagaatcttgagaatatcgagccccttcaagtgagttttgctgtgctctcgtcgcctaataagagctccattagcgaaacactcagtgggaccgacacatttagctcgagcaataatcacgaaaagattagctcacccaaggtaggcaggattactagaacatccaatcggcgaaaccagctggtcagcgtagtcgaagaaagcgtgtgtaacttgctgaataccgaagtccagccgtgtaaggaaaaaaagattaacagacggaagagccaggaaaccaagtgtaccaaaagagcactaccgaaaaaatctcaggttttgaagagttgccgcaagaagaaaggcaagggcaagaagtcagtgcagaagagcctatacggagagcgagacattgcgtcaaagaagcccctgctctcacctattcctgagctgcctgaggtgcccgagatgaccccctccattccctcaatccgaaggctgggctccggctacttttcaagcaacgggaaactcgaggaagttaagactcctaaaaatcctgtcaaaagaaaggacctgttgcgccatgaccccgacctccacatgcaccagggatacgataagtacgatgtctctgagttctgtagctacattaaatcgagctccagcctcggcaacgccacttccgacgaggatcctaacaccaatatcatgaatatcaacgagaataagaacatcccgaaggctaagaataagtccgagtctgaaaacgaaccaaaggccggtacagacagccccgtctcatgtgccagcgtcactgaagagagggtcgcaagcgactcacccaaaccagccctgaccctgcagcagggacaagaattctctgccggaggccagaacgccgagaacttgtgtcagtttttcaaaatctcacccgatctgaatatcaagtgcgagcgcaaagacgactttttaggtgccgctgaagggaaactccagtgcaatcggctgatgcctaattctcagaaagattgtcattgcctgggagatgtactgattgaaaacacaaaagagtccaagtcgcagtcagaggatttgggacgcaagccaatggagtcatccagtgttgtgtcgtgccgcgatagaaaggaccgacgccggtccatgtgctattcagacggacgctcactgcatctcgagaagaacggtaaccacacacctagctccagcgtaggaagcagcgtcgagatttccctggagaactccgaactcttcaaggatctgagtgacgctattgagcagacatttcagaggcgaaattccgaaacgaaagtccgcaggtctaccaggctccagaaagacctcgagaatgagggcctcgtttggatctccctcccactgccctccaccagtcagaaggcaaagcgtcgaactatctgcactttcgactcatctgggtttgaaagcatgtctcctatcaaagaaaccgtgtcctccagacagaaaccgcaaatggcccccccagtgtccgaccccgagaacagtcaggggcccgccgccggtagttccgacgaacccgggaagcgtagaaaaagcttctgcatttctacacttgcaaatactaaggctaccagtcagtttaagggctaccgacgcagatccagcctgaatgggaaaggcgagtcctctctgaccgctctggagcgaatcgaacacaatggagaacgaaaacagtag

SEQ ID NO: 23602 - DNA, 963 bp, synthetic construct
  source 1..963: mol_type = other DNA; note = Synthetic coding sequence
atgagcaagagcgagagccccaaggagcccgagcagctgcggaagttgttcattgggggactgtcgttcgagacaaccgatgaatcattgaggtcacattttgaacagtgggggactctgaccgattgtgtcgtcatgagagatcctaatacaaagcggagcaggggttttgggttcgtaacttacgccaccgtggaagaagtggacgccgcaatgaacgcaagacctcacaaggtagatggtcgcgttgtcgaaccaaagcgcgcggtctcaagggaggactctcagaggcccggcgcgcatctaaccgtgaagaagatctttgtgggcggcataaaggaggataccgaggagcatcatctccgggactactttgaacagtacggcaaaattgaggtcatcgagattatgacagataggggctcaggtaagaaacggggctttgccttcgtgacatttgacgatcacgatagcgtagacaaaatcgtcatacagaagtaccataccgtgaacggccataactgcgaagtgcggaaggctttatcgaaacaagaaatggcctccgccagtagttcccaacgcgggcgcagcggatctggaaatttcggagggggacggggcggaggattcggggggaatgacaatttcggacgcggaggcaacttctctgggaggggggggttcggaggaagtaggggggggggaggatatggagggagcggggatgggtataatgggttcggtaacgatggcaataactttggcggcgggggctcctacaatgatttcggcaactataataatcagagctcgaacttcggcccaatgaagggcggcaattttggaggcaggtcttcaggtccttacggcggtggaggccagtacttcgccaaaccacgtaatcagggcgggtatggaggaagcagcagctcttcctcatacgggtctggcagacgcttctag

SEQ ID NO: 23603 - DNA, 141 bp, synthetic construct
  source 1..141: mol_type = other DNA; note = Synthetic coding sequence
atgtgcagcctggccagcggcgccaccggctacagccacctgctgaagaaacactttcatacagtctccttgtctatcagcttgatactgactgcttggttcattaacatggacttgaattttatggatacactaagttag

SEQ ID NO: 23604 - DNA, 198 bp, synthetic construct
  source 1..198: mol_type = other DNA; note = Synthetic coding sequence
atgtgctactacagcaactactacggcggcctgcggtacggctacggagtgctaggcggcggatacggctgtgggtgcgggtacgggcatggttacggcggcctggggtgtgggtacgggaggggctatggcggatacggctacggttgctgtagaccgtcctgctacggcaggtactggtcctgtgggttttattag

SEQ ID NO: 23605 - DNA, 7059 bp, synthetic construct
  source 1..7059: mol_type = other DNA; note = Synthetic coding sequence
atggagaaggccaccgtgcccgtggccgccgccaccgccgccgagggggagggttcaccaccagccgtggcggccgtggccggccctccagccgctgccgaggtaggtggcggggtgggcggaagctcccgggcccgttcggcctctagcccgaggggcatggtacgcgtttgtgacctccttctcaagaaaaaacccccccagcagcaacaccataaggcaaagcggaataggacatgtcgcccccctagttcatccgaatctagctccgattccgataatagtggcggcggaggaggagggggaggaggcggtggcggcggaggcggaactagcagcaacaactctgaggaagaagaggatgacgacgatgaggaagaagaggttagcgaagtggagagttttatcctggaccaggatgacttggagaaccccatgttagaaacagcttccaaactgctactgagtggaactgccgacggcgcagacctgagaacagtcgatcctgagacccaggcccgtctggaagccttacttgaagcggccgggattggcaagctgtctactgctgatggcaaagcttttgcagatcccgaagtgttgcggcgactgacttcctccgttagctgtgccctggatgaggctgccgccgcactgacccgcatgcgagcagaatccacagccaatgctgggcagtctgataacaggagcttagctgaggcatgttctgagggggacgtcaacgctgtcaggaagttattgattgagggacgatccgtgaatgagcacacagaagaaggagaaagcttgctgtgcttagcatgcagcgctggctactatgaattggctcaggtgctgctagctatgcatgcaaatgtggaggatcgtgggattaaaggagatattaccccactcatggcagccgctaacggaggacacgttaaaattgtgaaacttctgctggcccataaagccgacgtgaatgctcagtcttcgactggcaacaccgccttgacctatgcttgtgccggaggttacgtagacgtcgtgaaagtactgctggaatcaggcgcctctatagaagaccacaacgagaacgggcatacccctctcatggaagccggttcagctggacacgtggaagttgctcgcctattactcgaaaacggcgctggcatcaatactcacagcaatgagtttaaagagagtgccctcaccttggcttgctacaagggccatcttgagatggtccgcttccttcttgaggcgggggccgatcaagagcacaaaactgacgagatgcataccgccctgatggaagcttgcatggatggccacgtcgaagtggcccgattactgttggacagcggggctcaagtgaatatgcctgctgacagttttgagtcccctttgacacttgcagcctgtggcggccacgtggagttagccgccttgttaattgagcgcggtgcctctctagaggaggtcaacgatgaggggtatacaccgctgatggaggctgcgagggagggccacgaagagatggtcgctttactgctgggccagggtgccaacatcaacgctcagaccgaggagacacaggagactgctctcacgctggcctgctgtggggggtttctagaagtcgcggactttctaattaaagctggggccgacatagagctgggctgctccacccccctaatggaagcggcacaggagggacacctcgaactggttaaatacctactggctgccggggccaacgtgcatgccacaaccgctaccggcgacactgccctgacgtacgcttgtgagaatggccacaccgacgtagccgatgtgttgctacaggccggggcagacctcgagcacgagtctgaaggcggcagaacacctctgatgaaagctgcccgcgccggtcatgtctgtacagtccagttccttatatcgaagggggcaaatgtgaatcgcactaccgccaataacgaccacaccgtgctgagtctggcctgtgctggtggacatctcgcagttgtggaactgttacttgctcatggcgcagaccccactcaccgcctgaaggacggcagtacaatgcttattgaagccgcaaaaggcggccatacttctgtcgtatgttatcttctcgattatcctaataacttgctgtccgctcccccacctgacgtcacgcaactcactccaccctcacacgatctgaatcgggcccccagggtccctgtccaggctcttcccatggtggtgccgccccaggagcccgataaaccaccggccaacgttgcgacgaccctaccgattagaaacaaagcggtgtcgggcagagcttcagctatgtcaaacacccctactcacagcattgcagcatccatttcacagccccagactcctactccatctcctatcatctccccctctgctatgctgccaatttacccagcaatagatatcgatgcacagaccgagtccaatcacgacaccgctctcaccctggcatgtgccggtggacatgaggaactggtgcagaccctactggagcgcggagcatccattgagcacagggacaagaaaggcttcacccccctgatattagccgcaactgccggacacgttggtgtggttgaaatcctgctggacaacggcgccgacattgaagcgcagagcgagcggactaaggacacccccctctctctcgcatgcagtggaggaaggcaggaagtggtggaactcctgctagcccgcggcgccaacaaggaacataggaacgtgtccgattatacacccctgagtctggctgcctccggcggatatgtgaacataattaagatattattaaatgcgggcgcagagatcaatagcagaactggctccaagctcggaatatcacctctgatgttagctgctatgaatgggcacaccgcggcggtgaagctcctgctcgatatgggttcagacataaacgcccaaattgaaacgaaccgaaacactgccctaacactggcctgttttcagggtcgcacagaggtggtctccctgctgctggatcggaaggcgaatgttgagcaccgcgcgaagaccggactgacccccctgatggaagcggcgtctggagggtatgccgaggtgggcagggttctgctcgataagggagctgatgtcaacgcccctcctgtgccaagtagcagagacaccgcccttaccatcgccgccgataaagggcactataagttctgtgaactactgattgggagaggagcccacattgacgttaggaacaagaagggcaatacccccctttggctcgctgctaacgggggccatttggatgttgtgcaactccttgtgcaagccggggccgatgtggatgctgcagataatcgcaagatcacgcctttgatggctgcttttaggaaaggccatgtcaaagtggtcaggtacctggttaaggaagtcaatcagtttccttcagactccgagtgtatgcgctacattgcaaccatcactgataaagaaatgctcaagaaatgccacctgtgcatggagagcattgtgcaggccaaagacaggcaggccgccgaagctaataagaatgcgagcatcctgctcgaggagctcgatctggaaaaactccgcgaggagtctcgacgcctggcattagccgctaaaagagagaagcgcaaggagaagcggaggaaaaaaaaggaggagcaaaggaggaaacttgaggagattgaagccaagaataaggaaaacttcgagttgcaggccgctcaggagaaggaaaagcttaaagtagaggatgagcctgaagttctgacggaacccccttccgccacaactacgacaacaatcggtatctcagcaacctggacaactctggcggggagtcacggaaagcgcaacaatacgataaccacaacatcatcaaaacgcaagaatcgaaaaaataaaattacacctgaaaacgtacagattatattcgacgatccattgccaattagctactcccagccagagaaggtgaatggtgaatccaaatcgagttccactagcgaatcaggtgattctgataacatgagaatcagttcctgctctgacgagtcgtccaactcaaacagtagtaggaagtccgacaaccattcacccgccgttgtgaccactacggttagctccaagaaacagccaagcgtccttgtcactttccccaaggaggagcggaaatccgtgtcaggtaaggcatccattaagttgagcgaaacaatttccgaggggacctctaattcactgtcaacgtgtaccaagtccggcccctcccctctgtccagcccaaacggcaaacttacggtcgcctcaccaaagagagggcagaagagagaagagggctggaaggaagttgtccgacgaagcaaaaaggtgagtgtacctagcacggtcatcagcagagtgattggccggggtggctgcaacataaatgcaatcagggagttcaccggtgctcatattgacatcgacaagcagaaagacaaaaccggcgatcgaattatcactattcgaggcggaaccgagtccacccgccaggcaacccaactgataaacgctctaattaaggatcctgacaaggaaatcgatgaactgattccaaaaaaccggctgaagtcttcaagcgcaaatagcaaaatcgggtcatcagctcccaccacgactgccgcgaacaccagtctcatgggaatcaaaatgaccacagtggcattgtcctctacttcacagactgcaacagccctaactgtgcctgccatcagctctgcatccactcataagacgatcaaaaacccagtaaataacgttcgccctggctttcccgtcagtctgcccttagcgtaccctccccctcagttcgctcacgcactgctggctgcgcagacgtttcagcagatcagaccaccacgattaccgatgactcactttggtggcacatttccgccagcgcagtcgacttggggaccctttcctgtgcggcctttatcccctgcccgagctactaacagccctaagcctcacatggtgccaaggcacagcaatcagaatagctcaggctcccaagttaactctgccggttccttgacatccagccctacgacaacaaccagctcttctgctagtactgtccccggaacttctacaaacgggtctccctctagtccttcagtgcggagacagttgtttgtgaccgtcgtgaagacgagcaatgccaccactacaactgtgacaacgaccgcatccaacaacaataccgcaccgaccaatgccacatatccaatgcccaccgctaaagagcactacccagtttcttccccgtcttcaccctccccaccggctcaaccaggaggggtctcgcgtaattccccactggactgcggcagtgcatcccccaataaggtagcaagcagcagcgaacaggaagcaggctctccaccagttgtagagacaacgaacaccaggcctcctaacagcagtagttcctcggggagttccagtgctcacagtaaccagcagcagccaccaggatctgtgagtcaggagccaaggcccccgctgcagcagtctcaggttcctcccccggaagttcgtatgacagtgccacccctcgccacttcctccgctccagtcgcggtccctagtacagctcctgtgacatacccaatgcctcagacacccatgggctgcccccagcctacacccaaaatggagacacccgctatcagacccccaccgcacgggacaactgccccacacaagaatagcgcttcggttcaaaactcgagtgtagctgttctgagcgtgaaccatatcaagagacctcacagcgtcccctcaagcgtgcagctccctagcacattgtcaacacagtcagcctgccaaaatagtgtccatcctgcaaataagcctatcgcaccaaacttttccgctcctttgccatttggcccattctccaccctgtttgagaactctcctacgagtgcccatgctttttggggcggctccgtagtgagctctcagtccacccctgagtcaatgttgagcggaaagtcatcatacctgcctaactcggatccgctacaccagtcagacacctctaaggcgcctggttttcgccctcccttgcaacgacctgcgccatccccctctggtatagtgaatatggattccccctatgggtcagttaccccctcctccactcacttagggaatttcgctagtaatatctccggcggccagatgtacggacccggggcccccctggggggcgcgcccgccgccgcaaactttaataggcagcatttttctcccctgtctttgttgactccatgcagttccgccagtaatgattcgagtgcccagtctgtcagctctggcgtgagagctcctagtcctgctccctcttctgtgccactggggtccgagaagcctagtaatgtgagccaggacagaaaggtgcctgtgccgataggcacagagcgatctgcccgcataaggcagacaggaacatcagcgccttccgttatcggttcaaacctgagcacctcagttgggcacagtgggatctggagctttgagggaattggtggcaaccaggacaaggtggattggtgtaatccagggatgggcaaccctatgatccatcgacctatgtccgaccccggcgttttctcccagcatcaggccatggagagagatagcactggtatagtgactccctcagggacctttcaccagcacgtgcctgccgggtacatggactttccaaaggtcggaggcatgcccttctcggtatacggcaatgcaatgattcccccggtcgcccccatacccgacggcgcagggggtccgatcttcaatggcccccatgcggccgacccttcatggaactcactcattaaaatggtatcctcctcgactgagaataatggacctcagaccgtgtggacggggccatgggccccgcatatgaattcggtgcacatgaaccagctgggatag

SEQ ID NO: 23606 - DNA, 1374 bp, synthetic construct
  source 1..1374: mol_type = other DNA; note = Synthetic coding sequence
atgagcggcacccgggccagcaacgaccggccccccggcgccggcggagtgaagagaggcaggctgcaacaggaggcagctgcaactgggagcagagtaaccgtggtcttgggcgcccagtggggggacgaggggaagggaaaagttgtggacctgcttgccaccgatgccgacatcatctctcgctgccaaggcgggaataacgcaggtcacactgttgtagtggatgggaaagagtatgacttccacttgctcccttcaggtatcatcaacaccaaagccgtgtccttcattggaaacggggttgtcatccatctgccaggactgttcgaggaagctgagaagaacgaaaagaagggcctgaaagattgggagaaaaggctgattatcagcgacagagcccacctggtatttgattttcaccaggctgttgatggtctgcaggaagtccagagacaagcccaggaaggcaagaatatcgggaccacaaaaaagggcatcgggccaacatatagcagcaaagccgccaggacaggactccgcatatgcgacttgcttagcgacttcgacgagttttcctctcggttcaagaatctggcccatcagcaccagtctatgttccccactctcgagatagacatcgaggggcagctgaaacgcttgaaagggttcgctgagcggattagacccatggtgagagacggcgtctacttcatgtacgaggcactccatggcccaccaaagaaaattctcgtggaaggtgccaacgcagctctcctggatatcgactttggcacctaccccttcgtgacgtctagtaactgtaccgtggggggtgtgtgtaccggactgggtattcccccgcagaacatcggcgacgtctatggggtggtcaaagcctataccactcgcgtaggcatcggtgcctttccgaccgagcaaattaacgaaatcggaggcctcctacagactaggggacatgagtggggggtgacaaccgggcgtaaacgccgatgtgggtggctggacctgatgatactgcggtacgcacacatggtcaacggattcactgccttagctctgacgaagctagacattttggacgtgcttggagaagttaaagtgggcgttagttacaagctaaacggaaaaagaatcccctactttcctgcaaatcaggaaatgttgcaaaaggttgaggtggaatatgagacccttccggggtggaaagccgacaccactggagcccggaggtgggaggacctgccaccacaagctcagaactacattcgcttcgtggagaatcacgtcggggttgccgtgaagtgggttggcgtgggaaagtcccgtgagagtatgatccagttattttag

SEQ ID NO: 23607 - DNA, 1596 bp, synthetic construct
  source 1..1596: mol_type = other DNA; note = Synthetic coding sequence
atgtgcagcctggccagcggcgccaccggcggccggggcgccgtggagaacgaggaggacctgcctgagctaagtgatagtggggatgaggcggcatgggaggatgaagacgacgccgacctgcctcatggcaaacagcaaaccccttgcttgttttgtaatcgtcttttcacctcagccgaagagacttttagccattgcaaaagtgaacaccagttcaacatcgactccatggttcacaagcatggattagaattctacggctatataaagctgattaattttatccgcctgaaaaatccaaccgttgagtacatgaatagcatatataacccagtcccgtgggaaaaagaggaatatttgaaacccgtgctcgaggatgatctcctgctccaatttgacgtggaggacctctacgagccagtcagcgtgccttttagttaccccaatggcctgtcagaaaacacttctgtggtggaaaaactcaaacatatggaggcccgggcattgagcgccgaggcagctctggctcgcgcgcgagaggacctccagaaaatgaagcagtttgcccaggacttcgtcatgcacaccgatgtccgtacttgcagttcgtcaacttccgtgattgctgatttacaagaagatgaggatggtgtgtattttagttcatatgggcactatggcattcatgaggaaatgctcaaggataagatccgaactgagtcatatagagactttatttatcaaaacccacacatctttaaagacaaagtcgttcttgacgtgggatgcggaactggtatactgtccatgttcgccgccaaggccggcgccaagaaggtgctaggcgtggaccaatccgagattctatatcaggcaatggacatcatacggttgaacaagctcgaagataccattactctcataaagggaaagatcgaagaggtgcacttgccagtcgagaaggtagacgtgattatttccgaatggatgggctactttctgctctttgaaagtatgctggattcagtcctgtatgccaaaaataagtacctcgctaagggcggctctgtttatccggacatctgcaccattagccttgtggcagtgagcgacgttaataaacatgctgacaggatcgctttttgggatgatgtctacgggtttaagatgtcatgcatgaaaaaagctgtcatccccgaggcagtggtagaggtgctggacccaaagacccttatttcagagccttgcggtattaagcatattgattgccatactactagtattagcgatttggaattcagcagcgatttcactcttaagatcactagaacttctatgtgcaccgctatcgcaggctacttcgatatttacttcgagaaaaactgccataaccgggtggtgtttagcacaggccctcagtccacgaaaacccattggaaacagactgtgttcctgctggaaaaacccttcagcgtcaaagctggcgaagccctgaaaggaaaagtgacggtgcataagtccaaaaaggatcccagatcactaaccgttacactcacgcttaacaatagcacccaaacctatggactacaatag

SEQ ID NO: 23608 - DNA, 1659 bp, synthetic construct
  source 1..1659: mol_type = other DNA; note = Synthetic coding sequence
atgagcgtgctgagccccggcgacctgaagcccaagcggggcagcccacataggggatcgctggatcggacagacgctagcactgacctcgccatgaggtcctggcccagcgagctgggtagccggacatgttctacctctgctacaacgacagcaccatctaacagtactcctattgccagacacccaggccgcaccaagggatacaactccgatgacaatctgtgcgagcctagcttagagtttgaagtgcccaaccaccgtcagtatgtgtcacggcctagtagccttgaatctagccggaatactagctctaatagtagtccactgaatttgaaaggatctagtgaacaacttcacggtcgttccgaatcatttagttctgaagatctgattccttcgcgggatctggccacactgcccagagaagcatctactcccggtcggaatgcgcttggccgccatgagtaccccttgccgaggaatggccctttgcctcaggaaggggcccaaaaacggggaaccgcaccgccgtacgtgggcgtgaggccatgtagcgctagtccttcctcggagatggtgacgctggaagaatttcttgaggaatccaaccgatcaagtcctactcacgatacaccctcatgcagagacgaccttttgtcagactatttcagaaaagcctccgatcctccggccattgggggacaaccagggcccccagccaaaaaggagggggctaagatgcctacaaattttgttgccccgactgtgaagatggcggcccctacatccgaaggccgcccacttaaaccgggccagtacgtcaagcctaattttcgcctaacagaggcggaagcaccacctagcgtcgctcctcggcaggcacaacctccacagtcacttagtctcgggcgtccccgacaggcccccgtacccccagcaagccatgcccctgccagccggtccgcatctctgtctagagcattttctttggctagcgctgatcttctaagggcctctggccctgaagcctgtaagcaggaaagcccacagaaacttggagctccagaggctctcggaggtcgcgaaaccgggtcacacacattgcagtcaccggcgcccccatcatcgcactccttggctagagagcggacccccctcgtgggcaaagcaggttcttcttgccaggggcccgggccaagaagccgccctctggacacccggcggtttagccttgcccctccaaaagaggaaaggctggctccacttcaccaaagcgccaccgcacccgctatcgccacagccggcgcgggagctgccgctgcgggcagtggctcaaatagtcagctgcttcatttctcacccgccgcggctccagcagccagaacaaaacccaaggcccctccgagaagcggtgaagtggccacgattactccagtgcgcgcgggcctgtcgctgtcagagggcgatggagtccctggtcagggatgttccgagggcctgccagccaaatctccaggaagaagccctgacctagctccccacctcggcagagctcttgaagactgctcacgtgggtcggtgtcaaaatcatctcccgcatctccagaaccgggcggcgacccacagaccgtatggtacgaatatggctgtgtgtag

SEQ ID NO: 23609 - DNA, 774 bp, synthetic construct
  source 1..774: mol_type = other DNA; note = Synthetic coding sequence
atggccgacaagatggacatgagcctggacgacatcatcaagctgaatcgaagccagaggggaggcagaggaggcggtcgtgggcgcggacgggccggcagccagggtggacggggaggcggggctcaagctgccgcccgtgtgaatcgcgggggtggtcccatccggaacaggccagctatcgccaggggagctgctggcggcggcgggaggaatcggccggccccatattcccggccaaaacagctgcccgacaagtggcagcacgatctgtttgatagcggatttggcggaggagctggggtggagactgggggcaaactgctcgtttcgaacctcgatttcggtgtgtctgacgcagatattcaggaactgttcgccgaattcggaaccctaaagaaggcagcggtgcattacgatcggagcggcagaagtttgggcaccgctgacgttcactttgagaggaaggcagacgccctgaaagccatgaaacagtacaacggggttcctctggacgggaggcctatgaatattcagctggttacgtctcagattgacgctcagagaaggccagctcagagtgtcaataggggggggatgactcgcaacagaggggccggtggtttcggagggggtggaggcactcggagaggcacaagggggggtgcacggggccggggacgcggtgcgggtcgcaattccaaacagcagcttagcgcggaggaactggacgcccaactcgatgcttacaacgcacggatggatacgtcctag

SEQ ID NO: 23610 - DNA, 876 bp, synthetic construct
  source 1..876: mol_type = other DNA; note = Synthetic coding sequence
atgggcgtggccgcccggccccccgccctgcggcactggttcagccactctatacctctcgctatcttcgcccttcttttactttatctcagcgtgcgcagtctgggagctcgcagcggctgtggtcctagggcccagccgtgtgtcccgggagaaacggcgccttttcaagtccgccaggagagcggtacacttgaagcccctgagcggaaacagcccccgtgcctgggcccaagaggcatgctgggtagaatgatgcgccggtttcacgcgtcacttaagcccgagggggacgtggggctgtcaccctaccttgctggctggcgagcactcgtggagttcctgacccctttggggagcgtgtttgcctttgctacaagagaagctttcactaaggtgacggatctagaggcccgcgtgcatggcccagacgcggagcattactggtccctggtggccatggctgcgtgggaacggagagccggactgctcgaacagcctggtgctgcaccccgggacccaacaaggagctcaggctcacgcaccctgctgctcttacaccgcgctctgagatggtcccagctgtgtctgcatcgagtcgctacaggggccctcggaggtcctgatgccggagtacagtgctccgatgcttatcgggcggctcttggtccgcaccatccatggctggtgcggcagactgcccgcctggccttcctggccttcccgggtcgtaggcgactgttagagttggcatgtcccggcgcaacggaggccgaagcccgggcagcactagtgagggctgctggcaccttggaggacgtgtataaccgtacgcagtcactgctggccgagagagggctgctgcaacttgcatag

SEQ ID NO: 23611 - DNA, 3303 bp, synthetic construct
  source 1..3303: mol_type = other DNA; note = Synthetic coding sequence
atgggcaacgccgccggcagcgccgagcagcccgccggccccgccgccccaccaccgaagcaacccgcccctccaaagcagcccatgcctgcagctggagaattagaagaacgatttaaccgggctctcaactgtatgaacctgccccctgacaaagtgcagctgctgagccagtacgacaatgagaaaaaatgggagctgatatgtgaccaggaacgtttccaggtgaaaaacccgcccgccgcgtacattcagaagctgaaatcttatgtagataccgggggggtcagtaggaaagttgctgcggattggatgtccaacctgggattcaagaggagagtgcaggaatctactcaagtcctgcgagagctggaaacctcgttgcgtacgaaccacatcgggtgggttcaggagttccttaacgaagagaacaggggcctggacgttctcctggagtaccttgcctttgcccagtgttccgtcacttacgatatggagagcactgacaacggcgcatcaaattcggaaaaaaataagccattagagcagtccgtggaggacctgtcaaagggcccgccaagctcagtccctaagtccagacaccttacaatcaagttaacacccgcccacagccgaaaagccctcaggaatagcagaatcgtgagccagaaggacgacgttcatgtctgtattatgtgtctccgcgccatcatgaactaccagagtggtttctccttagttatgaatcatcccgcctgcgttaacgagatcgccctgagcctcaataacaagaaccccagaacaaaggccttggttttggaactgctggctgctgtttgcctagtgcgcgggggccacgacatcatccttgcagctttcgacaatttcaaggaagtgtgtggggagcaacacaggtttgagaaactgatggagtattttagaaacgaggattctaacatcgacttcatggtggcctgtatgcagttcatcaacattgtcgtccactccgtggaaaatatgaactttcgcgtcttcctgcagtatgagttcacccacctcggtttggacctgtatctagagcgcctgaggctcaccgagtccgacaagctccaggtccagattcaagcatacttggataacatttttgacgtgggagcgctcctcgaggatactgagacgaaaaacgctgtgttagagcacatggaggagttgcaggaacaggtggccctactgaccgaacggctgcgcgacgccgaaaatgagagtatggcaaagatcgctgaattggagaagcagctgtcccaggcaaggaaggaattggagactctgagagaacggttctcagagtctaccgctatggggccatcccgaaggcccccggagcccgaaaaggcccctcccgctgctcctaccagaccgtccgctttagagctcaaggtggaggagctggaagaaaaaggcctgattcgaatcttgcgcggccctggggatgccgtctccatagagatcttaccagtcgcagtggctaccccatctggcggtgatgcccccaccccaggcgtgccaacaggatcaccttcccccgacctcgcccctgccgccgaaccagctcccggagctgcgccaccaccccccccaccactgcccggactgccatcccctcaggaggcgccccccagtgctcctccgcaggcaccgcccctccctggcagcccggaaccaccaccggcccccccactcccaggagatctcccgccccccccccctcccccacccccgcctcccgggactgatggcccagtcccccctccaccgcctccgcctccgccaccgccaggcgggccccccgacgctctgggccgcagggacagtgagctcggccccggggtgaaagcaaaaaagcccatacagaccaaattcagaatgccactcctaaattgggtcgctctgaagccctcccaaatcactggaacagtgtttaccgaactgaatgacgagaaggtattgcaggaactcgacatgtccgacttcgaggaacagttcaagaccaagtctcagggacccagcctggacctcagcgccctgaaatcaaaggctgcccaaaaggcaccatcaaaggccaccctcattgaagcaaaccgcgccaaaaaccttgcaatcaccctccggaaggggaatctcggggctgagaggatctgccaggccatagaagcgtacgatctccaggcactcggattagacttcctcgaactgctgatgaggttcctgccaacggagtacgagagatctctgataacccgtttcgagagggaacagcgaccaatggaggaattgagcgaagaggacaggttcatgttatgctttagtaggatccctcgcttgcctgaaaggatgactacgcttacattcttaggcaacttcccagacacagctcaactgctgatgccacagctaaatgccatcatagctgcttcgatgtcaataaaaagcagtgacaaacttcgacagattctggagatcgtgctcgcgttcgggaattatatgaactccagcaaaagaggtgccgcctatgggtttcggctgcaatctcttgacgcactcctcgagatgaaatccactgaccggaaacaaacattgctccattatctggtcaaggtcatcgctgagaaatatccacaattgaccggatttcacagcgatctgcatttccttgataaggccggctccgtttcactggattccgtgctcgctgatgtccggtctctacaacgaggactggagcttacccagagagagttcgttagacaggacgactgcatggtgcttaaggagttccttagagcaaattcacccactatggataagctgctggctgactctaaaaccgctcaggaggctttcgaatctgtcgtcgagtacttcggagagaatcccaagaccacgtcccctggtctgtttttttcattgtttagccggtttattaaggcatacaagaaagccgagcaggaagtggaacagtggaagaaggaagccgcagcacaggaagcaggtgccgatacccccggtaagggagagcctcccgcacctaaaagccccccaaaggccaggcgcccccaaatggatcttatctccgaactcaaacgccggcagcagaaagagccacttatctacgagtccgacagggatggcgccatagaggatatcattacagtgattaagaccgttccattcaccgctagaacaggaaaacggactagtcggctgctctgcgaggccagccttggcgaagagatgcctctgtag

SEQ ID NO: 23612 - DNA, 1839 bp, synthetic construct
  source 1..1839: mol_type = other DNA; note = Synthetic coding sequence
atggagaaccagctggccaagagcaccgaggagcggaccttccagtaccaggattccttgcctagcctgccagtgcccagtcttgaggagtctctcaagaaatatctggagagtgttaaaccctttgctaaccaggaagagtacaaaaaaactgaggagatcgtgcagaagttccaatccgggatcggagagaagctgcaccaaaagctgcttgaacgtgccaagggcaagcgtaactggcttgaggagtggtggttgaacgtcgcttacctggacgtccgcattccaagtcagctgaatgtgaactttgctggccccgctgcccattttgagcactactggcctccgaaggagggcacccaattagagcgtggcagtataacactatggcataatctcaattattggcagcttctgaggaaagagaaagttcctgtccacaaggtggggaatacccccctagacatgaaccaatttcgcatgctgttcagcacatgcaaagtccccggtatcacccgcgactccatcatgaactatttccgcactgagtccgaaggtcgctccccgaatcacattgtggtgctgtgtcgggggagagcttttgtgtttgacgtcatccacgagggatgcttggttacacccccggagctgttgcgacaactcacttacatccataaaaaatgtcacagtgaacctgatggccctggtattgcagctctgaccagcgaggagaggactcgctgggccaaagccagggagtatttgatcgggctggatcccgaaaacctcgctttgttggagaagattcagtcatctctcctggtgtatagcatggaagatagttccccgcatgtaacacccgaggactactcagaaattatcgctgccatcttaattggcgacccgacagtcagatggggcgataaaagctataacttgataagcttctccaatggcgtcttcgggtgtaattgcgatcatgctccatttgacgcaatgatcatggtgaatatctcctactacgtggatgaaaaaattttccagaatgagggcagatggaaaggcagtgaaaaagtgcgggatatcccacttcctgaagaacttatctttatagtcgacgagaaagtactcaatgatatcaaccaggctaaagcacagtacctacgcgaggcctccgaccttcaaatagcggcatacgccttcacttcttttgggaagaaactaaccaagaacaaaatgctacacccggacacctttattcaactggcattgcagctagcatattatagactccacggccatccaggctgctgctacgagaccgccatgacacgacatttctatcatggccggaccgaaactatgagaagttgtactgtcgaggccgtgcggtggtgccaaagtatgcaggacccatccgtaaacctgcgagagagacaacagaagatgctgcaagcattcgctaaacataacaaaatgatgaaggactgctccgcgggaaagggatttgataggcacttactgggcttactcctgatcgccaaagaagaaggcctacccgtccctgagctgttcaccgacccgctgttcagtaaaagtggcggaggcgggaactttgtcttaagtacaagtctggtgggctatcttcgtgtccagggagttgtggtgcccatggttcataatgggtacggcttcttttatcacatccgggatgatcggttcgtcgtggcctgcagcgcgtggaaatcctgccccgagacagacgccgagaagctcgttcagctgacattctgcgcgttccatgacatgatccagctaatgaactccacgcatttgtag

SEQ ID NO: 23613 - DNA, 1773 bp, synthetic construct
  source 1..1773: mol_type = other DNA; note = Synthetic coding sequence
atgagcgacagccccgccggcagcaacccccggacccccgagagctccgggtctgggagtgggggcggcggaaaaagaccagctgtcccggcagccgtaagtctattgcctcctgccgatcccctgcggcaggctaacaggctgccaattagggttctgaagatgttgagcgcccataccggccatctgttgcaccccgaatatttgcagcccctgtcatctacacccgtttcccctattgagttagatgctaagaaatcccctctcgccctgctggcccagacgtgcagtcagattggaaaaccagatccaccgccgtcttcaaaactcaattcagtcgcagctgcagccaatggtctcggggcagaaaaggacccagggcgctctgcacccggggctgcatccgcggcagcagctcttaaacagctgggtgattctccggctgaggacaaatccagtttcaaaccatactccaaggggagtggaggaggggattcacgtaaggacagcggttcctcaagtgtgtctagtacttctagctcctcttcgtcgtcccccggtgacaaagccgggttcagagtccctagtgccgcgtgcccccccttccctccgcacggggccccggtgtcggcgtctagcagttcctcctctcctggtggctcccgggggggcagcccgcaccacagtgactgtaaaaacggtggcggggtgggaggcggggagcttgacaagaaggaccaggagcccaagccctcgccagaacccgcggccgtgtccagaggtggtggcggagagccaggggcccacggaggcgcggagtcaggagcctccgggcgtaagtcagagcccccaagcgctcttgtgggcgcagggcacgtggctcctgtctccccctataaaccaggtcactcagtcttccccctgccgcctagttctatcggatatcatggttccatcgttggagcttacgctggatacccctcccagttcgtccctgggttggatccctccaagtcaggtctggtgggaggccagttgagtggtggattgggtttgccgcccggcaagcctccaagcagtagccccttaaccggggcctcccctccatcatttctccagggcctatgtcgggacccctactgtctggggggctaccacggggcttcccatttgggaggcagctcctgtagtacctgttctgcacacgaccctgcaggaccctccctgaaagctggaggatatccattagtgtacccaggccacccactccagcctgcagcactgtcgtccagcgctgcccaggcggcattaccgggccaccccttgtatacgtacggcttcatgttacagaatgaacctctgccacactcctgtaactgggtggccgcgtccggcccctgcgacaaaaggtttgccaccagtgaggagctcctgtcacacctcagaacgcatacagcacttccaggggccgaaaagctactggctgcctacccaggggcttccggactgggctccgcagctgctgctgccgccgctgccgcatcctgccacctgcacctccccccgcccgccgcccccggttctcccggaagcctgagtctaaggaatccccatacactggggctgagcaggtaccacccctatgggaaaagtcacttgtcaactgccggcggacttgctgtcccgagcttgccgacagccggtccctactattccccctatgctctctacggacaaaggttagccagtgctagcgctcttggctaccagtag

SEQ ID NO: 23614 - DNA, 1020 bp, synthetic construct
  source 1..1020: mol_type = other DNA; note = Synthetic coding sequence
atgtggaccgcccggggccccttccggcgggaccggtggagcagcgaggacgaagaagcagcgggcccaagccaggctctgagccctttgctcagcgacactcgcaaaattgtttcagaaggagaactggaccagcttgcacagatcaggcctttaattttcaattttcacgagcagaccgctataaaggactgcctgaagatcctggaggagaagacagcagcttatgacattatgcaagaatttatggcactagagttaaagaacctgccaggggaattcaattccgggaaccagccatcgaacagggaaaaaaaccgttatagggatatcctaccatatgactcaacacgcgtccccctcggtaagtccaaagactatatcaacgctagctatatccgtattgttaactgcggagaagagtacttctacatagccacacagggaccacttctgagcaccatcgacgacttttggcagatggtcctagagaataatagcaatgtaattgcaatgattacccgagaaatcgagggtggaataattaagtgctatcactactggcctatatcacttaagaaacccctcgagctaaaacattttcgcgtgtttctcgagaactaccagattctacaatacttcattatccgaatgtttcaggtggtggagaaatctacaggcacctctcactcagtgaaacaacttcagttcacgaagtggccggatcatggtactcctgccagtgcagactcttttatcaagtacatccgctatgccagaaagtcccatctgaccggacctatggtcgtgcactgctccgcagggatcgggcggactggcgtgtttctgtgcgtggatgtggtattctgtgcaatagtaaagaactgcagcttcaatataatggacatagtggcccagatgcgggaacaacggagtggaatggttcagaccaaagagcagtatcatttctgctatgatatcgtgttggaggttctccgaaagcttctgaccctggactag

SEQ ID NO: 23615 - DNA, 1917 bp, synthetic construct
  source 1..1917: mol_type = other DNA; note = Synthetic coding sequence
atgagcgccctggccggcgaggacgtgtggcggtgccccggctgcggagaccacatcgcaccctcacaaatctggtatagaacggtaaacgagacttggcatgggtcctgtttcagatgcagtgaatgccaggacagtctcaccaattggtattatgagaaggacggtaaactgtattgtccaaaggactactggggaaagttcggcgagttttgtcacggctgttctctgcttatgaccggcccattcatggtcgcgggcgaattcaagtatcatcctgaatgttttgcatgtatgagttgtaaggttatcatcgaggacggagacgcctacgcgcttgtgcagcacgccaccctctactgcgggaaatgccacaacgaagtggtactagcccctatgttcgagcggttgagcacggaatccgtgcaggaacagctgccgtactctgtcactctgatttcgatgccagctacaaccgaaggaaggagagggttctcagtgtctgtggagagcgcatgctcaaattatgctacgactgtccaggtcaaggaggtgaacaggatgcatatttcacccaacaaccggaacgctatccaccccggggaccggattctggagataaatggaacccccgtgaggaccctgcgcgttgaagaggttgaggacgccatcagccagacaagccagaccctccagctgctgatcgagcacgaccctgtatcccaaagactggaccagcttcgcctcgaggcccgcctcgcacctcacatgcagaatgccggccacccacacgccctaagtacgctcgacacaaaagaaaatcttgaggggactctccgccgtaggagcctcagaagatccaactccatttctaaaagtccaggtcctagttcaccaaaggagccgctgctgttttccagagatatctccaggtcagaaagtctcagatgttcatccagctacagccagcaaatctttcgcccgtgtgacctgatccacggagaagtgctgggcaaagggttctttggccaggcaatcaaggttacccacaaggccacagggaaagtgatggtgatgaaagagctgattagatgcgacgaggaaacccaaaagacattcctaaccgaggtgaaagtgatgcggtcattggaccatccaaacgtgctcaaattcataggtgtactgtacaaagataagaagttgaacttgctcactgaatacatcgagggtggtaccttaaaggattttctgagaagcatggatccttttccctggcaacagaaggtgagatttgctaagggtattgcaagtggtatggcctaccttcactccatgtgcatcattcaccgggacctgaacagtcataattgtcttatcaagctcgataaaactgtggtagtcgcagatttcggactctcccggctgatagtcgaagaaagaaaacgtgccccaatggagaaggcaactacaaagaagcgaacacttcgcaagaacgaccggaagaagcggtatacggtggtggggaacccttactggatggccccggagatgctgaatggcaagagctatgacgaaaccgtggatatattctcattcggcattgtgctgtgtgagataatcgggcaagtttatgctgatccagattgtctccctcgaactctggacttcggactaaatgtgaaactcttctgggagaagtttgttccaaccgattgcccaccagcattttttcctctcgctgccatctgctgcaggcttgaacctgaatctaggcctgccttttcaaagctcgaggacagcttcgaggccctctctttgtatcttggtgagttgggaatcccactccctgccgaactcgaagaactcgaccatacagtttccatgcagtacggcttgacaagggacagccctccctag

SEQ ID NO: 23616 - DNA, 606 bp, synthetic construct
  source 1..606: mol_type = other DNA; note = Synthetic coding sequence
atggccgccgccaaggacacccacgaggaccacgacaccagcaccgagaatacggacgagtccaaccacgatccacagtttgagcctattgtgagtctgcccgagcaggagatcaaaactcttgaagaagatgaggaagagctgtttaaaatgagggccaagctcttccgtttcgcctctgagaacgatttgcccgagtggaaggagagaggcacaggagatgtgaagctcctcaagcacaaggagaaaggcgccattcgcctgctcatgcgccgtgataagaccctgaagatttgcgccaaccactatatcactcctatgatggaactaaaaccaaacgcaggttccgatagggcctgggtgtggaatactcacgctgacttcgctgacgagtgccccaaaccggaattgcttgctatccggtttctcaatgcggagaacgcacaaaaatttaagacaaaatttgaagaatgtagaaaagaaatcgaggagagagaaaagaaggcaggatctggaaagaacgatcatgcagagaaggtcgccgaaaagttggaggcgctttccgtgaaggaggaaaccaaggaggatgcagaagaaaagcagtag

SEQ ID NO: 23617 - DNA, 2154 bp, synthetic construct
  source 1..2154: mol_type = other DNA; note = Synthetic coding sequence
atggccgccgacaagcccgccgaccagggcgccgagaagcacgagggcaccgggcagtcaagcgggatcacagaccaggagaaagaattaagcactaacgccttccaggcatttaccagcgggaattatgacgcttgcctccagcacctggcatgcctacaggatatcaacaaggatgactacaagattattctgaataccgcagtggcggagtttttcaagtctaaccagactaccactgacaacctgagacaaacgctgaatcagcttaaaaaccaagtgcacagcgctgtagaagaaatggacggcttggacgatgtggaaaactccatgctttactacaatcaggcggtgatactttatcatttacgtcagtacaccgaagctatatcagtgggagaaaaactgtatcagtttattgaacccttcgaagagaagttcgcccaggccgtgtgcttcctgctcgtcgacctctacattctgacctaccaggcggaaaaggcgctccatctgctggctgtcctggagaagatgatctctcaaggcaacaacaacaaaaatgggaagaacgaaaccggcaacaacaacaacaaagatgggtctaaccacaaggcggaatccggtgctctcatcgaggccgctaagtcgaagattcaccagtataaagtgagagcctacatccagatgaaaagtctgaaagcatgtaagagggagatcaaatccgtgatgaatacagccggaaacagcgccccatccctgtttctcaagtctaactttgagtacctccgggggaattaccgcaaggctgtgaagctgctgaacagcagcaacattgctgagcatccgggatttatgaaaactggtgagtgcctgcgctgtatgttttggaacaacctgggctgtatccactttgccatgtccaagcacaaccttggcattttttacttcaagaaggcgctgcaggaaaatgacaatgtttgcgcacagctatccgctgggagcacagatccaggcaagaaattttctggccgccccatgtgcacattgcttacgaacaagaggtatgagctgttatataactgtggaatccagctgttgcacatcggccgtcccttggctgcattcgagtgcctgattgaagcggtgcaagtgtatcacgcgaatcccagactgtggttgcggttagcagagtgctgtattgcagcaaacaagggaacctcagaacaggagaccaagggtctgccctcaaaaaaggggattgtgcagtctatcgtgggccaggggtatcacagaaaaatagtattggccagtcagtctatccagaacacagtgtacaacgatgggcagagtagcgccatacccgtggcctctatggagtttgcagctatctgtctgaggaacgctttgcttttgcttcctgaggagcagcaagaccctaaacaggaaaatggcgccaaaaactccaaccagctcggcggcaataccgagagctcagaatcaagcgagacttgccggtgttctattttggcctgcagcgcctatgtggctctcgccctcggcgataacctcatggccctgaaccacgcagataaactgctgcagcagcctaaactatctggcagtctgaagttcctgggacatctgtacgcagctgaagcgctaatatcactcgatcgcatttcggatgccattacccacctcaaccccgaaaatgtgactgacgtgtccctgggaataagttccaatgagcaggatcagggatcggacaagggagagaatgaggctatggagtcctctggcaagcgggccccgcaatgctatccttcaagtgttaatagcgctaggactgttatgctgtttaacttgggaagcgcctattgtctaagatcagagtacgacaaggcacggaagtgtctgcatcaggcggctagtatgatccatccgaaggaggtgcctcccgaagcaatcctgctggctgtctatctagagttgcagaacgggaacacacagctcgccctccaaattataaaacggaatcagctgctgcccgcagtcaagacccactccgaggtgcgaaagaaacctgttttccaaccagtgcatcccatccaacccattcagatgcctgctttcacaaccgttcaacgaaaatag

SEQ ID NO: 23618 - DNA, 1488 bp, synthetic construct
  source 1..1488: mol_type = other DNA; note = Synthetic coding sequence
atggaggccctgctggagggcatccagaaccggggccacggcggcggtttcttgaccagctgcgaagctgagctgcaggagcttatgaagcaaatagacatcatggtggctcataaaaaaagtgagtgggagggccggactcacgcccttgagacttgcctgaagatccgggagcaggagttaaaaagcctgagatcccagctcgatgtgactcacaaggaggtgggtatgttgcaccaacaggtggaggaacatgaaaagattaagcaggaaatgaccatggagtacaaacaggaacttaaaaaactccacgaagaactgtgtattttaaagcgcagctacgagaagctccaaaaaaaacagatgcgtgagttcagaggcaatacaaaaaaccatcgcgaagaccgaagtgaaattgagaggctgacagcaaaaatcgaggaattcaggcagaaaagtcttgattgggaaaagcagcgcctcatctatcagcagcaggtgagcagcctagaagcccagagaaaagcgttggccgagcagtctgaaatcatccaagcccaactggtaaatagaaagcagaagctggaatctgtggaactatcaagccaaagtgaaattcagcacctgagctccaagctggagcgcgcaaatgatacaatttgcgcgaatgagcttgagatcgagaggctgacaatgagagtgaacgaccttgttggcacatccatgaccgtgctgcaggaacagcagcagaaggaagaaaagctgcgagaatctgaaaagttgctggaggctctacaggaggagaaacgtgagctaaaggctgctctgcagagtcaagagaacctgattcatgaggcgcggatccaaaaggaaaagctgcaggagaaagtcaaagcaactaatactcaacacgctgtcgaagctattagtctcgaaagtgtatccgccacttgtaaacaactcagccaagagctcatggagaaatatgaagaacttaagagaatggaagcacataacaacgagtataaggcggagatcaagaagctgaaggaacagatacttcagggcgagcagtcatattcatccgccctggagggcatgaagatggaaatttctcacctcacccaagagctgcatcagagggatataactatagccagtactaagggaagtagcagtgatatggagaagagactgcgcgcagagatgcaaaaagctgaggacaaggcagtggagcataaggagattctggatcagctggagagcctgaagcttgagaatcgacatttaagtgaaatggtcatgaaattggagttgggtctccatgaatgcagccttcctgtctcacctctcggctccattgccaccagatttctggaggaagaagaattgcggagccaccacatcctggaacgactcgatgcacacatagaggagcttaagcgagagtccgagaaaactgtgcgccagttcacagctcttaagtag

SEQ ID NO: 23619 - DNA, 1962 bp, synthetic construct
  source 1..1962: mol_type = other DNA; note = Synthetic coding sequence
atgatccccccccaggaggccagcgcccggcggcgggagatcgaggataaactgaagcaagaggaagaaacactatcatttattcgggatagcctggagaagtcagatcagcttaccaaaaatatggtctccatcttgtcatcctttgagagccgtctcatgaagctggagaattcaatcatacctgtgcataagcagacagagaatttacagcgtttgcaggagaacgtggagaagaccctgtcatgtctcgaccatgtgatctcctactaccacgtggcttccgacacagaaaagattattcgcgagggccctaccggtcgactggaggagtatcttggctcaatggcaaaaatccaaaaagccgttgagtatttccaggataatagtcctgattctcccgagctgaataaggttaaactgctctttgaaagaggcaaggaagcactagaatcagaattccggtcactgatgacccgccacagcaaagtggtttcccccgtcctgatccttgaccttatttcaggggacgacgaccttgaagcacaagaagacgtcacactagagcacctccctgagtcagtgttgcaggatgtcatccgcatctctagatggttggttgagtacggcagaaaccaggattttatgaatgtctactatcagatccgatcttcacagttggatcggtccataaaagggttgaaagagcactttcataaaagcagttcaagtagcggagtgccctactctccagctattcccaataagcggaaggacaccccaaccaagaagcccgtgaagaggcccggcagagatgacatgctggatgtggagaccgacgcctatattcactgcgtgtctgcctttgtaaagttggcacagagcgagtatcaactgctcgcagacattattcccgaacaccaccagaagaagaccttcgacagtctaattcaggatgccttggacggacttatgttggagggggaaaatatagtgtcagctgcccggaaggcaattgtgcgccacgacttttcaactgtgcttactgtgtttcctattctccgacaccttaagcagacgaaacctgagtttgatcaggtgttgcaaggcaccgcagcttctacgaaaaacaagctccccggtcttatcacatcaatggaaaccatcggcgcaaaggcccttgaggactttgccgacaacatcaaaaatgatcctgacaaagagtacaacatgcctaaagatggtacagtccacgagctcaccagcaacgctattctattcctacagcagctgcttgactttcaggaaaccgcgggcgctatgctcgcctcccaggaaactagtagtagcgccactagttactcctctgagttttcgaaacgtttactgtctacctacatttgcaaagtcctaggcaatctgcagttgaacttactctccaaaagtaaagtctacgaggacccagctctaagcgctattttcctccacaataattataactatatcctgaaaagcctggaaaaaagtgaactgattcaactggtcgccgtgacccagaaaaccgctgaaaggagctaccgcgagcatatagagcagcaaatccagacctaccagcggtcatggctaaaagtcaccgactacatagcggagaagaatcttccggtgttccagccaggggtaaaactgcgcgacaaggagcgccagataatcaaggagagattcaaaggtttcaacgatggcctcgaggagctgtgcaagatccagaaggcctgggccatccccgataccgagcaacgggaccgaattcgtcaggctcagaaaacgattgtgaaagagacctatggggccttcctgcagaaattcgggtcggtgccctttacgaaaaatcctgaaaagtatattaagtacggtgtcgaacaggttggcgatatgatcgacaggctttttgatacctctgcttag

SEQ ID NO: 23620 - DNA, 735 bp, synthetic construct
  source 1..735: mol_type = other DNA; note = Synthetic coding sequence
atggagctgaccatcttcatcctgcggctggccatctacatcctgacctttcccctgtacctgctaaattttctcggactgtggtcttggatttgcaagaaatggttcccttatttcttagtcagattcacagtcatctacaacgaacaaatggcctccaaaaagcgggagcttttctcaaacctccaggaattcgctgggccttcggggaagctgtctctactggaagtcggttgcggtacaggcgctaacttcaaattttacccgcccggttgcagagtcacttgtatcgatccaaacccgaatttcgagaaattcttgattaagtctattgccgaaaatagacacctacagttcgagaggttcgttgtggcggcgggtgaaaatatgcatcaggttgccgatggctcagtagacgtggttgtctgtacactggtgctttgtagcgttaagaaccaggaacgcatcttacgagaggtgtgcagggtgttgaggccaggaggtgccttctacttcatggaacacgtggcggccgaatgctctacatggaattacttttggcaacaggtgttggaccccgcctggcacctgttgttcgacggttgcaacctcaccagggaatcctggaaagctctggagcgggccagcttctccaaactaaagttgcagcacatccaggcaccactcagctgggagcttgtacgacctcatatatacgggtacgcagtgaagtag

SEQ ID NO: 23621 - DNA, 3522 bp, synthetic construct
  source 1..3522: mol_type = other DNA; note = Synthetic coding sequence
atggccgtggagaccctgagccccgactgggagttcgaccgggtggatgacggaagccagaagatacacgccgaggtccaacttaaaaactatggaaagtttctcgaggagtatacctcccagctccgtcgaatcgaagacgcactggacgattccattggagatgtctgggatttcaatctggatcccatagccttgaagttacttccttacgagcaatctagcctactggaactaatcaagaccgaaaataaagtcttgaataaagtgataaccgtctatgctgctctgtgttgcgaaataaagaaactcaaatacgaggctgagaccaagttctataatggcctgctgttctatggggaaggagctacagatgccagcatggtggagggggactgtcagatccagatgggccgcttcatctcattcctgcaagagctcagttgctttgtaacacgatgctatgaggtggtcatgaacgtggtccatcaactcgcagctctgtacatctcaaataagatcgctccgaaaatcatagaaacaactggagtgcactttcagacaatgtacgaacacctgggagaacttctgacggtcctgttaacactggatgaaatcattgacaaccatattacgctgaaagatcattggacaatgtataaacgcctgcttaaatcagtgcatcataacccgagcaaatttggcatccaggaggagaagctgaagccatttgagaaattcctccttaaactcgagggccaactactagatgggatgatttttcaggcctgcatcgagcagcagttcgattcattaaatggaggcgtgtccgtcagtaagaactcaaccttcgccgaagagtttgcccattccattaggtcaattttcgccaacgttgaggccaagctcggcgagccttccgaaattgaccaacgggataagtacgtgggcatttgcggcttgtttgtgctgcacttccagatattccgtacgatcgacaagaaattttacaagagcctactggatatctgtaaaaaggtcccagcaatcacacttactgccaatattatttggttccccgacaattttctgatccagaaaatccctgcggcagccaagctcctggacagaaagagcctacaggcgatcaagatccaccgggatacgttcctgcagcaaaaggctcagtctctgaccaaggatgtccagagctattacgtctttgtttcctcttggatgatgaaaatggagtccatcttgtcaaaggagcaacggatggataaattcgccgaggatcttactaaccggtgcaatgtgttcatccaaggatttctgtacgcctactcaatcagcacaataatcaagactacaatgaatctctacatgtctatgcagaagcctatgactaagacatctgtcaaggccctctgccgcttagtcgaactcctcaaggcaattgagcacatgttctaccgacgctcaatggttgtggccgactcagtttcgcacataactcaacatctccaacatcaagctctgcattccatctccgtagccaagaagagggtgatttccgataagaaatactccgaacagcgactggacgtgctctcagctctagtgttggcggaaaacactctaaacggaccctccaccaagcagcggcgattgatcgttagtcttgccttgagcgttgggactcagatgaaaaccttcaaggacgaggagctctttccactgcaggtggtgatgaagaagctggacctcataagcgagctccgcgagagagtacagacccagtgtgattgctgcttcctttactggcatcgagcagtgtttcccatttacctcgatgacgtgtacgagaatgcagtggacgctgcgaggctccactacatgtttagtgcactgcgggactgtgtgccagcgatgatgcacgcaagacatctcgagtcttacgagatcctcctcgattgctacgataaagaaataatggaaatcctgaacgagcacttgctggacaagctgtgtaaggagattgagaaagatctgaggctgtcggtgcacactcatttgaaacttgatgatagaaacccgttcaaggttggaatgaaagatcttgcacttttttttagtcttaaccccatcaggttcttcaaccgcttcattgatatcagagcctacgtcactcactatctggataagaccttttataacctgaccacagtggcgctccatgactgggctacgtactctgaaatgaggaatttggcgacgcagaggtatggcctggttatgacggaggcacacctgccttctcagactttggagcagggactggatgttcttgaaattatgcgaaacatccacatctttgtgtcaagatatttgtacaatctgaacaaccaaattttcattgagcgtactagcaataataaacatttgaatacgatcaatattcggcacatcgcgaatagcatcagaacgcacggtacaggcatcatgaatacgactgtcaattttacctaccaattcctgaagaaaaagttctatatctttagtcagtttatgtacgatgaacacattaaaagccgcctcatcaaggacatccgatttttccgtgagatcaaggaccagaacgaccataaatacccatttgaccgggctgaaaaatttaaccggggcatcagaaagctgggtgtcactcccgaaggccagagctatctggatcagttccgtcagctcatctcacagatagggaatgccatggggtacgtaagaatgatccgctccgggggcctgcattgttcgtccaatgctatcagatttgttcctgacctggaggacattgtgaactttgaagaacttgtgaaggaggaaggcctcgccgaagagaccctgaaagctgcaaggcatctggattccgtattatcggatcatacgcgaaattcagcagagggtacggaatactttaaaatgttagtggatgttttcgctccagagtttcggcgccccaaaaacatacacctgagaaacttttatataatcgttccccctctgaccctgaactttgtggaacattccatcagttgcaaagaaaagttgaataagaaaaataaaatcggagccgctttcacggacgatggctttgctatgggagtagcttacattctgaagcttctcgaccagtatagagaatttgattctctgcactggttccagtctgtgagggaaaagtacctgaaagaaattagagcagtggccaagcagcagaatgttcaaagcgcctcacaggatgaaaagttactccaaacgatgaacctgacccaaaagcgactggacgtatacctgcaagaatttgaactcctctattttagcctgagctcggctaggatttttttccgggccgacaaaactgctgccgaggagaaccaggagaaaaaagagaaggaagaagaaacaaaaactagcaatggtgatctttccgatagcaccgtgtctgccgaccccgttgtgaagtag

SEQ ID NO: 23622 - DNA, 972 bp, synthetic construct
  source 1..972: mol_type = other DNA; note = Synthetic coding sequence
atgctgcggtggaccgtgcacctggagggcggcccccggcgggtgaatcacgccgctgtcgctgtaggacaccgagtatacagtttcggcggctactgcagcggggaagactatgaaaccctgcggcagattgatgtgcatatttttaatgctgatacgcacaagtggttcacccccagggtcagcggtacagtgccgggagccagggatggtcactccgcttgcgtcctcggcaaaatcatgtatatcttcggaggctatgagcaacaggctgactgcttcagcaacgacattcacaagcttgacaccagtacaatgacgtggactctcatttgcactaaagggtccccggcccgatggcgagatttccattccgcaaccatgctgggctctcacatgtacgtttttgggggaagggccgaccgattcggaccctttcacagcaacaacgagatctactgtaatcgaatccgcgtttttgacacgaggaccgaggcctggcttgactgccctccaacacctgtactccctgagggtcgtcggagtcactccgcttttggatacaatggcgaactttatatcttcgggggttacaacgcccgactaaaccgccactttcatgacctttggaagtttaatccagtgtctttcacctggaaaaagatagaacctaaaggcaaggggccctgccctcggaggcgacaatgctgctgtattgtaggagacaaaattgtgctcttcggcggcaccagtccatccccagaggaaggcctgggcgacgagttcgatctgatagaccacagtgatctgcatattttagacttcagtccttcattgaagacactgtgtaagctcgccgtgatccagtataacctggatcaaagctgccttcctcatgacattagatgggagttgaatgctatgaccacaaattccaacatcagcaggccaatagtgtcttcccatgggtag

SEQ ID NO: 23623 - DNA, 2517 bp, synthetic construct
  source 1..2517: mol_type = other DNA; note = Synthetic coding sequence
atgaccggcgccgagatcgagcccagcgcccaggccaagcccgagaaaaaggcaggcgaagaagtcatcgccggcccagaacgcgaaaatgatgtgcccctcgtagtgaggccaaaggtccgaactcaggctaccaccggcgctcggccgaagaccgagacaaaatctgtccctgcagctagacccaagaccgaggctcaggcaatgtcaggagcccggccaaagacagaggtccaggtgatgggcggggctcgtcctaaaactgaggcgcagggaataacaggagctaggcctaagaccgacgcgcgcgccgtgggaggcgctcgctccaagaccgatgccaaggctatccctggcgctcggcctaaggatgaggcgcaggcatgggcccagtcagaattcggtacagaggccgtgtctcaggccgaaggggttagtcagacaaacgcggtcgcatggcctcttgcgactgctgaatcaggctccgtcactaagagcaaagggttgagcatggatcgagaactggtcaacgtggacgcagaaacttttccagggacacagggacagaaaggcatacaaccatggtttgggccaggcgaggagaccaatatgggctcttggtgttacagtaggccccgggcccgcgaggaagcgagtaacgaaagcggcttttggagcgccgacgaaacttccacagcatctagcttttggactggagaagaaacaagtgtgcgctcatggccaagggaggagtcaaacacgagaagcagacaccgcgctaagcatcaaactaacccaaggtcaagaccaagatccaagcaggaagcttatgtcgacagttggtcagggtctgaggacgaagcaagcaatccattttccttttgggtcggagaaaacactaacaacctgtttagacctcgcgtgcgggaggaggcgaacattagatccaagctgagaaccaacagagaagattgttttgaaagcgagtctgaggacgaattctacaaacaatcctgggtgttgccaggagaggaagctaatagccgcttccgccaccgggacaaggaagaccctaacaccgcattaaaattaagagcacagaaagatgtggacagtgatcgtgtgaagcaggaacccaggtttgaggaggaagtcatcatcggctcatggttttgggctgagaaggaggccagtctcgagggcggggcttcagccatctgtgaatcagagccgggcactgaggagggagctataggcggcagcgcatattgggctgaggagaaatcctctttaggggctgtggcgcgcgaggaagctaagcctgagtccgaggaagaagccatcttcgggtcttggttctgggatagggacgaggcctgcttcgatctaaacccttgcccagtctacaaggtgtctgatcggtttcgcgatgccgctgaggagctaaacgcgtcgtcaagacctcaaacctgggatgaagtgacagtagagtttaagcccggcttattccatggagtgggcttccgtagcaccagccccttcgggattcccgaggaagcttcagagatgctagaagccaagcccaagaacctagagctctcccccgaaggcgaggagcaggagagcctcctccagcctgaccagccctcccccgagttcactttccagtacgacccctcttatcgaagtgtgagagagatacgggagcatctacgtgccagggaatcggcggaaagcgaatcctggagctgctcatgcatccaatgcgagttaaaaatcggatcagaggaatttgaagaatttctactgctaatggacaaaatacgagaccctttcatacacgagatctcaaaaattgccatgggtatgcgatccgccagccagttcacacgggactttatacgggactccggagtagtctccctgatcgaaaccctgctaaattatccttcttccagggtccggacaagtttcctcgagaacatgatccacatggcgcccccttatccgaacctgaacatgattgaaacctttatttgtcaagtttgtgaggagaccctcgcgcactccgtagactcactcgaacagcttacgggaatccgcatgctgagacacttgaccatgaccattgattaccatacattgatcgctaattacatgtccgggttcctctccctcctaactacagctaatgccagaacgaaatttcacgtgctgaaaatgctgctgaacttgtcagaaaatcccgcagtcgcaaaaaaactattctcagccaaagcgctgagcatattcgtgggcctgttcaatatcgaagagactaatgacaatatccagatagttattaagatgttccagaacatctcaaacattataaaatccggcaaaatgtcccttatcgacgatgatttttcgttggagccattaatctccgcctttcgtgagttcgaggaacttgccaaacagctccaggcccagattgataaccagaacgatcctgaggtggggcagcagagttag

SEQ ID NO: 23624 - DNA, 2649 bp, synthetic construct
  source 1..2649: mol_type = other DNA; note = Synthetic coding sequence
atgcccggccgggcccggacccgggcccggggccgggcccggcggagggagagctaccaacaggaagcacctggcgggccacgggctccaggatcagcaaccacacaggaaccgccccagttgcagtccacaccacggcctctacaggaagaggtgcccgtggtcaggcccctccagcctagggcagccagaggaggcgccggagggggagcacaaagccagggcgttaaggagcctggaccggaagcggggttacataccgcccctctgcaggaacggagaattggtggagtcttccaggacctcgtggtgaacacgcgccaggacatgaaacacgtcaaggactcaaaaaccgggtccgagggtactgtggttcagctgctggccaaccatttccgggtgattagtcgcccccagtgggtcgcatataaatataatgtggattacaaacctgacattgaggatggcaatctgcggaccatcctcctggaccagcaccggcggaagtttggagagcggcacatcttcgatggtaacagcctgttgctctcaaggcccctcaaggaaaggcgtgtggagtggctctccacaacaaaggataagaacattgttaaaatcactgtagaatttagcaaggagttgactcccaccagccctgattgcctcagatactacaatatcctcttcaggcggactttcaagctattggactttgagcaggtgggccgcaactactacacgaagaagaaagccatccaactttataggcacggaacctcgcttgagatctggctgggctacgtaactagcgtgctccaatacgaaaactccatcactctttgcgccgacgttagccataagctacttaggatcgagaccgcctatgacttcatcaagcgcacatctgcccaggcacagactggcaacattcgggaggaggtgactaataagctgatcgggtctattgtcctaacaaaatataataataagacctatcgggtggatgatatcgactggaagcaaaatccagaggatacattcaataaaagtgacggctcaaaaataacttatatcgactactatcggcaacagcataaagagatcgtgaccgtgaagaagcagcccctcctggtctcccagggcagatggaagaagggactaactggaacgcaaagggaacctatcctcctgatcccccagctctgtcatatgaccggcctcaccgacgagatatgtaaggattactcgattgttaaggagctcgcaaaacatacccggttgagtccacggaggaggcatcacactctcaaggaatttataaatacgctgcaagacaataaaaaagtgagagaactgctgcagttgtgggatctgaagtttgacaccaatttcttgtctgtaccaggtcgggtcctgaagaacgcaaatattgttcaaggcagaaggatggtcaaagctaatagtcagggggactggtctcgtgaaatccgcgagctccccctcttgaacgctatgcccctacatagttggttgatactgtactcccggtcgagccaccgagaagccatgtcccttaaaggccaccttcaatctgtgaccgcccccatgggcatcacaatgaaacccgctgagatgattgaggtagacggggatgccaacagctacatcgatacgttgcgcaagtacacacgccccaccctccagatgggaatgagctgcctgctcgtatttaaggtgatctgcattctgcccaatgatgataaacgccgctacgatagcatcaaacgatacctttgtacgaaatgcccaatcccttcccagtgcgtggtgaaaaaaactctggaaaaagttcaggctcgtaccatcgttaccaaaatcgctcaacagatgaattgcaaaatgggaggggccttatggaaagtagagaccgatgtgcagaggactatgtttgtgggcattgactgctttcacgatattgtgaacagacagaagtccatcgccggtttcgtggcatcaaccaatgcagaactaacaaagtggtactcacagtgcgtgatccagaagaccggagaggagctggtgaaggagctggagatctgtctgaaagccgccttagatgtgtggtgtaagaatgagagcagtatgccacatagtgtcattgtgtaccgtgatggtgtgggggacggacaactgcaggccctgctggaccatgaggctaaaaagatgtccacgtatctgaaaacgataagcccaaataatttcaccctcgcttttatagtggtcaagaagcgcattaatacacgattctttctcaaacacgggagtaattttcagaatcctccccctggcactgttatagatgttgagctgacacggaacgaatggtacgacttttttatcgtgagccaaagtgtacaggatggtacggttacacctacccactacaatgtcatatatgacactatcggcctctccccagacacggttcagaggctgacatactgtctctgccatatgtattataacttacctgggatcattagggtcccagctccctgtcactacgcccataagctggcctacttagtcggtcagagtatccatcaggagccaaatcggtcccttagcacacgcctgttttacctgtag

SEQ ID NO: 23625 - DNA, 1917 bp, synthetic construct
  source 1..1917: mol_type = other DNA; note = Synthetic coding sequence
atgaaccggcaggtgtgcaagaagagcttcagcggccggagccaggggttttctggcaggagcgctgtggtttccggaagctctcggatgagttgcgtagcgagaagcggaggagccggcgggggagcatgcggcttccgctccggagcaggcagcttcggatcaagatctctgtacaacttggggtctaacaaaagtatttctatatcagttgccgcagggtctagccgagctggcggattcggggggggaaggtcatcctgcgggttcgcaggcgggtacggcggcggcttcggaggctcttatggaggcggcttcggcggcggtaggggtgtgggcagcggtttcgggggggctggcggtttcgggggggccggcgggttcggcggaccaggggtgttcggaggcccagggtctttcggcgggccaggcgggttcggcccaggcggcttcccagggggaatacaggaggtcattgtgaatcagtcactcttgcaaccccttaacgttgaaatagacccgcagatcggccaggttaaggcccaggagcgggagcaaataaagacgcttaacaacaaattcgcgagttttatcgacaaagtcaggtttttggagcagcagaataaggtgttagaaacaaagtgggagctgctgcagcagcagacaaccggctctggcccttcttcactcgagccctgttttgagtcctacattagcttcctctgtaaacagctcgactctctgctgggggagcgtgggaacctagagggcgagctaaagtcgatgcaggatctcgtggaggactttaagaaaaagtacgaggacgagattaataagcggacagcggcagagaatgaattcgtcggcttaaagaaggacgtggacgccgccttcatgaacaaggttgagctgcaagcaaaggtggacagcctgaccgacgaggtgagtttcctacgaacgttgtatgagatggaactgtctcagatgcagagccacgcatcagataccagcgtcgtgctgagtatggataacaacagatgcctagatttaggaagtattatagccgaagtgagggctcagtacgaggaaattgcacagcgatctaaaagcgaagcggaagccctctaccagaccaaactcggcgaactgcagactacagcagggcgacacggagacgaccttcggaacactaagagcgaaatcatggaacttaaccgtatgatccagagacttcgtgccgagatcgaaaacgtgaagaaacaaaacgcaaatctccagaccgcgatcgccgaggccgaacagagaggggaaatggcactcaaagacgcgaacgccaaactacaggatcttcagactgctctgcagaaggccaaggatgacctggcacggctcttgcgcgattatcaggagctgatgaacgtcaaattggccctcgacgttgaaattgccacctatcgaaagctgctagagggcgaggaatgccgcatgagtggcgaatgtcagagtgccgtctgcattagcgttgtgtcaaatgtgaccagcaccagtggctcttcaggaagtagtcgtggcgtgttcgggggtgtcagcggcagcggctctgggggttacaagggcggttctagcagttcgagtagcagtggctacggtgtctccggcggatctggctccgggtatggcggggtgagctcaggttctacgggcggacgcgggagctcgggttcatatcagagctctagtagcggaagccggctcgggggggccggatctatatctgtgagccactccggcatgggctcttctagtgggtcgatccagacatctggcggaagcgggtataagagcggcggcgggggttccacttccattcggttctcacaaacaacctctagctctcagcactctagcaccaagtag

SEQ ID NO: 23626 - DNA, 1080 bp, synthetic construct
  source 1..1080: mol_type = other DNA; note = Synthetic coding sequence
atggccgagcccttcctgagcgagtaccagcaccagccccagacctccaactgtactggagccgcagctgttcaggaagaactcaatcctgagaggcccccaggcgctgaggagcgtgtgcccgaggaggactcgagatggcaatctagagctttcccccaacttggcggaaggccaggcccagaaggcgaagggtctctagagagtcaaccacctcctttgcaaactcaagcatgccctgagtcatcatgcttaagggagggtgaaaaggggcagaacggagacgatagcagtgccggcggagacttccctcctccggcggaggttgagcctaccccagaggccgaacttctggctcagccgtgccatgactcagaagctagtaagctgggcgcacccgcagccggtggcgaagaggaatggggccagcagcagagacaattaggaaaaaaaaagcaccgccgccggccttctaagaaaaagagacactggaagccctactacaaactaacctgggaggaaaaaaaaaagttcgatgaaaagcagtccctgcgcgctagtcgcattagggctgagatgttcgccaagggccagcccgtcgcaccttataacactacgcagttcctaatggatgatcacgaccaggaggaacccgacctgaaaactggcctgtactccaaacgagccgcggctaagtctgatgatacaagcgatgacgattttatggaggaaggaggagaggaagatggaggctctgatggaatgggcggcgacggctctgagtttttgcagcgggatttttcagagacctacgagaggtaccacacagaaagtcttcagaacatgagtaagcaggagctcataaaagaatacctggagctggaaaaatgcttgtctcggatggaggatgaaaacaatagattaagactggagagcaagcgattgggcggagacgatgccagggtgcgggaacttgagctcgaactggatagattacgagccgaaaatttacagctgttaactgagaacgagctccacagacaacaggaaagggctcctctgagtaaatttggagactag

SEQ ID NO: 23627 - DNA, 2889 bp, synthetic construct
  source 1..2889: mol_type = other DNA; note = Synthetic coding sequence
atggacgagcaggccctgctgggcctgaaccccaacgccgacagcgacttccgtcaacgtgcattggcctatttcgagcaactcaaaatctcccctgacgcttggcaggtctgcgccgaagctctagcccagcgaacatacagcgacgatcacgtaaagttcttctgtttccaggtgctggaacaccaggttaagtataaatactctgagttaacaactgtccagcagcagttgatccgtgagaccttaatcagctggctgcaggcccagatgctgaatccccagcctgagaaaacatttatccggaataaggccgctcaggtgtttgcactgctgttcgtcactgaatacttgactaagtggcccaaattcttttttgacatcctcagcgtcgtcgatctgaatcccagaggtgtggatctttacttgcggatccttatggccatcgattcggagcttgtggatcgggatgtcgtccatacgagtgaagaggcgaggagaaacacattaataaaagacacaatgagagaacagtgcattccaaacctggtcgaatcatggtaccagattttacaaaactaccaatttaccaattcagaagtaacgtgtcagtgtttagaggtggtgggcgcctatgtgtcttggatcgatctcagtcttatcgccaacgatcggtttatcaacatgctgctgggacacatgtccatagaagtgctgcgcgaagaagcatgcgattgcctgttcgaggttgttaataaaggtatggaccctgtggacaaaatgaagcttgtcgagtctctgtgtcaagtactccaaagcgcaggtttcttctccatcgaccaggaagaagacgttgactttctggctcggttcagcaagctggtcaatggcatgggtcaaagcctgatagtgagttggtccaagctgataaagaacggggacattaaaaacgctcaagaggcactgcaagctattgaaactaaggtggcattgatgctgcagcttctcattcatgaggatgatgacatctcctctaacatcatcggattctgctatgattatctgcacattttgaagcagctgacggtcctgtctgatcagcagaaggccaatgtggaagctatcatgctggccgtgatgaagaagctcacctatgatgaggagtacaactttgaaaatgagggtgaggatgaggcaatgttcgtggaatataggaaacaattaaaattactgcttgatcgtttggctcaggtttcccccgagctgctgttggctagcgtccgacgggtgttttcctcaaccctccagaactggcaaacaaccaggtttatggaggttgaggtggctatcaggctcctctatatgctcgccgaagccttaccggtcagccatggggcccatttcagtggagacgtgtccaaagcctccgcactccaggacatgatgcgtactctagtgaccagtggagtgagctcatatcagcacacttccgtgacattggaattcttcgaaacggtggtgcggtacgaaaagttctttacagtcgaaccccagcatattccctgtgttctgatggcctttcttgaccatcggggcctccgtcattccagtgcaaaggttagatcacgtactgcctatttattcagccgcttcgtcaaatctttgaataaacaaatgaatccattcatcgaggacatcctgaacaggatccaggacctgctggagctctcccctccagaaaacggccaccagagtctcctgtctagtgatgatcaattgttcatttacgaaacggccggagttctaatcgtgaatagcgaataccctgctgaaagaaagcaggcactgatgcgcaacctgctgactcccttaatggaaaagtttaaaatccttctcgagaaactcatgctggcccaggacgaggaacgccaagcctccctggcagattgcctgaatcatgctgtgggattcgcctccaggacgtccaaagccttctccaacaagcagactgtcaaacagtgcggatgctccgaagtgtacctcgactgcctgcaaacctttctaccggcactgtcctgcccactgcagaaagatattctgcgatccggggtgcggaccttcctccaccggatgatcatatgtctggaggaggaagtgctgccgtttatccccagcgcgagcgaacacatgttgaaagattgtgaagccaaagacttgcaggagtttattcctctgatcaaccaaataactgccaagtttaagattcaagtgtctcctttcctgcagcagatgttcatgccccttcttcacgccatttttgaggtgctcctccgccctgccgaagaaaacgatcagagtgctgccctcgaaaaacagatgcttcggagatcctacttcgcgttcctgcagacagtgacaggctccggcatgagcgaagttattgctaaccagggagccgagaatgtggagagagttctcgtgacagtcatccagggagcagtagagtacccagatcccattgctcaaaaaacatgctttattatcctgagcaagttggtcgagttgtgggggggtaaggacgggcccgtgggcttcgccgacttcgtgtacaagcacatcgtgccagcttgctttctagcacctctgaagcagacatttgatctggccgacgcccaaactgtactcgcgcttagtgagtgtgcagtgactttgaagacaattcacctgaagcgtggtccggagtgtgtacagtacctgcagcaagagtacctgccatcactacaggttgctccagagatcatccaggagttctgtcaggccctccaacagccagatgcaaaagtctttaaaaattacctcaaggttttttttcagcgagccaagccgtag

SEQ ID NO: 23628 - DNA, 2976 bp, synthetic construct
  source 1..2976: mol_type = other DNA; note = Synthetic coding sequence
atggccgagagcttcttcagcgacttcggcctgctgtggtacctgaaggagctgagaaaggaggaattctggaagttcaaggaattgttaaaacaaccactcgagaaattcgaattgaaacccattccttgggctgagcttaaaaaggcttcaaaggaagatgtagctaagctcctggataaacactatccaggaaaacaggcctgggaggtgacccttaatctgttcctgcagatcaatcggaaagacctgtggactaaggcgcaggaggaaatgcgaaacaaacttaacccgtatcgcaagcatatgaaagaaacgttccagctaatctgggaaaaagaaacatgtctccacgtgccagaacacttctacaaagagactatgaagaatgagtataaagaattaaacgacgcttatacagctgccgcccgcaggcacacagtcgttcttgagggtcccgatggaattggtaagacaacactgctccgtaaggtcatgctggattgggccgagggcaacctgtggaaggacagattcacctttgttttctttcttaacgtgtgcgaaatgaacggtattgctgagacgtcgctgcttgagctgctgtcccgcgattggcccgaatccagcgagaaaatcgaagacatcttctctcagcccgaaaggatcttatttatcatggacggcttcgaacagcttaagtttaacctgcagcttaaggccgatctgagtgatgattggcgacaaaggcagcccatgcctattatcctttcctctctgttacaaaagaagatgctgccagaaagctctctgcttattgcattggggaagctcgccatgcagaaacattacttcatgctgaggcacccgaaattaataaagttgctcgggtttagtgagagtgaaaagaagagctacttctcatacttttttggggaaaagtcaaaagcattgaaggtattcaacttcgtaagagacaacgggccactgttcattctgtgccataaccccttcacttgttggctagtgtgtacttgtgtcaaacagaggctggagaggggcgaagacctcgaaatcaattcccaaaacactacttatctatacgccagcttcctgaccacagttttcaaagcgggcagccagagcttccctccaaaagtaaatcgcgcccggcttaagtcactttgtgctctcgcggccgaggggatctggacttatactttcgttttttcccacggtgatctgaggaggaatggactatcggaaagcgagggggtgatgtgggtgggaatgcggcttcttcagcggcggggtgactgctttgcttttatgcatctgtgtatccaggagttctgcgccgccatgttctacttactgaaacgccccaaagatgaccccaatcctgctatcggttccattactcaactcgtgagggcatcagtcgtccaaccccaaacgcttcttactcaggtcggtatcttcatgttcggcatttcgacagaagaaattgtatcaatgctagagacctccttcggatttcctctgagcaaagatctgaagcaagagatcacacagtgcctggagtctctcagccagtgtgaagccgacagagaggccatcgcctttcaggagctgtttattggactgttcgaaacccaggagaaggagtttgtcaccaaagtgatgaatttctttgaggaggtcttcatctacatcgggaatattgaacatctggtgattgcttccttttgtctgaagcactgccagcacctgaccacactgagaatgtgtgtcgaaaacatctttccagacgatagcggttgcatcagtgactacaatgagaagttggtctattggagagagctgtgcagcatgtttattactaacaaaaacttccagattctcgatatggagaacacatctcttgatgatccatctctggctattttgtgcaaggccctggctcagccagtatgtaaactgcgtaaactgatatttacatcggtttattttggccacgactctgagctttttaaggctgtgctgcataacccccacctgaagctgctgtccctgtacggcacatcactttcacaaagtgacatcaggcatctctgcgaaaccctcaagcatcctatgtgtaaaatagaagagctgattctcgggaagtgcgacatctccagcgaagtctgcgaagacatagcctcagtgctggcctgcaacagcaaactgaagcatctgtctttggtcgaaaacccgcttagagatgaaggcatgactcttttgtgcgaagcactgaagcactcccattgtgctctggaacggctcatgctgatgtattgctgtctcacctcagtgtcctgtgatagtatcagcgaagttttactgtgctctaaaagtttgtcactgctggacctgggctctaacgctctggaagacaacggagttgcctccctatgtgccgcactgaaacacccgggttgctcaatccgggagctgtggctgatgggatgtttcctaacttcggattcctgcaaggacatcgcggctgtgcttatctgtaacgggaaactcaagaccctgaaactcggacataacgagattggggatacaggagtgcggcaactctgcgctgctctgcagcatcctcattgtaaactagaatgtctgggtctgcagacatgtccaatcacccgggcatgctgcgatgatatcgctgcagcgctgattgcttgcaagacactgcggtctctcaacctggactggatagcgttggacgcagacgccgttgtagtcctctgtgaggctctcagccaccctgattgcgctcttcagatgcttggacttcataagtctggatttgacgaggagacccaaaaaattctgatgtctgttgaagagaaaatccctcatttgacgataagccatggcccttggattgacgaggagtataagattcgtggcgtgcttctctag

SEQ ID NO: 23629 - DNA, 534 bp, synthetic construct
  source 1..534: mol_type = other DNA; note = Synthetic coding sequence
atggccgccgtgaaggccagcaccagcaaggccacccggccctggtatagccatcctgtgtacgcccgctactggcagcactaccaccaggctatggcatggatgcaaagccaccacaatgcttatcgaaaggcagtggagtcctgtttcaacctgccttggtacttaccctccgctctactgccccagtcctcgtatgataacgaagccgcctacccccagagcttctacgaccaccacgttgcctggcaggattatccatgctctagcagtcatttccggcggagtgggcagcacccaaggtacagctccaggatccaggcaagtacgaaggaagatcaggcactaagcaaagaggaggagatggagaccgagtccgacgccgaggttgagtgtgacctgagcaatatggaaatcacagaggagctgcgccagtatttcgcagaaactgaaagacatcgcgaggagaggagaagacagcaacagctggatgccgaacgtctggatagttacgtgaatgccgaccacgactag

SEQ ID NO: 23630 - DNA, 1503 bp, synthetic construct
  source 1..1503: mol_type = other DNA; note = Synthetic coding sequence
atggtgggccggagctgcggcgtggccacccagcggcagggcggcgggcagcgaccaacaaatctcgcccttactctgagctccagccctgcccatagtacagcactgccatggctaccaccccgctcccttcagctgctatcagggcacagtgtgccagcacagcccacaccccacctgccttctgcctgtggtggacccacaagagtcacccttggcgaggaaagggcatggcgctcgcatgggagcaacgcaggtggccacacatgtctgccgaggcgcaccgccggcgctggctcactcacgcccggcggtgaaagaggaggaaataacgctggacacacagtcgtggtggacggtaaggagtatgattttcacctactcccctctggtattattaataccaaggccgttagctttatcggaaacggagtggtgatccacttgcccggcttattcgaagaagccgaaaagaatgagaagaaaggtctgaaagactgggagaaacggctgatcatctccgatcgagctcacctggtgtttgatttccaccaagctgttgacggcctgcaggaggttcagcggcaagcacaggagggaaaaaacatagggactaccaagaagggaatcggccctacttactccagcaaggccgcacgaacggggctcaggatttgcgatctcctttcagacttcgatgaattttccagcaggtttaaaaacctggcccaccagcatcagtccatgttcccgactctggagatcgacatagaaggccagctgaaaagactgaagggcttcgctgagagaatccgccccatggtccgagatggcgtctattttatgtacgaggcactgcacggaccccccaagaaaattttagtggagggagccaatgctgcgctgctggacatcgacttcggcacatatccatttgttacgtccagtaattgcactgtgggcggtgtctgcacagggctcggaataccacctcagaacataggagacgtgtatggagtggtcaaagcctacacaaccagggtgggcataggagcttttccaaccgagcagattaatgaaatcggcggcctgctgcagactagaggacacgagtggggagtgaccactggccgcaagcgaagatgcggatggttggatctgatgatcctgcggtatgctcatatggtgaacggcttcactgctctggctctcacaaaactagatatactggatgtcttgggagaagtgaaggtcggagtatcttacaagctcaacggcaagcggatcccatattttccggcgaatcaagagatgctgcaaaaggttgaggttgaatacgagactttgcctggatggaaagcagataccacaggagccagacggtgggaggatctcccaccacaagctcagaactacattcgcttcgtggagaaccacgtgggtgtcgcggtgaaatgggtcggagtcgggaagtctagagagtccatgattcagctgttttag

SEQ ID NO: 23631 - DNA, 468 bp, synthetic construct
  source 1..468: mol_type = other DNA; note = Synthetic coding sequence
atggtgaacagctgctgcggcagcgtgtgcagcgaccagggctgcggacaggatctgtgccaagaaacctgctgttgcccatcgtgttgccaaacgacctgttgtcgtacgacatgctacagaccatcctatagcgttagctgttgttgcagaccccagtgctgccaaagcgtgtgttgccagcccacctgctgcaggccgtcttgttgtgtgcctacctgctgtcatccctcgtgctgtatcagcagttgctgcagaccaagctgctgtgtctcctcctgctgtaagcctcaatgttgccagtccgtatgctgtcagcccaactgctgtaggcccagctgttgtcgcccatgttgctgcctcaggcccgtctgtggcagggttagctgtcataccacatgttatcggcccgcttgcgtgatttccacctgccccagacccgtgtgttgcgcaagttcttgctgctag

SEQ ID NO: 23632 - DNA, 2124 bp, synthetic construct
  source 1..2124: mol_type = other DNA; note = Synthetic coding sequence
atggccgccgaggccctggccgccgaggccgtggccagccggctggaaagacaggaagaggatattaggtggctctggtccgaagttgaacggctcagggatgaacagttgaacgctccttactcctgtcaggccgaggggccctgcctcacccgggaagtggcacagctgcgtgcggagaactgtgaccttcgacatcgactttgttctttacggctgtgtttggccgaagagcgaagtagacaggcaactctggaatctgcggaactggaggcagctcaggaagcgggggcgcagccgcccccctctcagtcccaggataaggacatgaaaaagaaaaaaatgaaagaatctgaggcagactccgaggtgaaacatcagccaatctttattaaggaacggctgaaactattcgagattctcaaaaaagaccaccagcttttactggctatctatggcaagaaaggcgatacgtccaatatcattactgtgcgtgtcgccgacgggcaaactgtccagggtgaggtctggaaaaccaccccatatcaagtagccgctgagatctcacaggaactggctgaatcaaccgtgattgccaaggtaaatggagagctgtgggaccttgaccgtcccctggagggcgactccagcttagagctcctgacgttcgacaacgagaaggtaaatacagcgactaccacggtctaccgatgcggtcccctgattgatctttgtaaaggcccccatgtgcggcacacggggaagataaaaactataaaaatttttaagaattcatctacctattgggagggcaacccagagatggagacactgcagcgcatttatggtatttcttttccggacaacaagatgatgcgtgattgggagaagttccaggaggaggccaagaacagggaccacagaaagatagggaaggagcaggaactcttcttctttcacgacctctccccaggctcctgtttcttcctgcctcggggagccttcatatacaacactctgacggattttatacgtgaagagtaccacaaaagggattttacggaagtgctgtcccccaacatgtacaattcaaagctgtgggaagcatcaggacattggcagcattatagtgagaacatgtttacctttgaaattgagaaggatacgtttgcgctcaaacccatgaactgccccggccactgcctgatgttcgcacacaggccccgcagctggcgggaaatgccaatcaggttcgctgatttcggcgtgctccaccgaaacgaactcagcggcaccctgtccggcctgacgagggtgcggagatttcagcaggatgatgcacatatattctgtacagtggaacagattgaggaagagattaaaggctgcctacaattccttcagagcgtctattccacctttggctttagctttcagttgaacctatcaactaggcccgagaatttcctgggagaaatagaaatgtggaatgaggccgagaaacagctgcagaattctttgatggatttcggcgagccatggaagatgaacccaggagacggcgccttctatggtccaaagattgacatcaagataaaggacgctataggccgctaccaccagtgtgccactatacagctggacttccagctgccgattagatttaacttaacatacgtaagcaaggacggggacgacaagaagcgccccgtgatcatccacagagccatattgggcagcgttgagaggatgatcgccattttaagcgagaattacggcggcaaatggcctttctggttatctccaaggcaggtaatggtcattccagtgggccctacctgtgagaaatacgcattacaagtgagctccgagttcttcgaggagggcttcatggccgatgtcgacctggaccattcctgcacacttaacaaaaagatccgcaacgcgcaactcgcccaatacaattttatattggtagtcggcgagaaggaaaaaatcgataatgcggtcaacgtccgcactagggataacaaaattcacggcgaaatcttggtgacaagcgctatcgacaaacttaaaaatctccgaaagacacggacgctcaacgccgaggaggccttttag

SEQ ID NO: 23633 - DNA, 816 bp, synthetic construct
  source 1..816: mol_type = other DNA; note = Synthetic coding sequence
atggccggcctggaggtgctgttcgccagcgccgcccccgccatcacctgccgccaagacgccctggtttgtttcctacattgggaagtggtcacgcacggttatttcggcttgggcgtgggtgaccagcccggtccaaacgataaaaagagcgagctcctccctgccggatggaacaacaacaaggatctctacgtgctcaggtacgagtacaaggacggctcccggaagttgcttgtgaaggcaatcacagttgagtccagcatgattctcaacgtcctggagtacggaagccaacaggtggccgacctgacactgaatcttgatgattatattgacgctgaacacttgggggattttcatagaacgtacaaaaattccgaggagctgagatcccgtatagtctcagggattattacccccatccatgaacaatgggagaaagccaatgtgtcctccccccaccgtgagttccctcctgcaacagctcgggaggtggaccctttgcggattccaccccatcacccacacacatcacgccagccgccctggtgcgatcctctgggtccatttgtcgtgggaggcgaggatttggatccttttgggcctagaagaggaggtatgattgtcgatccactccggtccggatttccccgtgcgctcatcgatccatcctctgggctgcccaatcgcttaccacccggcgctgtccctcctggtgcccgctttgacccattcggaccaatcggtaccagcccccccggacccaacccggatcacctcccaccacctgggtacgatgacatgtatttgtag

SEQ ID NO: 23634 - DNA, 474 bp, synthetic construct
  source 1..474: mol_type = other DNA; note = Synthetic coding sequence
atggccaccccccccaagcggcgggccgtggaggccaccggcgagaaagtcttgagatacgagaccttcatctccgatgtgctgcagcgcgatcttcgaaaagtgcttgaccatagagataaagtttacgagcagctggccaaatacctacaattgcgcaatgttatagaacgcctccaggaggcaaaacattccgagttatatatgcaggtggaccttggatgcaatttctttgtggataccgtcgttccagacaccagcagaatctacgttgccctgggatacgggttcttcctggagctgaccttggccgaagcactgaaatttatagataggaagtcctctttgctgaccgaactgtccaactcccttactaaagatagtatgaacattaaagcacacatccacatgctcctggagggcttacgggaactccaagggctccagaatttcccagaaaagccccatcattag

SEQ ID NO: 23635 - DNA, 543 bp, synthetic construct
  source 1..543: mol_type = other DNA; note = Synthetic coding sequence
atgcaggccgagggccggggcaccggcggcagcaccggcgacgccgacggcccgggaggacccgggattcccgatggacctggaggcaatgccggagggccaggtgaggccggagctactggaggcagaggcccccggggggcaggggcagcccgtgcttcgggtcctggagggggtgccccacgcggccctcatgggggagccgcttcagggctcaacgggtgctgtcgatgcggagctagaggacccgaaagccggctgctcgagttctacttggctatgccttttgccactccgatggaggccgagctggcccggcgtagcctcgcccaagatgcaccccccctgccagtgcccggcgtgctgctcaaggaatttactgtgtctgggaacattctcaccatccggctgacagctgccgaccatcgccagctgcagctcagtatctccagctgcttacagcagctctctctgctgatgtggatcacacagtgttttttaccagtgttcctagcccaacccccaagtgggcagcgtagatag

SEQ ID NO: 23636 - DNA, 621 bp, synthetic construct
  source 1..621: mol_type = other DNA; note = Synthetic coding sequence
atgaccgccagcgtgctgcggagcatcagcctggccctgcggcccacatcagggctcctggggacatggcagacccagctccgcgagacccaccagagagccagcctgctatccttctgggaacttatcccaatgcggagcgaacctttacggaaaaagaagaaggtagaccccaagaaagatcaagaggcgaaagagaggctaaaaaggaagatacggaagctggaaaaggccactcaagaactgattccaattgaagactttatcacccctctcaaatttctggataaggctcgggagaggccacaggtggagctgacttttgaggaaaccgagagacgagccttgctgctaaaaaagtggtcattatacaaacagcaggagcgcaagatggaacgggataccatcagggcaatgctcgaggctcagcaggaagcattggaggagctccagctagaatcacctaaactgcacgcagaggccatcaaacgcgatcccaacttgttccctttcgagaaggaaggtccacactacacccctccaattcctaactatcagcccccagaaggaagatataacgacataactaaagtatacacccaagtggaatttaagaggtag

SEQ ID NO: 23637 - DNA, 6963 bp, synthetic construct
  source 1..6963: mol_type = other DNA; note = Synthetic coding sequence
atggccgagcccagcagcgcccggcggcccgtgcccctgatcgagtccgagctatacttcttgatcgcacggtacctttctgctggaccatgccgacgggcagctcaggtgttagttcaagaattagaacagtaccagctcctcccaaagcggctcgactgggaaggcaacgaacacaatcggagctatgaagagctggtcctttctaataaacatgtggctcccgatcatctactgcagatatgccaaaggatcggtccaatgctcgataaagagatccctcccagcatcagtagagtgacttcattgctgggagctggccgacaatctctcctacgcaccgccaaggactgtcgccatacagtctggaaagggagcgctttcgcagcgcttcatcggggccgtccaccagagatgccagtgaattacgggtcaccccctaacctggtcgaaatacaccggggtaaacagctgacgggatgtagcactttcagcaccgcgtttcccggcacaatgtaccagcacataaagatgcatagaaggatcctcgggcacctgagcgcagtttattgcgtagcttttgacagaaccggtcaccgcatattcaccggcagcgatgattgcctcgtcaagatctggtctacacacaacggacggttgttgagcaccctgagagggcactcggccgaaatttctgacatggctgtgaactatgagaatacgatgatcgcggctggatcctgtgacaagatcatccgcgtctggtgcctgaggacgtgcgcccccgttgccgtgctgcaaggccacacaggcagcatcacttcattgcagtttagtcccatggctaaaggcagccagcgttacatggttagcaccggcgctgatgggaccgtctgcttctggcagtgggacctggagtcacttaaattctccccaaggccgctcaagtttacggagaagcctcgacctggcgtgcagatgctgtgctccagcttttctgtgggcggcatgttcctcgcaactggatcaaccgaccatgtcatccgaatgtattttctcgggtttgaggcgcctgagaagatcgccgaactggagagtcacacagataaggtggattccatccagttctgcaacaacggggacagattcctgagcggatcaagggatggtacagctcgaatctggcggttcgagcagctggagtggagatctattctcctcgatatggctaccagaatttccggcgacctaagctccgaagaagaaagatttatgaaaccaaaggtcaccatgattgcgtggaaccaaaatgattcaatcgtcgtgaccgctgtcaatgaccacgtgttgaaggtgtggaattcatacactgggcagcttttacacaatctaatgggacacgctgacgaagtgtttgtcctggagacacatccctttgattcccggattatgctgagcgctggccatgatggctccatattcatttgggatatcaccaagggcactaagatgaagcactacttcaacatgattgaggggcaaggacacggagcggttttcgactgtaagttcagccaagacggccagcacttcgcctgtaccgactcacacggacatttacttattttcggctttgggtgctccaagccgtacgaaaaaatccctgatcagatgttcttccacacagattacaggccactgatcagagatagcaataactacgttttggatgagcagactcaacaggccccacatctcatgccgccgccatttcttgtcgacgttgatggaaatcctcaccccaccaaataccagaggctcgttccagggagagaaaattctgccgacgagcacctcatccctcagttgggatatgtcgctacttctgatggggaggtcatcgagcagatcataagtctacagactaacgacaacgacgagcgttccccagaatccagcattctggacggcatgattaggcagttacagcagcagcaggatcagcgaatgggcgcagaccaggatacaatccctcgcgggctgtctaatggcgaggagaccccaaggcggggattccgcagattaagcctagatatacagtcgccccccaacattggactgcggcgcagtggccaagtggagggtgttagacagatgcaccagaatgccccccgaagtcaaattgccacagagagagatcttcaagcatggaaaaggcgcgtcgtggtccccgaagtccctctgggtatcttcaggaagctagaggactttagactagagaagggcgaagaagaacggaacctttatatcatcggccggaagagaaaaaccctacagctgtcacataagtcagatagcgtggtgcttgtgtcccagagccgccaacgtacttgtaggcggaaataccctaactacggacggcggaacaggtcatggcgcgagttatctagtggaaatgaatcgtcttcaagcgtgcggcatgagacgtcctgtgatcagagcgagggatctggttctagtgaagaagacgaatggagatctgaccgtaaatccgaaagctattccgagtccagcagtgattccagctcgcgctacagcgattggacagccgacgcaggaatcaacctgcagccgcccctgaggacctcctgcagacgcagaattaccaggttttgttcatcttctgaggacgaaattagcacagagaacttaagtccacctaaacggcgcagaaaaagaaaaaaggagaataaaccaaagaaagagaatcttcgtcgaatgactccagcggaactggcaaatatggagcatctctacgaatttcaccctccagtgtggattacagacacaaccttgagaaagagcccctttgtgccgcaaatgggcgacgaagtaatatacttccgacaaggtcatgaggcttatatcgaggctgtgaggcgcaacaatatctatgaacttaatccaaataaagaaccatggaggaaaatggacttaagagatcaagagttggtgaagattgttggaatcagatacgaggtcggacctcctacactgtgttgtctgaaactcgcatttattgaccctgctactggaaaattgatggacaagagcttctcaatccgctatcatgatatgcccgacgtgatcgatttcctggtactcagacagttctacgatgaggccagacagaggaattggcagagttgtgaccgctttaggagtattattgacgacgcgtggtggttcgggacagtgttgtctcaggagccataccaaccccagtatccagacagtcatttccagtgttatatcgtgagatgggacaacactgagatagaaaaattgagtccttgggatatggaacccatcccggacaatgtagatccccccgaggagctgggagccagtatctccgtcacaaccgacgaactggagaaactgctgtacaagccccaagcaggagagtggggacagaagtctagggacgaggagtgtgacagaattatttcaggaattgaccagttgcttaaccttgacatcgctgccgcatttgctggccctgtggatctatgcacctaccccaagtactgcactgtggttgcctatcctaccgacctgtacaccattcggatgagactggtgaacaggttttaccggcgcctttccgcccttgtctgggaggtcagatatattgaacataatgctcgaacattcaatgagcccgagtccgtaatagcacgaagcgccaagaaaattacagatcagctgcttaagttcataaagaatcaacactgtacaaatattagcgaactaagtaacaccagtgagaacgacgaacaaaatgcagaggacctggacgattcagacctgccaaagacctccagtggacggaggcgggtgcacgatgggaagaaaagtataagggctacaaattatgtcgaatcaaactggaaaaagcagtgcaaagaactcgttaatctcatcttccagtgcgaggatagtgagcctttcaggcaaccagtggacctcgttgagtaccccgactaccgagatattattgatacccccatggactttgggaccgtccgtgagactctcgatgccgggaactatgactcaccccttgaattctgtaaagacatacggctgatcttttccaacgcaaaagcctacacccctaacaaacgcagtaaaatatatagtatgaccctgcgcttgagcgccctgtttgaagaaaagatgaagaaaatttccagcgatttcaagattggtcaaaagttcaacgaaaaattacggcggagtcaaagatttaaacagaggcagaattgtaaaggcgacagccagccaaataagtcaattagaaatctcaaacccaaacgccttaagagccagaccaagatcattcctgagctagtcggaagcccaacacagagcacatcttcccgtacagcctacctgggcactcataaaacctctgcgggaatcagctctggggtcacttctggagactcgtctgacagcgcggaaagctctgagcgcagaaagcggaatagacccatcaccaacgggagcacattgtccgaatctgaagtagaagattcactggccacgagtctgtccagctctgcctcaagtagttctgaagagtctaaagaaagctctcgagcgagggaaagctcaagcaggagcggtctctctcgaagctcgaatctgcgtgttactcggactcgggccgctcaaagaaagacgggccccgtgagtctggccaatggatgtgggcgcaaagctacacgaaagcgcgtgtacctctcagactccgacaacaattctctcgaaaccggagagatcctcaaagctagggctggcaacaaccgaaaagtgctgaggaagtgcgcagctgtcgcagctaacaaaatcaagttgatgagcgacgttgaagaaaactcttcctctgaaagcgtgtgttctggtcgaaagctccctcacaggaatgcctctgctgtggcaagaaaaaagttgttacataacagtgaagacgaacagtcactgaagtcagagatcgaagaggaggagttaaaggacgaaaatcagctgttgccggtaagttccagccacactgctcagagcaatgtggacgaatccgagaatcgggacagcgagtctgagagcgacctgcgtgtggctcggaagaattggcacgccaacggttacaagtcacacactcccgctcccagcaagacaaaatttttgaagatcgaatctagcgaggaagattccaaatctcatgattcggatcacgcttgtaacagaaccgctggccctagcacctcagttcagaaactgaaagcggagagtatcagtgaggaagcagatagcgaacccggacgctctggggggcgaaagtataacacatttcataaaaatgcctcattcttcaaaaagactaagattctaagcgattctgaggattcagagagcgaagaacaggatcgagaagatggtaagtgccacaaaatggaaatgaacccgatatccggcaacctgaattgtgatcctatcgccatgtctcaatgcagctctgaccacggttgtgagacggatcttgactcggacgatgataaaattgaaaagccgaataactttatgaaagacagcgcaagccaggacaatggcctgtctcgcaagattagtcgaaagcgtgtgtgttcttccgactccgatagcagtctgcaggtcgttaagaaaagtagcaaagctaggacagggctccttaggatcaccagacgctgtgccgccactgcggccaacaagattaaactgatgagtgacgtggaggacgtttccctagagaacgtccacaccaggagtaagaacggccgcaagaaacccttacacctggcttgcaccactgccaaaaagaaactgagcgattgcgaggggtctgtgcattgcgaggtgccctcagagcagtatgcttgcgaaggcaagcctcccgatccagacagtgaaggatccacgaaagtcctgtctcaagctcttaatggggactctgattctgaagacatgctaaattctgaacacaagcaccgtcacactaacatccacaagatcgatgcgccaagcaagcggaaatcgagcagcgtgaccagcagcggtgaggacagtaagagtcatatacctggtagcgaaacggacagaactttctcctcagaatccaccctggcccaaaaagccaccgccgagaacaactttgaggtcgaacttaattacgggcttcgtcgatggaatggacgccgcttaaggacgtacggtaaggcgcccttctccaagacaaaagtcatccacgattcccaagagactgctgagaaggaagtgaaaaggaaacgttcacacccagagcttgaaaatgtgaaaatctctgaaacgactggcaattctaagtttcgccccgatactagttccaaaagttctgacctggggtcggtgaccgaatccgacattgactgtacagataacacgaagacgaaacgccgtaaaacaaaggggaaagccaaggtcgtgaggaaggagtttgtgccccgcgaccgggagcccaacaccaaagtacgcacctgtatgcataaccagaaagacgcggtacagatgccttctgagaccctgaaagctaaaatggtgccagagaaggtgccccgcaggtgcgctacagtggctgctaataagatcaaaattatgagtaacttgaaggaaacaatcagcggcccggaaaacgtgtggatccgaaagtcttccagaaaattgccccacagaaatgcttccgcagctgcgaagaaaaaactcctgaacgtctacaaagaggacgatacaacaataaactctgaatccgaaaaagaactggaggacataaatcgcaagatgctgttccttagaggctttagatcatggaaagaaaatgcacagtag

SEQ ID NO: 23638 - DNA, 2961 bp, synthetic construct
  source 1..2961: mol_type = other DNA; note = Synthetic coding sequence
atggccgagagcttcttcagcgacttcggcctgctgtggtacctgaaagagttgagaaaagaagaattctggaagtttaaggagctgctaaagcagcctcttgagaagttcgaactgaagccaatcccctgggctgagctgaagaaggccagtaaagaagacgttgccaaactgctcgataaacattacccagggaagcaggcgtgggaagtgactctgaacctctttctgcagattaaccgaaaagatttatggacaaaggcccaggaggagatgcgcaataagttgaacccataccgaaagcatatgaaggagactttccagttaatttgggaaaaggagacctgcttgcacgtgcccgagcatttttataaggaaacaatgaagaacgagtacaaggagctgaatgacgcctacaccgccgccgctaggcgacacaccgtggttctggagggacccgatgggatcggcaagacaacccttctgcgaaaggttatgttagactgggccgaagggaatctgtggaaagacagatttacttttgttttcttcctgaacgtgtgtgagatgaatggcattgcggaaacctctcttctcgaacttctgtctagggactggcccgagtctagcgagaaaatcgaagatatctttagtcaacccgaacggattctctttatcatggatgggtttgagcaacttaaatttaacctccagcttaaagcggacctttctgatgattggaggcagcgacagccaatgcctataattctgtcttccctgctccaaaagaaaatgctcccggaatcttctcttctgatcgccttgggaaagcttgccatgcagaaacactacttcatgctgaggcaccccaagcttatcaaacttctcggcttttctgaatcagaaaagaagtcttactttagttacttttttggcgaaaaatccaaggccctgaaggtttttaactttgtacgcgataacgggccccttttcattctgtgccacaatccgttcacctgctggctcgtgtgcacgtgtgtgaagcagaggcttgaacggggcgaggatttggaaatcaacagtcagaataccacatacctctatgcttcattcctcactactgtattcaaggcgggatcacaaagctttccccccaaagtgaatagagcccggctgaagtctctgtgtgctctggcggctgaaggcatttggacatatactttcgtgtttagtcatggggatttacgacgaaacggcctgtccgagtctgaaggagtcatgtgggttggcatgcgactgctgcaaaggcgtggcgattgttttgccttcatgcacctgtgtatccaggaattttgtgccgcgatgttttacctgctcaagagaccaaaagacgatcctaaccccgctatcggctctattacacagctggtgcgcgcgtctgtcgtacagccccagactctcctaactcaagtggggatctttatgttcggaatatccacggaggagattgtctccatgcttgagacctccttcggcttcccactgtcaaaagatctcaagcaggaaatcactcagtgcctggaatcactgtctcagtgtgaggcagatcgagaagcaattgcattccaagaactttttattggactgttcgaaacacaagaaaaggagtttgtgactaaggttatgaacttctttgaagaagttttcatttacattggcaacatcgagcatctggtgattgccagtttttgcctgaagcattgccagcacttgaccacgctgagaatgtgtgttgaaaatatctttcccgacgacagcggctgcatatctgattacaatgaaaagcttgtatactggagagagctgtgttcgatgtttattactaacaaaaactttcagatattagatatggagaatacctcgttggacgacccaagtctggctatcctgtgcaaggcgctggctcagcctgtgtgcaaactgcgcaaactcatcttcacctcggtgtatttcggtcatgattcagaattgttcaaggcggtgctgcataatcctcatttgaagttactgtcattatatggaaccagcttatcgcagagtgatattcggcacctgtgtgaaacgctcaagcatcccatgtgtaagatcgaggaattgatactgggcaagtgcgacatctcaagcgaagtgtgtgaagatatagctagcgtacttgcttgtaacagcaagctcaaacatctgtctctggttgaaaaccccctgcgcgacgaaggcatgacacttctgtgcgaagcactgaaacatagccactgtgccctggagcgacttatgctcatgtactgttgtctgaccagcgtgtcttgcgactctatctctgaggtgctgctgtgtagtaagagtcttagcctgctggatctgggatctaatgctcttgaggataacggggtggcgtctctgtgtgcagcgttaaaacatcccggatgtagcatacgggaattgtggctcatggggtgttttttgacgtcagactcatgtaaggatatcgctgccgtactcatctgcaatggcaagttaaagaccctgaaactggggcacaacgaaatcggagatactggcgtgaggcagctgtgtgctgcgctacagcacccccactgtaagcttgaatgcctggggctccaaacctgcccaatcacccgggcctgttgcgacgacatcgcggctgcactgattgcatgtaaaaccctacgatctctcaatctcgactggattgccctggatgccgatgctgtagtagtgctgtgcgaagctctgtcccaccccgactgcgccttacaaatgctcggtaattgccaaaaaagtttgggcgacaccgttgcaccaggtgagaatcattgttctattaaacatctcctgctgacacttcccattaatatgcaaaggcagctaagattacaaaaatag

SEQ ID NO: 23639 - DNA, 3039 bp, synthetic construct
  source 1..3039: mol_type = other DNA; note = Synthetic coding sequence
atggacgccctggacgccagcaagctgctggacgaggagctgtactcccgccagctctacgtactggggtcccctgcaatgcagcgaatccagggagcacgggttttagtttcaggactccagggcctgggggcagaggtggcaaaaaacttggttctgatgggggtcggctccttgacactccacgatccccacccaacatgttggagcgatttggcagcacagttcctgctaagcgagcaggatctggagaggtccagggccgaagccagtcaggagctgctggcgcagctaaaccgtgcggttcaggttgtggtgcatactggcgacatcaccgaggatcttcttctcgacttccaggtggtggtgctgacggctgcgaagttggaggaacagttgaaggtgggcactttatgtcacaagcacggggtgtgtttccttgcagctgacacgaggggcttggtcggacagctgttttgcgacttcggagaggattttactgtgcaggacccaaccgaggcagagcccttgaccgctgccattcaacatatatcccagggatcgccaggcatcttaaccctccggaaaggtgcgaacacccactattttagggacggtgatctggttacgtttagcgggattgaagggatggtggaactgaatgattgtgaccctaggagcattcatgtgagggaggatggaagcctcgagataggtgatacaacaacattctctcgttacctacgcggtggagccataactgaggtgaagagaccaaagacagtgcgacacaagtcactggataccgcactgctgcagccgcatgtagtggctcagagctcacaggaggtacatcatgcccactgccttcaccaggcattttgcgcccttcacaaattccagcacctgcacggcagacctccacagccttgggacccagtggacgccgaaaccgtcgtcggactggctcgggacctcgaacctttgaagcgaaccgaggaggaacccctcgaagaaccattagacgaggccttggtgaggaccgtggctctgtcaagtgccggtgttcttagtcctatggttgctatgcttggggccgtggctgcccaagaggtcttgaaagccatctcacggaagtttatgcctctggaccagtggctgtatttcgacgcgctggattgcctccccgaagacggggaactgttgccttccccagaggattgcgccctgcgtgggtctcggtacgatggacagattgcagtgttcggcgcaggatttcaagagaaactgcgacgtcaacactatctgttagtcggcgcgggagccatcggatgcgagcttctcaaggtcttcgctttggtaggcctcggcgccgggaactccgggggactcactgttgtggacatggaccacatagaacggagtaatttgtccagacagttcctgttccggtcccaagacgtgggccgaccgaaagctgaggttgctgctgctgctgctcgcgggctgaatcccgatctccaggtcatacctctgacatatcccctggatccaactaccgagcacatatacggggataactttttctcaagagttgatggggttgctgctgctttggactcctttcaggcgagacggtatgtggccgcccgatgcactcactacttaaaaccccttctggaggctggcacaagtgggacctggggctcagccacggtctttatgccacatgtgaccgaagcttacagagctcccgcctcagcagccgcatcggaggacgcaccataccccgtgtgcaccgtgaggtatttcccctctaccgccgagcacaccctgcagtgggcaagacatgagttcgaggaactgtttaggttgagcgcagagacgattaatcaccatcaacaggcccacacgtcacttgctgatatggacgagcctcaaactctcactctgctgaagcctgtcttgggagtcctgagggttcgcccccagaactggcaggactgcgtcgcctgggcacttggccattggaaactttgtttccattacggtatcaagcaactgctccgccactttcctccaaacaaagtcctggaggatgggactccattttggtctgggcctaagcagtgccctcagccactcgagttcgatactaatcaggacactcacctgctatatgtactcgcagccgctaatctttacgctcagatgcatggcctgcccgggagccaggattggacggctctgcgggaacttctgaagctgctgccgcagcccgatccacagcagatggcacctatattcgcctccaatctcgaactggctagcgcatcagctgaattcgggcccgaacagcaaaaggaattgaacaaggcattggaggtgtggagtgtgggcccaccgctgaaacccctgatgttcgagaaagatgacgacagtaatttccatgtggatttcgttgtggctgcagcgtccctaaggtgccaaaattatggaatcccaccggtgaatagagcacagagcaagagaattgttggccaaattattcccgccatagcaactactacagctgctgtcgcagggcttctgggcctcgagttatataaggtcgttagtggcccccgcccccgctctgcctttaggcattcctacctccatcttgccgaaaattaccttataagatatatgccattcgcacctgctatccagaccttccaccacttaaaatggactagctgggatagactcaaagtaccggctggtcagccagaacggactctcgaatccctgctagcgcatctgcaggaacagcatgggctgcgggtgcgcatcctccttcatgggagcgccttgctgtacgctgccggatggtcgccagagaagcaggcgcagcaccttccccttagagtaacagaactggttcagcagttgacaggacaagcgcccgcacctggacagcgtgtgctggtgctggaactcagttgtgagggggatgacgaagatactgcattcccgcctcttcactacgaactgtag

SEQ ID NO: 23640 - DNA, 360 bp, synthetic construct
  source 1..360: mol_type = other DNA; note = Synthetic coding sequence
atggtgcggaccaagacctggaccctgaagaagcacttcgtgggctaccctaccaactctgactttgagttgaaaacagcagagctgccgccactgaagaatggagaggtcctacttgaggcactgttcttaacggtggatccctacatgagagtggttgagagcaagaatgttgctcttcccaaggggacaatagtgcttgcgagccctggatggactacgcattcaattagcgatggaaaagacttggagaagctgctgaccgagtggcctgacacaattccgttatctctggccctgggaactgtgggaatgccagggctgacggcctattttggactgctggagatttgcgggtag

SEQ ID NO: 23641 - DNA, 1797 bp, synthetic construct
  source 1..1797: mol_type = other DNA; note = Synthetic coding sequence
atgggcggctgcttcagcaagcccaagcccgtggagctgaagatcgaagtggtgctgcccgaaaaagaacgaggcaaagaagagctcagcgcatcaggaaaaggtagcccccgggcctatcagggcaacggtactgccagacattttcatacagaggagcgcctcagtacaccccatccttacccaagcccccaggactgcgttgaggcggccgtctgccacgtaaaggatctcgaaaacgggcagatgcgggaggtcgagctcggctgggggaaagttctgttagtgaaggataatggagaattccacgcactgggtcataaatgcccgcattacggggcaccactagtgaaaggcgtgctgtctcgcggaagagtgcgctgcccttggcatggggcatgcttcaacatcagcaccggcgatctagaggactttccgggcctggatagcttacataaatttcaagtgaagatagagaaagaaaaagtttatgttcgggctagcaagcaagctttacagttgcaacggcgcaccaaagtaatggccaagtgcatctctccgtctgcgggctattcttcctctactaacgtcctcatcgttggagcaggagcagccggactggtgtgcgcggagacacttaggcaggagggattttcagatcggatcgtcctgtgtacactggatagacatctcccttacgatagaccaaaactgtcaaaaagccttgacacacagccagagcagttggcactgcgacctaaggagtttttccgcgcctacggaatagaggttctaacagaggcccaggtcgtgacagtggacgtgagaacaaaaaaagtggtgtttaaggacgggttcaagctggaatatagcaagttgctgttggctccggggagttctccgaaaactctcagctgtaagggcaaggaagtagaaaacgtctttacaatccgcacacctgaggatgccaatcgggtcgtgagattggctcgggggcggaatgtcgtggttgtaggagctgggtttctgggcatggaggtggcggcttaccttacagagaaggcacactcggtgagcgtagtggagctggaggagacaccattccgccgcttcctgggtgaacgggtgggtcgtgctctgatgaagatgttcgaaaacaaccgagtgaagttctacatgcagacggaagtaagcgaactgcgaggccaggaggggaaactgaaggaagtggtgttgaagtcctctaaagtggtgagagccgacgtctgtgtcgttggtatcggcgcagtacccgctactggcttcttaagacagagcggcatcgggcttgatagtaggggctttatacccgttaataaaatgatgcagacgaacgtgcccggggtcttcgccgccggcgatgcagtcacattccctttggcatggagaaacaacaggaaggtgaatatccctcactggcagatggcacacgcacagggaagggttgctgcccaaaatatgctcgcccaggaagcagagatgtcaaccgttccctacctgtggacagcaatgtttggcaaatccttacggtacgccggctatggcgagggcttcgacgatgtcatcattcagggcgatctggaggaattaaaatttgtggccttctacaccaagggggacgaagttatcgccgtggcgtccatgaactatgatcctatcgtgtccaaagtagccgaggttttggccagcggccgagccattcgtaaaagagaggtggagacgggagatatgtcttggttgaccgggaagggctcttag

SEQ ID NO: 23642 - DNA, 1854 bp, synthetic construct
  source 1..1854: mol_type = other DNA; note = Synthetic coding sequence
atgggcagctacctgagcgtgcccgcctacttcaccagccgggacctgtttcggtgcagcgagtgtcaagacagccttaccaactggtactacgaaaaagacggcaaattatattgtccaaaggattactggggcaaattcggagaattttgccatgggtgcagcctcctgatgacgggaccgtttatggtggcaggggaattcaagtatcaccccgagtgcttcgcctgtatgtcatgcaaagtaataattgaagacggagatgcatatgcgctcgtgcagcacgctactctatattgtggcaagtgccacaacgaggtggtgttagcccctatgtttgagaggctgagcacggagtcggtgcaagagcagttaccgtactcagttaccttaatttcgatgcccgcaacaaccgagggaagaagaggattttcagtctctgtcgaatctgcatgctctaactacgccaccacggttcaggtgaaagaggttaatcgaatgcacatctctccaaataataggaacgcaattcacccgggcgaccgcatcctagagataaatgggacacctgtccgtaccctacgggtggaagaggtggaagacgctatctctcagacctcccaaacacttcagctgttgattgaacatgacccagtttctcagcggctggaccagcttagactggaagctcggctcgcaccacacatgcagaacgccgggcatccacacgctctaagcactcttgataccaaagaaaatctggagggcactctgcgtcgccgcagtctgcgccgcagcaatagcatctctaagtcccccggcccttcatctcccaaagagccccttctgtttagcagggatataagccggagcgagagtttgcgttgcagctccagttattctcagcaaatcttccgcccttgcgaccttattcacggggaggtgctcggaaaggggttcttcgggcaggccataaaagtaactcataaagcaaccgggaaagtgatggtgatgaaagagctgatcaggtgtgatgaagagacccaaaagacattcctgactgaggtgaaagtcatgcgatcgctggatcaccctaatgtcctgaagtttatcggggtcctttataaagataagaaactgaacttgttgacagaatatatagaaggtggaaccctaaaggatttcctcaggagtatggacccctttccttggcagcaaaaagtcagattcgcgaaaggtatcgcttctggaatggcctatttgcattctatgtgcatcattcaccgcgacctcaactctcataactgcctgataaagctggacaagaccgttgtggtggccgattttggcctgagccgattgatcgtagaggaacgaaaaagagcgcccatggaaaaagctacaaccaagaagaggacacttagaaagaacgatcggaagaaacgttacacagttgtgggtaatccctattggatggcccccgagatgcttaacgggaaatcatatgatgaaactgtcgacatcttttcctttggaatcgttctgtgtgagatcatcgggcaggtgtatgcagacccggattgtctgcctagaacactggactttggcctgaacgtgaagctgttttgggagaaattcgttcctaccgactgccccccagcctttttccctctcgcagcaatctgctgccgcttggagccagagtcccgcccagctttcagtaagctggaagactcttttgaggcactatccttgtatctgggcgaactcgggattccgctgcccgcagagctggaagagttggatcatactgtaagtatgcagtatgggcttactcgggactcaccaccatag

SEQ ID NO: 23643 - DNA, 1338 bp, synthetic construct
  source 1..1338: mol_type = other DNA; note = Synthetic coding sequence
atgcgggagatcgtgcacatccaggccggccagtgcggcaaccagatcggagccaaattttgggaagtcataagcgacgagcacggaatcgacccaacaggatcttatcacggtgattccgacctccaactcgagagaattaatgtgtattacaatgaagccgctggcaacaagtatgtgcctagagctatcctggtcgacttggaacccggtacaatggactcagtgcggtctggcccattcggacagattttcagacctgacaactttgtgttcggccagagtggcgctggtaacaactgggccaaaggacactacacagagggtgccgaactcgtcgatagcgttctggatgtcgttagaaaggagtctgagagctgcgactgcctacaaggctttcagctcactcactctctggggggcggcactgggagtggcatggggaccctgctgatcagtaaaatacgggaagagtaccccgaccgcatcatgaatacattctctgtaatgccttcacccaaggtctcagatactgtggtcgagccttataacgccactctttctgtgcatcagttggtagagaataccgacgagacctatagcattgacaatgaggccctttatgacatatgttttcgaactttgaagctgacaacccccacctacggagacctaaaccacctcgtttctgcgactatgagcggcgtcaccacttgtctgcgtttccccggccagttgaatgccgatctgcggaagttagccgtaaatatggtgcctttcccaaggcttcattttttcatgcctggatttgcccctctaaccagtaggggcagccagcagtacagagccctgactgtacccgaacttacacagcagatgttcgattctaagaatatgatggctgcctgcgaccctcgccacgggagatatctgacggtggcggccatcttccggggccgcatgtcgatgaaggaggtggatgaacaaatgctgaacgtgcagaataagaatagttcctatttcgtggagtggattccaaacaacgtgaaaaccgctgtttgtgatataccacctcgcgggctgaaaatgtcagctacgttcatcggaaattccacagcgatccaggaactgttcaaacggatttccgagcagttcaccgccatgttccgcagaaaagcttttctgcactggtatacgggggagggtatggatgagatggagttcacagaagccgagtctaacatgaacgatttagtctccgaatatcagcaatatcaggacgccacggctgacgagcagggcgagttcgaggaggaggagggtgaagacgaggcctag

SEQ ID NO: 23644 - DNA, 2028 bp, synthetic construct
  source 1..2028: mol_type = other DNA; note = Synthetic coding sequence
atggccaagcacggcgccgacgagcccagcagccggagcggcagccctgacagagaagggagagcgagtgaggacagatcgctgctccatcagcggctggccgtgagggaactgatcgacaccgaagtgagttaccttcatatgttgcagctgtgcgcatctgatattaggtcccgtctgcaacagctgccccagggagatctggacgtattgtttagtaacatcgatgacataatcaaggtcaatagcaggttcctgcacgatttgcaggagacggcctcaaaggaagaggagcaggtccagctggttggtaatatttttctggaattccaggaagaactcgaacaggtttataaggtctactgtgctagctacgatcaggccctgctgttggtggatacctaccgcaaagaaccagaattgcaaaggcacatacagggaatcgtggaagctgtagttccacaagctgggtcttccgggctgtccttcctcctggtcatcccattacagcggattactcgctacccgttgctccttcaaaaaattcttgaaaataccgtgccagatgcatctgcctaccctgtattacagagagctgtgagtgctctgcaggacgtgaacacaaacattaatgaatataaaatgcggaaggaagtggcaagtaagtataccaaggttgagcagttgacgctgagggagcgtcttgccaggattaacacacacaccttgtcaaaaaagactaccaggctgtcacaactgctcaagcaagaagcaggcctcattccgcgaaccgaggacaaggagtttgacgacctggaggaaaggttccaatgggtgtccctgtgcgttaccgaactaaagaataatgtagccgcctacctcgataatctccaagcttttttatatttcaggccccatgagtacaacctggatatcccagaaggccccgctgtccaatattgtaatttagccagggatcttcatctggaagcgttcctgaaatttaagcagcggctggagggcctggtctggcagcccctctgttctctcgccaaggcgttgctcgggccccaaaacctgatcaaaaagcgattggacaaactcttagacttcgaaagggtcgaggaaaagctgctggaggttggctcggtcacttatcaggaggaggccgcccggcacacctatcaagccttgaactctctcctggtggctgagctgccacagtttaaccagctagtcatgcagtggctcggacagatcatgtgcactttcgtaacgctgcaacgggacctggcaaagcaggtgctccagagggcagagggctcaatggctcagttgccccaccaccatgtacccgaacccgctttccggaagctggttgaagacgccctcggaaggacttccaaccagctcagaagctttcaggaaacctttgaaaaggtccaaccacctcctacgacacagcccctattgcccggatctgagcgtcaggtgcaggcactgttgtctcggtatggcccaggaaagctttatcaggtcactagtaacatttccggcacaggcacacttgatcttacgttacccagagggcagatcgtcgccatcttgcagaataaagacaccaaggggaattccgggcgctggcttgtagatacaggcgggcataggggctatgtgccagcaggtaagctccagctgtatcacgtggtcccttccgccgaggagttaagacgccaggccggtttgaacaaggatccgcggtgtctgacccccgaaccaagtcccgcactggttcctagtattcctaccatgaaccaagtaattgcggcctacccgtttgtagcccgctctagccacgaagtgtccctgcaggcggggcaaccagttacaattctagaggctcaggataaaaagggcaacccggagtggagtctggtggaagtgaatggccagagaggctacgtcccttctggattcctagccagagcccggtcaccagtcctctgggggtggagccttccctcctag

SEQ ID NO: 23645 - DNA, 3399 bp, synthetic construct
  source 1..3399: mol_type = other DNA; note = Synthetic coding sequence
atggccagcgacggcgccagcgccctgcccggccccgacatgagcatgaaaccctcagccgccccatcaccttctccagcgctgcccttcttgcctcccacgtccgaccctcccgaccaccctccgagggagcccccaccacagcccattatgcctagtgtgtttagtcccgacaatcccctgatgttaagtgcctttccttcctccttactggtgaccggcgacggaggaccatgcctgtctggagcaggggcaggaaaggttattgtcaaagtgaaaacagagggcggttcggctgagccatctcagactcagaattttatcctcacgcagaccgccctgaattctacagcccctggaaccccttgtggcggactggaaggacccgcaccacctttcgtcactgctagtaacgttaaaacgattctcccatctaaggctgtgggggtgagccaagagggtcctcctggtctacccccacagccccctcctcctgtggcgcagcttgtgcccatcgtgccattagagaaggcttggcccggcccccatggaacgacaggagaaggcgggccagttgccactctgtccaagccctcactcggcgacagatccaagatttcaaaagatgtgtatgagaattttcgtcagtggcagcgatataaggcactggctcgacgccacctgtcccaatcgcctgataccgaggctctgtcttgtttccttattcctgtcttacgttcactggccagactcaagcccaccatgacccttgaggagggcttgccactggccgttcaggaatgggaacatacgtctaacttcgacaggatgatcttctacgagatggcagaaaggtttatggaatttgaggccgaggaaatgcagatacaaaatacacagttgatgaacggctcacaaggattgtctcctgcaacaccccttaagcttgaccctctgggaccgctggcctccgaagtgtgccaacagcctgtgtatatccccaagaaagcagccagtaagacacgagcacccagacgtagacagcggaaagcccagagaccacccgcccccgaggcccccaaagaaatccctccggaagccgtgaaagaatacgtcgatattatggagtggttggtgggcacccacctggcaaccggcgaatctgatggaaaacaggaggaagaaggacagcagcaagaggaggagggtatgtaccccgatccaggccttctgagctacatcaacgagctctgttcccagaaagtgtttgtctcaaaggttgaagccgtgattcatccacaattcctcgctgacttgttaagtccagagaaacagcgggaccccctggcattgatcgaggagctagagcaagaggaaggtcttactctggcccagttggtccaaaagaggctcatggcccttgaagaagaggaggatgccgaggcccctcctagtttttctggggcccaactagatagcagcccctccggtagcgtcgaagatgaggacggtgatggacggctgaggccatctcccggtctccaaggagcaggcggggcagcctgcctgggcaaggtctctagctcaggcaaacgggcaagggaggtccacgggggccaggagcaggctttagatagcccgcgaggaatgcacagggacggcaacacccttcccagtcccagttcctgggacctgcagcctgagctggccgcccctcagggcacccctgggcctttgggagtggagcgaagaggctccggaaaggtcattaatcaggtatcacttcatcaggatgggcatctcggaggggcgggccctccgggccattgtttggtggcagaccgcacatcggaagccttacccttatgttggcagggcggtttccagccagagtccacgccatcgctggacgccggactcgccgagctggcccctctacagggccaaggcctcgaaaaacaggttctggggctccagaaaggccagcagaccgggggccgtggcgtgcttccacagggaaaagagcccttagccgtgccttgggaaggatcctctggggctatgtggggagacgatcggggaactccaatggcccagtcttacgaccagaatcctagtccacgcgccgcaggggagagagacgacgtgtgcttatccccgggcgtgtggctgtcgtcagagatggatgccgtgggactcgagctgccggtccagattgaagaagtgatcgaatccttccaagttgagaagtgcgttacagagtaccaggagggctgccagggcttgggatcacggggaaatatctccctaggcccaggggagacattggtgcctggagatacagaaagctcggtgataccgtgcggcggcactgtagcagccgctgctctggaaaaacgcaactactgttctctacctgggcccttgcgggcaaactcccctcccctcaggtcgaaagaaaaccaggagcagtcttgtgagactgtcgggcacccctcggatctgtgggcggagggatgctttcctcttctggaatcaggcgactctacgctcggaagctctaaggaaacactaccgcccacttgccagggaaaccttctcattatggggactgaagatgcctctagcctcccagaggcatcccaagaggccggctcaagaggaaattcttttagccccctgttggaaacgatcgagcctgtgaacatactagatgttaaggacgactgtggactccagctgcgtgtttctgaagatacatgccctcttaacgtgcattcatacgaccctcaaggggagggacgagtggatccggacttatctaaaccgaagaaccttgcccccctgcaggaatcgcaggaaagctatacgacagggactcccaaggctacatccagtcaccagggactgggctctacactgccgcgtcggggcacccgcaatgccatcgtcccaagggagacatctgtatcgaagactcaccgcagcgccgatcgtgctaagggaaaggaaaaaaaaaaaaaggaggctgaggaggaggacgaggagttgtctaatttcgcctacttgctggcctcaaaactctctctgtcaccacgagaacaccccttgtcccctcaccatgcctcaggtggacagggaagtcagcgcgcgagccatctgctacctgcgggggccaagggcccatctaaactcccttacccagtagcaaagtctggcaaaagagcactagccggcggccccgcaccgactgagaagacgcctcactcaggggcgcagcttggcgtgccacgagagaaacccttggctcttggtgtggtacgtcccagccaaccaagaaaacgaaggtgcgacagcttcgttaccggtcgcaggaagaagaggagacgatcccagtag

SEQ ID NO: 23646 - DNA, 522 bp, synthetic construct
  source 1..522: mol_type = other DNA; note = Synthetic coding sequence
atggccgtggccgtgggcgtgcgggccgcccccgtgctgggcctggcccgcgcactcgttctgggtcttaggggaagccaggccgcccgctggcgcgggtggggcacggccgcacccggttcattgtgggcactgtgtgaatgccccgctgggtgtcgcgagctatggtttcggggtcgagcggcctgggccgcacgatcagaaagactgcttcaccccgcacaggactctgacggcgagcgggaggattccgccgcagagcgggctaggcagcagctagaagcgctgcttaataaaaccatgcgcatcagaatgacagacgggagaactcttgtaggatgctttctgtgtacagaccgagattgtaacgtgatcctcggaagcgctcaggagtttctgaagcccagcgactcattctctgcaggggaacccagggtgctcggactcgctatggtacccggccaccatattgtgtctatcgaggtccagcgtgagtcgcttaccggacccccttacttgtag

SEQ ID NO: 23647 - DNA, 558 bp, synthetic construct
  source 1..558: mol_type = other DNA; note = Synthetic coding sequence
atggtgaacagctgctgcggcagcgtgtgcagcgaccagggctgcggtcaagacttgtgtcaggagacttgttgttgcccatcatgttgtcagaccacttgttgccggactacatgctacaggccctcttattctgtcagctgttgctgccgccctcagtgttgccagtcagtttgttgtcagcccacttgttgccgtccctcttgttgcgtttcctcttgctgcaaacctcagtgttgccagtctgtctgttgccaacccacctgttgtcacccctcgtgctgcatcagttcttgctgtagaccttcatgttgtgtgtcatcttgctgcaaacctcaatgttgccagagtgtgtgttgtcagccaaactgttgtaggcctagctgctccatttcctcatgctgccgaccctcttgctgtgagagcagctgttgcaggccatgttgctgcttaagacccgtctgtggccgcgtctcatgccacaccacatgctaccgtcccgcttgcgtcatctctacatgtccgcggccggtgtgctgcgcaagttcctgttgttag

SEQ ID NO: 23648 - DNA, 252 bp, synthetic construct
  source 1..252: mol_type = other DNA; note = Synthetic coding sequence
atgtgctgcaactactaccggaactgctgcggcggctgcggctacggatctggatggtcctctggatgtggctacggctgtggatacggctgtgggtacggttccggctgtagatacggaagtggatacggaacaggctgtggatatggatgtggatacggcagtggatgtgggtacggatgcggctacagctcctcttgctgcggatacagaccgctctgttaccggcggtgctactcatcgtgttattag

SEQ ID NO: 23649 - DNA, 993 bp, synthetic construct
  source 1..993: mol_type = other DNA; note = Synthetic coding sequence
atgggcagccggaagaaggagatcgccctgcaggtgaacatcagcacgcaggagctttgggaggagatgctcagttccaaaggtttgactgtggtcgacgtgtaccaggggtggtgcggcccttgtaagcccgtagtttctctgtttcagaaaatgagaattgaggtcggtctcgacctgctacattttgcactggctgaagccgacaggctggatgtgctggagaagtataggggcaagtgtgagccgaccttcctgttctacgccggtggcgaattggtggccgtggttcggggagcgaacgcacccctgctgcagaaaactattctcgaccaacttgaagctgaaaaaaaagtactggccgagggccgagagcgcaaggtgatcaaagatgaggccctgtcagacgaggatgagtgtgtttctcacggtaagaataacggcgaggatgaagatatggtgtcttcagagaggacctgtacactggctatcattaagcctgatgccgtcgcccacgggaaaactgacgaaattataatgaaaattcaggaggcagggttcgagatactaacaaacgaggaacggactatgaccgaggcggaagtgcggttgttttatcaacataaagccggtgaggaggccttcgagaagctggttcatcacatgtgcagcggtccatcccatctgcttatcctgacccgtactgaggggtttgaggacgtggtgactacatggcgcactgtgatggggccacgagatcccaacgtcgcccgtcgtgagcagcctgagtcgctgagggcccagtacggtactgagatgccatttaatgccgtgcatgggtcccgggaccgcgaagatgcggaccgggagctggcactgctgtttccatctctgaagttctcagacaaggacactgaggcccctcagggtggtgaagctgaggctacagctggcccaacggaggcactgtgtttccccgaggatgttgattag

SEQ ID NO: 23650 - DNA, 606 bp, synthetic construct
  source 1..606: mol_type = other DNA; note = Synthetic coding sequence
atggtgagcagctgctgcggcagcgtgtgcagcgaccagggctgcgggcaggatttatgtcaggaaacatgttgcaggccaagctgttgcgagaccacctgttgcagaactacatgctgtaggccctcatgctgcgtgtcctcatgctgtcgtcctcaatgttgtcagagtgtttgctgccagcccacatgtagtcgaccatcttgttgtcagaccacctgttgccgaaccacctgttatcggccgtcctgctgtgtgtccagttgttgcagaccccagtgctgccagcccgcctgttgccagccgacctgttgccggcctccacgttgctgtatttcctcctgctgccgtcctagttgctgcgtctcaagttgctgcaagccccagtgttgccagagcgtttgctgtcagcctaactgctgcaggccaagttgctctatttcatcatgctgtagacccagctgttgcgagagttcctgctgtcggccatgttgctgtgtccgtccagtctgtgggcgcgtgtcttgccacactacttgctaccgccccacttgtgtgatctcatcttgtcctagaccattatgctgcgcatcttcgtgttgctag

SEQ ID NO: 23651 - DNA, 792 bp, synthetic construct
  source 1..792: mol_type = other DNA; note = Synthetic coding sequence
atgggcgacatccccgccgtgggcctgagcagctggaaggccagccctggcaaagtcaccgaggcggttaaagaggctatcgatgcagggtaccgccactttgattgcgcctatttctaccataatgagagagaagtgggtgcgggcattcgttgcaagatcaaagagggggcagtgcggcgagaggatctttttatagcaaccaagctgtggtgcacatgtcataagaagtctctagtggaaacagcgtgccgcaaatctctcaaagccctgaagcttaactacttggacctctacctgattcactggcctatgggctttaagccaccgcaccccgagtggattatgtcctgcagtgagctatctttctgcctctctcacccgagagtccaggatctcccccttgatgagagcaacatggtgattccctccgacaccgacttcttggacacctgggaagccatggaggacttggtgatcaccggcctggtaaaaaacattggtgtgagcaactttaatcacgagcagctcgaacgtctgcttaataaacccggactgcggttcaagccccttaccaaccagatcctcattagatttcagatccaacgaaacgttattgtgattcctggttcgattactccttctcatatcaaggaaaacatacaggtgttcgattttgagctgactcagcacgacatggataatatcctttctctgaataggaacctccgtctggctatgttcccaatcacaaagaaccataaggattacccatttcatatcgagtactag

SEQ ID NO: 23652 - DNA, 177 bp, synthetic construct
  source 1..177: mol_type = other DNA; note = Synthetic coding sequence
atgcggtactacggcagctactaccggggcctgggctacggctgcggcggttttggcggccttggctacgggtgtgggtgcgggggctatcgctacgggagcgggtatggcggatatcgctatggctgctgtcgcccctcatgccgggagggctatggcttttctggattctactag

SEQ ID NO: 23653 - DNA, 159 bp, synthetic construct
  source 1..159: mol_type = other DNA; note = Synthetic coding sequence
atgtgctacggctacggctgcggctgcggcagcttctgccggctgggatatggatgcggctatgagggatgtcgatacggatgcggacatcggggatgtggcgacggttgctgttgtccgtcatgttacaggagatacaggttcacaggcttctattag

SEQ ID NO: 23654 - DNA, 255 bp, synthetic construct
  source 1..255: mol_type = other DNA; note = Synthetic coding sequence
atgagctactacggcagctactaccggggcctgggctacggctgcggtggttttgggggactagggtatgggtacgggtgcggctgcggaagcttccgcagactcggctatgggtgtgggtttggcggcaacgggtatggatattgcagaccaagttgctacggtggatacggcttctcaatcctgctcaaatcctatcccgaggataccatcagcgaggtcatacggcggtccttcaatctgaccaaatactag

SEQ ID NO: 23655 - DNA, 246 bp, synthetic construct
  source 1..246: mol_type = other DNA; note = Synthetic coding sequence
atgagctactacggcagctactacggcggcctgggctacggctgcggaggcttcggcgggcttgggtacggctatggctgtgggtgtggctctttccggcgcctaggctccggctgcggctacggtggctacggatatggcagtggtttcggtggctacggctacggttctgggtttggcggctacgggtatgggtgttataggccctcttattatggaggctatggtttctcaggtttctattag

SEQ ID NO: 23656 - DNA, 414 bp, synthetic construct
  source 1..414: mol_type = other DNA; note = Synthetic coding sequence
atgagctacaactgcagcagcggcaacttcagcagctgctgcttcgggagttacctgaggtatcctgttagcacgtacaacctgttttacccctctaatgccatctactctcccaatacctgccaactcggctcctccctgtataacggatgtcaggaaacttactgtgagcccacatcatgtcagacatcttgtactctggccagaagctatcagacaagctgttactgtcccaagaacagcatcttttgctcaccacgacaaaccaactacatacgtagcctcggctgcggcaacacggggctcgggagtttgggctgtggttccactggctttcagtcactggactgtggttcctctttctaccacccaacaacattttcctcccgaaactttcaggcaacatgctactag

SEQ ID NO: 23657 - DNA, 483 bp, synthetic construct
  source 1..483: mol_type = other DNA; note = Synthetic coding sequence
atgagctacaactgctgcagccggaacttcagcagccggagcttcggagggtatttgtattatccgggcagctacccttctagcttagtatattccactgctctgtgctccccatccacctgccagctacggagctccctgtaccgagattgtcagaagacgtgctgggagccagcctcttgtcagaaatcatgttacaggccaagaacaagcatcctctgctgcccttgtcaaactacttgctctgggagcctgggatttagatcttcttcttgccggtcccagggctacggctctcgctgctgttactccctaggtaacggatcctccggatttcgtttcctgaagtatggcggatgcggttttccttccttgtcatacggctcccgcttctgctaccccaactatcttgcctctggagcatggcagagtagctgctaccgtcccatctgtggcagccgcttctatcaatttacctgttag

SEQ ID NO: 23658 - DNA, 684 bp, synthetic construct
  source 1..684: mol_type = other DNA; note = Synthetic coding sequence
atgctgaaccccgacggcgtgtacctgggcaactaccggtgcagcctgatgggattcgacctcaatcgccactggctggatccatcgccatgggttcatcctacattacacggggtcaagcagctcatcgtgcaaatgtataatgaccccaaaacttcactggagttctatatcgatatccatgcacactccacaatgatgaatggatttatgtatggcaacattttcgaggacgaggagcggtttcagcgacaggccattttccccaagttgctctgtcagaacgccgaagacttctcctattcaagcacatcctttaaccgagatgccgtcaaagcagggacggggagaaggttcctgggggggcttctggaccacacctcctattgctatacgctggaggtgtcattttactcttacataattagcggcaccaccgctgctgttccatacacagaagaagcgtacatgaaactgggacggaatgtcgctaggaccttcttggactactatcgcctgaaccctgtcgtggagaaggtagctatccctatgcctcgtttgcggaaggagaagtctcccccatataagcatcccctgcttagagggccggcaagcaactatccgaacagcaagggggacaaaaagtctagtgtcaatcacaaggacccctctacccctttttag

SEQ ID NO: 23659 - DNA, 465 bp, synthetic construct
  source 1..465: mol_type = other DNA; note = Synthetic coding sequence
atgacccactgctgcagcccctgctgccagcccacctgctgccggactacttgttgccggacaacttgctggaagccaacgacagtaactacctgtagctcaaccccctgctgtcagccttcatgctgcgtgagcagctgctgtcagccatgctgtcggcctacttgttgccagaacacatgctgccaaccaacgtgcgtgacatcatgctgccaaccctcttgctgcagtactccctgctgccagcctacctgctgcggtagttcctgtgatcagagctctagctgtgcaccagtatactgtcggcgcacatgttattatcctacaacagtgtgtctcccagggtgccttaatcaaagttgtggttcaaactgctgtcagccctgctgccggcccgcttgctgcgaaaccacatgtttccagcctacatgcgtgtcctcgtgttgccaaccattttgttgttag

SEQ ID NO: 23660 - DNA, 7062 bp, synthetic construct
  source 1..7062: mol_type = other DNA; note = Synthetic coding sequence
atgaagcagcggaagggccagggcagcggcggcagccggggccggaaaaaacgcggtttgtccgatatctcccctagcaccagcctccctcccctagtagagggccagcttcgatgctttctcaagctaaccgtgaacagggtcatctggaaaattgccaagcctcctacatgtgtcctcgtgcgggtgagatggtggggcgagacttctgatggaactctgttttgcccaagagacgcccttcagacggaaccaaaggccgtacggactactacccgctacgccataagatgcggccccaagcagtttacatcgtatttaacagatatggctgtgctcgtgctggaagtaatcactaaacttgacggcttacctataggcagagtccagatcaacggcctcgcacagctgagtccaacgcaccagatcaacggctttttcacaatcgtgagttctactagtaagaaactgggggagctgcaggtgagcctagcattggaaccgctgagcgaaacctacgactcataccatccactaccaacgaccgacatgacggaaaacgtcttgttgtcgaaacagggcttcagggaaaataccgagccctcaagcacacagttccaggttccctcgaggcccagggacatccacacaattaagattgatggcaaggagctagctgctaatagctcccgcagcactacgccgaggggcaaggaccacgtgtgcttcgcagagaaccctgataccatcaaggactcatctttcggcctgcagcattcattaaacagcggccagagtctcgaatctgtgactttgaaagggcgcgctcccagaaaacagatgtcgctcctcaacagctcggagttccagcctcaaatccgcactgtggccaaatcccattcagactcctgcatcctgagttctaataacttacctacaaaagatctgctcagtgccctcctggaacagggaaacaagttgcggaacgcaatggtgatcagtgccatgaagtcatcacctgaaacttcaatgctcttagatcaagtacacccgcccatcaacgaggactccctgcgggcctctacccaaattagggccttttcccgaaatcgctttaaggaccacatcgaagatcacctgctcccatccacagaaaatacattctggcggcacgacacaaaggcggacacacgtgctatccaactcctcctgggaagtgccgaactgtcccaaggcaatttctgggatggtctgggctccccgcccgattcacccagcccagggtcggatgtctattgcattagcgagctgaatgatccccagtacgaccagtccctcctagaaaacctgttttatactgcccctaagagcgacacctcgatttctgacttcttgagcgaggaggatgacattgttcctagtaagaagatctctcagagtaccgctctagccaggtcctctaaggtgttagaatctagtgatcacaagctcaagaaaaggtcagccgggaagcgcaaccgaaacctcgtggagcagcagatgctttcagagaccccggaggatgcccagaccatgactctgtcagtggatcggctcgccctccttggcagaacacacagtgtgagaatcataattgaaacaatgggagtcccccccgacagcccccaaatgacgccagggaagaaatcttatgctggcccccctccaaaggtgaccactgccaagaaacgcacctttttcgtggagtaccacttcccagtcggtttctccgagtctgggttaggtaaaacagctctgattactgaggtcgtgcgccttgctagtagtaagattacagatggtaaggtaaagtttcagcaaaggttcgtatttcccgtccagttcggtggccctatgattgagcattggtggaacagcaatctgacctttcaaatctatgtgaagaagactccacaaaaaaagccagaggttattggctcggtctctctgtcactacgtgcagtaattcaatcagagcttttgagctttagtgaccagctgcctgtgcagcaggagaatggccaatctcccttcggtccactaaaggtcacaatggagctgataacagataacaaagatttcacaggaatcaacaccaaactgtcggggaatacccattatacacccctctgcgctccaacttcgcctaacaaagctctgccagaacttaatcaggacatgacatgcaccaagaatcctcaaaatttgaatcagatccacgaagagacggccaagaaagctcagaacttggtgttacctaacagaaagagcccaagtccagttgcaccccatccatccacgttcgtcgcgactcccgcttcgcacaatctggttaatcagaccaacgggaccacaaaggagagcgctttgctgctccatgtgctgctgatggtccctgacggcaaggacttcattagtggagaaagcgagaaacagtctccgtgcaacgtctatttgaactgcaaattattctccaccgaggaagtcactcgatcagtgatcgcctggggcactacccagcctgtgtttaacttctcgcaggtgatccccgtgagtctgtctagtaaatatctggaacgtctgaaaaataacgtaatggtcatcgagacctggaacaaagtgaggagtcccggccaagacaaattactggggctggtcaagctcccgctgcaccaattttacatgagcttcaaggatgcgaaaatcagtcgcttgctgctagacgctcaataccccgtcgttgccgttgacagctacatgccagtgattgatgtgttttccggacaccagaatggcagcctcagagtgtttttggcaatgggatcatccaatcagatcatggcccttcagcgcctgaagaacgaggaaggaacactgccaccgttttcaccacgacccgcacatttcctggatcaacctactgccgcttcggtggcaatggccgaagatcgcggtaacggcctaatggaacattgctttgagattcacattgagatggtgaagggccttgcccctctccaggcaaccgtctggggggaggcagattgttacgtgcagtactactttccggtgcaacacagccagtcctccgtgctgaaagggcctgagttcctcgaaaatgggattactctgaagccctttcggacagccacaactctttgcgtaccagatccaatcttcaatagcgaacatcaccacagccttctcctccctgctgaagttccggttcaacgattgttattgagcgcgttctccgcccaaggcctcgtccccggggggggtgttcagttcgagatttggtgccgctattattatcctaatgtccgcgatcagaaggtcgcgaagggaacactgcccctgtctcgcatctgcgctatggtgacaacacagcaccgggaggacgttgggattcagaccttcaatctgccattgacgcctagaattgagaaccgaaaggagttgaggaaccaatctagcggcctgctcgatgtaggcctgcgttatcgacggtctccccgtaccgcagagggggtgctggcagccagaacagtctcaatatcggtccagattatccgggcatgtgggcttcaagctgcggcgaaggccctggcagaaagagagcccgcgttacagtttagcgccaccgtgggagtgaacgccagtgtcacaacgcatctctcctttctcccccagggagaacagcgcaggacccaccccgtcgcctgttccttctgcccagagtttagtcatcacgtagagttcacttgtaatctggttactcaacattgctcaggggaagcttgctttctggcagagttattggagttcgcagaggtaatatttgcggtgtatcacgagaacacgaagagtgcgtccgacatcatctccatcgaatcttgcaaggagtatcttctcggtgtggtgaaggtgcccacaaaggagctcttgataaaacggtctggtatcacgggttggtaccccatcatactgcctgaagacggaggcctcccacacgggcttgagttgatgcagaaaatcgtcggtggtcttgaactctcaatcagtttcactcaccggggggatagagaacgcgtgttagaggcggccgagcatttaggatggagtttcgaaaattctctgaaggacttcgttagaatggatgagggcgagccagcgacagtcacaatctccacacccaggctctggctgcccattcattgtgttctcttagcaggacacaaccatatccacaagaatacttactgctatctgcggtacaaattttacgatcacgaagccttttggacgcccttaaagaagccgaaagagagcgtgaataagaaacagattatggtgacattcaaggctagcaaacgggctgaggttacaagaggtcctagcctgctgtggtactttcgggaggagcgcttagaaattcaggtctggcgtgcttatggcaatgattccgtggaacgtccccaccagacagactcttggattggatctgcgtacgtagatcttgcaaggctgggggagaggagcgctcggacactcaccgtgtctggggtgtatcccctttttggtagaaatgcctcaaacctatccggcgccgctctgagagtccacgtggttctctctagcctgtcctcacacctcgagcccacgcatgagctggactcgatggactgttcttcacacagtgagtccgaacaattacctaggagaaacgacgaggtgcagctttctccccctgaagtgatcagctgccaccagaagagtccagcaagcactcaagtgccatgctcctccacaactgctgaagtacggctaacccaagaagggcccgctgacttagatggcactttcgcagtgagtatcttggtggaaagggcaatgcatcttagcctgaaggggtcccccctcacggagagaaaggtgtcaatccccagctgttgtgtgtccttcgccactgcagatgagtcatcacctgtgtatacacaggtggtagaaaatacagacagccctatttggaacttccagcagcagagtcgcctgtcaaaggaactgctgctcgacccgcagcagactctcgtgttcaaggtttggcataaaggagacgaggagagagtgatcggattcgcttcagttgacctgagtccactcttgagcgggttccagttcgtctgcggctggtataatatcactgatttctccggcgagtgccaaggtcagatcaaggtagccgtgtcaccgctggaatcactgatccacttcaaagaagagcgacaggcaagaagaggcgtggagacgtcgaaaagcctgattcccatttattcccccttcagcttccccgctagcgatacatacgccgccttctctagtcatatggcccggcagaccctagatcagcttgcccacgctagtagtaaggagctggacttttccagtccaggcagatcggacaccaccagatcacaagcatcccgccacgaggaacacgtgcagaatattcgacgcttccatgaatcactgcacttgcagggcgaagcccctcttccatgtgacgacaaactcaccacttccccattgtcctcgcaaaccagcatcctgacttcactaagaaagaatctgtctgaactggaccaaattcagaggtattttagacagaagctcactaaacccttcctgcctttgtccccacagacccaaactgccatttcacagcaccaagaatcttgtcgcgatcacctggggccgggggcaagcagcctggatcccgggtcgcagtgcatcctggaaaagtcaagcaatctcgttctacaagtgagctccctcatcactgacctgcagaccatcacgcgagactctcaagcagctctgagctctcacagagccagatcccggtccaacaaggcaacaacgctacccgatgcccaggatacagaggccttgcaggagcggtgtactatgccagacgagccccttgtgagggcgccggacaagggtaccgattccccttccccaccccccttagaagaaacaagcaacggcggacgtatgctccatgagagccttagacatgccgtcccaatcactcgtatgcagtcgtcagaggataccgaagccggacctgcctacagcgatgaggattacgaagaagacattattgagcctcgcactttgaatgaaatcactacggtgaccgacaagacatccccatggagtagcgtgatctccgacacatctgaggtgatttcgccgcaacccgacgaggtgcagagggaaggtccctcctgcccatcacccggtcctttttgccgcgaggagctgatggtgaagtctagcttcctgtcttcccccgaacgcgcagttaacccccatctgccgagacaaggctccccgtcccaatcactcgtcgcctgtgaatgtgaggcctccaaggcccgtgtgggtggggagtccgcctccgccaacccccaacctataccctgcccaaccctcagtggagctcagcagagcagtacctttgtgggatggtcgagcccccagacagatcagaataaggaacccaaatcagaggctcccgctgagaacgaggctgcgaccagcgaacttggggactccgctgatagcttcaagaaactgcccctaaaccttgcttcgcagtctagacgggaaaaccataagggaccacctattgactcctctgatattcgccaaaggcaggtcacgaccgggagcgaaacctctaccaaacaatcgctcctcctgccaggccccattgtagtgccgaacttctttttgcccccccagcagctggaagcttctctgcgtatgctctcgctgagcgccaccctgccacctgccgccacaacggatcaggacaagtcggaagctactcggggggctctcagccagcggccatgccgaccaaggcccaattccctgccacttaacttgccagaggaagaaacactcaggatcgcgcgcatcttctcttcacaatatagccaaaaggactag

SEQ ID NO: 23661 - DNA, 219 bp, synthetic construct
  source 1..219: mol_type = other DNA; note = Synthetic coding sequence
atgaactactacggcaactactacggcggcctgggctacggctacggtggctttgacgacttaggatatggatacgggtgtggctgcggctccttccgaaggctgggttacggaggcggatacggcggctatggttacggctctgggttcggggggtacggttatcggagctgtaggcctagctgttatggcggctatgggttttcagggttctactag

SEQ ID NO: 23662 - DNA, 198 bp, synthetic construct
  source 1..198: mol_type = other DNA; note = Synthetic coding sequence
atgagctacaactgctgctgcggcaacttcagcagccacagctgcgaagggtatctttgttactctggttactctcgagggggttcctcttacccctctaatttagtgtatagcacagaaccactcatttcccagcatctgccggcgggcttcttgagtctacaggggctttctggagatctgctaggaaacccatag

SEQ ID NO: 23663 - DNA, 384 bp, synthetic construct
  source 1..384: mol_type = other DNA; note = Synthetic coding sequence
atggtgaacagctgctgcggcagcgtgtgcagcgaccagggctgcgaccaggggctctgccaagagacttgctgtagaccatcctgctgccaaaccacgtgctgttgtccaagttgtgtggtgtcctcctgttgtcggccatcctgctcccaaacaacctgttgccagactacctgttgcaggccttcttgttgtcaccccgtgtgttgtcagacaacatgcaggcccagctgtggagtgtcaagctgttgccgtccactatgctgtcagactacctgccgccccagttgcggggtatcgagttgctgtagacccctgtgctgccagaccacatgttgcagggcaacgtgctgccgtccatcctgctgcgggagctcctgctag

SEQ ID NO: 23664 - DNA, 318 bp, synthetic construct
  source 1..318: mol_type = other DNA; note = Synthetic coding sequence
atgggctgctgccccggcgactgcttcacctgctgcacccaggagcagaattgctgcgaagaatgttgctgccagcctggctgttgcgggtgctgtgggtcatgctgcggatgcggaggctctggatgcggaggctccggttgtggcgggagttgttgtggatcatcatgttgtggcagcgggtgcggagggtgcggggggtgtgggggatgcggtggaggctgctgtggatctagttgctgcggatcatcctgctgcgggtcagggtgttgtggtcccgtctgctgccaacctacccctatctgcgacaccaagtag

SEQ ID NO: 23665 - DNA, 3915 bp, synthetic construct
  source 1..3915: mol_type = other DNA; note = Synthetic coding sequence
atggaggagatccccgtgaaggtggccgtgcggatccggcccctgctttgtaaagaagcactgcacaaccatcaagtttgcgtgagggtgattccgaacagccaacaggttataatcggaagggatcgcgtgttcacctttgacttcgttttcggcaagaattctacgcaggatgaggtatacaacacctgcatcaagccactagtcctgtcgctaattgaaggatataatgcaactgtcttcgcctacgggcagacaggctcagggaaaacatacaccattggcggggggcacatagcgtccgtcgtcgaaggccagaaaggcattatccctagggccatccaagaaatttttcagagcatctcagaacatccttcaattgacttcaacgtgaaggtgagctatattgaagtctacaaggaggatttgagagacctgctggaattagagacttcaatgaaggacctccacatcagggaagacgagaaaggaaacaccgtgatagttggagccaaagagtgccacgtggagtcggcgggtgaggtcatgtctttgcttgagatgggtaatgcagctcgtcacacaggcactacccaaatgaatgagcacagttcacggagccatgccatcttcactatctcaatatgtcaggtccacaaaaacatggaagcagctgaggacggttcctggtattcaccccgacatattgtgtccaagtttcattttgtggatctggccggctcggaacgcgtgaccaaaacaggaaacaccggcgagagattcaaagaaagtatccagataaattcaggcctcctcgcactgggaaacgtgatctctgcgctgggggatccgaggcgaaagtcatctcacatcccctacagggatgccaagattacacgcttgttgaaggatagcctgggaggcagtgcaaaaaccgtaatgatcacatgcgtgtcacctagctcttccaacttcgacgagagtctcaactcccttaagtatgcaaaccgcgctaggaacatcaggaataagcccactgtgaattttagccccgaatcggatcggatcgacgaaatggagttcgagattaaactcctgcgcgaggcgctccaatcacaacaggccggagtttcccagacaacccagatcaaccgcgaagggagcccggacactaaccgtatccacagcttggaggaacaggtcgcccaactacaaggcgagtgtctgggataccaatgttgtgtggaagaagcttttacattcctggtggacctgaaggacacggtgaggctcaatgagaaacaacagcacaagctccaggaatggttcaacatgatccaggaggtccgcaaggccgtgctgacctcattccgcgggattggaggaaccgccagcctcgaggaagggcctcagcacgttaccgttttacagttgaagcgggagctgaaaaaatgccagtgcgtgttagccgcagatgaagtcgtattcaaccagaaagagctcgaggtgaaagagctgaaaaatcaagtccagatgatggtccaggagaacaagggccacgccgtctctttgaaagaagcccaaaaggtcaatcggctgcagaacgaaaaaatcatcgagcagcagctgctggtcgaccaacttagtgaagaactgacaaagttgaacctgagcgtgacctctagcgccaaagagaactgcggtgacggacctgatgctcggatccccgagaggcggccatacaccgtcccattcgatacacatctcggtcactacatatatatcccgtcgcggcaggactctagaaaggtgcacacctcacccccaatgtactcacttgatagaatctttgccggattcaggacccgaagtcagatgctgctggggcacatagaagaacaggacaaggtcctccattgtcagttcagtgataattccgacgacgaggagagcgaaggccaggagaagagcggaactcgatgcagatcaagaagttggatacagaagcccgactcagtttgctctttggttgaattgagcgatacgcaggacgaaacacagaaatctgacctggaaaatgaagacctcaaaatcgactgcttgcaggaaagccaggaactgaacctacagaaactaaagaacagcgagagaatcctgaccgaagcaaagcaaaagatgcgtgagctcaccattaacatcaagatgaaagaggacctgattaaagagcttatcaagaccggcaatgatgctaaaagcgtctccaagcaatattcactgaaggtgaccaaactcgaacatgacgccgaacaggctaaggtcgagcttatcgaaacgcagaagcaactccaagaacttgagaacaaggacttaagcgatgtggcaatgaaggtcaagctccagaaggaattccggaagaagatggacgccgcgaagctccgagtgcaggttctgcagaagaagcagcaggactctaagaaacttgctagtttgagcatccagaatgaaaaacgggccaacgagctcgaacagagtgttgaccacatgaaataccaaaaaatccaactccagcggaaattgcgcgaagagaatgaaaagcggaaacagcttgacgctgtgatcaagagagaccaacaaaaaattaaggccctcaacactgatagcctcaaaattagcacacgcctgaacctgttggagcaagaattatccgagaagaatgtccaattacaaacatctacagcggaagaaaaaactaagatctccgagcaggtggaagttcttcagaaggagaaggaccagctgcagaagcggcgccacaatgttgacgagaaactcaaaaatggacgtgtgctaagtcccgaggaggagcacgttctgtttcagctggaagagggaattgaggcactcgaagcagctattgaatataggaacgagagcatccagaaccgccagaaaagcctgcgtgcgtccttccacaacctttcacggggtgaggcaaacgttctggagaaacttgcctgcctatcgcccgtggagatcagaacgattctctttcgttacttcaataaggttgtgaatctgcgcgaggcagagcggaagcagcagttgtataatgaggagatgaagatgaaggtattggaaagggataacatggtccgcgagctggagagcgcactggatcacctgaagctccagtgcgataggcggctcacactgcagcagaaagagcacgagcaaaaaatgcagctgctcttgcatcactttaaagaacaggacggagaaggcatcatggaaacctttaagacgtatgaagataaaatccagcaactcgagaaggacctgtacttttataaaaaaactagccgggaccataagaaaaaactaaaagagctggtgggtgaggctatccgcagacaactggcaccaagtgaatatcaagaggcaggagacggcgtattgaagcctgagggaggcggcatgctttctgaagaactgaaatgggcctcgcgtccagaatccatgaagctgagcggacgtgagcgtgagatggatagcagcgcatcttctctgcggacacagccaaacccccagaaactctgggaggacattcctgaattgcccccgattcatagtagcttggctccaccttcaggccacatgcttgggaatgagaataaaaccgaaactgacgataaccaattcactaaaagtcattcaaggctgagcagccagattcaggtcgtgggtaacgtcgggcgcctgcacggggtcactcccgtcaagctctgccgcaaggaactgcgtcagatttccgctttagagctgagcctccggaggtccagcctgggcgttgggattgggtccatggccgctgactctattgaagtgagccgcaagccaagggatctgaagacttag

SEQ ID NO: 23666 - DNA, 903 bp, synthetic construct
  source 1..903: mol_type = other DNA; note = Synthetic coding sequence
atggaggaggaggccagcagccccggcctgggctgcagcaagccccatctggaaaagctgacactagggatcacacgcattcttgaaagctctcccggggtgactgaggtaaccatcatcgagaagcctccagctgagcggcacatgatttcaagctgggagcagaagaacaactgcgtgatgcctgaagacgtgaaaaacttctatctgatgacaaacggctttcacatgacctggagtgtaaaactggacgaacacattattcccttggggtccatggcgatcaattctattagcaagctgacgcagcttactcagtcctccatgtattctctgcctaacgcccccacccttgcagacctggaggacgacacccatgaggcttccgatgatcagcctgaaaaaccacactttgattcaagatcagtcatcttcgagctggactcttgtaacggctccggaaaggtatgtcttgtgtataaaagcgggaagcctgctctggccgaagacacagagatctggtttctggatagagctctctattggcacttcttaactgatacgtttacagcttattatcggctgctgatcactcacctgggcctgccacaatggcagtacgccttcacaagctacgggatctctccccaggcaaaacagtggttttccatgtacaaacctatcacgtataacacgaaccttctgaccgaagaaacggatagctttgtgaataagctagacccctctaaagtgttcaagtccaagaataagatcgtcatccctaaaaaaaagggccctgtgcaaccagccggggggcagaaggggcctagtggcccatctggcccgagcacaagtagtacgagcaaatccagtagcgggtcaggaaaccccacacgaaaatag

SEQ ID NO: 23667 - DNA, 390 bp, synthetic construct
  source 1..390: mol_type = other DNA; note = Synthetic coding sequence
atgatgaccgacctgaagcagagccacagcgtgcggctgaacgacggaccttttatgcccgttctgggcttcggaacatacgcccctgatcacaccccaaaatcgcaggcagctgaggctaccaaggtggctatcgacgttggctttcggcacattgacagtgcttacctttaccagaacgaagaagaggtcggacaggcaatttgggaaaagatcgccgatggcaccgtaaaaagggaggaaatcttctacaccatcaaattgtgggctactttcttccgagctgagctcgtccaccctgcactagagagaagcctgaagaagttagggcctgattacgtcgatctctttatcatacatgtgcccttcgcgatgaaaggcagtagttag

SEQ ID NO: 23668 - DNA, 1257 bp, synthetic construct
  source 1..1257: mol_type = other DNA; note = Synthetic coding sequence
atgcaccccgagcccagcgagcccgccaccggcggcgccgccgagctggactgtgcacaggaacctggcgtcgaagagtctgcaggtgaccacggcagtgccggcagaggtgggtgtaaggaggagataaacgacccgaaagaaatatgtgtgggctctagtgacacatcctaccactctcagcagaagcagtccggggacaatgggtccggtggccatttcgcccacccacgcgaggatcgagaggacaggggccctcggatgacgaagtccagcttacaaaaactctgcaaacagcacaagttgtatataacccccgccttaaatgataccctgtacctgcacttcaagggatttgatcgcatcgagaatctggaggaatatacaggtctgcgctgtctgtggctgcagagcaacggaattcagaagattgagaatcttgaggctcagacagaactccgatgccttttcctacaaatgaaccttttgcgaaagattgaaaatttggaacccctgcagaagttggacgccctcaacttgtctaataattatatcaaaacaattgagaatctttcgtgtcttccggttctaaacacgctccagatggcccacaatcatctggaaaccgttgaagatattcagcacctccaagaatgtctccgactgtgtgtgctggacctgtctcacaacaagctaagcgacccagaaatcttgagcatcttggagtccatgccggatctgagagtgctgaacctgatggggaaccctgtgataaggcagattccaaactatagaagaactgtgacagtccggctgaaacatttgacttatttggatgataggcccgtcttccctaaggacagagcctgtgcggaggcgtgggcccgtggcggctacgccgcggagaaggaagagcggcagcagtgggagagtcgtgagcggaagaagatcacagacagcatcgaagctctagctatgatcaagcagagggccgaggagcgcaagcgacagcgggagtcacaggagcggggcgaaatgacatcttctgatgatggcgagaatgtccctgcctcagccgaggggaaggaggagccacccggggaccgcgagactaggcagaagatggaacttttcgttaaggaaagcttcgaagccaaagatgagctgtgcccagagaaaccatccggagaggagcctcctgtcgaagctaaaagagaagatggagatccagctaccgtaacagcgtgtgaaggctag

SEQ ID NO: 23669 - DNA, 2472 bp, synthetic construct
  source 1..2472: mol_type = other DNA; note = Synthetic coding sequence
atgggcaagaagcggaccaagggcaagaccgtgcccatcgacgactcctccgagacccttgaaccagtctgtaggcatattcgcaagggactggagcaagggaacctgaaaaaggcactggtgaatgtggaatggaatatttgtcaggattgtaagacagacaacaaggtgaaagataaggccgaggaagagaccgaggagaagcctagcgtttggttgtgcttgaagtgtggacaccaggggtgcggtcggaactcgcaggagcagcatgccctgaaacactacctaactccaagaagcgagccacactgcctcgtcctcagcctagataactggagcgtgtggtgctatgtatgcgataatgaggtgcagtactgttcctctaaccagctgggccaggttgtagactacgttaggaaacaggccagcataaccaccccgaagccggccgagaaagacaacgggaacatcgagcttgagaacaaaaaattggaaaaggaatccaagaacgagcaggagcgggagaaaaaggagaatatggctaaggaaaatccgccgatgaattccccatgtcagataactgtgaaagggttgtccaatcttggaaacacttgctttttcaacgctgttatgcagaacctgtcccagacacccgtgctcagagaactcctgaaggaggtgaagatgagcggcactattgtgaaaattgaaccgcctgatctggctttaaccgaacctctcgagataaacttggaacctccaggcccgctgaccctcgccatgtcacagttcctcaacgagatgcaagaaaccaagaagggggtggttactcctaaggaattgtttagccaggtgtgcaaaaaggccgttcgcttcaagggctatcaacagcaagatagccaggaactcctgaggtatctattagatgggatgagagcagaggaacaccagcgtgtcagtaaaggcattctcaaggcatttggtaattctacagagaaacttgacgaggagctgaagaacaaagtgaaggactacgaaaagaagaagtctatgccctcattcgtggaccgaatctttggaggtgaactgacatctatgattatgtgtgaccagtgtcgcacggtgagtcttgttcacgagtcctttcttgatctttccctaccagtgttggacgaccagagtggtaagaagtccgttaacgataaaaacttgaaaaagacagttgaagacgaagatcaggacagcgaggaggaaaaggataacgattcctatatcaaagaaagaagtgatatcccgtcaggcacctccaaacaccttcagaagaaggccaaaaagcaggccaagaaacaggcgaagaatcaacgtcggcaacagaagatccaaggcaaggtgctgcatctcaacgacatctgcaccatcgatcaccccgaggacagcgagtatgaggccgagatgtcgcttcagggagaggtaaatattaaatcaaatcatatcagccaagaaggcgtgatgcataaggagtactgtgtgaatcaaaaggatcttaacgggcaagccaagatgatagagtcggtgacagacaatcaaaagagcacagaagaagttgacatgaagaacatcaacatggacaacgatctggaggtgcttacaagctctccaaccagaaacctcaacggagcgtacttgacagagggctctaatggcgaggtggacatcagcaacggcttcaaaaaccttaatctgaacgctgccttacaccccgatgagattaatatcgagatactgaacgactcacacacccctgggacaaaggtttacgaagtcgtgaacgaagaccccgagactgcgttttgtacccttgccaaccgcgaagttttcaacacagacgagtgtagcatccagcattgcctatatcagttcacacgcaacgaaaaactgcgggacgcaaataagcttctttgtgaggtgtgtacgcggagacagtgtaacggaccaaaggccaatatcaagggtgagcggaagcacgtatacaccaatgccaaaaagcagatgctcatttccctggctccccccgtgctcacactgcatctaaaaaggtttcagcaggctggattcaacctccgcaaggtgaacaagcacatcaagttccctgaaatcctggatctggcacctttctgcacactgaaatgcaaaaacgtggcagaggaaaacacccgtgtgctctatagcctctacggagtcgttgagcacagcggaacaatgcgatcaggccattatacagcctatgcgaaggccagaactgcgaatagccacctgtcgaatctggtgctgcatggagatatacctcaggatttcgagatggagtccaaggggcagtggtttcacatctctgatacacacgtccaggccgtgcccaccactaaggtcttgaactcccaggcataccttctattctatgaacggatcttatag

SEQ ID NO: 23670 - DNA, 3204 bp, synthetic construct
  source 1..3204: mol_type = other DNA; note = Synthetic coding sequence
atgaacagcatggaccggcacatccagcagaccaacgaccggctgcaatgcatcaagcagcatctccagaatccagctaactttcacaacgcagcaacagagctcctggactggtgcggcgatcccagagcctttcagcgacctttcgaacagtccctcatggggtgcttgaccgtagtgagccgagtggccgcccagcaggggtttgacttggacctggggtacaggctgttagccgtgtgtgcagccaatcgagacaagtttacacctaaatccgcagccctccttagttcatggtgcgaagagttaggaagacttcttctcttacgtcaccaaaaaagtcgacagagcgaccccccaggtaaattgcccatgcagcccccgctgtcatccatgagctctatgaagcccaccctgagtcactccgatggctccttcccctacgactccgtgccttggcagcagaataccaaccaaccgcccggtagccttagcgtggtaacaacagtgtggggggtgacgaatacttctcagtctcaagtcctgggaaatcctatggcaaatgcaaacaatcccatgaaccctgggggcaaccctatggcttctggcatgaccacttccaaccctggattgaacagccctcagtttgcaggccaacagcagcagttcagcgccaaggccggcccagcacagccatatatccagcagagcatgtacgggagaccaaattacccgggatccggcggttttggagctagctaccctggggggcccaacgccccagccggtatgggtatcccaccccacactcggcctcccgccgatttcacacagccggccgccgctgccgcagctgcagccgtggcagccgccgctgcaacggcgacagctactgctacggctaccgtggccgcgttgcaggagacccagaacaaggatatcaaccagtatgggccaatgggccctacccaggcatataattcacaattcatgaaccaaccagggccccggggtcctgcttcaatgggcggcagcatgaatccggccagtatggcggccggcatgacaccctccgggatgtcagggcctcccatgggcatgaatcagccccgacccccaggcatctcccccttcgggacccatggacagagaatgccacaacaaacgtaccctggcccaagacctcagtctttacccatacagaacatcaagaggccttaccccggagagcctaattacggcaatcagcaatatggtcccaactcccagtttcctacacaacccggccaatacccagctcccaatcctccacgccccttaacatcccctaactatcccggccagaggatgccttcccaaccaagttcaggtcaataccccccacccactgtgaatatgggacaatactacaagccggaacaattcaatggtcagaacaacactttttcaggctcttcttacagtaattatagtcaaggtaatgtgaatagaccaccccgccctgtgcccgtcgccaactaccctcactcccccgttcccggtaacccaactccgcctatgactccaggctcctctattcccccgtatttgtctccaagtcaggatgtgaaaccacccttcccccccgatatcaagccgaacatgtccgctctgcccccccctccagcaaatcataatgacgaactgaggctgacttttcctgtacgcgatggtgtggtgctggaaccttttaggctggagcataacctcgccgtttcaaatcatgtgttccatcttagacccaccgtgcaccagactcttatgtggcgctctgatctggagctgcagtttaagtgctatcaccatgaggataggcagatgaatacaaattggccagcctccgtgcaggtcagcgtcaacgcaacacctctcactattgagcgcggcgacaacaaaacgtcccacaagcccctgcatctgaagcacgtgtgtcagccaggacgcaacacgattcagattaccgttacagcctgctgttgctcccatctcttcgtcctgcagcttgtacatcgcccctcggtgagatccgtactccagggcttattgaagaaaagactactgcctgcagaacattgcattaccaaaatcaaaaggaatttttcatctgtggcagcttcatcgggaaacacgacactcaatggtgaagacggtgtggagcagaccgccatcaaggtctctttgaagtgcccgatcacttttcgccggatccagctgccagcccggggccacgattgcaaacacgtgcagtgcttcgatctggaatcctacctgcagctgaactgcgaaagaggtacctggcgatgtccagtttgcaacaaaacagctcttctcgagggcctagaggtcgatcagtacatgtggggaattctgaatgctatccagcactctgaatttgaggaagtgaccatcgaccctacatgtagctggagaccagtccccatcaagtcagatctccatattaaagatgaccctgacggtatccctagcaagcgatttaaaactatgagcccgtcacaaatgataatgccaaacgtcatggagatgatcgccgccttaggtcctggtccaagcccctacccactgcccccaccccctggtggcactaatagcaatgactattctagccagggaaacaattatcagggccatgggaacttcgactttccccacggcaaccccggggggaccagcatgaatgacttcatgcatggacctccccagctgtctcatcctcccgatatgccaaataatatggcagccttggagaagccactcagtcaccccatgcaggagactatgccacacgccggctccagcgatcaacctcaccctagcatccagcaggggttgcacgttccccatccgtccagccagagtggccctccactccatcactccggagcaccccctccacctccctctcaaccaccccgacagccccctcaggccgcaccctccagccatcctcactcagacctgacatttaaccccagctctgccctggaaggacaggccggcgcacagggggcatcagacatgccagagccaagtctcgatctattacccgaactaacaaacccagacgagttactatcttatctagatccacccgacttgccttcaaatagtaatgatgacctgctgtctctgtttgagaacaactag

SEQ ID NO: 23671 - DNA, 1038 bp, synthetic construct
  source 1..1038: mol_type = other DNA; note = Synthetic coding sequence
atggacggcgaggacatccccgacttcagcagcctgaaggaggagacagcctactggaaagagttaagcctcaaatataagcagagctttcaggaagccagggatgaactggtagagttccaggagggatccagggagctcgaagccgagctggaggcccaactggtacaggccgagcaaaggaatcgtgacttgcaagccgataatcagagactgaaatacgaggtcgaggcgctcaaagagaagttagaacatcagtatgctcagtcctacaaacaggtctctgtgctggaagatgacctttctcagacccgcgccatcaaggagcagttgcataagtacgtgcgtgagctcgagcaagcaaacgatgatctggaacgagcgaaacgggctaccattgtcagtttagaggactttgaacagcggcttaatcaggcgatcgagcggaatgcctttctggagagcgagctggacgaaaaggagtccctgcttgtctcagtccagcgattgaaggacgaggcccgagacctccgccaggagcttgcagtgagggagagacaacaagaagtaactcggaaatctgcacctagcagcccaacgctggactgtgaaaagatggattcagctgtgcaggccagcctctcactccccgccacccctgtgggaaagggaactgagaacacgttcccctcacctaaagccattcccaatggctttggaacgtctcctttgacaccgtccgcccgtatttctgctctgaatattgttggtgacctgttacgaaaagtgggtgccctcgaatccaaactggctgcctgtcgcaatttcgccaaagatcaagcctcgcggaagtcctacatctcaggtaatgttaactgtggggttctcaatggaaacggcactaagttcagccgctctgggcacacttcgtttttcgataaaggtgcagtgaacggctttgatcctgctcccccccccccagggttaggatcttctagacccagttcagcgccagggatgctgcccctcagcgtgtag

SEQ ID NO: 23672 - DNA, 588 bp, synthetic construct
  source 1..588: mol_type = other DNA; note = Synthetic coding sequence
atgggcagccgggccagcaccctgctgcgggacgaggagctggaggagataaaaaaagaaactgggttcagtcactcccagatcaccagattgtattccagattcacaagtctagataaaggcgaaaatggtacactatctagggaggattttcagcgaatccccgagttggctattaacccgttgggcgatagaatcatcaacgcttttttccctgaaggcgaggaccaggtgaatttccgcggctttatgaggacgcttgctcactttagacctattgaagacaacgagaagtcaaaggatgttaatgggcccgaacctctaaattccagaagtaataaactgcatttcgctttcaggctgtacgatctggataaggacgagaagatatctagggacgagctcctgcaagttctacgtatgatggtgggtgtgaacatctccgacgagcaattaggttctatcgcggataggaccattcaggaagctgatcaagacggcgacagtgccattagcttcacggaatttgtcaaggttctcgagaaagtggacgtcgagcagaagatgagtattcgattcctgcattag

SEQ ID NO: 23673 - DNA, 780 bp, synthetic construct
  source 1..780: mol_type = other DNA; note = Synthetic coding sequence
atggccgacgcctgctgcacccggacctacgtgatcgccgccagcactatgtccgtctgctcctcggatgtcggtcatgtgagcagagtatcaagcccttccacatgcacgggctccagctggcaggtggacaattgccaggagagttgttgtgagcccaggtcatgcgcaagtagttgctgcacaccaagctgctgcgctccagccccatgtctggctttggtgtgtgcccctgtgagctgtgaaccctccccttgccagagtggttgtaccgactcctgtaccccttcttgttgccagcagtcctcttgtcagcccgcctgctgtaccagttctccatgccagcaagcatgctgtgtgcccgtttgttgtaagagtaattgttgtaagccagtgtgttgtgtgtccatttgttctggggcctcgtcaccctgctgccaacagtctagctgccaatcagcttgctgcaccttttctccttgtcaacaagcatgttgcgttcctatctgttgtaagccaatttgttgtgttcctgtgtgctcaggggcgtcgagcctgtgctgtcagaaaagctcctgccagccagcttgttgcacaacgtcttgctgtaggccctcatcctctgtgtccttgctgtgtcgccctgtatgccgcccggcatgctgcgtaccagtgcctagttgctgcgtacccgcatcttcctgccaacccagctgctgccatccagctagctgcttgagttttctttgcaggcccgcgtgctcacgcctcgcctgttag

SEQ ID NO: 23674 - DNA, 171 bp, synthetic construct
  source 1..171: mol_type = other DNA; note = Synthetic coding sequence
atgatctactacagcaactactacggcggctacggctacggcggccttggatgtggttatggctgcgggtaccggggctacggttgcggctatggtggatacggcgggtatggtaatggatattattgcccatcctgttatggtcgttattggtcttacggcttctactag

SEQ ID NO: 23675 - DNA, 897 bp, synthetic construct
  source 1..897: mol_type = other DNA; note = Synthetic coding sequence
atggccgccagcaccatgagcgtgtgcagcagcgcctacagcgacagctggcaagtggatgattgtcccgaatcatgctgcgagccaccctgctccgcacctagctgctgcgcccctgccccatctctgtcactggtatgtacgccggtgtcttgtgtgagtagtccttgttgtcaggcagcgtgtgagccatccgcgtgtcaaagtggatgtacttcaagctgcacgcctagctgttgtcaacagagcagctgtcaacctgcctgttgcactagcagtccctgccagcaggcttgttgcgtgcccgtctgttgcaagactgtgtgttgtaaaccggtctgttgtgtgcctgtgtgctgcggcgcagccagttcttgttgtcgtcagagttcctgccagcctgcctgctgcgcttcaagctcatgccagcccgcttgctgtgtccctgtttgttgtaaaccggtgtgttgtgtgagcacatgctccgaagattcctcgtcatgctgtcagcagagctcatgtcagccggcctgctgcacatcctcatcttatcagcaggcgtgttgtgttccagtgtgctgtaagactgtgtactgtaagcctatttgctgtgtgcctgtctgcagcagggccagctccagtagatgccaacaaccatcgtgccaacccgcgtgttgcactacaagctgctgtaggccatcttcatctgtgtcactgttgtgtcatcctgtgtgcagatccacatgctgcgtcccagtttcctcctgctgtgcccctacaagcagctgtcaatcatcctgttgcaggccggccagttgtgtgagtctgttgtgcaggcctgcctcttcccggcttgcatgctattcactgtgcagtggtaagaagtccagctgctag

SEQ ID NO: 23676 - DNA, 567 bp, synthetic construct
  source 1..567: mol_type = other DNA; note = Synthetic coding sequence
atgaccgcccccagctgcgccttccccgtgcagttccggcagcccagcgtctccggactatcccagataaccaagagtctgtacatctctaacggagtggccgctaataataagctgatgctcagcagtaaccagattacaatggtgatcaatgtcagcgtagaggtggtcaatacactgtacgaggatattcagtacatgcaggtgcctgtggctgactcccccaatagcagactttgcgatttttttgacccaatcgccgaccacattcattcagttgagatgaaacaggggaggacactgctccactgcgcagctggcgtcagcagaagcgcagcactgtgcttagcttacctgatgaaataccacgccatgtcactgttggacgcccacacttggacaaaaagctgccggcctatcatccgcccaaactccgggttctgggaacaactcatacattacgagttccaactcttcggtaaaaataccgtacacatggttagctcccccgtcggcatgatccccgatatatatgagaaggaagtaagacttatgatcccactgtag

SEQ ID NO: 23677 - DNA, 147 bp, synthetic construct
  source 1..147: mol_type = other DNA; note = Synthetic coding sequence
atgagcttcgacaacaactaccacggcggccagggctacgccaagggaggtttgggatgttcttacgggtgtgggctgtctggctacggttacgcctgctattgcccctggtgctatgagagatcttggtttagcggatgtttctag

SEQ ID NO: 23678 - DNA, 192 bp, synthetic construct
  source 1..192: mol_type = other DNA; note = Synthetic coding sequence
atgagctacagcggcagctactacggcggcctgggctacggctgcggcggattcggcggcctcggatacggatattcctgtggatgtggcagttttagacggctgggctacggctgcggttatggcgggtatagatattcatgttgtcacccaagttgctatggcggatattggagcagcggcttctattag

SEQ ID NO: 23679 - DNA, 189 bp, synthetic construct
  source 1..189: mol_type = other DNA; note = Synthetic coding sequence
atgtgcggcagctactacggcaactactacggcgaccacggctacggctgttgtggttatgaggggttaggctatggttatggctctctccgctgcggatactcttcatgttgtgggtacgggcacgggtacggatcccgatttttctgtggctgcgggtatggctgcggctcgggctattattactag

SEQ ID NO: 23680 - DNA, 4227 bp, synthetic construct
  source 1..4227: mol_type = other DNA; note = Synthetic coding sequence
atgtggagcctgaccgccagcgagggcgagagcaccaccgcccacttcttcttgggtgctggggatgaggggttagggacccgggggatcggaatgagacctgaggaatcagattccgaactgctcgaggatgaggaagacgaagtgccgcctgagccccagatcatcgtcgggatttgcgctatgaccaagaaatccaaatccaagcccatgactcagatcctggaaagactgtgccgctttgactacctaaccgttgtcatactcggtgaggacgtaatccttaacgaacctgtagaaaactggccctcatgtcactgtctgatttcgttccattccaagggcttcccactagataaagcggtggcttatagcaaactgcgcaaccccttcctgatcaatgacctcgcgatgcagtattacattcaggatcggcgtgaggtttaccggattctccaggaggagggtattgatctcccacgctacgccgtgctcaatcgtgatccagcccggcccgaagagtgtaacttaattgaaggggaggaccaagttgaggtgaacggggctgttttccccaagccattcgtagagaagccagtttcagcggaggatcacaatgtgtacatctattatcctagctctgcaggaggcgggagtcagcgactcttccgcaagatcggatcccgttcttctgtctactcacccgagtcatccgttagaaaaaccggtagttatatctatgaggaatttatgcccacagatggaactgacgtgaaggtatatacggtcggccccgactatgcacatgcggaggcacgcaagagcccagctctggacggcaaagtggagcgagacagtgaggggaaagaaatcagatatccagtgatgctcaccgccatggaaaagctggtggcccgaaaggtatgcgtcgcctttaagcaaaccgtctgcggattcgatctcctgagagccaacggacacagctttgtgtgtgacgttaacggcttttccttcgtcaaaaattccatgaagtactacgatgactgtgccaaaatcctagggaataccatcatgcgggagcttgccccccaattccagattccttggtctatccctacagaggccgaagatatccccatcgtgcctaccacaagcggtactatgatggagcttaggtgtgtaatcgccatcatcagacatggcgaccgtacacccaagcaaaagatgaaaatggaagttaaacatcccaggtttttcgccctcttcgaaaagcacgggggctataaaactggaaagctgaaactgaagcgaccagaacagctgcaggaggtcctggatataacaagactgctgttggccgagctggagaaggagccaggcggggaaatcgaagaaaaaacaggcaaattagaacagctgaagagcgtgctggaaatgtatggtcacttctctggcattaaccgtaaggtgcaactgacttactacccacatggcgtgaaagcctccaatgaaggacaggatcctcagagggaaaccctcgccccctcactgctcctcgtcctcaaatggggaggagagttgaccccagctggccgggtgcaggctgaagagctgggtagagcctttcgctgtatgtaccctgggggtcagggagattacgcgggattcccgggttgtggattactgcgacttcatagcaccttccgccatgatctgaagatctacgctagcgacgaggggcgggtacagatgaccgcagctgcattcgcaaaaggcctgttggcattggaaggcgaactcaccccaatcttggtgcagatggtaaaatccgcgaatatgaacggattactggattccgatggcgacagcctctccagctgccagcacagggtaaaagcacgcctccaccacattctccagcaagatgcaccatttggtcctgaagactatgatcaacttgcccctacacgaagcacatcccttctgaactcaatgaccataatccagaatcctgtaaaagtttgcgaccaggtcttcgccctgatcgaaaacctgactcaccaaatccgcgaaagaatgcaggatcctcgctctgtggatcttcagttgtatcactctgagaccctcgagctgatgttgcaaagatggtccaaactggagcgcgactttaggcagaaaagcggacggtatgatatctctaagattcctgacatctatgattgcgtgaagtacgatgtgcagcacaacgggtcattaggcctgcagggcacggctgagcttctgcgcctctccaaggccttggccgacgtcgtgatcccacaagaatacgggatttcccgagaggaaaaactggaaatagcggtcggcttctgcctccctctgcttcgcaagatcctgcttgatctccagaggacacacgaggacgaaagcgtcaacaaactgcatcccctatacagtcggggagtcctgtcccccggacgccatgtgcgcacccggctgtactttacatcagagtcccatgttcacagcctgctgtctgtcttcaggtacgggggactgctggacgagacccaagatgctcagtggcagagggccctagattacttgtctgccatctcagagttgaattacatgacccagatagtgattatgctgtatgaggacaatactcaagatccactgtctgaagagcggtttcatgttgagctgcacttttcccctggcgtaaaaggtgttgaggaagaagggtccgcccccgccggatgcggtttccgacctgccagctctgagaatgaagagatgaaaacaaatcagggaagtatggaaaacttatgccctggcaaggcttctgacgagcccgatagagccctccagacatcccctcagcctccagagggccccgggctgccccggcgcagcccgttgattaggaataggaaggccggctccatggaagtcctatctgaaacgtctagctcgagaccaggtggctatcgacttttcagtagttccaggccaccgaccgagatgaaacagagcggactgggctcgcagtgcaccggtctattctctactactgtactgggagggagttcctcggcccctaatctgcaggattacgctcgttctcacggaaagaaactaccccctgcctctctgaagcatagggacgggttcgagggatgttccatggtgcctactatctatccacttgagaccctccacaatgccttaagtctgcggcaggtgtccgagttcctatcacgagtgtgccagcgccacactgatgcgcaggcccaggcttcagcagctctttttgactccatgcacagctcacaggctagcgacaaccccttttccccgcctcggaccttacattctccaccactgcagctgcagcagagaagcgagaaacccccgtggtactcgagtgggccctcgagcaccgtgtccagtgccgggcccagcagtcccactacagtcgacggcaacagccagtttggcttctccgaccagccatcactgaactctcacgttgccgaagagcatcagggtctgggtctgttacaggaaacccccggctctggggctcaggaactgtcaatagagggggaacaagagttgttcgaacccaaccagagccctcaggtgcctcccatggaaacctcacagccatatgaggaggtgagtcaaccctgccaggaagtaccggacatttcgcagccatgccaagatatttccgaagctctttcgcagccgtgtcagaaggtacccgacatatcccaacaatgccaagaaaaccacgataacggtaatcatacttgccaggaggtgccacacattagccagccatgccagaagtcgtcgcaactgtgtcaaaaggtgagcgaagaagtttgccagctgtgtctagagaattcagaagaagtgtctcagccctgccagggggtgagcgtggaggtgggcaaattggtacacaagtttcatgttggagtgggttcacttgtccaagaaaccctggttgaagtgggcagcccagccgaagagatacccgaagaggttattcagccttaccaggagttctccgtggaggtcggacgcctcgcccaggagacctcagcgatcaatctactttcgcagggcattcctgaaatcgacaagccctcccaggaattcccagaggagatcgacctgcaagcacaagaagttcctgaggagatcaactag

SEQ ID NO: 23681 - DNA, 705 bp, synthetic construct
  source 1..705: mol_type = other DNA; note = Synthetic coding sequence
atggagggcgccagccggaacctggccagcaccccccgggtgcacgcaaaggttatgatgtaccgcaaggagcagtatcttgatgtgctgcacgcactgaaggtcgtaaggtttgtgagcgacgcaactcctcaggccgaagtttatctccggatgtatcagttggagtcagggaaactgccgaggtccccgtctttcccattagagcccgacgacgaggtgttcctagcaattgccaaggcaatggaggaaatggtcgaggacagcgtggattgttactggatcacacgccggttcgtgaaccaactgaacactaaatatagagattcactccctcagctccccaaagcctttgaacagtatctcaatctagaggacggcagactgctgacgcacctccgcatgtgcagcgctgctcccaagctcccttatgacctgtggtttaaaagatgctttgctggatgtttgcccgagtccagcctccaacgtgtttgggacaaagtcgtctctggcagttgcaaaattctcgtcttcgtggcagtcgagatcctcctgacattcaagataaaggtgatggccctaaatagcgctgaaaaaatcacaaagttccttgagaacatcccgcaggattcctctgacgctatagtgtccaaggcaattgatttatggcataagcactgtggtacccccgtacactcttcatag

SEQ ID NO: 23682 - DNA, 537 bp, synthetic construct
  source 1..537: mol_type = other DNA; note = Synthetic coding sequence
atgaccaccctgcgggccttcacctgcgacgacctgttccggttcaacaacatcaacctcgatccgctgaccgagacctatggcattccattctatctgcagtacctggcgcactggccagagtacttcatcgtggcagaggccccgggtggtgagctgatgggatatattatgggcaaggcagaggggtccgtggccagagaggagtggcatggtcacgtaactgccctatccgttgctcccgagtttcgtaggctcggcctggcggctaagctaatggagctattggaagagatatccgagaggaagggggggttcttcgtggaccttttcgttagagtgtcaaatcaagtggccgttaacatgtacaaacagttgggctattctgtgtatcgtacagtcattgaatactactctgcaagtaacggggagcccgacgaggatgcgtatgacatgcggaaggccctatctcgggatactgagaagaaatccataataccactcccgcaccctgtgcgccccgaagatatcgaatag

SEQ ID NO: 23683 - DNA, 2373 bp, synthetic construct
  source 1..2373: mol_type = other DNA; note = Synthetic coding sequence
atgggcacccggaagaaggtgcacgccttcgtgcgggtgaagcccactgacgactttgcccacgagatgatacggtacggggatgacaaaagaagtatcgacatacatctgaagaaggacatccgcaggggggtggtgaacaatcagcagaccgattggtcttttaagctggatggagtgctccacgatgcaagccaggatctggtttatgagaccgtcgccaaggatgtggtctctcaggcactggacggatacaatggcaccattatgtgctatgggcaaacaggtgcaggcaagacttacactatgatgggagccacagagaattacaagcacaggggcattctgccaagagcactacaacaggtgtttagaatgatagaggagagacctacccatgccatcaccgtgcgcgtttcttatctggagatctacaacgaaagcctatttgatctgctgtccacattgccatatgtaggtccgtccgtcactcctatgaccatcgtggaaaaccctcagggcgtgtttattaaaggtctatctgtgcacttgacttctcaagaagaggacgctttcagcctgctcttcgaaggggagacgaatagaattatagcctcacacactatgaataaaaattcttctcgatctcactgcatcttcaccatctacctagaggcacactcgaggactctgagtgaggaaaaatacataacgtcaaagatcaacctcgtagatctggcaggttccgagcgactgggcaagtccggaagcgagggacaggtgctcaaagaggccacttacattaataagtccctatccttccttgaacaggccatcattgcgttgggcgaccaaaaaagggaccacattcccttccggcagtgtaaactgacccacgccctgaaagacagtctgggagggaactgtaacatggtcctcgttaccaatatctacggggaggccgctcagctcgaagaaaccttgtcgagtctaaggtttgcttcccggatgaagttagtgaccacggaaccagctatcaacgaaaaatacgatgcagaaaggatggtgaagaacttagaaaaagaactagccctcctgaagcaggaactcgcgatccacgattctttaaccaaccgcacctttgtgacttacgatcccatggatgagatccagatcgccgaaattaatagtcaggtcaggcggtacttggaaggaaccctagacgaaatcgatatcatcagcctgcgtcagatcaaagaggtttttaaccagtttagagtcgtgctcagtcagcaagagcaggaggtggagtctacgttaagaaggaagtataccctgatagaccgaaatgattttgcagccataagtgcaatacagaaagcaggactcgtagacgtggatggtcacctggtcggcgagccagagggtcagaacttcggactgggcgtggcgccgttttctaccaagccggggaagaaggctaaaagcaaaaagaccttcaaggagccgctctcctccctagcgagaaaagagggcgcttcatctcccgtaaacggaaaagatctggactatgtgagtacgtctaagacccagttggtgccttcgagcaaagatggggacgttaaagacatgctatcccgcgatagagagaccagcagcattgaacctctgccgtccgacagtcctaaggaagaactgcgccctatcagacccgacaccccgccttcaaagccagtcgccttcgaggaattcaagaatgaacaaggcagtgagatcaacaggattttcaaagagaataaaagcattttaaacgagagaaggaagcgcgccagtgaaacaacgcagcacatcaacgcaattaagcgcgagatcgacgtgacaaaggaagcactgaactttcagaaatcattaagagaaaagcagggtaagtacgaaaataagggactgatgatcatcgatgaagaggaattcttgcttatccttaagctgaaggatcttaaaaaacagtatcggtctgagtaccaagacctgagggacttacgcgccgagatccaatactgtcagcatcttgttgatcagtgccggcatcgcctgctgatggaatttgatatatggtacaacgaatccttcgtaattcctgaggacatgcaaatggcccttaaacccggaggctcaataagacctgggatggttccggtgaaccggatcgtaagcctgggggaagacgaccaggataagttctcgcaacttcaacagcgggtgctgcccgagggtcccgactctataagtttttataatgccaaggtaaagattgagcaaaagcacaattacttgaaaacaatgatggggcttcagcaagcccatcgaaaatag

SEQ ID NO: 23684 - DNA, 3588 bp, synthetic construct
  source 1..3588: mol_type = other DNA; note = Synthetic coding sequence
atgtggagcctgaccgccagcgagggcgagagcaccaccgcccacttcttcttgggcgctggggatgaaggccttgggaccaggggtatcgggatgagaccagaagagtcagactccgagctgctcgaggacgaagaagacgaggttcctccagagccacagatcatagtgggcatttgcgccatgaccaaaaagagcaagtcgaagcccatgacccagattctcgagaggctgtgtaggtttgactacctgaccgtggtgatactcggcgaggatgttatcttgaatgagccagtggaaaactggccctcctgtcattgcttaatctcctttcacagcaagggctttcctctggacaaggccgtggcatactcaaaactgcggaacccatttctgattaacgacctggctatgcagtactacattcagggcgacagacgagaagtgtatcggatcctgcaggaggagggcatcgatctgccgcggtacgccgtgttgaatcgagatccggcaagacccgaggaatgtaatctaattgagggcgaggatcaggtcgaggttaacggcgccgttttcccaaagccctttgtcgagaaacccgttagcgccgaggaccacaatgtgtacatctactatccctcgtcagctggaggtggaagtcagcgtctgttcaggaagattggaagtcgctccagcgtgtattcgcctgagagttccgtacgcaagaccggcagttacatctacgaagaatttatgcccaccgatgggactgacgtgaaggtgtatacagtcgggccagattacgctcatgccgaggcccgcaaatcacccgctctcgatggcaaagtggaacgggattctgaggggaaggaaatcaggtaccccgtcatgctaacggctatggagaaactggtcgctaggaaggtatgtgtggcttttaaacagactgtatgcggatttgacctcctccgggcaaacggccattcattcgtgtgcgacgtgaacggctttagctttgtgaagaactcaatgaaatattacgatgattgcgcaaagattttggggaacaccataatgcgtgagttggctccccaattccagataccttggagcattccaactgaagcagaggacatcccaatagtcccaacaacgtcaggaacaatgatggagttgcggtgtgtcatcgcgattattagacatggagatcgcacaccaaagcagaagatgaagatggaagtgaaacacccccggttctttgctcttttcgaaaagcatggaggatataaaaccgggaaactgaaacttaagaggccagagcaattacaagaagtgttagacatcacacgactactcctcgcggagctcgaaaaagagcccgggggagaaatagaagagaaaactgggaaattggagcagctcaagtccgtgctggagatgtatggacatttttcgggaattaaccgaaaagtgcagctgacttattacccacatggcgtcaaggcttcgaacgagggacaggatccgcagcgggaaacgcttgccccatcgctcctcctcgtgcttaaatggggcggggaactgacacctgcaggtagggtacaggccgaagagctgggaagagcgttccgatgtatgtatccaggcgggcagggcgattacgccggctttcctggttgtggtctcctgagacttcatagcacatttagacacgacttaaaaatttacgcttctgacgagggccgtgtacagatgacagctgctgctttcgccaagggcctgctggcgttggaaggtgagctgacgcccattctggtgcagatggttaagtcagctaacatgaatgggctgttagactctgacggagatagcctgagtagctgccaacatcgtgtcaaagctcgactgcaccacattctacagcaggatgccccatttggcccagaggattacgatcaactcgctccgactaggtcaaccagcctgctcaatagtatgactataatccagaatccagtaaaagtgtgtgatcaggtgttcgcacttatcgaaaacctgacacaccagattcgagagagaatgcaggacccaaggagcgtggatctccagctttatcatagcgagaccctggagctgatgctacagagatggagtaaactcgagagggatttccgtcaaaagagtggccgctatgacatatcaaaaatacctgatatctatgactgcgtcaagtacgatgtgcagcacaacggttcactggggttacaaggaacggctgaactgctgcgcctgagcaaggcactggccgatgtggttatccctcaggagtacggtatctctcgcgaggagaaattggaaattgcggtcggcttctgtctcccactgctgcggaagattttactggatctccagcgtactcatgaggatgaatactcaagaggggtgctctcccctggccgacacgtccggacgcgcttatatttcacatccgagtcccacgtgcattcgctgctatccgtgttccgatatgggggtctgctcgacgagactcaggatgcagacagggccctgcaaaccagtccccaacccccggagggaccaggcctgccacggaggagccccctgatccgcaacaggaaggctgggtcgatggaggtactgtcagaaaccagctctagtagacctggaggatacagactgttcagctcctcccgtccccctaccgaaatgaagcagtcaggtctgggctctcagtgcacaggcctgttttccaccacggtgctaggtggttcctcctcggcacctaacctacaggattacgccagatcccacgggaaaaagttgcctcctgcctcattaaaacacagagacgagctgttatttgtacctgccgtaaagcgcttctccgtgagctttgccaaacacccaactaacggattcgagggctgttccatggtgccaacgatttatcctctggaaacactgcacaatgccctttcactgcggcaggtacccccaatggagaccagccagccatacgaagaggtgtctcagccttgccaggaagttcctgatatctcccaaccttgccaagacatttctgaagccctcagccagccatgtcagaaagttcccgatatctctcagcagtgtcaggaaaatcacgataacgggaatcacacatgccaggaggtgccacatatctcacagccctgtcagaagtcgtctcagctctgtcaaaaggttagcgaggaggtttgtcagttgtgtctagaaaactccgaggaagtttcgcaaccatgccagggggttagcgtggaggtggggaagctggttcataaattccatgtaggtgttggctcgctagtgcaagagacactcgttgaggtcggctcaccagccgaggaaatccctgaggaagtgatacagccatatcaagagttctccgttgaggtgggtaggctggcccaggagaccagcgccattaatcttttgtcacaggggattcctgagattgataagcctagccaggagttccccgaagagatcgatctgcaggctcaagaggtgccagaggaaatcaactag

SEQ ID NO: 23685 - DNA, 240 bp, synthetic construct
  source 1..240: mol_type = other DNA; note = Synthetic coding sequence
atgtgctgcaactactacggcaacagctgcggctacggcagcggctgtggatgcggatatggttccggatccggatgtggttgcggctacggcacaggatatggctgcggttatggttgtggctttgggtctcactacggctgcggatatggcacaggctacggctgcggatatggatcaggctctggatactgtggttaccggcccttttgtttccggaggtgctattccagttgctag

SEQ ID NO: 23686 - DNA, 1767 bp, synthetic construct
  source 1..1767: mol_type = other DNA; note = Synthetic coding sequence
atgaagctggagttcaccgagaagaactacaacagcttcgtgctgcagaatttgaatcgacagagaaagaggaaagaatattgggacatggcattgagtgtagataaccatgttttctttgcccaccgcaacgtgctggcagccgtgtctccgctcgttagatcgttgatctcatctaacgacatgaaaacagccgacgagctgttcattaccatcgacacgtcatacctgtcacccgtgacagtagaccagctgctcgattacttttattcaggaaaagtcgtgatctccgagcagaatgtggaggagctgctccggggggcccagtactttaacactccccgactgcgcgttcattgcaacgacttcttgatcaaatctatctgcagagcaaactgtttaaggtatctgtttttggcggaactttttgagcttaaggaggtgagtgatgtggcctatagcgggatccgggataatttccattattgggccagcccagaaggctccatgcactttatgagatgtccccctgttatcttcggacggctgcttcgggatgagaacctgcacgtgctcaatgaggatcaggcactgtcagccctgataaactgggtctattttcgcaaagaagacagggagaagtatttcaaaaagttcttcaattacatcaaccttaacgccgtatcaaataaaactcttgtattcgccagcaacaagctcgtcggaatggagaacactagtagtcatacaacactgatcgaatccgtgctgatggacagaaagcaggagaggccttgcagtttgctggtgtaccagagaaaaggcgccctgctggacagtgtcgtaattctgggcggccagaaagctcacgggcagttcaatgatggagtgtttgcctatattattcaggaaaatctgtggatgaagctgtcagatatgccctatagggccgccgccttgtccgcaacctccgctgggagatacatttatatctcaggcggcactacagaacagatttctggacttaagacagcttggaggtacgatatggatgacaactcatggacaaaattgccagatctgcccattggtcttgtgtttcacacgatggtcacgtgtgggggaaccgtctattcagtaggcggaagcatcgctccccgccggtatgtgtcaaatatttatcgatacgatgaaaggaaagaggtatggtgtctggccggcaagatgtctattcccatggatggcaccgcggttattacaaagggcgataggcatctttacatagtgacagggcgctgtttggtcaagggttatatctctagggtgggtgttgtggattgtttcgacaccagcactggagacgttgtgcagtgcattacctttccgattgagtttaatcaccgccctttattgtcttttcagcaggataatattctgtgtgtccattcccaccggcagtcagtggaaatcaatctgcagaaagtcaaagcaagtaagaccacgacgagcgtcccagttctgcccaacagctgtccactggatgtctctcacgcaatttgtagtatcggcgatagtaaagtttttgtgtgtggtggcgtgactacagctagcgacgtgcagactaaggactacaccatcaaccctaatgccttcctgctcgaccaaaaaactggtaagtggaaaactttggctcccccccctgaggccctggactgccctgcttgctgcctggctaagctcccgtgtaagatacttcagcggatttag

SEQ ID NO: 23687 - DNA, 2208 bp, synthetic construct
  source 1..2208: mol_type = other DNA; note = Synthetic coding sequence
atgatccccccccaggaggccagcgcccggcggcgggagatcgaggacaaactcaaacaagaggaggagaccctgtcttttatccgcgactctctcgaaaaatcagaccagctgaccaaaaacatggtgtcaatactctcaagtttcgagtcgcgcctgatgaagctggaaaattctatcatccctgtccacaaacagactgaaaacctacagagactgcaggagaacgtagagaagacactcagctgtctggaccacgtcatttcttactatcatgttgcatctgacaccgaaaaaattatacgcgaaggccctaccggccgcctagaggaatacctaggatcaatggctaaaattcagaaagccgtggagtattttcaggacaactccccggacagtcctgagttgaataaagtcaaacttctgttcgagcggggcaaggaagccctggagtccgagttccggtccctgatgacacgacactccaaggtcgtgtcccccgtcttgatcctggacctcatctctggtgatgatgacctagaggcgcaggaagacgttactctcgagcatctccccgaaagtgtgcttcaggacgtcatcaggataagtagatggctggtggaatacggccgcaaccaggacttcatgaatgtgtattaccagatacggtccagccaactggatcgcagcatcaaaggccttaaggaacattttcacaaaagctcaagttcgagcggtgtgccttactccccagctatacctaataagcgaaaagataccccaacaaagaagccagtgaagcgccctggcaccattcggaaggcccagaatcttcttaagcaatactcacagcacggcctggatggtaagaaaggaggaagcaatctcattccattggaaggcctgctcccttgcacccctaggggcgggttaccggggccttggataaacgccgcttgcgtttgtgctgccgacatttctcctggtcacgagcatgatttccgcgtgaaacacctgtcagaagcactgaatgacaaacacggtcctttagccggccgggacgacatgttggacgtggagacagacgcttatatacactgcgtttcggcctttgttaaactggctcagtctgagtaccagctcctggctgatatcatccctgagcaccaccagaaaaagacttttgactccctgatccaggacgctcttgatggacttatgcttgagggggaaaatatagtttctgccgctaggaaagctattgtacgccacgacttctcaactgtgctgacagttttccccatactgcggcacttgaagcagaccaagcctgagttcgaccaggtcttgcaaggcacagccgctagcactaagaacaagctgccaggactgatcaccagcatggagactataggcgcaaaggccctggaggactttgcggacaatatcaagaacgatcccgataaggaatataatatgcctaaagacgggactgtccatgagctgacctctaacgcaatactgttcctccagcaattgctggacttccaagagaccgccggcgccatgctggcctcccaagagaccagttccagcgccacatcatattcaagcgagttcagcaagcgcttactcagcacctacatctgcaaagtgctagggaacctgcagttgaatttactgagcaagtctaaagtctacgaagatccagctttgtctgcaatttttctccataacaactacaactacattctgaaatccctggagaaaagtgagctgatacagctggtggctgtgacccaaaagacagcggaaaggagctaccgggagcacattgaacagcagatacagacctaccagcgatcttggttgaaagtgactgactatatcgctgagaagaacctgcccgtgttccaacctggggttaaactacgagataaggaacgccagatcattaaagagcgatttaagggttttaatgatggactcgaggaactctgcaaaatacagaaggcgtgggccatacctgacaccgaacagagagatagaattagacaggcacagaagactatcgtaaaggagacatatggtgcatttttgcagaaatttggcagcgtccccttcacgaaaaatccggaaaagtatattaaatacggcgtcgagcaggtaggcgatatgatagaccgactatttgatacgtccgcatag

SEQ ID NO: 23688 - DNA, 378 bp, synthetic construct
  source 1..378: mol_type = other DNA; note = Synthetic coding sequence
atggccggcgccggccccaccatgctgctgcgggaggagaacggctgctgctctcgtaggcagtcttcatcatcagctggtgacagtgacggagaacgagaagactccgctgccgaaagagcaaggcagcagctcgaggccctgctgaataaaactatgagaatcagaatgacggatgggcggacactcgtcgggtgttttctttgcaccgaccgtgactgcaacgtcatactgggttctgcacaagaatttctaaaaccatctgacagttttagcgcgggcgagcctagagtgctgggattggccatggttccggggcatcatattgtcagtatcgaggttcagagggagagcttgacaggcccgccttacttatag

SEQ ID NO: 23689 - DNA, 477 bp, synthetic construct
  source 1..477: mol_type = other DNA; note = Synthetic coding sequence
atgctgctgctggactgcaaccccgaggtggacggcctgaagcaccttctggaaaccggagcgtccgtaaatgccccacccgatccatgtaaacaaagtcccgtacatctagctgccggatccggattggcatgctttctcctgtggcagctgcagacgggcgcggacctgaatcagcaggatgtacttggcgaggccccactccataaagccgccaaagtcgggtccctcgagtgcctaagcctgctggtggccagtgatgctcaaatagatttatgcaataagaatggccaaacagcagaggacctcgcctggagctgtggatttccggattgcgcgaaatttttgacaacgataaagtgtatgcagacaattaaggctagcgaacatcctgaccgaaacgactgtgtggccgtgctgcggcagaaaagatctcttggaagcgtcgaaaacacttctggtaaacgtaaatgctag

SEQ ID NO: 23690 - DNA, 8712 bp, synthetic construct
  source 1..8712: mol_type = other DNA; note = Synthetic coding sequence
atgcggggccggcggggccggccccccaagcagcccgccgcccccgccgcagagaggtgcgccccagctccacctccgcccccgcctccccctactagtgggcctatcgggggcctgaggagtcggcacagaggctctagcagggggcgttgggccgcagcccaggccgaggtagcaccaaagactaggttgagtagccctaggggcggcagcagctctaggcggaagccccctccaccaccacctgctccgccgtcaacaagtgccccgggtcgcggtgggagaggcggtggcggcggccgaacaggcggcgggggaggtggagggcacctggcgcgaactaccgccgctcgtagagccgtgaataaagtagtgtacgatgatcacgaatctgaggaggaagaagaggaagaagatatggtctctgaggaagaagaggaagaggatggggacgcggaagagacccaggatagcgaggatgacgaagaagatgaaatggaggaagatgacgacgattctgattacccggaggagatggaagacgatgatgacgatgccagttactgcaccgaaagttcctttagaagccactcaacctacagctctaccccagggcgccgaaagcctagagtgcaccgcccacggagccccatattagaagaaaaggatattccgcccttggagttcccaaagagctctgaggacctgatggtgcccaatgaacatatcatgaatgtgatcgccatttacgaggttctcaggaactttgggaccgttctgcgacttagcccttttaggttcgaggacttctgcgcagctctcgttagccaggagcagtgcacactaatggccgaaatgcacgtagtcctccttaaagcagtattaagagaagaggatacatccaacaccacgtttggccccgcggacctgaaggactcagttaattccaccttgtactttatcgatgggatgacttggccggaggtcttacgggtatactgcgaatccgacaaggaataccatcatgtgctcccttatcaggaagcagaggactacccatatgggcctgtcgaaaacaagatcaaagtgctccagttcctcgtggatcagtttctgactacaaacatcgctagggaggagctgatgtcagaaggggtgattcagtatgatgatcattgtagagtgtgccacaagttaggggacttgctgtgctgtgagacctgtagcgccgtttaccacctcgagtgcgtaaagcctcctctggaggaagtccctgaagacgagtggcagtgcgaggtgtgcgtggctcataaagtgcccggggtgacagactgtgtggccgagattcaaaagaataaaccttatatccggcatgaacctattggttacgaccgtagtagacggaagtattggttcttaaatcgaagattaatcattgaagaagacactgaaaacgaaaatgagaaaaaaatatggtattattccacaaaagtgcaactggctgaactcatcgactgcctggacaaggattactgggaagctgagctctgtaagatactggaagaaatgcgcgaggagattcaccgccatatggacatcaccgaggatctgaccaataaggcacggggcagcaataagagctttctggcagccgcgaacgaggagatcctcgaatcgattcgagccaaaaaaggggatatcgataatgtgaaaagccccgaagagaccgaaaaggataagaacgagacggaaaacgacagcaaagacgctgaaaagaatcgcgaagaatttgaagaccagagcttggagaaggactcagatgataagactccagatgacgacccagagcagggcaagagcgaggagccgacggaagttggcgataagggaaatagtgtgtctgcaaatctgggggacaacaccacaaacgcaactagtgaggagacatcccctagtgaaggccgatcaccggtcggctgcttgtccgaaacccctgactcctcaaacatggcggagaagaaagttgcctccgaacttcctcaggacgttccagaggaacctaacaagacatgtgaatcttccaatacatccgccacaaccacatctatccaaccaaacttggagaatagcaactcttcttctgagctaaactcatcacagagcgagagcgccaaggccgccgacgacccagaaaacggtgagcgggagtctcacactccagtcagcatccaggaggagatcgtaggtgatttcaagtctgaaaagagcaacggcgagctgtctgagtccccaggcgcaggcaagggggcctcaggctcaactcggattattactagattacgtaaccccgacagcaaactatcccagctcaaatcccagcaggtggcagctgccgctcatgaggccaataagctgtttaaagaaggtaaagaagtgctcgtagtgaatagccaaggcgagatatcacggctgtcaaccaagaaagaggtaatcatgaagggaaacattaacaattacttcaaactgggccaggaggggaagtacagggtataccacaatcagtacagtaccaactctttcgccttaaataagcaccaacaccgggaggatcacgacaagcggaggcatctggcccacaagttttgccttacccctgccggtgaatttaaatggaacggaagcgtgcacggctccaaggtcctaaccatctccacgctgcggcttaccatcactcagttggaaaacaacatcccttcctctttcctgcatccgaactgggctagtcacagagcaaactggattaaagctgttcaaatgtgctccaagccacgggaattcgccctcgccctggccattctggagtgtgctgtcaaaccagttgtaatgctgccaatttggagggagtcactcggccatactcggcttcaccggatgacatctattgaacgcgaggagaaggagaaagttaagaaaaaagagaagaaacaggaggaagaggagacgatgcagcaagcaacttgggtaaaatacactttcccagtgaagcaccaggtgtggaaacagaaaggcgaggaatatagggtcacaggctacggtgggtggtcatggattagtaaaacgcacgtgtacaggttcgttcctaagttgcctggtaacactaatgtcaattaccgcaagtccttggagggaacgaagaacaatatggatgagaatatggatgaatccgataagcgcaaatgttcgcgctcccccaagaaaataaagatcgaacccgattccgaaaaagacgaggtgaagggcagcgatgcggccaaaggcgcagaccaaaacgagatggatattagtaagattaccgaaaaaaaagaccaggatgtgaaagaacttctcgacagtgacagcgacaagccttgcaaagaagaacccatggaggtggacgatgacatgaaaaccgaaagccacgtaaactgccaggaatcctcccaggttgatgtagtgaatgtgtctgagggttttcatcttaggacttcatacaagaagaaaacaaagtcgtccaagctagacggcctgttggagaggcgcataaaacagttcaccctggaggagaagcagcggcttgagaaaataaagctggagggtggaattaagggcatcggcaaaacttcaaccaacagcagcaaaaacctgtcagaatcgcccgtgatcacaaaggccaaggaaggatgccagtctgactcaatgcgccaggagcagagccccaatgcaaacaatgaccaacccgaagatctgattcagggatgtagcgagagtgatagctctgtcctgcggatgtcagaccctagccacacgacgaataagttgtaccccaaggacagggtactggatgacgtgagcattagatctccagagacgaagtgccccaaacagaatagtatcgagaacgatattgaggagaaagtatctgacttagcttcacggggacaagaacctagcaagtcaaagactaaaggtaatgattttttcattgacgattccaagttagcttcagctgacgatattggtacactgatatgtaagaataagaaaccgcttattcaagaagaatccgatacaatagtttcctcctccaaaagcgcactgcatagctctgtgcccaaatcaaccaacgatagagatgcaacccccctatcacgagccatggattttgaggggaaacttgggtgtgactccgagtccaacagcactctggaaaacagctctgacaccgtgtccattcaggattcatcggaggaggatatgatagtgcagaattccaacgagagcatctcagaacagttcagaactcgggagcaggatgttgaagtcctagagccactcaagtgtgagctagtgtcaggggaatcaacggggaactgtgaggatcgcctgcccgttaagggtaccgaggctaatggaaagaagcccagccaacagaaaaaattggaagaaagacccgtaaacaaatgcagcgatcaaattaaactaaagaacactacagataagaagaacaatgagaatagggagagtgaaaaaaaaggacaaagaacatccaccttccagatcaatggaaaggacaacaagccgaagatctatctaaagggcgagtgcctgaaggagatctccgagtccagagttgtcagtggtaacgtcgaacctaaagtcaacaatatcaataaaatcatccctgaaaacgatatcaagtcattgactgtgaaggagtcggccatccgtccttttatcaatggtgacgtgatcatggaggactttaatgagagaaattctagtgaaacaaagagtcacctactgtcctccagtgacgctgagggtaactaccgggactccctcgaaaccctgccttctactaaggaatctgattcaactcagacaactactccgagtgcatcttgcccggagagtaactcggtgaatcaggtggaagacatggaaatcgagacctcggaggttaagaaggtaaccagtagtccgattaccagcgaagaggagagcaacctgtccaatgattttattgacgaaaatgggctaccaatcaacaagaatgagaatgtgaacggcgagtcgaagagaaaaaccgtgatcacagaagttaccacaatgacctcaactgtggctaccgagtcaaaaaccgtaatcaaagtcgaaaagggggataagcagaccgttgtgtcttctacagagaattgcgcaaaaagcacagtgactacaactactaccacagtcacaaagttgtctaccccaagtaccggggggagtgtggacatcatctccgttaaagaacaatcgaagactgtggtgacaaccaccgtaactgatagtctgacaactaccggtgggactttggtaacttctatgactgtgagtaaggaatacagcactagggataaagtcaaactgatgaaattcagtcgacccaagaagactcgcagcggaacagccctccctagctataggaagtttgtgactaagagtagtaaaaagagcattttcgtgctgcctaatgacgacctaaagaaactcgcacgcaaaggtgggataagggaggtgccctacttcaattacaatgcaaagcccgccctggacatctggccctacccttcacccaggcccacattcggcattacttggcggtaccgtctgcagacagtcaagagtcttgccggtgttagccttatgctgaggctgctttgggcatcacttaggtgggacgacatggccgccaaggcgcctcccggcggcggcacaactagaaccgagacgagcgaaaccgagataacaactactgagattataaagaggcgcgacgtagggccctacggcattcgatcagagtattgtataaggaagataatctgtccaattggggtcccagagacaccgaaagagacacccacccctcagagaaagggactccggtcaagcgccctccgtcccaaacgcccagagaccccaaagcagactggtcctgtgatcattgagacctgggtggctgaggaggagctcgaactgtgggaaattcgcgctttcgcagagcgtgtggaaaaagagaaggctcaggccgttgaacagcaagccaagaaacgtcttgagcagcagaagccaacagtgatcgcaacttcaacaacaagccccacaagcagtactacaagcactatcagtccagctcaaaaagtcatggtggcgcccatatcgggcagcgtgaccactgggaccaagatggtgcttactacaaaggtgggcagcccagctacagtcacctttcaacagaacaagaactttcaccagacattcgccacttgggtgaagcagggacagtccaattctggagtagtacaggttcagcagaaggtgctggggattatcccaagttccaccggcacctctcaacagacctttacttccttccagcctcgcacagctacagtgacgatccgccctaatacctctggctctgggggcacaacctccaactcccaggtcataactgggccacaaataagaccagggatgaccgtaattagaaccccacttcagcagtccaccctgggcaaagccatcattcggacccccgtcatggtgcaaccgggcgcgcctcagcaggttatgacccagattattaggggacagcccgtgtcaacggcagtctctgctccaaatacagtaagctcaacccccggccagaagagtctcaccagcgcgacttctacatctaacatccagtcttctgcatcacagccgcctcgtccccaacaggggcaagtgaaacttaccatggcccagctgacccaactgactcagggtcatggcggaaatcagggcttaaccgtggtaatccagggacagggccagactacaggtcaactgcagctgataccccaaggggtgacagtgttaccgggaccgggccagcaattgatgcaagcggctatgcccaacggcacggtgcagcgctttttgtttacccctctcgccaccaccgcaacgacagccagcaccacaacaaccacggtctctacgaccgcagccgggactggcgaacaaagacagagcaagcttagccctcagatgcaggttcaccaggataaaacccttccaccagcccaatcttcctcagtcggccctgctgaggcccagcctcagaccgcacagccctctgcgcagccacaacctcagactcagccacagtcccctgcacaaccggaagttcagactcagcccgaagtccaaacccagaccacagtctcctcccacgttccctccgaagctcagcctacacacgcgcagtccagcaaacctcaagtcgccgcgcagtcccaacctcagtcgaatgtgcagggacagagccccgtgagagtgcaatcaccctctcagacccgcattagaccatctaccccatctcaactgagcccagggcagcaaagccaggtgcaaacgaccacctctcagccaattcctatccaaccccacacctcgcttcagatcccaagccagggccagcctcagtcccagcctcaggtagttatgaagcacaacgccgttatcgagcacctgaagcagaaaaaatctatgacccccgccgaaagggaagaaaaccagaggatgatcgtctgcaaccaggttatgaaatacattctggataaaatcgacaaagaggagaaacaagctgctaaaaaacggaagagggaggaaagcgtcgaacagaaacgatccaaacaaaatgcaacaaagctctctgccctgctctttaagcacaaagagcagctgagggcggagattctcaagaaacgcgcgctgctggataaggaccttcaaatcgaagtgcaggaagaactgaagcgtgacctgaaaatcaaaaaagagaaagacctcatgcagctggcccaggcaacagcggtagctgccccatgtcctcccgtaacacctgccccacctgcccccccggcgccacccccaagcccaccgcccccaccagctgtccagcataccggactcctgagcacccccacattaccagcagcaagtcagaagcgcaagcgggaggaggaaaaagatagcagctccaaaagcaagaagaaaaaaatgatctcaacaacgtccaaagagacaaagaaggatacaaagctgtactgtatctgtaaaaccccctacgacgagtcaaagttctatatcggctgcgatcgctgtcagaattggtaccacggtagatgtgtgggtatactccagtcagaggcagagctaatcgatgaatacgtttgtcctcagtgtcagagcacagaggatgcaatgaccgtattaacccctctgactgagaaggactacgagggcctgaagcgcgtactacggtccctgcaggcccataaaatggcctggccattcctcgaaccagttgaccccaacgatgcacccgattattacggggtcattaaggaacctatggacttggcaacaatggaggagagagtacaacgaagatactacgagaaattgacagagttcgttgccgacatgactaaaatcttcgataactgcaggtattataacccttccgattccccattctaccaatgtgctgaagtgctggagagtttcttcgttcagaaactgaagggttttaaagccagccgtagtcacaataacaagctgcaatcgactgcgtcctag

SEQ ID NO: 23691 - DNA, 2628 bp, synthetic construct
  source 1..2628: mol_type = other DNA; note = Synthetic coding sequence
atgaacttccaggccggcggcggccagagcccccagcagcagcagcaacttgcaggggggcctcctcagcagttcgccctgtccaactccgcagccatccgcgcagaaattcaaagatttgagagcgtgcaccctaatatctatgctatctatgacctcatagaaaggatcgaggatctcgccctccagaaccagatcagagagcacgtgatctcaatagaggactcgttcgtcaactctcaagagtggacactgtctaggtccgtgcctgagctcaaggtgggtattgtaggcaacctgagttccggcaagtcggccctagtacatagatacttgacaggcacttacgtgcaggaggaatctcccgagggaggaaggttcaaaaaagagatcgtcgtcgatggacaatcctacctcttgttgatacgggacgaaggcggcccacctgagctccagttcgcggcgtgggtggatgccgtggtattcgtgtttagcctagaagacgaaataagttttcagaccgtttacaactattttctccggttatgctctttccggaatgcatcggaggtgcccatggtgctggttggcactcaggatgccatttccgcggctaatcctcgcgtgattgatgatagtagggcccggaagttatcaactgacttgaaaagatgcacctattacgaaacatgtgccacttacggactcaacgtcgagagagtcttccaggatgtggcacagaaagtggtggctctgaggaagaaacagcagctcgctatcggtccatgcaaatctctcccaaatagcccttcccatagtgccgtctctgccgctagcattcccgcggtccacattaatcaagccaccaacgggggaggttctgccttctctgattattcttcttcggtacccagcaccccgtccatctcccagcgcgaacttaggattgaaaccatcgcagcttcatctactccgacacctatcagaaaacaatctaaaaggcggtcaaatatctttacatctaggaagggagctgacctggaccgggaaaaaaaggccgccgaatgcaaggtagacagcatcgggtccggaagagccattcccatcaaacaggggatactgctcaagcgatctggcaagagcctgaacaaagagtggaagaagaaatacgtcactttgtgcgataacgggctactaacatatcatcccagccttcatgattatatgcagaatattcacggcaaagagattgatctgttacgcaccaccgtcaaggttcctgggaagcgtttgcctagggcaacacccgccaccgcccccggtacatcccccagagcaaatgggctttctgtcgaaagatccaatacccagctgggcggcggaactggggcacctcacagtgcctcttctgcgagtctccactcagaacgaccgcttagctcatcggcgtgggccggcccgcgaccagagggcttgcatcagcggtcctgttctgtttcaagcgcagaccagtggagcgaagccacaacctctctccctcctggaatgcagcacccagcctcaggcccagcggaggtgctctcctcttctcctaagctcgaccctccgccaagcccacatagcaaccggaagaaacataggagaaagaaatccactggcactccacgccctgatgggccgtcctccgctaccgaagaggctgaagagagctttgagtttgtggtggtgagcctcaccggccagacctggcactttgaggcctctaccgccgaagagcgagagctttgggtgcagtcagttcaagcacaaattctcgcctccctgcaaggatgcaggtctgccaaagataagactcggctgggtaaccaaaatgccgctctggccgttcaggccgtgcggacagtccggggaaactctttttgcatagattgtgatgcacccaatcccgactgggcatccttgaacctgggtgctctcatgtgtatcgagtgcagtggcatccatagacacctgggggcacacctgagtcgcgtgcgcagtctggacctcgatgactggcccccagagcttctggcagttatgactgccatgggcaatgcccttgccaactcagtgtgggaaggcgccctgggaggctattctaaaccaggccccgatgcttgtcgggaagagaaagaaaggtggatacgggcaaagtacgaacagaagcttttcctcgcacccctgccttcttccgatgtgcctctcgggcagcagctgttacgagccgtagtagaggatgatctgaggctgctggtgatgctgctagcacatggcagtaaagaggaagttaatgaaacctatggcgacggagatggacgaaccgcgttgcacctctcatccgccatggctaacgtcgtgtttactcagctgctcatctggtatggcgtggacgtgaggtccagagacgcccggggactgacacctctggcctatgcaagacgtgccggctcgcaagaatgtgcagacatcctcattcagcacggatgtcctggtgaaggctgcggtctggccccgacaccaaatcgagaacccgctaatggaacaaatcctagtgccgagctacataggtcccctagtctactgtag

SEQ ID NO: 23692 - DNA, 1761 bp, synthetic construct
  source 1..1761: mol_type = other DNA; note = Synthetic coding sequence
atgggcggcgccctgggcctgcggcagctgcccatctgcgcccccgcatgcagaccaagttctgggcacagtccatgggctgctgcctctccaaatcctaaccagtggtcatctcgctcacgctggtgttgtctccgccgctccgaagctcgacggagctgccgccccgttggccgcgccgcccccgggccgacccgcgccatggcgcgtccagccaccagcacacggagatccgcatgcccaccactgacccccactccagccctgcgtattgcgtggcgactcctgtcagcaactagtaggacaagccgaatggcctcagtgctctcacgcggtcgtgtacgctgcccgtggcacggggcatgttttaatatatccacaggggacctggaggactttcccgggctggattccctgcataagtttcaagtgaaaattgaaaaggagaaagtttacgtgagagcatcaaaacaggccctgcagcttcagagacggacaaaagttatggcaaagtgtataagcccctccgcaggttacagctcaagtactaatgtgctgatcgtgggggcaggcgcagctggactggtgtgcgccgagactttgcgccaggaaggtttttctgaccgcatcgtgttatgcactctggacagacacctgccttatgaccggccaaagcttagcaagagtctggatacgcaacctgagcagctggcacttcgcccaaaagagttcttcagagcgtacggtatcgaagtgctgacagaagctcaggtagtgactgtggatgtgcggaccaagaaggtagtgttcaaagatgggttcaagctggagtacagtaagctcttattggctcccgggtcttctcctaagacactgagctgcaaaggcaaagaagtggaaaatgtcttcacaatccgcactcccgaagatgcgaaccgagtggtaaggctggcaagaggacgcaatgtggtggtcgttggcgcgggcttcctgggaatggaggtcgccgcgtatttgaccgagaaagcgcattctgtgagtgtcgtggagctagaggagacgcccttcagaaggttcttgggcgagcgcgtgggacgggctttaatgaagatgttcgaaaataatcgcgtgaagttctatatgcagacagaggtttccgagctgcgaggtcaggaaggcaaactaaaggaagtggtactaaagtcttcaaaggttgttcgggccgacgtgtgtgtggtgggcatcggagccgtacccgctactggctttctgagacagtccggcattggcttagatagtcggggcttcattccagtgaataagatgatgcagactaacgttccaggggtgtttgccgccggtgatgccgtcaccttccctctagcgtggcgtaacaatcgaaaggtgaacattcctcactggcagatggcccacgctcagggcagggtcgccgcccaaaacatgctggcgcaggaagccgagatgagtaccgtaccttacctgtggacagcaatgtttggaaaatcactgaggtatgccggttacggcgagggattcgacgatgtgattatccagggcgacctggaagaattgaagttcgtcgcgttctatacaaaaggtgacgaggttattgctgtggccagtatgaattacgatccaatcgtgtccaaggtggccgaagtcttggcaagcgggcgggccattcgaaaacgcgaggtggaaacaggggacatgagctggctaaccggaaagggcagctag

SEQ ID NO: 23693 - DNA, 1521 bp, synthetic construct
  source 1..1521: mol_type = other DNA; note = Synthetic coding sequence
atgcccgtgcaggccgcccagtggaccgagttcctgagctgccccatttgctataatgagttcgacgagaacgtgcataaaccaatcagtctcggctgctcacacacagtttgtaaaacctgcctcaacaaactacataggaaagcctgcccctttgaccaaacggccataaacacggacattgacgtgctgccagtcaacttcgccttactacagctggtgggtgcccaggttccggaccatcaatctataaaactctctaacctcggagaaaataaacactatgaagtcgcaaaaaaatgtgtggaggatcttgctctctacctgaaaccactgtccggaggtaagggtgtggcttccttaaatcagagtgctctttcacgacccatgcagcgcaaacttgttacattagttaactgccagctggtggaagaagaaggacgcgtccgcgcgatgagagccgctcgctctctgggcgagcgtactgttacagagctgattcttcagcaccagaacccgcagcagctttctgccaacctgtgggctgcggttcgggcccgggggtgccagttcctggggccagctatgcaggaggaagcactgaaactagtgctgcttgcacttgaagacgggagcgccttgtcacgtaaggtcctggtgttattcgtagtgcagcggctcgaaccaagattcccgcaggccagcaaaacttccattggtcacgtagtgcagctcctttaccgcgccagttgcttcaaggttactaagcgcgacgaggattccagcctcatgcagctaaaggaagaattcagaagctacgaggcgctacggcgggaacatgacgcccaaatcgttcatatcgcgatggaagctgggctgaggattagccctgagcagtggtcttcactgctgtatggggacctcgcgcataaaagtcacatgcagtctatcatcgacaagttgcaaagccctgagtccttcgccaaaagcgtccaggaacttactattgtgctgcaaagaaccggcgaccccgccaaccttaaccgactgaggccccacttagagttactggcaaatattgaccccaacccagacgcagtgagccccacctgggagcagttagagaacgctatggtcgctgttaagacagtggtgcacgggttggtcgactttatccaaaactacagtagaaaaggtcacgaaacgcctcaaccccagcccaattccaagtataagacttcaatgtgtcgggacctccgccagcaggggggctgccctagggggactaactgcacgtttgcacactcacaagaagaattagagaaatgtaaccccagagggttgtacctccactgttgtttgctgagctcggtggctagtctgggtacggtgcataacgagctgtataaacagcagcactgcgaccgtgaaaagatcagtgtgtgtgccgtcaaaagagctgagacctgcttcagctcccaattcttctctcccctggaggttccgagagaggaggactag

SEQ ID NO: 23694 - DNA, 783 bp, synthetic construct
  source 1..783: mol_type = other DNA; note = Synthetic coding sequence
atgccccgggcccggagcggccggcggagccggggcgccggcggcagggaagagacctttctgagggtcagggccaaccggcagacacggttgaacgcccgcatcgggaagatgaagaggcggaaacaggatgagggccaggtttgcccactgtgtaaccgtcccttggctgggtcagagcaggagatgtctcggcatgtggagcattgtcttagcaaacgcgagggcagttgcatggcagaagatgatgcagtggatattgaacacgaaaacaataatcgtttcgaggagtacgaatggtgcgggcagaaacgtataagggcaactactctacttgagggcggtttccggggctcaggttttatcatgtgcagcggcaaagagaaccccgatagcgacgccgacctggatgtggacggagatgacactctagagtatggaaaaccacagtacacagaggccgatgtcataccgtgtaccggagaggagcctggggaagccaaagagcgggaagcgctcaggggagccgtccttaatggtgggcccccttccaccaggattacaccagagttttccaagtgggccagcgacgagatgcctagtacgagcaatggtgagtcctccaagcaggaagcgatgcagaagacttgtaaaaatagcgatatagagaagatcaccgaggattccgctgtgaccacatttgaggcattaaaggcaagagttcgcgaactggagcgacaactgagtcggggcgaccgttacaaatgcctgatatgtatgtag

SEQ ID NO: 23695 - DNA, 1461 bp, synthetic construct
  source 1..1461: mol_type = other DNA; note = Synthetic coding sequence
atggccgccgtgaagaccctgaaccccaaggccgaggtggcccgggcccaggccgcactagctgtcaacatttcagccgcccgaggcctccaggacgtgctgagaaccaatctgggtcctaagggtacaatgaaaatgctcgtgagcggagctggagatatcaagctgaccaaagacggtaacgtgctgttgcatgagatggggctccatcctaggattattacagaaggctttgaggcggccaaggagaaagcattacaatttctagaggaagtgaaggtgagccgggaaatggatcgcgagactctgattgacgttgcacgcacatcattgcggacgaaagttcacgcagaattagcagacgtgttgaccgaagccgttgtggactctattctggcgatcaaaaaacaggatgagcctatcgaccttttcatgatcgagatcatggagatgaaacataaatctgaaaccgatacatctttgatccgtggcttggtgctcgaccatggggctagacacccagacatgaaaaaacgagtcgaggatgcctatatcctgacatgtaatgtaagcctagagtatgagaagactgaggtcaattctggcttcttctacaagtccgccgaggagcgagagaagctagtgaaagccgaacggaaatttatcgaggatagggtaaaaaagataatagagctgaaacgtaaagtctgtggtgactccgacaagggattcgtggtgatcaaccagaagggcatagacccgttctcattggatgctctgtccaaagagggaattgtggctctcaggcgggctaaaaggcgaaatatggagcgactgacacttgcatgcggcggggttgccctgaattcctttgatgatctttccccagattgcttaggacatgcgggcctggtgtacgagtatacacttggagaagaaaagtttacattcattgaaaaatgcaacaaccctcgaagtgtgactctgctgatcaaaggtcctaataaacacaccttaacacaaattaaagatgctgtcagggacggcctgcgggcggtgaaaaacgccatagacgacggttgcgtggttccgggcgctggggcagtggaggtggccatggccgaagctctcattaaacacaaaccaagcgttaagggaagggctcaactcggagtacaggcgtttgcagacgcactgctcatcatcccgaaggttttagcccagaatagtggttttgatctgcaggagacacttgtgaaaattcaggcagagcactccgaatcaggtcagttggttggggttgacttaaacactggggagcccatggtggcggctgaggtgggagtgtgggacaactactgtgtgaaaaagcaactgctgcattcctgtaccgtgattgctacaaacatccttttggtggacgaaattatgagagccggtatgagctcactcaagggatag

SEQ ID NO: 23696 - DNA, 1407 bp, synthetic construct
  source 1..1407: mol_type = other DNA; note = Synthetic coding sequence
atgagcttccggctgagcggcggcagccggcggatctgcagccggacaggctctggaagactctcaggaggggggaccggatttgttgcagggaatgtgtgcgtaggaagtggcgcccgaagtagcttctcttgtaccctggaaggcatcagcagcggtgggagcttttgtaactctggcggtgggctagggagcggcgcatgcgccggctttttgggtaacgagcattccctactctccggcaacgaaaaggtaaccatgcagaacctgaatgataggctagccagttatctggaccacgtccacgccttggaagaagcaaatgccgacctggagcagaaaataaagggctggtacgagaagtgcgaacctggctcgagcagggagcacgaccacgattattctaggtacttttctgttattgaggacctgaaaagacagattatctctgcgaccatctgcaacgccagcatcgttctccagaacgataacgcacggctaaccgcggatgatttcagattaaaatatgagaatgagctcgccctccatcattctgtggaggcagacacaagtgggctccgcagagttctggacgaattgaccctgtgcacgaccgatctcgaaattcagtgtgaaaccctctcagaggagcttacctatttaaagaagtcacatgaagaggagatggaagtgcttcaatatactgccggaggcaatgttaacgttgagatgaatgctacgcccggtgttgatcttacagttctgctgaataacatgagagctgagtacgaggacctcgccgaacagaatcgcaaagacgctgaggcatggttcaatgaacgtagcgcaaccctgcagcagcagatttcagaccacgaaggtgctgctacagcagcaagaaacgagttgacagagctgaagcgcaacttacaaactctggagatagagctgcagtcactgatggcagttaagcacagttatgagtgcagcctggccgaaacggaagggaactactgcaatcagttgcagcagattcaggatcagatcggggtcatggaggagcagctgcaacagataagaactgagacagaggggcagaagttggagtatgagcagctcctcgacgtgaagatattcctcgagaaagagatcgatatctattgcaatctgctggacggagaggaacgcaaatcaaagagcacctgctacaagtcaaagggctaccgcccagtcaacagtggcaatcaggccaaggactctaccgaggaaacgatagttaagaccgttgtcgaggagttggatcaaattggaaatctgctgagtctgagggtgcatagcgtagaggagaagtcgagcaaaatctccaacattaccgtcgagcagcgggtgccttcgaaggctccgtag

SEQ ID NO: 23697 - DNA, 816 bp, synthetic construct
  source 1..816: mol_type = other DNA; note = Synthetic coding sequence
atggccggcctggaggtgctgttcgccagcgccgcccccgccatcacatgtcgccaggacgccctggtatgtttcctgcattgggaagtggtcacacatgggtattttgggctaggagttggggatcagcccgggccaaacgacaagaagtcagagttactgccggccggctggaataacaataaggatctatacgtcttgcgctacgagtacaaggacgggtcacggaagctgctggtgaaagctataacagtcgaatccagcatgatattaaatgtactcgaatacgggagtcaacaagtagccgatctgacactgaatttggacgattacattgacgcggagcaccttggcgattttcataggacctacaagaattctgaggagctgcgaagtcggattgttagtggaatcattacgccaattcacgaacagtgggagaaagccaatgtttccagcccccacagagaatttccgcctgctaccgcgagggaggtcgaccctctgcggattcccccccatcatcctcacacttcgagacagccaccttggtgtgaccctttgggccccttcgtagtggggggggaggatctcgacccttttggcccccggcgcggaggcatgatcgttgacccactccggtccgggttccccagggccctgattgaccccagctcggggttgcctaatcgactccctcctggagcagtcccccccggcgccagatttgaccctttcgggcctattggaacctccccaccaggcccaaacccggaccacctccctcctcctggctacgatgacatgtacttgtag

SEQ ID NO: 23698 - DNA, 753 bp, synthetic construct
  source 1..753: mol_type = other DNA; note = Synthetic coding sequence
atgagcgagaacgccgcccccgacttctactacgtggccatggactttggagggcatggattatccagccattactcaccgggtgtaccatattacctgcagacctttgtgagcgagatcaggagggtggtggccggtggtgtggtgggggggatgtttttctgtacttttccagagatggtagacaaactcatcctactggatacacccctgtttcttctggagtctgatgagatggagaatctcctcacttacaaaagaagagccattgaacatgtgttacaggtggaggcgtcccaagagccttctcacgtgtttagtctaaaacagctgttgcagaggctcctgaaatccaactctcacctgtccgaggagtgcggggagttattgctgcagaggggaaccactaaagtggctacaggcctcgtgctgaatagagatcagaggctggcctgggccgaaaactcgatcgatttcatcagtagagagttgtgtgctcacagcatacgaaagttacaggcccacgttctgctcataaaagcggttcacgggtatttcgacagtcggcaaaactactctgagaaggagagcctgtccttcatgattgacaccatgaaatctactttgaaggaacagttccagtttgtagaagtccctggcaatcattgcgtgcatatgtccgagcctcagcacgttgcttccatcatcagtagctttctccaatgcactcatatgctacctgcccagttatag

SEQ ID NO: 23699 - DNA, 510 bp, synthetic construct
  source 1..510: mol_type = other DNA; note = Synthetic coding sequence
atggtgttccccctgcccaccccccaggagcccatcatggccacccctcccaagagacgagctgtagaagcgaccggtgagaaggttttgaggtacgaaacctttatctcagatgtgctccagagggatctgagaaaggtgcttgaccacagggacaaagtgtatgagcagttggccaaatatttgcaattgcgcaatgtgatcgagcgtctgcaggaagcaaagcactcagaactgtatatgcaggtggacctaggctgcaacttttttgtagatacggtggtgccagacacatcgcgaatatacgtggccctggggtacgggttctttctagaactaactctcgcggaggcactcaaattcattgatcgtaaatcctcgctgcttactgagttatcaaactccctaacaaaggatagcatgaacattaaggctcatattcacatgttactcgaagggcttagggagttgcaggggctgcagaacttccccgagaagcctcaccactag

SEQ ID NO: 23700 - DNA, 3177 bp, synthetic construct
  source 1..3177: mol_type = other DNA; note = Synthetic coding sequence
atgaccaccgtggtggtgcacgtggacagcaaggccgagctgaccactcttctagagcaatgggaaaaagaacatggatccggccaggatatggtgccgatccttactcggatgtcccaacttattgaaaaggagactgaagaataccgcaaaggtgatccggatcccttcgatgataggcaccctggtagagccgaccctgaatgcatgctgggccatctgctgcggattctgtttaagaacgacgacttcatgaacgctcttgtgaatgcctacgtcatgactagcagggagccccccctcaataccgccgcctgcaggctgttgctagacattatgccgggcttagagactgcagttgtcttccaagagaaggaagggatagttgagaacttgttcaagtgggctcgcgaagcagaccaacccctcagaacgtacagcacgggccttcttggaggggccatggagaaccaagatatagccgccaattacagggacgagaacagtcaacttgtggcgatcgttctccggcggctccgcgagctccagctccaggaggttgcgctcagacaggaaaacaagaggcctagcccccggaagttgtcgagtgaacctctgctgcctttggacgaagaggccgtggatatggactatggtgacatggctgtggacgacgcggaaattcagaaatcggctctacagattatcattaactgcgtgtgcgggccagataacaggataagctctatcggcaagtttatatctgggacaccacgaaggaaactgcctcaaaatccaaagtcatctgagcataccctggccaagatgtggaatgtagtgcagtccaataacggaatcaaggtcctactgtctctgctcagcatcaaaatgccaattacagacgctgaccagatacgagccctggcgtgcaaggctctcgttggactgagcagatcttctaccgtgcgtcaaatcataagcaaattgccgctattctcatcttgccaaattcagcagttgatgaaggaacccgtcctgcaagataagcgctccgaccatgtcaaattctgcaaatatgctgctgaacttatcgagcgggtcagtgggaaacccttgctgattggcacggacgtttccttggcaagattgcagaaagcagatgtggtagcacagagtcgcatctcatttcccgagaaagagctcttattactgataaggaaccacctgatttcaaaggggctcggagagaccgcaacggtgctcacaaaggaagccgacctgcccatgacagctgccagtcacagttctgcatttacaccggttactgcagctgccagtcccgtgtctctaccgcggactccccgcatagccaacgggatcgccaccaggttagggagccacgctgctgtcggtgccagtgcccctagtgcgccaacagcgcatcctcagcctcgccccccacaagggcccctggcactgccgggtccctcatatgcaggtaatagccctctcataggacgtattagcttcatcagggagagaccctcaccctgcaatggaaggaagatccgcgtgctgcgacaaaaatctgaccatggcgcatatagccagagtccagccatcaagaagcaactggacaggcacctgcccagtccaccgaccctggactccatcattacggaataccttagggagcagcacgcacggtgcaagaaccccgtggccacctgtcctcctttctcactctttactccacatcagtgtcccgaaccaaagcaacggagacaagcccccattaattttacatcgcgcttgaacagaagggcctcctttccaaagtatggcggtgtcgacggaggctgctttgatcgccacctgatcttttctaggtttcgtcccatctccgtgtttcgggaagccaacgaggatgagagcggctttacatgctgcgcattttctgctagagaacgctttcttatgctcgggacttgcacgggacagctcaagctatacaacgttttctctggtcaggaggaggcgtcttataactgtcacaattctgctataacacacctggagcctagcagagatggctccctactactgacttcagctacatggagtcagccactcagcgcactgtggggcatgaaaagtgtgtttgacatgaaacactctttcaccgaggaccattacgtggaattttcaaagcacagccaggaccgcgtgattgggaccaaaggcgacatcgcgcacatctacgatatacagacagggaataaattactgactctgtttaatcctgatctggcgaacaattataagaggaactgcgcgacattcaacccgacagatgaccttgttttgaacgacggcgtcttgtgggatgtacgctccgctcaggccatacataaatttgacaagttcaatatgaatatctctggtgtgttccacccaaatggtttggaggtcattatcaataccgaaatctgggatcttcgaaccttccacctgctacacactgtccctgccctagatcagtgccgcgtcgtgttcaatcacacaggcaccgtgatgtacggggccatgcttcaggctgacgacgaggacgatctcatggaggagagaatgaaatcccctttcggtagttcgttcagaacattcaatgctaccgattacaaacctatagccaccattgatgtcaaacgaaacatattcgacctgtgtacggataccaaagactgctacttagccgtgattgagaaccaggggtcgatggatgctttgaatatggatactgtctgtcgcctttacgaagtggggcggcagcgtctggccgaggacgaggacgaggaagaggaccaagaagaagaagagcaagaagaggaggacgacgacgaggacgacgacgacacagatgacctagatgagttggataccgatcagctgcttgaggcagaattggaagaagatgataataacgaaaacgcaggagaggatggagataatgatttctcacccagcgatgaagaattggctaaccttctcgaggaaggtgaagatggcgaggacgaagatagtgatgccgacgaggaagtggagttgatcctgggggatactgacagcagtgataattcggacctggaagacgatatcatcctgtctttaaacgagtag

SEQ ID NO: 23701 - DNA, 2409 bp, synthetic construct
  source 1..2409: mol_type = other DNA; note = Synthetic coding sequence
atggccgccgaggccctggccgccgaggccgtggccagccggctggagcggcaggaagaagacattaggtggttatggtctgaggtggaaagattgcgggacgagcaacttaatgctccgtacagctgtcaggctgagggtccttgcctgacaagggaagttgctcaactgcgcgccgagaactgcgatttgcgccaccgcctctgtagtctgcgactttgcctagctgaggagcgctcccgacaagccacactcgagtctgcggagctcgaggccgcacaggaggccggagctcagccacctcctagtcagagtcaggacaaagacatgaaaaagaagaaaatgaaagagagtgaggcggattccgaggtaaaacaccagcccatcttcatcaaagaaagattaaaacttttcgaaattctgaagaaggaccaccagctgctgctggctatctatggcaaaaaaggggatacttccaacattatcaccgtgcgcgtggctgacggccagactgtgcaaggcgaggtgtggaaaacaaccccctatcaggtggcagctgaaattagccaagagctggcagaatctaccgtgattgccaaggttaatggggagctgtgggacctcgaccgacctctggagggtgatagctcgctggaacttctgacgtttgataatgaagaggcccaggccgtctactggcatagcagtgctcacatcttgggcgaggcaatggagctgtattacggagggcacctgtgctatgggcccccaattgagaacgggttctattatgatatgttcattgaggatagagcagtgagctcgacggagttgtccgcactggagaatatctgtaaagccataatcaaggagaaacagccttttgagcggttggaggtctcaaaagaaatcctgctggagatgtttaagtacaacaaattcaagtgtcgaatcctcaatgagaaggtgaataccgcaaccacaacagtatacaggtgcggacccctcatcgacctctgcaagggtccccacgtcaggcatacagggaaaatcaagacaatcaaaatcttcaagaattcatctacatactgggaggggaaccccgagatggagacacttcagcgaatttacggaatcagcttccctgataataagatgatgcgcgattgggaaaaatttcaggaggaagccaaaaacagagatcatagaaagatcggcaaggagcaagagctgttcttcttccatgatctgtcaccaggtagttgttttttcctgcccaggggcgcgttcatctataacacgttgacagacttcatcagagaagagtaccacaaaagggatttcactgaagttctgtcgcccaacatgtataattctaagttatgggaagcctccggacactggcaacattatagcgaaaacatgttcacttttgaaatcgaaaaggataccttcgcactgaaacctatgaactgcccagggcattgcctgatgtttgcccatagaccacggagttggagggagatgccaattaggtttgctgacttcggcgtgctccaccgcaacgagctttcaggtaccttgtctggactgacgagggttaggcgattccaacaggatgacgcccacatcttctgcacagtggagcagatcgaggaggaaattaaaggctgcctgcagtttcttcagtccgtgtactctacattcggattttcgttccaattaaatctatcgaccagaccagagaatttccttggggagattgaaatgtggaacgaggctgaaaaacagctgcagaattcgctcatggacttcggagaaccatggaagatgaatcctggtgatggagcgttctacggtccaaaaatagatatcaagatcaaggatgcaatagggagatatcatcagtgcgccactatccagttggactttcagctccctatcaggttcaatctgacatatgtgagcaaggacggtgacgataagaaaagaccggtgataatacatagagcaatactggggtcagtggagagaatgatcgctatcctaagcgagaactatggcggaaaatggccattttggctgagtcccaggcaggttatggtgattcctgtgggaccaacctgcgagaagtacgccttacaggttagtagcgaattcttcgaagaaggattcatggccgacgtagaccttgatcacagctgtacccttaacaagaagattcgcaatgcccagctggctcagtacaattttatcctggtcgttggggagaaggagaaaatcgataatgctgtgaacgttcgtaccagggacaacaaaatacacggggagatcctggtgacgtccgccatcgataagctgaagaacttgcggaagacaagaaccctgaatgctgaagaagcgttctag

SEQ ID NO: 23702 - DNA, 1149 bp, synthetic construct
  source 1..1149: mol_type = other DNA; note = Synthetic coding sequence
atgttcaagatccagctggagcccctgaagctgcgggcctggaccctcaacggctttgtgaagtttcgcaacaaagagacatctgcaggacccgtcgccgtgatgggaaaagattattacaagatcctgggcattcccagtggagctaatgaggatgaaatcaagaaggcctaccgtaaaatggcacttaagtaccatccagataagaacaaagaacccaacgctgaagagaagtttaaggagatagcagaggcatacgacgtacttagtgaccccaaaaaacgcggcctgtatgaccagtatggagaggaagggctgaaaaccgggggtggaacctccggcggatcgagcgggtcatttcattacacattccacggggatcctcacgctacttttgcatccttcttcggagggagtaaccctttcgatatcttttttgcaagctcccgctctacccgcccatttagtggatttgatccagacgacatggacgtggatgaggatgaggatccatttggcgcctttgggagattcggctttaatgggctgtcgagaggccccaggcgagcccccgaaccgctgtatcccaggcgaaaagtccaggacccccctgtggtgcacgaactgagggtgtctttagaggagatctatcatgggagtactaagcgcatgaagatcacacggaggcgtctgaaccctgatgggcggacagtgcggaccgaggacaagatcctccatatcgtgatcaagagggggtggaaagagggaacaaaaattacctttccgaaagaaggcgacgcgacccccgataacattccagcagacatagtgtttgtgctgaaagacaagcctcatgcccacttcaggagagacggaacaaatgtgctgtattcagccctgatttcacttaaggaagccctgtgcggatgcacagtcaacattcctaccattgacggaagagtgatcccactcccctgcaatgacgtgattaagcccggcactgttaagcgtttacggggagaagggctgccatttccaaaggtgccaacacagcggggggatctcatcgttgagtttaaggtccgcttcccagatcgactaacgccccagacaagacagattctgaagcagcatttgccatgcagctag

SEQ ID NO: 23703 - DNA, 1356 bp, synthetic construct
  source 1..1356: mol_type = other DNA; note = Synthetic coding sequence
atgcgggagtgcatcagcatccacgtgggccaggccggcgtgcagatcggcaatgcctgctgggagctgtactgcctggagcacggcatccagcccgacggtcagatgccttcagacaagactatcggaggaggagatgactccttcaacacctttttctcagagacaggcgcggggaagcatgtgccccgcgcagttttcgttgatttagagccaaccgtgattgacgaagtcaggactggaacatatagacagctatttcatcctgagcagctaataaccggaaaagaagatgccgctaataactacgcaagaggccattacaccattggcaaggagatcatcgatctggtgctggatagaatcaggaaactggcagatcagtgcactggattgcaaggattcctggtcttccacagcttcggaggcggaactggctccggcttcactagtctacttatggaaaggctgagcgtcgactatggaaagaaatccaagctcgagttctctatctacccagcaccccaggtgagtactgcagtagttgaaccatacaactctatcctgaccacgcatacaacactggaacatagcgattgcgcatttatggtggacaacgaagcaatttatgatatctgtcggcgaaatctggatattgagaggccaacctatactaatttgaatcgattgataagccaaatcgtgtcaagcattacagcttccttgcgattcgatggtgcactcaatgttgatctgaccgagttccagacaaaccttgtgccttacccccgcattcacttcccactggccacctacgcacccgtcatctctgccgagaaggcctaccacgaacagttatccgttgccgaaatcactaacgcttgtttcgagccggctaatcagatggtgaaatgtgatccccgccacggtaaatacatggcctgttgtctgctttacaggggggatgtagtccctaaagatgtcaatgccgccatcgctacaataaaaacaaaaaggtcgatacagttcgtggactggtgtcctaccggattcaaagtcggtattaactaccaacctcctaccgtcgtgcctggaggcgacttagccaaggtgcagagggctgtgtgcatgctgtccaacaccacggcaatcgctgaggcttgggcaaggttggatcataaatttgatctgatgtacgctaaaagggcatttgtccattggtacgtgggagagggtatggaggagggggagttctctgaggctcgcgaagacatggctgctctcgagaaggactatgaggaggtgggagttgactcagtggaaggggagggagaggaggagggagaggaatactag

SEQ ID NO: 23704 - DNA, 444 bp, synthetic construct
  source 1..444: mol_type = other DNA; note = Synthetic coding sequence
tgaaccgcccggggccccgagcccgagcagatgggcctggccccctgctgtacccaggccctgtgtggattggccctccgccatcatagccatctccaacagatccgattagagtttcatcgactctcggaagaaaacacgttgttgaaaaatgacctcggacgagtcaggcaggagctggaggcggcagagagcacacatgacgcccagcgtaaggaaatcgaagtgttgaaaaaagacaaagagaaagcatgttctgagatggaggtgcttaataggcagaatcagaactacaaggatcagctaagccaattgaatgtcagagtgctgcagctcggccaggaagcctccacccaccaggctcagaacgaagaacatagggtcacgatccagatgcttacccagtcactagaggaagtggtgagatctggccagcaacaatag

SEQ ID NO: 23705 - DNA, 771 bp, synthetic construct
  source 1..771: mol_type = other DNA; note = Synthetic coding sequence
atggccacccagcggaagcacctggtgaaggacttcaacccctacatcacgtgttatatctgtaaagggtacctaatcaagcctacaacagtgactgagtgcttgcacactttttgcaagacgtgcattgtacagcactttgaggatagtaacgattgtccacgctgtggcaatcaagtccacgaaaccaaccccctggagatgctccgtttagacaacaccctagaggagatcatctttaaactggtccccgggctgcgggagcaggaactggaacgcgaatcagagttttggaaaaagaataagccccaagaaaacggacaagatgacactagcaaggccgacaagccgaaggtggacgaagaaggggatgagaatgaggacgacaaggactatcataggagtgatccacaaatcgcaatctgtctggattgtttaaggaacaacggtcagtcaggcgataacgtggtgaaaggcctgatgaaaaagttcattaggtgctcaacccgcgtgaccgtaggaactataaaaaaattcctgagcctcaaattgaaactgccctcttcctacgagctggatgtcctctgcaatggcgagataatgggtaaagatcatacaatggagttcatctatatgacgcggtggagacttaggggcgagaacttccgatgcctgaattgttccgcgtcccaagtgtgttctcaagacggccccctgtatcagtcctatccaatggtgctgcagtatagaccgcggattgattttggttag

SEQ ID NO: 23706 - DNA, 6672 bp, synthetic construct
  source 1..6672: mol_type = other DNA; note = Synthetic coding sequence
atggcccccaagaaggagaagggcggcaccgtgaacaccagcagcaagatttgggaaccctctctgattgccgcacagttcaatcaaaacgactggcaggcctccatcgccttcgttgtaggcaatcagattgaagacgatctgttgatccaggcgctcaccgtcgctgtccaggtgccacagagaaaactgttctccatggtttcgtggcaggatatccttcagcagattaacgaaataaacacgctggtgggctcagccagctcaaagaaagctaaaaaaccagttgggggtaacgcccctctttactatgaggtcctgacggctgctaaggcaatcatggatagtggagaaaagttgaccctgcctctgatcggcaagttactaaaatttcagctcctgcagattaagtttaaagaccagcagagacgggaaaacgaaaagaaagtcattgaggataagccgaaactcgagaaagataaaggaaaggctaaatctcctaaggagaagaaagcccctagcgcaaagcctgctaaaggcaaaggtaaggaccagccagaggctaacgcacccgtgaagaaaaccacacagctgaagcgccggggcgaagatgatcacacgaacagatatatagatgacgaaccagacgacggcgcccagcactatattattgttgttggctttaacaatccacagctattagcgataatggccgagttaggaattccaattacgagtgtcatcaagatcagcagtgagaattatgagccactccagacacatctcgcagccgtcaaccaacagcaggaggtgctcctgcagagcgaggacctggaggctgaaaaattgaagaaagaaaacgcaatcaaggaacttaaaacattttggaaatatctcgaacctgtactgaataacgaaaagccagagaccaatttattcgacgtggcccgcttggaatatatggttaaagctgcggatttcccttctgattggagcgatggagagatgatgttgaaattgggtaccgacattttcgagaacatcgcctgtctcatgtatgacatcctggattggaaacggcagcatcagcattacttagaatctatgcagctaatcaacgtgccacaggtggtgaatgaaaaacccgtactggaagctatgccaacttccgaagcgccccagcccgccgtgcccgcccccggaaagaaaaaggcccagtatgaggaaccacaggctcccccccccgtgactagcgtcatcacgacggaggtcgatatgcgctactacaactatttactgaatcctatccgggaggagttcatctcagtcccgctcattctgcattgcatgctggaacaggtggttgccaccgaggaagaccttgttcctccaagtcttcgcgagccatcccctagagctgatggcctcgaccataggattgctgcacacatcgtgtccttattaccttctctctgtctctctgagagggaaaagaagaatctccacgatattttccttagcgaagaggaaaacgagtccaaggccgtgccaaaagggcctctgctcctgaactatcacgatgcccacgcacataagaaatacgccctgcaggatcagaagaatttcgatccagtgcagatcgagcaagaaatgcagtccaagctgcctctgtgggaattcttgcagtttcccttgccccccccctggaataacaccaagcggttagctacaatacacgaactaatgcacttctgtactagtgacgtgctgtcatggaatgaagtggagagagcatttaaagtgttcaccttcgagtcccttaagctgagtgaggtggacgaaaagggtaagctgaagccatctgggatgatgtgcggttccgactccgaaatgtttaacatcccatgggacaatcctgcaagatttgcaaagcagatccggcagcagtatgtcatgaagatgaatactcaggaggccaagcagaaggctgacatcaagatcaaagacaggaccttattcgtggatcagaatttgtctatgagtgtccaagacaatgagtcaaatagggaacctagcgatcccagtcaatgcgatgccaacaatatgaaacacagcgatcttaataatttgaagttaagtgtacccgataatcggcagctcttggagcaggagtcaatcatgaaggcgcagccccaacatgaaagcctggagcagaccactaataacgagattaaggatgatgcagtgacaaaggccgattcacacgagaagaaacctaagaaaatgatggttgaagcagacctggaggatatcaaaaaaactcagcagagaagcctcatggattggtcattcaccgagcactttaagcccaaagtgttattgcaggtcctccaagaggctcacaaacagtaccggtgtgtggactcttactatcacactcaggacaactctctgctgttggttttccataatcccatgaatcggcagcggcttcactgcgagtactggaatatcgctctccattcaaatgtcggattccgcaattacctggagctggtggcaaagtctatccaagattggattacaaaggaggaggcgatttatcaagagtcaaagatgaacgaaaaaatcattaggactagagcagaactggagctgaaatctagtgctaatgcgaagcttactagcgcttcaaaaattttctccatcaaggaatcgaaatcaaacaagggcatcagcaagactgaaatctcagatcaggaaaaggaaaaggaaaaggaaaaaattcccttcatcttagagggcagtcttaaggcctggaaggaagagcagcaccggctagctgaggaagaacggctgcgtgaggagaaaaaagctgagaaaaagggcaaagaggccggcaagaagaagggcaaagacaacgcagaaaaggaggatagccgctccctaaaaaagaaatcaccctataaagaaaaaagcaaggaagagcaggtgaaaattcaggaagtcactgaagaatcgccacaccagcctgaacctaagatcacatatcccttccacggttataatatgggcaacatcccgacccagattagtggctctaattattacctgtatccatccgatgggggccagattgaagtggagaaaactatgttcgaaaaaggaccgacgttcatcaaggtgcgcgtggtgaaagacaatcacaatttcatgatacacctgaacgaccctaaggagatcgttaaaaaggaagagaaaggcgactattacctggaagaagaggaggagggagatgaagagcagagcctcgagacagaagtgagcgatgcaaagaacaaggccttctccaagttcggctcgttcagcgccaccttagaaaatggaatctgtctgtctatatcttattatgggagtaacgggatggcaccagaggacaaggatccggatctggaaaccattctgaacattcccagcgctcttacaccgacagtagtgccggttatagtgacggtacctcagtctaaagcaaaaggtaagatcaaaggaaaggagaaacccaaggagagccttaaagaggaagagcatcctaaggaggaggagaagaaggaagaggaagtcgagccggagcctgttctgcaggaaaccctggacgtgcccacattccagagcctcaacgtatcctgtccttcaggcttactcttaactttcattgggcaggaatcaaccggtcaatacgtaatcgatgaggaacccacgtgggatatcatggtgagacaatcttaccctcagcgcgttaagcattacgagttctataaaactgtgatgccgcctgccgagcaggaggcatcccgggtgatcacttcccagggtaccgtcgtcaagtatatgctggacgggagcactcaaatcctgttcgccgacggagccgtgtctagatcgccaaattccgggctgatttgcccccccagtgaaatgcctgccacgccacattctggtgatttgatggacagtatatcccagcagaagtcagaaaccattcctagcgagatcacaaatacaaaaaaagggaaatcccacaagtcgcagtcatctatggcccataagggagaaattcacgacccaccccccgaggctgtgcaaaccgtgacccccgtagaagtgcatattggcacctggttcacaaccacccctgaaggcaatcgcataggaaccaaggggctggagcgcatcgctgatctgactccactcctgtcatttcaggccacagatccagtaaatgggactgtaatgacgaccagggaagataaggtggtaatcgtcgaaaggaaggatggtactcgaatcgttgaccatgccgatggcacacgaattaccactttctatcaagtgtacgaagatcagataatcctgccagacgaccaggaaacaacagagggcccccgaaccgtgacacggcaagtgaagtgtatgcgagttgagtcctcccgatacgctacggtgattgctaactgtgaggacagctcctgttgcgccacttttggtgacggcacaactataatcgcaaagcctcagggaacataccaagtcctgccgcccaacaccggctctctgtacattgataaggactgctcggctgtctattgccatgagagcagtagtaatatctattatccttttcagaagcgcgagcagctgcgagcaggccgatatataatgaggcacacctccgaggtgatctgcgaagtgttagacccggagggcaacacattccaagtcatggctgatggatcaataagcactatactcccggaaaagaagctcgaggacgatctgaatgagaagaccgaggggtacgattccttatcaagcatgcaccttgaaaaaaaccaccagcagatctatggagagcacgtccctcggttcttcgtaatgtacgccgatggctccggcatggaacttttgcgtgactcagacatcgaggagtatctaagccttgcatacaaggaaagcaatacagtggtacttcaggaaccagtccaggagcagcccgggactcttaccattacagtgttacgtccttttcatgaggcttctccatggcaggttaagaaggaggatacaattgtgccccccaacctgaggtcacggagttgggagacctttccctcagtagaaaaaaaaactccaggaccaccttttggcacccagatatggaagggcctgtgcattgagagcaagcaactcgtgtccgcccccggagccatcctgaagagtccgtccgtgctgcaaatgagacagttcatccaacacgaagtgattaaaaatgaagtaaagttaaggttacaagttagcttaaaggattacatcaattacattctgaaaaaggaagacgagcttcaagaaatgatggtcaaagatagccgcaccgaagaggagagaggtaatgctgccgacctgctcaaattggtgatgtctttccctaaaatggaagagacaactaagagccacgtgacagaagtggcagcccatctgacggacctcttcaagcagagcctggctaccccgcccaagtgtccacccgacacatttgggaaagacttttttgagaaaacatggcggcacacagccagttccaaacggtggaaagagaaaatcgataaaacacgaaaagagattgagaccactcagaactacttgatggacatcaaaaacaggatcattccgcctttctttaaatctgagctgaatcagttgtatcagtcgcagtataatcatctcgattctttatccaaaaaacttccaagttttacaaaaaagaacgaggatgcgaacgaaaccgccgtgcaagatactagtgacctgaaccttgacttcaagccccataaggtgagtgagcaaaaatcttcttccgtcccctcgctgccaaagccagagatatctgcagataagaaggacttcaccgcccagaaccaaactgaaaatctcactaagagcccggaggaagcagagagctacgaaccagtgaagattccaactcagtcactgctgcaggatgtggcgggccagacacgaaaggaaaaagttaagctccctcactatttactgagtagcaagcccaagagccagcccctggctaaagtccaggacagcgtggggggcaaggtaaatacttcaagtgtcgccagtgctgcaataaataatgcaaagagttctctgttcggcttccatctcctgccctcctccgtcaaattcggtgtgctgaaggagggtcacacctacgctaccgtggtgaagttgaagaatgtcggagtagacttttgcagatttaaggtgaagcagccgccccccagtactggcctgaaagttacctacaagcctgggccagtggcagccggtatgcagactgagcttaacatcgagctgtttgccaccgccgtgggcgaggacggagccaaaggatcagcccacatatctcacaatatcgaaataatgacggaacatgaggtattatttttaccagtggaggcaacagtgctcaccagtagcaactatgacaaaaggccaaaagacttccctcagggcaaagagaatcctatggtgcagcggacctccacgatctatagttctacacttggtgtctttatgagtcgtaaggtgtcaccccattag

SEQ ID NO: 23707 - DNA, 2337 bp, synthetic construct
  source 1..2337: mol_type = other DNA; note = Synthetic coding sequence
atgcccgccttcctgggcctgaagtgcctgggcaagctgtgcagcagtgaaaagtccaaagtgacttcttcagaacgcaccagtgctcgcgggagtaaccggaaacgcctgatcgtcgaagaccggcgcgtgagtggcaccagttttacggcccatagacgtgcgacgattactcacctgttatacctgtgtccgaaagactactgtccaagaggacgggtatgtaatagtgtggatccattcgttgcacacccgcaggacccccaccacccctccgaaaagcccgtcattcactgccataaatgtggcgaaccttgcaaaggcgaggtcctcagggtacaaacaaagcactttcatatcaaatgcttcacgtgtaaggtgtgcggctgcgatctggcccagggtggcttttttatcaagaacggcgagtatctgtgcactctcgattatcagcggatgtatggcacccgatgtcatggttgtggcgaattcgttgagggggaagtggtaaccgcgctaggcaaaacttatcatcctaattgttttgcctgcacaatttgtaagagaccattcccacccggcgacagagtcaccttcaatggcagagattgcctctgtcagctgtgcgcccagcccatgagctctagcccgaaggaaacaacttttagctccaactgcgccgggtgcggccgggatatcaaaaacggacaggcactcctggctctcgataagcagtggcacctgggctgctttaaatgcaagagctgcgggaaggttttgacgggggaatatatctcaaaggacggggccccgtattgcgagaaggactaccaagggctgttcggagtcaagtgtgaggcctgtcaccagttcataacgggaaaggtgctagaagctggcgataagcactatcacccttcttgtgccaggtgcagtcgctgcaatcaaatgtttacagaaggggaggagatgtatctgcaggggagcactgtttggcatccagactgcaagcagtcgaccaagacggaagaaaagctgaggcccacccggacgagcagtgaatctatctattcgcgccccggaagttccatccctggctctccagggcacaccatctatgccaaggtcgataacgaaattcttgactacaaagaccttgcagccattccaaaagtcaaggcgatctacgatatcgaacggccggatttgatcacctacgagcctttttacactagcggctacgacgataagcaggaacgccagtccctcggagagtcgcctagaacactctcacccacgccttctgctgagggatatcaggatgtcagagaccgaatgatccaccgttccacaagtcagggcagtattaactctcctgtctacagtcggcattcctacacgccaacaacatccaggagcccccagcattttcacagacccggcaatgaaccctcgagtggacgcaacagcccactgccctaccggcccgactcacgtcctttgactcctacctacgctcaggcccccaagcatttccatgtgcccgatcagggaatcaacatctatagaaagccccctatctataaacagcacgctgcgctggctgcacagagcaagtctagcgaagatatcattaaattctctaagtttccagctgcccaggccccagatccctcagagactcccaagatcgaaactgaccactggccagggccaccctcctttgccgtggtcggacccgacatgaagcgccggagttcaggaagagaggaggatgatgaggaattgcttcggcggcgtcagctgcaggaagaacagttgatgaagctcaattcagggttgggtcagctaatcctgaaggaagagatggagaaggaaagtagagagcggtcatcacttctggcctcaagatatgactcgcctattaactctgcatctcatatcccaagctcaaaaactgcttccctgcccggttatggaagaaacggcctgcatcgcccagtgagcacagactttgcgcaatataactcgtacggggacgtgtccggcggtgtgcgcgactatcagacactaccggatgggcatatgccagccatgaggatggaccgcggagtatcaatgcctaatatgctggaacctaaaatttttccatatgagatgctaatggtgactaataggggacggaacaaaatcctgcgagaggtcgatagaactaggctggaaagacacctcgcccctgaggtgttccgagaaatctttggaatgagcatccaagaatttgataggctaccactgtggcggagaaatgacatgaaaaaaaaggccaagctgttttag

SEQ ID NO: 23708 - DNA, 1689 bp, synthetic construct
  source 1..1689: mol_type = other DNA; note = Synthetic coding sequence
atgaaccccctgttcggccccaacctgttcctgctgcagcaggagcagcaagggctggcaggaccactcggggactcactggggggcgaccactttgccggggggggcgacctgccacctgctcccctttccccggcaggacccgcagcttactccccaccaggacccggaccggccccccccgctgcaatggcgctcagaaacgacctgggaagcaatataaatgtgctgaagaccctgaatctgcgctttaggtgtttcttggccaaggtgcacgaactggagaggcgcaaccggctgttggagaagcagctccagcaagccctggaggaaggtaaacaggggcggcgcggactgggccggcgtgaccaggcggtccagacgggcttcgtaagtccaattcgcccacttgggttacagctcggcgcccgccccgctgccgtgtgcagtccaagcgcacgagtgctcggaagccccgcaaggtcacccgctgggccactggctccttcagcggcgtccctgtcctcatcatcaacatctacttcaaccacatactctagttctgctagattcatgcctggaactatatggtccttttcacacgctaggaggcttggtccgggcctggagcccacacttgtgcaaggtcctggcttaagctgggtccacccagacggcgttggggtgcagatcgataccattacacccgaaatacgggctctgtacaatgtcctcgctaaagttaaacgggagcgagatgaatataagcgaaggtgggaagaggagtatacagtccgaatccaactgcaggatcgcgtcaacgagctgcaggaggaagcccaggaggctgatgcctgtcaagaggagctcgccctgaaggttgaacagcttaaagccgagttggttgtattcaagggactgatgagcaataatctcagcgagctggataccaaaatccaggagaaggccatgaaagtggatatggatatatgcaggcgtatcgacattactgctaaactctgcgatgttgcccaacaacgaaactgcgaggatatgatccagatgtttcaaaaaaaactggtgccctccatgggaggacgcaaacgtgaacgaaaggctgcggtcgaggaagatacaagcctgtccgaatcagagggaccccggcaaccggacggcgacgaggaggagtccactgcactgagtattaacgaggaaatgcagagaatgctgaatcaactgcgcgagtatgattttgaggacgactgtgattccctgacttgggaagagactgaggaaaccctcctgctgtgggaggatttcagtggatatgcgatggcagccgctgaagcgcagggcgagcaggaggactccctggaaaaggtcattaaggacacagagagtctgtttaagacaagagagaaagaatatcaggagacaatcgatcaaattgagttggagctggccaccgccaagaacgacatgaatcgccacttacacgagtacatggaaatgtgctccatgaaacggggtctggatgtgcagatggagacttgccgccgcctgattacccagtctggcgacagaaagagcccagcatttaccgctgtgcccctgtcagaccctcctcccccaccatccgaagcggaggactcagaccgggatgtaagctctgattcatcaatgcggtag

SEQ ID NO: 23709 - DNA, 2415 bp, synthetic construct
  source 1..2415: mol_type = other DNA; note = Synthetic coding sequence
atgaactaccagcagcagctggccaacagcgccgccatccgggccgagatacaacggttcgagtcagtgcacccaaatatttatagcatatatgaactgttggagagggtggaagaacccgttctccaaaaccagatccgcgaacacgtgatcgctattgaagatgcttttgtgaatagccaagaatggaccctatcaaggagcgtccccgagctgaaggttggaatagttgggaatctagcgtctgggaaatctgcactggtacataggtatctgacagggacctacgtgcaagaggagagccccgaaggcggtcgctttaagaaggaaatcgtggttgatgggcagagctatctcctcttgatcagagacgaggggggccccccagaggcacagttcgctatgtgggtggacgctgttatatttgtattttccctcgaggacgaaatcagtttccagaccgtctaccactactatagccgaatggcaaattatcggaacacttcggagataccactcgtgcttgtgggcactcaagatgcaatcagcagcgccaacccacgggtgatcgatgatgcacgggcaagaaaactgtctaatgacttaaaaagatgtacatattatgaaacctgtgctacatacggcctgaatgtagagagagtatttcaagatgtggcacaaaagattgtggccacccggaaaaaacagcagctttctatagggccttgtaagtctctccctaatagcccttcgcattcatctgtctgttcggctcaggtctctgcagtgcacattagtcaaacatctaatggcggtggaagtctgtcagattatagctcatcagtgcctagcaccccaagcacatctcagaaggaacttcggatcgacgtcccaccaaccgcaaatacccctacacccgtgaggaaacagagcaaacgccgctcaaacctgttcacctccagaaagggaagcgatccagacaaggaaaaaaagggcctagagagtagagccgactccattgggagcgggcgggcaataccgataaaacaagggatgctcttgaagcggtctggaaagtcattaaataaggagtggaagaagaaatatgtcactctctgcgacaatggcgtgttaacttatcacccctcactgcatgattatatgcagaacgtccacgggaaagaaatagacctgctgcggacaacagtgaaagtcccaggtaaaagaccaccaagggccacatctgcgtgcgctcctatttcttctcctaagaccaacggactctccaaggatatgagttcattgcatatctcaccgaatagcgatactgggctaggagattccgtgtgctcatcaccctctattagctccaccacttctcccaagttggatcctccaccctccccccacgccaaccgcaaaaagcacagaaggaagaagtcaacctcaaactttaaagctgatgggctgagtggcaccgccgaggaacaagaggagaattttgagttcataatcgtgtctctgactggtcaaacttggcactttgaagctacaacctacgaagagcgcgacgcttgggtccaggccattgagtctcagatattggccagcctgcaatcatgtgaatccagcaaaaacaagagtcggttgaccagtcagtcagaggcaatggctctgcaaagcatccggaacatgaggggcaattcccactgcgtcgattgtgagactcagaaccccaattgggctagtctgaacttgggcgctttgatgtgcattgagtgttctggcattcaccgcaacctcgggacccatctgtcccgtgtgagatccctggacctagatgactggcccgtggagctgattaaagtgatgtcgagcatcggaaatgagttagctaattcagtgtgggaagagtctagtcagggcagaaccaaacctagtgttgactctactcgggaggagaaggagcgctggatccgggcaaaatacgagcaaaagctattccttgcacccttgccctgtaccgagctgtctctgggccaacatctgttgcgagctacagcagatgaagatctccggactgccatcctcctgctggcccacggttcaagagatgaagtaaatgagacctgtggcgaaggagatggaaggaccgccctgcaccttgcttgtcgcaaagggaacgtggtgctggcacaattgcttatctggtacggggtcgacgttaccgcccgtgacgcccacggcaataccgccctcgcttatgctagacaggcgtcctctcaggaatgtattgatgttctccttcagtacggatgccctgacgagcggttcgtactgatggccacccccaacctgtcgcgcagaaataataaccggaataatagctcaggccgagttccaacaatcatctag

SEQ ID NO: 23710 - DNA, 2712 bp, synthetic construct
  source 1..2712: mol_type = other DNA; note = Synthetic coding sequence
atgcccgagcagttcagcgtggccgagttcctggccgtgaccgccgaggatttgagttcacctgcgggggcagcagccttcgcagcgaagatgccgcgctatcggggagcggcgctcgcccgggaggaaatacttgaaggtgaccaggccatactccagcgcataaagaaagccgttagggcaattcattcctccggtctgggacacgtagaaaatgaagaacaatatcgcgaagctgtcgaatccctgggcaactcacatctgtcccagaactctcacgaactgagtacgggctttttgaacctagcggtgtttacacgggaggtggctgcgctctttaaaaatttaatacagaatcttaacaatatcgtctcctttcctctggattccctcatgaaggggcagctcagggatggcaggcaggacagcaaaaagcagctggagaaagcctggaaggattacgaggctaagatggccaagcttgagaaggagcgtgatcgagcaagagtgaccggcggcatccctggggaggttgctcaggatatgcagcgcgagagacggatttttcaacttcatatgtgtgaatacctgttgaaagcaggagaatctcaaatgaaacaaggtccagattttctccaatccttaatcaagttttttcatgctcagcataacttctttcaagacggctggaaggctgctcagtctcttttcccttttatcgaaaagctcgccgccagcgtccacgctttgcaccaggcgcaggaggatgaactccagaaactaacgcagctaagggatagtctccgcggtactctgcagctggagagccgtgaagagcatctgagccgcaagaactctggctgtggttattccatacatcaacatcaaggaaataagcaatttggcacagaaaaagtggggtttttatacaaaaagagtgacggtattaggcgcgtgtggcaaaaacgaaaatgtggggtgaaatacggctgcctcacaatcagccactctacaattaataggccgcctgttaagctcacccttctaacctgtcaggtgcggcccaaccccgaggagaaaaaatgttttgacttggtgactcacaataggacgtaccattttcaggccgaggatgagcacgagtgtgaggcctgggtctctgtattgcagaactcaaaggatgaggccctctcctccgctttcttaggggagcccagtgcaggccccggaagttggggttctgcgggccatgacggcgaaccacacgacctgaccaaactgcttatagcagaggtgaagtccaggccagggaacagccagtgctgtgattgcggagcagctgatcccacctggttgtctacaaacttgggtgttttgacatgcattcagtgttcgggagtgcacagggaactgggcgtgaggttcagtcgtatgcagtctttaacgctggacttgctgggcccgtcagaactgctcttggcccttaatatgggaaatacatctttcaacgaagtaatggaggcccagcttccatcccacggtggaccgaagccttcagccgagtccgacatggggactaggcgagattatattatggccaagtatgtagagcatcgcttcgctagaagatgcactccagagccgcaacgcctgtggactgccatttgtaatcgcgatttactctctgtgctcgaagccttcgcgaatgggcaggacttcggccaacctcttcctgggcccgacgcccaggcgcccgaggagcttgtactgcaccttgccgtaaaagtcgctaaccaagcctcattgcctttagtagactttataattcagaatggaggccaccttgacgcaaaagccgccgatgggaacaccgctctgcactacgcagccctgtacaatcagccggactgcctcaagcttctgttgaaagggcgagctctagtgggcacagtgaatgaagcaggcgagaccgcacttgatatagcaagaaaaaaacaccacaaagagtgcgaggagcttttggaacaggcccaggctggtacattcgcgtttcccctgcatgtggattactcctgggtgatctcaaccgaacctggcagtgacagcgaggaggacgaagaagaaaaacggtgtctgctgaaactccccgcccaggctcattgggctagcgggaggctggacatatccaataaaacatacgagaccgtggcctcactgggtgccgccaccccccagggggaatccgaagactgccctccccccctgcccgtgaagaattcttccaggaccttagtgcagggttgtgcgcggcatgcatctggagacagaagcgaggtctcttctctgagttccgaggcaccagagacaccggagtcactggggtcacctgcctctagcagctcgctgatgtcccccctggaacctggagatcccagtcaggcgccacctaactctgaagagggcttacgggaacctcccggcaccagtagaccgagcctgacctcagggacgactcccagtgagatgtacttaccagtccgttttagcagtgagtctacaagatcctaccgaagaggcgcgagatcccctgaggatgggccatccgcccgacagccactgccaagacgcaacgtcccagtaggtataacggagggtgacgggtcacgaacaggttccctccctgcaagctccgtgcaactgttgcaggactag

SEQ ID NO: 23711 - DNA, 1359 bp, synthetic construct
  source 1..1359: mol_type = other DNA; note = Synthetic coding sequence
atgatgaagcggcagctgcaccggatgcggcagctggcccagaccggtagcttggggcgcacgcccgagaccgctgagtttctgggagaagatttactgcaggttgaacagcgcctagagccagcgaagagagccgcacacaatatccacaaaagactgcaggcctgcttgcagggacagagtggggcggatatggataaacgtgtgaagaaactacccctgatggccctgagcaccactatggcggagagctttaaagagctggacccggatagctcaatggggaaggcgctcgagatgagctgcgctatccagaaccagctggctagaatcctcgccgagtttgaaatgacattagagagagatgttttacagcctttatcacggcttagcgaggaggagcttccagcaatcctgaaacataagaagagtctgcaaaagctcgtgagtgattggaacaccctgaaatctaggctctcacaggccactaagaattctggctccagtcagggtcttgggggtagcccaggctctcacagccacactacaatggctaacaaagtggagacattgaaagaggaagaagaagagttaaagcgcaaggtagaacaatgtcgcgatgagtatctagcagatttgtatcacttcgttaccaaagaggattcttacgcaaattatttcataaggttgctggagatccaggctgactatcatcggaggtctctcagctcactcgataccgccctcgccgaactgcgggagaaccatggacaagccgaccattccccttcaatgaccgcaactcactttccaagagtgtacggggtgagcctggctacccacttgcaggagctgggccgtgagatcgcgcttcccattgaggcctgtgtcatgatgctcctgagtgaaggcatgaaagaagagggcctctttaggctggccgccggtgcgtccgtactcaagcgattaaagcagacaatggcatccgaccctcactcgctcgaggagttttgttcagatccccatgccgtcgctggagccctaaaatcataccttcgggaactgccagagcctctgatgaccttcgacttgtacgacgactggatgcgcgcagctagcctcaaagagccaggggctcggctacaggcgcttcaggaggtgtgcagccggttgccgccggaaaatctcagcaatcttaggtaccttatgaagtttcttgccagactagccgaggagcaggaggttaacaaaatgacaccttcaaacatcgccatcgtgctgggtcccaaccttctgtggcctcccgagaaagagggcactgagccagcgagggaattgggtagtcaaacactctgttag

SEQ ID NO: 23712 - DNA, 1137 bp, synthetic construct
  source 1..1137: mol_type = other DNA; note = Synthetic coding sequence
atgaacaacagcggcgccgacgagatcggcaagctgttcgtgggcggtctggattggtccacaactcaagagaccctgagatcatatttttctcagtacggggaagttgtggattgtgtgatcatgaaagataagacaaccaatcaatcacgtggttttgggttcgtgaaatttaaagatccaaactgcgttggtacagtgctcgcaagtcgtcctcacacccttgacggaagaaatatcgatcccaagccatgcacccctaggggtatgcaaccggagaggacacgacctaaggagggctggcagaagggcccacgcagtgataactctaaatctaataagatctttgtgggaggcatcccacataactgcggcgagacggagctgcgtgagtacttcaagaaatttggagtcgtcactgaggttgttatgatttacgatgccgagaaacaacgtcccaggggctttggattcataacctttgaggacgaacagtcagtagatcaggctgtaaacatgcatttccatgatataatgggtaagaaggtcgaggtgaaaagggccgagccgcgtgacagtaaaagccaagcacccggacagccgggagcgtctcaatgggggtctagagtggtccccaatgcagccaacggctgggctggtcagcctcctcccacctggcagcaaggttacggaccccagggcatgtgggtccctgctggccaggctatcggaggttatggtcctccacctgcaggtagaggtgcgcccccacctcctccacccttcacgagctacatcgtctctactccaccgggcggttttccaccaccacagggctttcctcagggatatggagcgcccccccaattttcatttggatacggcccccccccaccgcctccagaccagtttgcacctcccggcgtcccgccccccccagctacccccggagcagctcctcttgcttttcccccgcccccatcccaagcagctcccgatatgtctaagccgcccacagctcagccggattttccttacggtcagtacggcctgggatcctacagtcctgccccgcccggatgtggtccccatttcgtgtattctctgatggttcgtttgtcatcagatgtcgcatag

SEQ ID NO: 23713 - DNA, 2430 bp, synthetic construct
  source 1..2430: mol_type = other DNA; note = Synthetic coding sequence
atggaggtgctgcgggagaaggtggaggaggaggaggaggccgagagggaggaggccgcagagtgggcagagtgggcccgcatggaaaaaatgatgcgcccagtggaggtcagaaaagaggagataactcttaaacaagagacactgcgggatcttgagaagaagctgagcgagattcagatcacagtaagtgccgaactgcccgctttcaccaaggacacaattgatattagtaagctgcccatttcatataagacaaacaccccaaaagaagagcatctgctccaggtggcagacaatttttctagacagtactcacacctctgtccagatagggtgcctctcttcctccatccactgaatgaatgtgaagtgccaaagttcgtatcaactacgttgcggccgacgttaatgccataccctgaactctataactgggattcttgtgcccagtttgtttccgactttctgacaatggtgccactgcccgaccctctaaaacccaccatcaaaaaagaagagaaagtgctgcccaagaaatacacgataaagcccccccgcgatttatgcagtcgctttgaacaggagcaagaggtgaagaagcagcaggaaatcagagctcaagagaagaagcgtctgcgggaggaggaggaacgtttgatggaggccgaaaaagcaaagcccgatgctctgcatggattgcgcgtgcatagttgggtgttggtgctcagtgggaagcgggaagtccctgagaacttttttatcgatccttttactgggcattcctatagtacccaagatgagcacttcctcggaatcgaatctctctggaatcataaaaattattggatcaatatgcaggactgttggaactgctgtaaagacctcattttcgacctgggcgatcctgtacggtgggaatatatgctgctgggtaccgataagagccagttaagcctgacagaggaagatgacagcgggattaacgacgaagatgacgtggagaacctcggaaaagaggacgaggacaagtccttcgacatgccacactcttgggtggagcagatagagatctcccctgaagctttcgagacccggtgtcccaatgggaagaaagtgatccagtacaagcgggctaagcttgagaagtgggctccctatctgaactctaacgggctcgtttcaaggcttacgacttacgaggacttacaatgcacaaacattcttgaaatcaaagaatggtatcagaatagggaggatatgttggaactgaaacatatcaacaagaccaccgacttaaagactgattacttcaaaccaggccacccccaggcccttcgtgtccattcatataaaagtatgcagcctgagatggatcgcgtgattgaattctatgaaaccgctagggtagacgggctcatgaagcgggaggagaccccaagaacaatgaccgagtattatcagggacgcccagacttcctgagctacaggcacgcatctttcggcccccgtgttaaaaaactcaccttgagcagcgcagaatccaaccctaggccgatcgtgaaaatcaccgagcgattctttagaaaccctgctaaaccggcggaagaagacgttgccgagcgagtgttcttggtcgccgaggagcggatccagctcaggtaccactgtagggaggatcacatcacagcctcaaaaagagaattcctgcggaggaccgaggtggactctaagggaaacaagatcattatgacccctgatatgtgcataagtttcgaggtggagcctatggaacataccaagaaacttttatatcagtatgaagctatgatgcatttgaaacgggaagagaagcttagccgacaccaggtctgggagtccgaactagaggtattggaaatccttaaactgagagaggaagaggaagctgcacataccctcacaatcagcatctacgatacaaagagaaacgagaagtcaaaggagtaccgcgaagctatggagaggatgatgcatgaggagcatttgaggcaggtcgaaacacaattggactatctggctccctttctggctcagctgccgccaggtgagaagctcacttgttggcaggctgtaagactgaaggacgaatgcttgagtgacttcaaacagagactaattaacaaggccaatctaattcaggcccggttcgaaaaagagactcaagaactgcagaagaaacaacagtggtaccaagaaaatcaggtcactcttacccctgaagacgaggatctgtatctgtcctactgcagtcaggctatgttccgaattcgcattttggagcagaggctgaatcggcataaggagctggcgcccctgaagtacctggccctggaagaaaagttgtacaaagatcccagattgggggagctccagaagatctttgcgtag

SEQ ID NO: 23714 - DNA, 828 bp, synthetic construct
  source 1..828: mol_type = other DNA; note = Synthetic coding sequence
atgtggcccctgaccgccctgctgctgctggtgcccagcagcggccaggcggccactctggagaaacctatcctgtccctgcatccaccctggacaactatttttaaaggcgagagggtcacccttaaatgcgatggatatcatcctctgttgctcgaactccagcccatttctaccctgtggtacttgggccatctgcttctcccttcccacaaaaagtcaattgaagtgcagactcctggcgtgtacagatgccagactagaggcgcccctgtgtctgatcctatacaccttagcgtgtcgaatgattggctcattctgcaagtaccatacgcacctgttttcgagggggagcctttggtcctgcgctgccgcggctggtacgacaaggtggtgtacaaacttcactattaccacgacgggcaggcggtccggtacttccactcttctgccaactatacggtcttgcaggcccgagcttctgactccggacgctaccaatgcagcggcaccatgcgaatacccgtggagagtgcccctatgttctctgcgaaagtagctgtgacagtgcaggaggcacggcatgccgctgctgtccgggtgcttcaggtccagccacgaggagctcccctgcgactgggacggcgcgtacatagcccaggcgcaaggggacgcggagcccggatagttctggtaagggggggctaccgacaccctcaatgccctgagacacagtccgtcgctgctgcgcccggggctggattcagccctggtccaggtttgcatcaccgtccatcgtctatgggcagaagcctggggtcatggtag

SEQ ID NO: 23715 - DNA, 657 bp, synthetic construct
  source 1..657: mol_type = other DNA; note = Synthetic coding sequence
atgaactgccggagcgaggtgctggaggtgagcgtggagggccggcaagtcgaagaagcaatgctggcagtgctgcacactgtgcttcttcatcggagcaccggaaaatttcactacaaaaaagaaggtacctatagcatagggacggttgggactcaggatgttgactgcgactttattgactttacatacgtcagggtttccagcgaggagctggacagagctttgcgcaaggtggttggtgagttcaaagatgctctgcgcaactccggcggcgatggtcttgggcagatgtctctcgagttctaccagaagaaaaaaagccgctggccattctctgacgaatgcatcccgtgggaagtctggactgttaaggtacacgtcgttgccttggccactgaacaggaacgtcaaatatgccgagaaaaagtgggagagaagctgtgtgagaagatcatcaacattgtagaagtgatgaacagacatgagtacttacccaaaatgcctacccagagtgaggttgacaatgtgttcgatacaggactcagggacgtgcagccctatctgtataaaatcagcttccagatcaccgatgcactaggcacctctgtgaccacaacgatgcgaagactaattaaggacacactagcactctag

SEQ ID NO: 23716 - DNA, 552 bp, synthetic construct
  source 1..552: mol_type = other DNA; note = Synthetic coding sequence
atgatgcagatctgcgacacctacaaccagaagcacagcctgttcaatgctatgaatcgatttattggcgcagtgaacaacatggaccagaccgtcatggtgccaagtctgctgcgagatgtccccctcgctgaccctgggctggataacgacgtcggggtggaggttggaggaagcggcggttgtctggaagagaggaccccccccgtgccagatagtggctcagctaatggtagctttttcgcacctagccgtgatatgtactcgcattatgtactacttaaatcaatacggaacgatatcgagtggggagtgctacatcaacccccgccacccgccggatcagaggaagggagtgcctggaagagcaaggacatactcgtagacctgggacacctggaaggagccgatgcaggggaagaagatttggagcagcagttccactaccacttgcggggtctccataccgtcctttccaagctcacaagaaaggcaaacatcttgaccaaccggtacaagcaggagatcggatttgggaactgggggcactag

SEQ ID NO: 23717 - DNA, 369 bp, synthetic construct
  source 1..369: mol_type = other DNA; note = Synthetic coding sequence
atgctgttcgccccctgctgccaccagtgcggcgagttcatcatcggaagagtaattaaagccatgaataactcctggcatccagagtgtttcaggtgcgacttgtgtcaggaagtccttgccgacattgggtttgtcaaaaatgccggacgacacctgtgtcgcccatgtcacaatagagaaaaagcaagagggcttggcaaatacatatgccagaaatgccacgcaattatcgatgaacagccccttatcttcaaaaatgacccctaccaccccgatcatttcaattgtgctaattgcgggcaggaggggtccgattgtcgctgtaccggggctgagagaggagcaatccttcctgctatgccttag

SEQ ID NO: 23718 - DNA, 1083 bp, synthetic construct
  source 1..1083: mol_type = other DNA; note = Synthetic coding sequence
atggacagcgagctgatgcacagcatcgtgggcagctaccacaagccgcctgaacgggttttcgtaccttccttcacgcagaatgagccctcacagaattgtcaccctgccaacctggaagttacgtctcctaagatattgcactccccaaactcgcaggagaaacagctggagtatacaaaaaggatggtacttaatgtggagcgggagaaaaacatgatacttgagcaacaggcacagctccagagggaaaaggaacaagatcagatgaagctatacgccaagctagaaaagctggatgtcctggaaaaagaatgttttcggctgactactacacagaaaactgccgaagacaaaatcaaacatctggaggagaaattgaaggaagaagagcatcaacggaagctctttcaagataaagctagcgagctacagactggtcttgagatcagcaagataatcatgagctccgtgtccaacctgaaacatagtaaagaaaagaagaaaagcagtaagaagacaaaatgtattaagcgccgccccccttggcagatctgtagcaagttcggcgctctgcctttcgtggctgagaagcctagtcgcacaacttcatggtgcaaggccatccccccggactccgagaagtctatatccatctgtgataatttatctgagttactgatggccatgcaggacgaactggatcagatgtcaatggaacatcaggaactgttgaagcaaatgaaagagactgagtcacattcggtgtgtgacgatatcgagtgcgagttggaatgcttactgaaaaagatggaaatcaagggtgagcagattagcaaactgaaaaaacaccaggacagcgtgtgtaagttacagcagaaggtgcagaattccaagatgtctgaggcctctggcatccagcaggaagactcatatcccaagggtagcaaaaacattaagaactcacctaggaaatgtctgactgacacgaatttattccaaaagaactctagcttccacccaattcgcgtccacaacctgcaaatgaaactgcgccgggacgacatcatgtgggagcaatag

SEQ ID NO: 23719 - DNA, 1758 bp, synthetic construct
  source 1..1758: mol_type = other DNA; note = Synthetic coding sequence
atgagcggcagcacccccttccagatgcggctggtgcacctggaccttaaaggtgctccaccaaaagtctcatacctttccgaaatcttcccactcttcagagccctgggagcaaatggacttttaatcgagtacgaggatatgttcccctacgaggggccgctgcgcctcctgcgcgcaaagtatgcatactccccatctgaaatcaaggaaattcttcaccttgctgggcttaacgagctcgaggttatcccactcgttcaaacctttggtcatatggagtttgtgctcaaacataccgcttttgcccatttgcgggaagtgggctcttttccttgcactttgaatcctcacgaagcggagagtttagctctggtgggggcaatgatcgatcaggttttagagttgcacccaggcgcccaacgcctgcatattgggtgtgatgaagtgtattacttaggagaaggtgaagcaagccgccgttggttgcaacaggagcagaactccacagggaaattgtgtctgtcccacatgagggcagtggccagtggcgtgaaggcaagacgacctagcgttacgccattagtctgggacgatatgctccgggatcttccggaggaccagcttgctgccagcggggtgccacagttggtggaacctgtcctctgggactatacggccgatttagatgtgcacgggaaagttctgcttatgcagaaatatcgccgatgtggcttcccccagttgtgggcagcctctgcatttaagggtgccacaggcccctcccaggccgtgccacccgtggaacaccatcttaggaatcacgtgcagtggttacaggtggctggatctgggcctactgacagcctgcagggaatcatcctaacaggctggcagagatacgatcattattctgtgttgtgtgagctgctccctgctggcgttccttcgctcgctgcttgtttgcaactccttcttcgcggaggctttgatgaggacgtgaaggcaaaggttgagaacctgctggggatctcaagcttggagaaaaccgacccagtcaggcaggccccttgctctccaccatgccccctcctgccactgcccttccccagaccatggcggcagttgttcagcgcgggcttgtccgcagggagagggccagcacctagtctcgctgctacgagtcttcctctgagccataagagtgcgtctatctgtgcggcactgtggatgcgctgctggcgggccaccggtatgagcctcgcaggcagtgcaccaaccaccgccagtggctcatcatccacccggagctggtttagcactagctctccccaaagaagtgcatcttggcactccggcgcgccctcttgtagatcgtggagactcccctgcagctggctgagcaccaggatgccttggagaagcggctggcgcaagacctgtacccctgcttgtagtgggtgcaagctttgctgtaggacctctgctaggtgtcttcctccgcgctgccacccgcccgccctggccgggacactgttaaggactccagagggacgggctcacgctagagggctgcttctagaggcaggaggcgcgctccattgtcaaatggcatgggcaattcgggcccacgtgggagtcgtccccagtggcccggcagtgtcctgccctcattccgtgcccgagggacccggacagccactcggggagcggctggagaacacagaaggtagctccaccggaaggcctgctctctag

SEQ ID NO: 23720 - DNA, 2112 bp, synthetic construct
  source 1..2112: mol_type = other DNA; note = Synthetic coding sequence
atggaggccctgctggagggcatccagaaccggggccacggcggcggtttcctaacctcatgtgaggcggagttgcaggagttgatgaagcagattgacattatggtcgcgcataagaagtctgagtgggaggggcgcactcacgcactcgaaacatgtctgaagattcgggagcaagagctgaaatcacttcggtctcaactggacgttacacataaagaagttggaatgctgcaccagcaggtggaagagcatgaaaagataaaacaggagatgaccatggagtataagcaggagctgaaaaagctgcacgaggagctgtgcatcctcaagcggtcttacgaaaaactgcaaaaaaaacaaatgcgcgaatttcgcggcaacaccaagaatcatagagaagatcgcagcgaaatcgagcgtttgactgcaaagatcgaagagtttcgtcagaagtctcttgattgggagaagcagaggctgatttatcagcagcaggtatccagtctggaagcccagcgcaaggcccttgccgagcagagcgaaatcatccaagctcagctggtgaacagaaagcagaaactggaatccgtagagctgtcttctcagtctgaaatacaacatctgtcaagcaaattagagagagctaacgacaccatctgcgccaatgaactggaaatagagcggctgacgatgcgtgtgaacgacctggtcgggacctcaatgacagtactccaggagcaacagcagaaagaagaaaagctgagagagagcgagaaactcttggaggccctccaggaagaaaagagagagctgaaggccgccctgcaaagtcaggagaacttgattcatgaggcaagaattcagaaggaaaaactgcaagaaaaggtgaaagctacaaacactcagcatgcagtagaggcaattcgccctagagaggagtcgctagccgagaaaaaatacacatcgcagggacaaggcgacttggacagcgtgttaagtcagctgaactttactcatacttctgaggacctgttacaagccgaggttacctgtttggaaggctcactggaatccgtctcggccacatgtaagcagctgtcgcaggagctcatggaaaaatacgaagaactcaaaagaatggaagcacacaacaatgagtataaagccgagatcaaaaagttgaaggaacagatactccagggtgaacagtcttactccagtgccttggagggaatgaagatggagatctctcacctgacccaagaactccaccagcgagacattaccatcgcctccacgaagggatcatcttctgatatggaaaagcgcctgcgcgccgaaatgcagaaagctgaggataaagccgttgagcacaaggagatcctagaccagctggagagcctgaagcttgagaacaggcacttaagcgagatggtaatgaagctggaactaggactccacgaggccaaggagatcagtctggccgatctgcaggagaactacattgaggccctgaacaagctcgtctctgaaaatcagcagctccagaaagatttgatgaacaccaagtctcagctagaaatatctactcagatgtgcaagaaacagaatgatagaatcttcaaacctactcatagcagaaccaccgagttcaaaaacacagagtttaagcctacacacggccagcaccgacatgatggaattaagacggagcactataagactgatctgcactccccacgagggcaggcttctgacagtattaacccgatgagccgggtactgtctcctttgtctccccagattagtccttgttctagcacaagatccctgacgagttacagcctctgtaaaacccatagtctgccctcagcgcttgacactaacgaggccaatttctccgacaccatgagcgagagcatgaacgatcaagaggaattcatctcttcgtgtagtctgcctgtctcccctctggggtcaatcgccaccaggttcttggaagaagaggagcttaggagccaccacattctggagagattggatgcgcatatcgaggaactaaagagagaatctgaaaagacggtgaggcaattcaccgccttgaaatag

SEQ ID NO: 23721 - DNA, 1626 bp, synthetic construct
  source 1..1626: mol_type = other DNA; note = Synthetic coding sequence
atgagcagctgcgtgagcagccagcccagcagcaaccgggccgccccccaggatgagctagggggccgcgggtcaagctctagcgagagccagaagccctgcgaagcattgagaggattgagctccctgtccatacatttgggaatggagtcattcatcgttgtaacagaatgtgagccaggctgcgctgtggatctggggctggctcgtgatcgtccattggaggccgatgggcaggaggttccactagatacctccggctcccaggccaggccccatctgtccggacgcaagcttagtctgcaggagcgtagtcaggggggtcttgctgctggtggtagcctggatatgaatggcaggtgcatctgtccttccctgccctatagcccggtgtcttctcctcagtcatcaccacgattacctcgcagaccgaccgtggaatcacatcatgtgtctattacagggatgcaggattgcgtgcagctgaatcagtatacgctgaaagacgagattggcaaaggctcatatggggtggttaagctggcctacaacgagaatgacaatacatactacgctatgaaggtgctttctaaaaagaagctgattcggcaggccggctttcctcgcaggcctccacctagagggacgagacccgccccaggaggctgtattcagcccagaggtccaattgagcaggtctaccaggaaatcgccatcttaaaaaaacttgaccaccccaacgttgtgaagctggtcgaagtcctggacgatcccaacgaggaccacctttatatggtattcgaactagttaatcaaggacctgtgatggaagttccaactctgaagcctctatccgaagatcaagccaggttctactttcaggatctgatcaaaggaatcgagtatctccactatcaaaaaatcattcaccgggacatcaaaccatctaacctgctcgttggagaggacggacatataaaaatcgctgatttcggtgtgagtaacgaattcaaaggctccgacgcactgctaagcaacacagtggggacccctgccttcatggctcctgagtctctctcggaaacaaggaagattttttcaggaaaggcactggatgtctgggccatgggggtaaccctgtattgcttcgtcttcggtcagtgtcctttcatggacgagagaatcatgtgccttcactcaaaaataaagagccaagctctggagttccccgatcagccagacatagcagaggacttaaaggatctgataactcggatgctcgacaagaaccctgaatctcggattgttgttcctgaaattaaactgcatccatgggtcacaagacacggggctgagccattgcccagcgaagatgagaattgtactctggtggaggttactgaagaagaggttgaaaattcagtcaaacatattccctccctagccaccgttattctggtgaagacaatgatccgtaaacggtcttttggtaaccccttcgaaggaagtcggagagaggagcgaagcctctcggcccctggtaatttgctgactaaacagggttcagaggacaatctccaggggactgacccacctcctgttggagaagaggaggtactgctttag

SEQ ID NO: 23722 - DNA, 2463 bp, synthetic construct
  source 1..2463: mol_type = other DNA; note = Synthetic coding sequence
atgaccgacacccggcggcgggtgaaggtgtacaccctgaacgaggaccgccaatgggatgaccgggggaccggtcacgtctccagtgggtatgtggagcgcctgaaagggatgtcattactggtccgggcagaatcagatggcagcttgctgctcgagtctaagatcaatcccaatacggcctatcagaaacagcaggacaccctcatcgtctggtccgaggccgaaaactatgatcttgccttatcattccaggagaaggctggttgcgacgaaatttgggagaaaatctgccaggtgcagggtaaagatccttcagttgacattacccaggatttagttgatgagtctgaggaggagcgctttgacgacatgagcagccccggcctcgaactccccagctgtgagctttctaggctagaggaaatcgccgagctggttgcctctagtcttccttcacccctgagacgggaaaaactcgcattggctctcgagaatgagggatatattaagaaactcttggagctgtttcacgtctgcgaagacctcgagaacattgaaggcctgcatcacctgtatgaaatcattaaaggcattttcctgcttaacaggacagctctgttcgaggtgatgttctctgaggaatgtattatggacgtgatcggttgtctggagtacgatcctgcgctcagccagccacgtaaacaccgagagttcttgactaaaactgcaaagtttaaagaggtcattcctatctccgatcctgaactcaaacagaagatccatcaaacttacagagtacaatacatccaagacatggtgttgccaaccccaagcgtatttgaggagaacatgttatcaactctgcactcttttatattcttcaataaagtggagatagtcggtatgctccaagaagacgagaagtttctgacagatctgtttgcccagctgaccgacgaggccacagacgaggaaaagcgccaagaactcgtgaacttcctgaaagagttctgcgccttttcacagactcttcagccacagaaccgcgatgcgttttttaaaactctaagtaacatgggcatcctccctgccctggaagtgatactgggaatggatgacacacaagttagaagcgccgccacggatatcttctcttatttggtggaatacaacccctcgatggtcagggaattcgtcatgcaggaggctcagcagaatgatgacgacatcttattaataaacctgatcatcgaacatatgatctgcgataccgaccccgaactcggaggagcggtgcagctcatggggcttctccggactttggtggacccagagaacatgctggcgacggcaaataaaaccgaaaaaacggaatttcttggctttttttataaacattgtatgcatgtgctgaccgccccccttctggccaacactacggaagataaaccatccaaggatgatttccagactgcacagctcctcgcactggttctggagctcttgacattctgtgtggagcatcacacctatcacataaaaaactacattataaacaaagatattctgcgaagggtgttggtgctgatggcttctaagcatgccttccttgcactgtgtgccctcagatttaaacgcaaaattattggcctaaaagatgaattctataatcgatatatcatgaagagttttctgtttgagcctgtggtgaaggccttcctaaacaacggcagtcgctacaacctgatgaattctgccatcatcgagatgtttgagtttatcagggtcgaggacatcaagtccctgacggcacacgtcatcgagaattattggaaagccctggaagatgttgactatgtccagaccttcaagggtttaaaactgcgcttcgagcagcagcgggaaagacaggacaatccaaagctcgactccatgcggtccatcctgaggaatcaccggtacagacgggatgccaggacccttgaagacgaggaagaaatgtggttcaataccgacgaagatgacatggaagacggcgaggctgtggtcagtccttccgacaaaactaagaatgatgacgatataatggaccccatttccaagttcatggagagaaaaaagttgaaagaatcagaggagaaggaagtcctgctaaagaccaacctgagcgggagacaatcaccatccttcaagctgagtctctcttctggcacaaagaccaatctcacaagccagtcttccaccacaaatctccccggttccccggggtcaccaggttctccggggtcgcccgggtcacctggctcagtgccaaaaaatacgtctcagactgccgccatcacaacaaagggcggcctggtgggtctcgttgattatcctgacgacgacgaggacgacgacgaggacgaagataaggaggatactcttcctctgtctaaaaaggccaagttcgacagttag

SEQ ID NO: 23723 - DNA, 2382 bp, synthetic construct
  source 1..2382: mol_type = other DNA; note = Synthetic coding sequence
atgagcgagcagggcgacctgaaccaggccatcgccgaggagggcggcacagaacaagaaacggccacccctgagaacggcattgtgaagtccgaatccctggacgaggaggagaaactggaactgcaacggagactcgaggcgcagaaccaggagaggcgcaaatcaaaaagtggagccggaaaaggtaagctgacccggagtctggcagtttgtgaggagtcaagcgcaagaccaggaggtgagtcccttcaggaccaagagagcattcatctacagctgtcaagtttctctagcctgcaggaggaggacaaaagccggaaggatgactccgaacgagagaaagaaaaagacaaaaacaaggataagaccagcgaaaagcctaaaataagaatgctgtccaaggactgttcccaggaatacactgactcaacgggaattgatttgcatgaattcctgataaatacgctgaagaacaattctcgagacagaatgatactgctgaagatggaacaggaaatcatcgatttcatcgcagataataataaccactacaagaagttcccacaaatgtccagctaccaaaggatgctcgtgcacagagtggccgcctattttgggttagaccataacgtcgaccagacagggaagtctgttataatcaacaaaacctctagcacacggattccagagcagagattctgcgagcacctgaaagatgaaaaaggcgaggagagtcagaaaagatttattctcaagagagataactccagcatagacaaggaggacaaccagtccgtttgttctcaggaatccctcttcgtggagaatcgcgggaacagagacggctctggccggacgtcaggatcccgccaaagcagcagcgaaaatgagctcaaatggagcgatcatcagcgggcgtggtcatccaccgatagcgattcaagcaaccgcaatttgaaacccgccatgactaagactgcgtcctttggaggcatcaccgtcctgacccgcggcgactcaacgtcctctactcggtccaccgggaaactgtcaaaagctggttctgagagttctagctctgcgggatcttccggaagtctgtcacggacacacccccctctgcaatcaacacccctggtctccggtgtcgccgcaggtagccctggctgtgttccgtacccagagaatggcatcggaggacaggttgcaccaagttctacctcctacattcttctgcccctggaggctgctactggcatacctcctgggagcatattgctgaatccacacacaggccaaccctttgtgaatcccgatgggacgccagccatctataatccccccacaagtcagcaacccctacggagtgccatggtggggcagtcccagcagcagcccccccagcagcagccgtcaccccagccacaacagcaagtgcagcctccccagccacagatggcagggccattggtcacccagtccgtgcagggcctacaggcctcttcccagagcgtacaatatccagccgtgtcttttcctccccaacacctcctgccagtatctccaacccaacactttccaatgcgtgatgacgtggctacccagttcggccagatgaccctctcccgccagtcctccggcgagactccggagccgccgtccggccccgtttatccaagttcgctcatgccccaacccgcacagcagccttcatatgtgatcgcatcaaccgggcagcagctgccaactggagggttcagcggcagtggaccccctatcagccagcaggtcctgcagccgcctccctccccccaggggtttgtccagcagcctccccccgcacaaatgcctgtgtactattatccttccggccaataccctacgagcaccacacaacagtaccggccaatggcaccagtgcagtacaatgcccagagaagtcagcagatgcctcaggccgcccagcaggctggataccagcccgtgctgagcggacagcagggctttcagggtctgatcggagtgcagcagccacctcagagccagaatgtcattaataatcaacagggcactcctgttcaaagtgtgatggtatcttatcctacaatgagctcatatcaggttcctatgactcaggggtcacagggcctcccccagcaaagctatcagcagcccatcatgttacctaatcaggcaggacaaggctcattgcctgccaccggcatgccagtctactgtaacgtaacgccacctacaccacagaataatttgcgtttgataggcccgcactgcccgagctccactgtgcctgtgatgtccgcgagctgcagaacgaactgtgccagcatgtcaaacgccggttggcaggtcaaattctag

SEQ ID NO: 23724 - DNA, 1467 bp, synthetic construct
  source 1..1467: mol_type = other DNA; note = Synthetic coding sequence
atgcggttccactggctgcccaccctgagcgagcccttcgaccggaaccaggagcttgagacgtgcataagacccctgtggacaccaagtggctctgcctgcgagactgagcacaacaaaagtatggacatgggcaaccagcatccatcaatttcacggttgcaggagatacaaaaagaggtgaaatcagtggaacagcaggtaataggattctctggtctctctgacgacaagaactataagaaactggagcggattctaacaaagcagctattcgagatcgactctgtcgatactgaggggaaaggagatatccagcaggcccgtaaacgagcagcccaagagactgaacggcttcttaaggaactcgaacaaaatgctaatcatccccatagaatagagatccagaacatcttcgaagaagcgcagtccctcgtgcgagagaagatcgtacctttttacaacggcggtaattgtgtaaccgacgaattcgaagaagggatccaagatataatcctcaggctgactcatgtaaagacaggcggcaaaattagcctgagaaaagccagatatcatacacttacaaagatttgcgcagtgcaggaaatcatcgaagactgtatgaaaaagcaacctagcctgccattgtctgaggatgcccacccttccgtggccaaaatcaatttcgtcatgtgcgaggtcaataaggcaagaggcgttctcatcgcactcctgatgggcgtgaacaataatgaaacctgccggcacctttcctgtgtgctcagcggccttattgccgacttggacgcgcttgatgtttgcggcagaacagagataaggaattaccgaagagaggtggtggaggatatcaacaagctgttgaaatatctcgacctggaggaggaagccgacacaacaaaagccttcgatttacggcagaaccacagcatcctaaagatcgaaaaggtgctgaagcgaatgagagagattaagaacgagttgctgcaagcccaaaacccgtccgagttgtacttgtcctcgaagaccgagctacagggactgatcggccaacttgatgaagtttcattagagaaaaatccttgcatcagagaagcccgcagacgcgcagttatcgaggtgcaaacgctgattacctatattgatcttaaggaagcactggaaaagcgtaagctcttcgcctgtgaagagcacccgtcacataaggccgtgtggaatgttctggggaatttgtctgaaatacaaggggaagtactgtctttcgatggtaaccgcacagacaagaattacattagactggaagagctgctcactaaacagctactcgcgcttgacgcggttgaccctcagggagaagagaagtgcaaagctgctagaaagcaggcggttagactggcacagaacatcctgagttacctggacctgaaatccgatgaatgggagtattag

SEQ ID NO: 23725 - DNA, 978 bp, synthetic construct
  source 1..978: mol_type = other DNA; note = Synthetic coding sequence
atgggcaagatggtgagcgtgatcaacaccgtggacaccagccacgaggatatgatacatgatgcccaaatggattattacggcaccaggctagcaacgtgtagttctgacaggtctgtgaagattttcgacgtgaggaacggcggacagatcctaatcgccgatttgcgaggacacgagggccccgtgtggcaagtggcttgggcacaccctatgtatggaaatattctggcatcgtgcagttacgatagaaaggtgattatctggcgcgaggaaaatggaacctgggagaagagtcacgagcatgctgggcacgactccagcgtgaacagtgtctgttgggcgccacacgactacggcctgatcttggcctgcggcagttccgacggtgccattagcctgttgacttacacaggagaaggacaatgggaggtaaaaaaaataaacaatgcccacaccattggatgcaacgcagtaagttgggcccctgctgttgtgcccgggagcctcattgaccatccaagcgggcaaaaacctaactacatcaaacgctttgcaagtggaggctgcgataatctcattaagctatggaaggaagaagaagacgggcagtggaaagaagaacagaagctcgaggctcactcagattgggtgcgcgacgtcgcttgggccccttccattggcctaccaactagtacgattgcctcttgttcgcaggatgggcgggtctttatctggacatgcgacgatgcttcgtcaaatacatggtcccccaaattgctgcataaatttaacgatgtcgtgtggcatgtctcttggtcaatcactgccaacatcctcgccgtctccgggggggacaataaagttactctgtggaaggagtccgtggatggccagtgggtctgcataagcgacgtaaacaagggccagggtagcgtcagcgcatcagtaacggaaggccagcaaaatgagcaatag

SEQ ID NO: 23726 - DNA, 846 bp, synthetic construct
  source 1..846: mol_type = other DNA; note = Synthetic coding sequence
atgctgttcatcttccccctgagcctgccctggcggcccagctgctggaaggagtcttgctcgacaggccagagacaggcaggcaggtcaagagaggacagtgttacgccacctccatctagtccctggcctaccccaccagcaggagcgatgtccacgaaacaggaggcccgtagggatgaaggtgaggcccgcacacggggccaagaggcccagcttcgcgatagggcccacttgtcccaacagcgaaggttgaaacaggcgacacagtttctgcacaaggactcagcggacctactcccccttgattctctgaagagacttggtaccagcaaggatttacagccccggtctgttatccagaggagactagtagagggtaatccgaattggctacagggggagcccccaaggatgcaagatctgattcacggccaggaaagccgtagaaagaccagtaggactgagatccctgcacttttagtgaattgtaagtgccaagatcaattgctccgagtcgcagtcgatacgggtacacagtacaatcgcataagcgccggctgtttaagcagactgggattagagaagagggtgctgaaagcgtcagcaggagatctggctccaggcccccctacgcaggtcgagcagctggaactccagttagggcaggaaaccgtggtgtgcagtgcacaggtagtcgatgcggagtcccccgagttctgcctcgggctgcagacactgttgagtttaaaatgctgcatcgatttggaacacggcgtgttgcgactgaaagctcctttttccgagctgccatttctacccttgtaccaggagcctggacagtag

SEQ ID NO: 23727 - DNA, 1533 bp, synthetic construct
  source 1..1533: mol_type = other DNA; note = Synthetic coding sequence
accggcggcggcgtggcccccgccggccaggtgcggaccgccacctgggctaggcgggcacgaccttatcggaagatggccgctagaaccggcaccgagctggccagtgcagccagcactacagccccaggatccagtaagcgtaggaagcgtcacccatggcatacggtgtctcgccgtcctgggcgaacccccaagtggaggctgccacggatttctgctcgcgcaccttataggttgaggcggctgcgccgccacacatattggccaccacggcgtcccgtggctgcgtctagatgctggcccgtgggggctacccctcttgggtccgtagggggacggaccggtaaaatggatgcagccacgttaacatacgacacgctgcgctttgctgaatttgaagattttcctgagaccagcgaacctgtctggatcctggggcggaagtactcaatcttcactgaaaaagatgagatcctatctgatgtggcgtcccgcctgtggttcacatataggaagaatttccctgccatcggcggcacaggcccaaccagcgatactgggtggggatgcatgttgcggtgtggccaaatgatctttgcacaagcgctggtgtgtagacatctgggccgggattggcgctggacacaacgaaaacgccagcccgactcctacttctcagttttgaacgcattcatcgaccgaaaggattcatactattccatacaccagattgctcagatgggcgtgggggaaggaaagtcgatcggacagtggtatggcccaaatacggtggcccaggtcctcaagaagctggcagtgttcgatacttggtcgtcccttgccgttcatattgcaatggacaacaccgtggtgatggaggagataaggaggttgtgtaggacctccgtcccctgtgcaggcgccacagctttccccgcagactcagaccggcattgtaatggctttccggcaggagccgaagtgacaaatcgcccatcaccatggcgacccctggtgctgctaattcccctccggctgggcttgacagatatcaacgaagcttatgtagagacgctaaagcactgtttcatgatgccacaatcactcggagtgatcgggggaaaaccgaacagcgcgcactactttatcggctatgtaggggaggagttgatttatcttgaccctcataccactcagccagccgtggaaccaaccgacggatgctttatcccagacgagtctttccattgccagcacccaccgtgtaggatgtccattgcggaacttgaccccagcatagcagttgggttcttttgtaaaacggaggatgacttcaacgactggtgtcaacaagtgaagaagctgtcccttctcggcggtgccttgcccatgttcgagctggtcgagctgcagcccagccacttggcttgtcccgatgtgctgaacctctccttagatagctcagatgtggaaaggctggagcgcttctttgactcggaagacgaagacttcgagattctgagtttatag

SEQ ID NO: 23728 - DNA, 552 bp, synthetic construct
  source 1..552: mol_type = other DNA; note = Synthetic coding sequence
atggccagcaacaagaccaccctgcagaagatgggcaagaagcagaacggcaagagcaagaaggttgaggaagcagaacctgaggagttcgtcgtcgagaaggtgcttgacagacgcgtggtgaacggtaaggtggaatacttcctgaaatggaaaggttttacagacgcagacaacacctgggaaccagaggaaaacttggactgcccagagctcatcgaagcattcctgaacagccagaaggccggaaaggaaaaggatggcaccaaacgtaagagcctatccgatagcgagagtgacgacagtaagtcaaaaaaaaaaagggatgcagcggacaagccacggggttttgccaggggcttggatcccgagagaattatcggcgcaacggacagcagcggggaattaatgttcctcatgaaatggaaggacagcgatgaagctgatttggtgttagctaaggaggctaacatgaaatgccctcagatagttattgcgttctacgaggagcggctgacttggcattcttgtcctgaggatgaagcccagtag

SEQ ID NO: 23729 - DNA, 1464 bp, synthetic construct
  source 1..1464: mol_type = other DNA; note = Synthetic coding sequence
atggagcggagcggccagcgggtgaccacctgggactgcgaccaggggaagcactctgactctgattaccgcgaagatggaatggacctgggatcagacgcgggctccagcagcagtagctccagggcaagttcccaatcaaatagtactaaagtgaccccctgtagtgagtgcaaaagtagcagtagtccaggcggctccttggatctggtctctgctttggaagattacgaagagccttttcccgtgtatcagaagaaggtgattgacgaatgggcccctgaggaagacggcgaagaggaggaggaggaagacgaaagagatcagcgaggttaccgcgacgatcgtagccctgccagggagcctggagacgtgagcgctcgcactcgatcaggaggcggcggtggccgctctgccactacagcaatgccaccccctgttcccaatggcaatcttcatcagcatgatcctcaggacctgagacataacggtaatgtcgtggtggccgggcgcccttcttgttcccgcggccccaggcgggcaattcagaagccccagcccgccggaggccggagatctgggcgggggcccgctgcgggagggttgtgccttcagcctcctgatggagggacttgcgtgccagaagagccgccagtgcccccaatggactgggaagctctcgagaaacacctcgctggccttcagttcagagagcaggaagttcgaaaccaggggcaagcacgaacaaatagtacatccgctcagaaaaacgaaagagagtccatccggcaaaagctggctctgggttccttctttgatgatgggccagggatatatacctcttgttccaaatcaggcaagccatccctgtcttcgagattgcagtcagggatgaacctgcagatctgctttgtgaacgattcaggatccgataaggactctgacgcagatgacagtaaaactgaaacttcccttgacaccccactctctccgatgagcaaacagtctagttcttactcggatcgtgataccactgaagaggagtctgagtccttggatgatatggactttctgaccagacaaaagaaactccaggcagaggccaagatggcgttagcgatggcaaagcccatggccaagatgcaggtggaggttgagaaacagaataggaaaaagagcccagtggcagacctgttgccccatatgcctcacattagtgaatgcctcatgaagcgctccctgaagcctaccgaccttcgggatatgactataggccagctgcaggttatcgtgaacgatctccactcgcaaatcgagtctctgaacgaggaactggtgcagttgcttttgatccgcgacgaattacacaccgaacaagacgcaatgctggtggacatcgaggatctgacccgccacgccgaatcccagcaaaaacacatggcagagaagatgcccgctaaatag

SEQ ID NO: 23730 - DNA, 927 bp, synthetic construct
  source 1..927: mol_type = other DNA; note = Synthetic coding sequence
atgaagcgggcccaccccgagtacagcagcagcgacagcgagctggacgagacaatcgaagtagagaaggaatctgccgacgagaacgggaatttgagcagtgccctcggctcaatgagtcccacaacaagctcccagattctagcgaggaagcgacggcggggaattatagaaaaacgtagaagggaccgaatcaataattccctgtctgagctcaggcgcctagtaccgagcgcattcgagaagcaggttatggaacagggcagtgcaaagcttgagaaagccgaaattctgcaaatgacagtggaccatctgaaaatgctccacacagcaggcgggaagggatattttgatgcacacgcccttgccatggactaccgaagcttagggttcagggagtgtcttgccgaggtagcacggtatcttagtataatagagggcctagacgcctctgacccactgagagtcaggttggtgtcacaccttaacaactacgctagccagcgcgaagcggcctccggagcccatgctggtctgggacatattccatgggggaccgtatttgggcaccaccctcacatcgcccacccgttgctgctgccacagaacgggcacgggaatgcgggaaccacagcctctcctacagagccacatcaccagggtcgccttggatctgcccaccccgaagctcccgcccttagggcgcctcccagcggctccttgggccccgtgctgccagtggtgacgtccgccagtaaattatctccacccttgctcagttccgtcgctagtctatctgcattccctttctcatttggctcattccatcttttatcaccgaatgctttgtctccctctgcacccactcaggccgccaatctagggaagccctatcgtccttggggtaccgagataggagctttttag

SEQ ID NO: 23731 - DNA, 1338 bp, synthetic construct
  source 1..1338: mol_type = other DNA; note = Synthetic coding sequence
atgagcgtgacctacgacgacagcgtgggcgtggaggtgagcagcgactccttttgggaagttgggaattacaaaaggaccgtgaagaggatagacgacgggcacagattgtgctctgatttgatgaactgtcttcatgaacgggctaggatcgagaaggcttatgctcaacagctcaccgagtgggctcgccgctggcgccagctcgttgagaaaggccctcagtacgggacagtagagaaggcgtggatggcattcatgtctgaagccgagcgggtgagcgagctgcacctggaagtgaaggcatcccttatgaacgatgacttcgagaagattaaaaattggcagaaggaggcttttcataaacaaatgatgggagggttcaaagaaacgaaggaggccgaggatggtttccgtaaagcacagaagccatgggctaaaaagctgaaagaagtggaagcggctaaaaaggcccaccacgcagcttgcaaggaggaaaaactggcaatttctcgtgaggcgaacagtaaagctgacccgtccttgaaccccgaacaactgaaaaagttacaggacaaaattgagaagtgcaaacaggacgtgcttaaaacaaaagaaaaatacgaaaaatccctgaaggagcttgatcagggcacaccccagtatatggagaatatggaacaggtgtttgaacagtgccaacagtttgaagagaaaaggctgagatttttccgggaagttctgcttgaggtgcagaagcacctggatctctctaatgtggcaggctacaaggcgatttaccatgatcttgagcagtcaatcagggcagcggatgccgtagaggaccttaggtggttccgcgccaatcacggccctggaatggcaatgaattggccccagttcgaggaatggtcagcggaccttaaccgcacactgtctaggcgtgaaaaaaagaaagccacagacggcgtaacattaactggaatcaaccaaaccggtgaccaatcccttccaagtaagccctcctctgtctcctcttatgagaagacccaaagctacccaaccgactggtccgacgacgagagcaataatcccttcagcagcaccgacgctaacggggattccaatccttttgacgatgacgcgacctctggcaccgaagtgagagtccgagcattgtatgactacgagggccaggagcacgatgagttgagcttcaaagcaggcgacgagctcacgaagatggaagacgaagatgagcaaggatggtgtaagggtaggttagacaacgggcaagtagggttgtatccagccaactatgtggaggccatccagtag

SEQ ID NO: 23732 - DNA, 1248 bp, synthetic construct
  source 1..1248: mol_type = other DNA; note = Synthetic coding sequence
atgatgctgggccccgagggcggcgagggcttcgtggtgaagctgcggggcttgccttggtcatgtagtgtcgaggatgttcaaaattttttgtcggattgcaccatccacgatggagcagcaggagttcactttatttacacacgcgaggggaggcagtctggtgaggccttcgtggagttggggtccgaggatgacgtgaaaatggctctaaagaaagatagggaaagtatgggccacagatatattgaggtgttcaagtcccatcggaccgaaatggattgggtactgaagcatagtggtcccaacagcgctgactcagcaaatgacgggtttgtgcgactacgcggtctgcccttcggatgcacaaaggaagagatcgtccagttcttctcggggctggaaatcgtaccgaacggtatcacccttcccgtggatccagagggcaagattaccggagaagccttcgtgcagtttgccagtcaggagctggccgagaaggcactcggcaagcataaagaacggattgggcacaggtatattgaggtcttcaagagttcacaggaggaagtccgctcctactccgatccacccctaaagtttatgagcgtacagagaccagggccctatgaccgacccggtaccgcccggaggtacatcggtattgtgaagcaagccggcctcgagcggatgaggccaggcgcttattcgactggctatggcggttacgaggagtatagcgggttatctgatggatatgggtttaccactgacctctttggtagagatttatcatactgcttaagtgggatgtacgaccaccgctacggcgacagtgagttcacagtgcagagtactactggacactgcgtgcacatgcgggggttgccatacaaagccacagagaacgacatctacaattttttctccccactcaacccggtccgtgtgcatatcgaaataggccctgatggaagagtgaccggtgaagctgacgtggagtttgcaactcacgaagaagctgtcgctgccatgtccaaagatagggcaaacatgcagcatcggtacatagaactgttcctgaatagtactaccggggcctccaacggcgcctatagttcacaggttatgcagggtatgggagtctctgccgcccaagccacgtactctgggctagaatcgcagtccgtgagtggctgttacggagctggttattccggacagaactctatgggaggatacgactag

SEQ ID NO: 23733 - DNA, 1770 bp, synthetic construct
  source 1..1770: mol_type = other DNA; note = Synthetic coding sequence
atgagcgtgagcgtgcacgagacccggaagagccggagcagcaccggctccatgaatgtaacgttgtttcacaaggcctctcaccctgactgcgtgctagcccacttgaacactctgagaaaacactgtatgttcacagatgtgacactctgggctggcgaccgggcttttccttgccatcgcgcagtgctggcagcaagcagcagatattttgaggcgatgttttcgcacggcttacgtgagtcccgggacgataccgtgaactttcaagacaatttgcaccccgaagtattagagttactgctagactttgcctattcttcacgcatcgccatcaacgaggagaatgctgagagcctgttagaggctggcgacatgctacagttccatgatgttcgcgacgcggcagccgagttcttggagaagaatctgtttccttcaaactgtctgggaatgatgctcctcagtgacgcccaccaatgccggcggctgtacgaattttcatggaggatgtgccttgtgcactttgagaccgtgaggcaaagcgaagacttcaactctctttctaaggacactctcttggacttgataagcagtgatgagctggaaacagaagacgagagagtggtgttcgaggcaatcctccagtgggtcaaacatgacttagaacccagaaaggtgcatctgcctgaactgctgcgcagcgttcggctcgcactgctgccatcagactgcctgcaggaggccgtgtcctctgaagcattgttgatggccgacgaacggaccaagctgatcatggacgaagcactccgctgcaagactcgtatactacagaacgatggcgtcgttacaagtccttgtgcccgccccagaaaggcggggcacacactgctgatactgggaggacagaccttcatgtgcgataagatctaccaggtcgaccacaaagctaaggagatcataccaaaggccgaccttccatctccgcggaaggagttctcagcatccgctattggctgcaaggtgtatgtgaccggcggccgaggctcagagaatggcgtgtccaaggacgtgtgggtctatgacacggttcatgaggagtggagcaaagcagccccaatgctgattgcaaggtttggacacgggagcgcagaactggaaaattgcctgtacgtcgtaggaggccatacttccctcgcaggcgtgtttccagcaagccccagtgtatctttgaaacaggtagagaagtatgaccctggcgccaataaatggatgatggtggccccactgcgagatggagtgtccaatgcagccgtggtatctgcaaagctgaagctgtttgtattcggcggcacctcgatccatcgcgacatggtctccaaagtgcagtgttatgacccgagtgagaacagatggaccatcaaagccgaatgtcctcagccgtggcgctacaccgctgcagccgttctaggcagccaaattttcattatgggcggagataccgaattcacggccgcaagcgcgtatcgttttgattgcgagacgaatcagtggacaagaatcggagacatgaccgctaagaggatgtcctgtcacgctcttgcctctggaaacaaactttatgtggtaggggggtatttcggaacccaacgttgcaagacactggactgctacgacccaacttccgacacatggaattgcattaccaccgttccatattctctgatcccaactgctttcgtttctacttggaaacatttgccagcgtag

SEQ ID NO: 23734 - DNA, 1311 bp, synthetic construct
  source 1..1311: mol_type = other DNA; note = Synthetic coding sequence
atgatgggcgaggccgccgtggccgccggcccctgccccctgcgggaagactccttcacaagattcagttcccagagcaacgtgtatggcctcgccgggggcgccggtggacgcggagagctcctggctgccaccctgaaagggaaagttttaggctttaggtaccaagacttgaggcaaaagatcagaccggttgccaaggagctacagttcaactatatacccgtggacgcagagatcgtctcaatcgatacctttaataaatcacccccaaagcgcggactagtggtcggcatcacctttatcaaagattccggggacaagggctccccctttctaaacatttattgtgattatgaaccaggttcagagtacaacttggattcgatcgctcagtcttgcttaaatctcgagctgcaattcacaccttttcagttgtgccacgctgaggtgcaggtgggtgatcagctagaaacagtctttctcctatctggtaacgacccagccattcatctatacaaggaaaacgaaggcctgcaccagttcgaggagcagccagtagaaaacctctttcccgaacttacaaatctgacatcaagcgtcctctggttggatgtgcacaattttcccgggacttctaggagacttagcgccctgggctgtcagagtggctatgtgcgcgtggcacacgttgaccagaggtcacgggaggtactacagatgtggtcagttctgcaggatggccctataagcagagtgattgtgttcagcctttccgctgccaaagagaccaaagatcgccccctccaggatgaatacagcgtgctcgtggcaagtatgctggaacctgctgtggtttaccgtgatttgctgaatcggggtctcgaggaccagctgcttctgccaggttccgatcagttcgacagcgtactttgctcactcgtcaccgatgtcgatttggacgggcggccagaagtcctcgtggctacctatggccaggagctcctgtgctacaaatacaggggtcccgaatctggcctccctgaagcgcagcacgggtttcacctgctgtggcaaaggtccttctccagtcctctgctcgcgatggcccatgttgacctgaccggggacggattacaggagctcgcagtggtgtccttgaaaggcgtgcatattctgcaacacagccttatccaagcttccgaacttgtcctgactcgactccgacatcaggtggagcagaggcgaagaaggctacaggggctcgaggacggtgccggggccggaccagcagaaaatgctgcttcatag

SEQ ID NO: 23735 - DNA, 642 bp, synthetic construct
  source 1..642: mol_type = other DNA; note = Synthetic coding sequence
atgctgctgcccttcatccggaccctgcccctgctgtgctacaaccatctgctggtctcgccggatagcgccacgctttcccccccatacagcctcgagaagatgacggacttagtggccgtgtgggatgtggcactgtcagacggagtccataaaattgagtttgaacacggaacaacttcaggtaagagagtcgtgtacgttgatggaaaagaggagatccgtaaggaatggatgtttaagttagtgggaaaggaaacgttttacgtcggcgctgctaagactaaggccacgatcaacatcgacgccatatctggctttgcgtatgagtacacactcgaaatcaatggaaaaagcttaaagaagtatatggaggacaggtctaaaaccacaaacacctgggtgctccacatggacggtgaaaattttcgtatcgtactagagaaggacgcaatggacgtgtggtgtaatggaaagaaactggagacagcaggagaatttgtcgatgatgggacagagactcacttttccatagggaatcacgattgttacataaaagctgtgagttcaggaaaacgcaaagaaggaatcatccatactctcatcgtagataatagggaaatcccagaaatagctagttag

SEQ ID NO: 23736 - DNA, 663 bp, synthetic construct
  source 1..663: mol_type = other DNA; note = Synthetic coding sequence
atgaccagcggcgaggtgaagaccagcctgaagaacgcctacagctccgccaaaaggctctctcccaagatggaggaagagggtgaggaagaagactactgcaccccaggcgcttttgaactcgaacggctgttctggaaaggcagcccgcagtacacccacgtaaatgaagtgtggccaaagctctacataggcgacgaggctacagcactggatcgttatcggctccagaaggccgggtttacccacgtcttaaacgctgcacacggccggtggaacgttgatactggaccggactattatagggatatggacattcagtatcacggtgtggaggccgatgatctgcctacattcgatttatccgtgttcttttatccagccgccgctttcatcgacagagccctctccgacgaccacagcaaaatcctggtgcattgtgttatgggtcggagcagaagcgcgacacttgtgcttgcctatttgatgatccacaaagacatgaccttagtcgatgctatacagcaggtggccaagaatagatgcgtgttgcccaaccggggatttctcaagcaactgagggagttagacaagcagctggtgcaacagcggcgtagaagtcagcgccaggacggcgaagaggaggatggaagggaactatag

SEQ ID NO: 23737 - DNA, 1845 bp, synthetic construct
  source 1..1845: mol_type = other DNA; note = Synthetic coding sequence
atgagccccgccgaccggtgccggagcgccaacaccatcgagcccgctactaccagttcactggcactatttcttctactgcagcgggaccagtcgtcacgaacacgcggtctccctgaagagaaggaggaggtgactatggatacctctgaaaatcgtccagagaacgacgtacctgagcccccaatgcctatcgccgaccaagtcagtaatgatgatcgaccggagggcagtgtggaggatgaggagaagaaggaatcatccctccccaagagcttcaaacgaaagatatcagtggtcagcgcaacaaagggggtccccgccggcaactcagatactgagggaggccagccaggtcggaaacggcggtggggcgcaagcactgccactacccagaaaaaaccctctattagcatcacaacggaaagcttgaagtctcttatccccgacataaagcctctcgctggccaggaggccgtcgtggatctgcacgccgacgacagcagaatcagcgaggatgagacagagcgaaatggagacgatgggactcatgacaaggggttaaagatctgtcgcacagtcacccaagtcgtgcccgccgaagggcaggaaaacgggcagcgcgaagaagaagaagaggagaaggaacccgaggctgaaccacccgtgcccccccaggtttccgtggaggtcgcgctacctccccctgccgaacacgaagttaaaaaagtcacattgggcgacactctcaccagaaggtctatcagtcagcagaaaagtggtgtgtccatcacaatcgatgatcccgttaggaccgctcaggtgccaagcccacctagaggcaagatcagtaatatcgtgcacatatccaacctcgtgcgccctttcaccttaggacagctgaaggagctcctcggacgaactggcaccctcgtggaagaggccttttggatcgataaaatcaagtcccactgctttgtgacttactcgactgtagaggaggcagtggcaacgagaaccgccttacacggcgtcaagtggccgcaatctaatcctaagtttttgtgtgcggactacgcagaacaggatgagttagattaccacagaggcttactcgtagaccgcccaagcgaaacgaagactgaggaacaaggcattccacgcccgctccatcctccccccccaccacccgtgcagcctcctcaacacccgcgagctgaacagcgagagcaggagcgggccgtccgcgagcagtgggcggagcgtgaacgcgaaatggagcgacgggagcggactcggagcgagagggaatgggaccgtgacaaggtgcgggagggaccaaggtcaaggtcaagaagcagggacaggcgccgcaaggaacgagcgaagtccaaggagaaaaagagcgagaagaaggagaaagctcaagaagaaccccccgcaaaacttttggatgatcttttcaggaagaccaaggccgcaccttgtatctactggttaccactcaccgactctcaaatagtccagaaggaggctgagcgcgcagaacgagcaaaggaaagagaaaagcgtaggaaagagcaggaggaggaggaacaaaaagaaagagaaaaagaagctgagagggaacgaaatcgacagttggaacgggagaaaagacgggagcactcccgcgaacgtgaccgcgagcgtgagagggaacgggaaagggataggggggacagggatcgcgaccgggagcgggacagagaaaggggtagggagagggatcggcgggatactaagaggcatagccgttcgcgaagccggtcaactccagtcagggatcgcggtgggagacggtag

SEQ ID NO: 23738 - DNA, 1203 bp, synthetic construct
  source 1..1203: mol_type = other DNA; note = Synthetic coding sequence
atgaagaacgagcccctgacccccggctaccacggcttccccgccagagatagccagggtaatcaggaacccacgacaactccggatgctatggttcagccttttaccactatccctttcccgcctcccccacagaatgggatacccacagagtacggtgtgccccatacgcaagactatgccggacaaacgggggagcacaatctcacactctacggatccacacaggctcacggagaacagtctagcaatagcccaagcactcagaacggcagtctgacaaccgaaggtggcgcccagaccgacggccagcaatcacagacacaaagttcagagaattccgagagcaagagtactcctaagaggcttcacgtgtccaacattccattcagattcagagatcccgacctgcgacagatgtttgggcagttcggaaagatcttggatgttgagatcatctttaatgagagaggctctaaaggcttcggattcgttaccttcgagaattccgcagatgccgaccgggctagggaaaaactccacgggaccgttgtcgaaggacgaaagattgaggtgaataacgcaacagcaagggtgatgacgaacaaaaaaatggtgactccctatgccaacggatggaaactgtctccggtagtgggtgctgtctatggacctgaactgtatgccgcatcttcattccaggccgacgtgtcactgggtaacgacgcggcggtgcccctctctggaaggggaggtattaacacttatattcccctcattatcccaggcttcccatatcccacggccgctactaccgcagctgcctttcgaggggcccacttgcgtggtcgcgggaggacggtttacggggctgtgcgcgctgtcccacctaccgctatcccagcctaccctggcgtcgtataccaagacgggttctatggcgccgacctgtacatcgagtccgccaattgtttcagatcaaaccgcgtagacatgcagcccacggacatgcacagtctgctgcttcagccacagccccccctcctgcaaccgctgcagccactgacagtcactgtgatggcggggtgcactcaaccaacacctactatgcctctgccattgccactggctatggagttagccctctggcgtgtttataccgaagtggctactgccgatctgcccccaacagaggtaacatag

SEQ ID NO: 23739 - DNA, 1545 bp, synthetic construct
  source 1..1545: mol_type = other DNA; note = Synthetic coding sequence
atggacgagggcatggagatcagcagcgagggcaacagcctgatcaaagcagtgcaccagtctcgactgagactgacaagattattgctggaagggggtgcctacattaacgagtctaacgatcgaggcgagacacctctgatgatcgcatgtaaaactaaacacgtagatcaccagagcgtctcaaaggcaaaaatggtcaagtacctcctagagaataatgctgatcctaatattcaggataagtccggtaaaacagcgctaatgcatgcatgcctcgagaaagcagggcctgaggtagtgagcctcctactcaaatccggagcagacttaagtctacaagatcactccagctactcagccctggtgtatgcgatcaactcagaggacactgagacgctgaaagtcctgcttagcgcttgcaaggccaagggaaaggaggttataatcatcacgaccgctaagctgccctgtggaaagcacaccacaaagcaatacctaaatatgcctccggttgacatcgatggatgccattcacccgcaacctgcactacccctagtgaaatcgacataaaaacagcctcatctccactctcccattctagtgaaactgaactgaccctgttcgggttcaaggacctcgagctggccggctccaatgacgatacatgggatccggggtctcctgtcagaaagcctgcactcgccccaaaagggcctaaactgccgcatgcgcccccttgggtcaagtctcccccactcctgatgcaccagaatcgcgtggcttccctgcaggaagagctgcaggacataactccggaagaggagctctcgtataaaaccaatggcctcgccctcagtaagcgttttattacaagacaccaaagtatcgacgtgaaggacacagcgcacctgctgcgcgcgttcgaccaggcaagctccagaaagatgtcctatgacgaaataaactgccagagctacctgtcagagggtaatcagcagtgcatagaggtgcccgtcgatcaagatcccgattcaaaccaaactatttttgctagtactctgcgcagtattgtgcaaaaaaggaatttaggcgccaaccactactccagtgattcacagctgagcgccgggctgacccctcctacctcagaagatgggaaggcgttgattggaaaaaagaaaatccttagtccaagcccatctcagctctcagagtctaaggaattgcttgaaaatattccacccggtccccttagcaggagaaaccatgctgtactggagcgtcgtggatctggggccttcccacttgaccactccgtcacccagactcggcaagggtttctgccacccctgaatgtcaatagtcacccccccatttcggatatcaacgtgaacaacaagatctgttccctcctgtcctgtggccaaaaggtactgatgccaactgtcccaatttttccaaaagaatttaaatccaagaagatgctattacgtcggcagagtcttcagaccgaacagattaagcagttggttaacttctag

SEQ ID NO: 23740 - DNA, 1674 bp, synthetic construct
  source 1..1674: mol_type = other DNA; note = Synthetic coding sequence
atggaccagagccgggtgctgctgtgggtgaaggccgagcccttcatcgtcggagcgctccaagttcctcccccgtccaagttctcgctgcattacttaaggaagattagcacgtatgtgcagattagagcgaccgaaggggcctatccccggctgtattggagcacttggaggcatatagcttgcggaaagcttcagctggctaaagacttggcatggctttacttcgagattttcgattctctgtcgatgaagacacccgaagagcgtttggaatggagcgaggtgttatccaactgcatgtcagaagaagaagtcgagaagcagagaaaccaactgtccgtggataccctgcagtttctcctcttcctgtacatccagcaacttaacaaagtctcattgagaaccagcctcatcggcgaagagtggccgtcccccaggaacaagagccagtcccccgatctcacagagaaatcaaattgtcataacaagaattggaatgactacagccatcaggctttcgtttacgatcacttgtccgacctgttggaactcttacttgacccgaaacaactgaccgccagttttcactctactcattcatctctggtgtcaagggaggcggtggttgcgctgagctttctgatcgagggcacaatttctcgcgcacgaaaaatttaccccttgcacgaactcgctctctggcagccactgcacgctgacagtgggttctcaaagatttctaaaacttttagtttctataaattggagacttggctgcggtcttgccttactggaaacccttttggtacctcagcctgcctgaaatcaggcaagaaactggcctgggcccatcaggtggaaggtacaacaaagcgtgccaagatcgcttgtaacacacatgtggcacctcgcatgcaccgcctggtggtgatgtcgcaggtgtacaagcagaccctggcaaagagctccgacaccctcgcgggcgcccatgtcaagatacatcgctgtaacgaatctttcatttatttgttgtccccattgagatccgtcaccatcgagaaatgtcggaacagcattttcgtgctggggccagttggcaccacccttcacctccattcttgcgataatgtgaaagtaatcgctgtgtgtcaccgcctgtcaattagctccactacaggatgcatattccacgttttgacccctaccaggcccttgatcctcagcggcaatcagactgtaacattcgccccattccacacccactaccccatgctagaagatcacatggcgaggaccggactcgcaaccgtgcccaactactgggacaaccccatggtagtgtgtcgcgagaacagcgacaccagggtgttccaattactgcctccctgcgaattttacgtgtttatcataccttttgaaatggaaggggacaccacagaaattcctggaggcctgccaagtgtgtatcagaaggcccttggccagcgtgaacaaaagatacagatatggcagaaaaccgtaaaagaggcccacctgacgaaggaccagcgcaaacaattccaggtgctggtagaaaacaaattttacgagtggttaataaacacgggtcatcggcagcagctggacagccttgttcctcctgctgccgggagtaaacaggccgccgggtag

SEQ ID NO: 23741 - DNA, 648 bp, synthetic construct
  source 1..648: mol_type = other DNA; note = Synthetic coding sequence
atggtgttccggcggttcgtggaggtgggccgggtggcctacgtgagtttcggacctcacgctggcaagctggtggctattgtcgatgtgatagatcagaaccgagccctggtggatgggccatgcacgcaagtgcgtcgccaggccatgccttttaagtgcatgcagctgaccgactttatcttgaagttcccccattcagcccaccaaaagtacgtccggcaggcctggcagaaagctgatatcaacacaaagtgggcagcgacacgttgggccaaaaagattgaagctcgtgagaggaaagcaaaaatgaccgacttcgataggttcaaggtaatgaaggccaagaagatgcgcaaccgtataatcaagaacgaagtgaaaaaactgcagaaggccgcactcctgaaggcatctccaaagaaggcccccggcacaaaagggaccgctgccgccgccgcagccgctgcagccgcgaaggtcccagctaaaaaaatcaccgcagcatcaaagaaggcacccgctcagaaggtacccgcacaaaaggcaactgggcagaaggccgcccccgcacctaaagcgcagaagggccagaaggccccagcacaaaaagccccagcccccaaggcaagcggcaaaaaggcatag

SEQ ID NO: 23742 - DNA, 888 bp, synthetic construct
  source 1..888: mol_type = other DNA; note = Synthetic coding sequence
atggagctgatccaggacaccagccggccccccctggagtacgtgaaaggggtgccccttataaaatacttcgcagaggctctgggtcccctgcagtcctttcaggctcggcctgatgatttgctaattaacacctaccctaaaagtggaaccacatgggtgtcccagattctggatatgatttatcaggggggcgatctggagaagtgtaaccgcgcccccatatacgtgcgcgtacctttcctggaggtgaatgatcccggcgaaccaagcgggctggaaaccctgaaagacactccacctccccggctaattaagagtcatttgccgctggcactcttgccccaaaccctactggaccaaaaggtgaaagtagtttacgttgcccggaacccgaaggatgttgcagtgtcgtactaccacttccacagaatggagaaggctcatcctgagccaggtacttgggatagttttctggagaagtttatggctggagaagtaagctatgggagctggtaccagcacgtacaggagtggtgggagctgagcaggacacatcctgtgctatatctgttttatgaggatatgaaagagaatccaaaacgcgagattcaaaagattctggagtttgtgggcagaagcctgcctgaggaaaccatggacttcatggtccagcacaccagcttcaaggagatgaagaaaaaccccatgaccaactacacaactgtgcctcaggagcttatggaccactctatcagcccatttatgcgtaaaggaatggccggggattggaagacaacgttcacagttgctcagaatgaacgattcgatgcagactatgcagaaaaaatggccggctgttcactgtcctttcggagtgagctctag

SEQ ID NO: 23743 - DNA, 1368 bp, synthetic construct
  source 1..1368: mol_type = other DNA; note = Synthetic coding sequence
atgagcagcctgggcgccagcttcgtgcagatcaagttcgacgacctgcagttcttcgagaattgtggtggagggtcatttggttctgtctatagagcaaagtggatttcccaagacaaagaagtcgctgtgaaaaagttattgaagatcgagaaggaagcagagattctgagtgtgctgagccatcggaatataatccaattctacggtgtgattttggaacccccaaactacgggattgtgactgaatacgctagtctgggaagcttgtacgactatattaactctaatcgaagtgaggaaatggacatggatcatattatgacatgggccacagatgttgccaagggaatgcattaccttcacatggaagcacctgttaaggtgatccaccgtgaccttaagagtcgtaatgtggtgatcgccgccgacggggtcctaaaaatctgtgactttggcgctagccgcttccataaccacactacccacatgagtctggtgggcaccttcccttggatggctcctgaagttatacagtccttgcccgtgagcgaaacttgtgacacatacagttacggtgtggtgctctgggagatgctgactcgcgaggtcccctttaaggggctggagggccttcaagtcgcatggctggtcgtggagaagaacgagcgactgactatccctagctcatgtccacgctcattcgctgagctgcttcaccaatgttgggaagctgatgcaaaaaaacgaccctcttttaagcaaatcatatcaatattggagagcatgtcaaatgacacgagcctgcccgataaatgcaacagtttcctgcacaacaaggccgaatggcggtgtgaaatcgaagctaccctagagcgactaaagaagttagagagagacctgtcctttaaggagcaagagctcaaagagcgcgagcgaagactcaagatgtgggagcagaagctcactgaacagagtaatacaccattgctgttgccactggctgccagaatgagcgaagagagttattttgagtccaagacagaagagtcaaattctgctgaaatgagctgtcaaatcactgcaacctctaatggcgagggacacggcatgaatccatcccttcaggccatgatgttgatgggctttggcgacatcttcagcatgaacaaggctggcgcagttatgcactcgggcatgcagatcaacatgcaggcaaaacaaaactcttccaaaacaaccagcaagcgccggggaaagaaagttaacatggcactgggcttttctgactttgatctgagcgagggcgatgatgacgacgatgatgacggggaagaggaagataatgatatggacaacagtgagtag

SEQ ID NO: 23744 - DNA, 423 bp, synthetic construct
  source 1..423: mol_type = other DNA; note = Synthetic coding sequence
atgcggttccggttctgcggcgacctggactgccccgactgggtgctggcagagataagcaccctcgcaaagatgtcctctgtaaagctccgacttctgtgtagccaagtgttgaaagaactgcttggccaaggcattgactatgagaagattctgaagcttacagccgacgccaagttcgaatctggcgacgttaaggccacagtggcagtccttagtttcatactgagcagcgccgctaaacatagcgttgacggcgagtcactcagcagcgagctgcagcagctcggcctgcccaaagaacacgcggcctcgctatgcaggtgttacgaggaaaaacaaagccctctccagaagcatctgcgcgtttgttctctgcggaaactgaagcaggcccaaaccctgatgagcagtctggggtag

SEQ ID NO: 23745 - DNA, 573 bp, synthetic construct
  source 1..573: mol_type = other DNA; note = Synthetic coding sequence
atgaccgccagcgccagcagcttcagcagcagccagggcgtgcagcaaccctccatatacagcttcagccagatcactcggtccctgttcctgtccaatggggtcgctgccaatgacaaactcctgcttagcagtaatcgtatcactgctatcgtcaacgcctctgtcgaagttgtcaacgtatttttcgaggggatccagtacattaaggtccccgtgactgatgcacgagactctcgcctgtatgacttcttcgaccccatcgcagaccttatccatacaatcgacatgcgacaaggaaggaccctgttgcactgtatggcaggagtgtccagatcagcttccttgtgtcttgcttatctgatgaaatatcacagcatgtctttactggacgcccacacttggactaagtccagacgacctatcatccgccccaataatggcttttgggagcaactcataaattatgaattcaaattatttaacaataacacagtccggatgattaatagtcctgtgggaaacattcccgacatatatgagaaagacctgcggatgatgataagcatgtag

SEQ ID NO: 23746 - DNA, 3576 bp, synthetic construct
  source 1..3576: mol_type = other DNA; note = Synthetic coding sequence
atgctgcggaagctgaccatcgagcagatcaacgactggttcaccatcggaaaaactgtgacaaatgtggaactgcttggagcccctcccgccttccccgcaggggctgcccgggaggaggtgcagagacaggacgtcgctccaggtgcaggccccgcagcgcaggctcctgcacttgcacaggcccccgccaggcctgcggccgcgttcgagcgatccctgtcccagcggtcatcagaggtggaatatattaacaagtacaggcagttagaggcgcaggaacttgatgtatgcaggtccgtgcagccgacctccggccctggccctagaccctccctggcaaagctgtcaagtgtgacatgtattccgggtactacgtataagtatcctgacctgccaatcagcaggtataaggaagaagtcgtgtccctgatagaatctaatagcgtcgttatcatccacggcgcgacggggtcgggcaagtccactcagctgccacagtacattctggatcactatgtgcagcgaagcgcttactgttcaatcgtggtgacccagccacgaaagatcggcgccagctccatcgcaaggtggattagtaaggagcgcgcctggacactggggggtgtggttggttatcaagtgggtctggagaagattgccacagaggacactcggttgatctacatgaccaccggagttctgctgcaaaaaatcgtgtccgcaaagagcttaatggaatttacacatataatcatcgacgaggtgcatgaacgcactgaagaaatggacttcctgttactggtcgtcagaaaactgctgagaaccaattcacgctttgtcaaggtcgtgctcatgtctgccacgatcagttgtaaggaattcgcggactactttgcggtacccgtgcaaaacaagatgaacccagcgtatattttcgaagtagaagggaagccacacagtgtcgaagagtactacctcaatgatctcgagcatatccatcattccaagctcagcccacacctgttagaagaacccgtgattaccaaggatatctatgaagtagccgtatctctgatccagatgttcgacgatctggatatgaaagaaagcggaaacaaggcatggtctggcgcacaattcgtcctggaacgctcctcggtccttgtctttctcccaggccttggtgagattaactatatgcacgagttgctgacctctctggtccataagaggctgcaggtgtaccctctgcacagtagcgtggcgttagaagagcagaataacgtgttcctgagtccagtgcccgggtatagaaagatcattctaagcacaaacatcgctgaatcttcagtgacagtgcccgatgttaagtatgtaattgacttttgtctgacacggacgctcgtgtgtgacgaggataccaactaccaatccttacgactgagctgggcaagtaagacatcttgcaaccagcgaaagggcagagccggccgcgtcagccgggggtactgttacaggctcgttcacaaagacttttgggacaactcgattcctgaccatgtcgttccggaaatgcttcgctgcccactcggctctacaatcctgaaggttaaactgttagatatgggagaaccgagagctctcctcgcaaccgctctctcgccacccggactgagcgatattgaaaggactattctgctgttaaaagaagtgggcgctttggctgtctccgggcagagagaggacgagaaccctcatgacggtgagctgacttttttgggccgcgtgctggcacagctgcctgtgaatcagcagttgggcaaactaatagtactgggacacgttttcggttgcctggacgaatgcttaatcatcgccgccgcattgagcttaaagaacttcttcgctatgcccttccgccaacacttggatggctataggaacaaggttaactttagtggctctagcaaatctgattgtatcgcgttagtggaggcgttcaagacgtggaaagcctgtcggcagaccggcgagctaaggtaccccaaggacgagctcaattggggcagattgaactacattcagatcaagcgtatacgggaggtggctgaactgtacgaggagctgaaaacaagaatttcccagttcaatatgcatgttgacagcagacggccagtcatggaccaggaatatatctataaacagcgcttcatcctgcaggttgtactcgcaggggccttctatcctaattacttcacatttggtcagcccgacgaagaaatggctgtgagggagcttgccggcaaagatccaaaaactactgttgtgctgaagcatatccctccttatggctttctgtactataagcagttgcagagtctgtttagacaatgtggtcaggtgaaatccattgtgttcgatggagctaaggcgtttgtggagttctctagaaatccaactgaacggttcaaaaccctgccagccgtatatatggctattaaaatgagccagctgaaggtgagcttggaactaagcgtccactcagccgaggaaattgagggaaaggtgcaaggcatgaatgtgagcaaactgcgcaatacccgggtcaacgtggatttccaaaagcagaccgtggaccccatgcaggtcagtttcaacacttcagaccgttctcagactgttactgatctgcttctgacgatcgatgtaacagaagtggtggaggtgggacacttttggggttatagaatagatgagaacaactctgagattctcaaaaaactcactgccgaaattaaccaactcactctggtccctctccccacccacccgcacccagacctcgtctgtctggccccctttgcggacttcgacaaacagaggtactttcgagcccaggtgctgtacgtttccggtaatagtgccgaagttttctttgtggattacggcaacaagtcgcacgtggatctccacctcctgatggagatcccttgccagttcctggaattaccctttcaagcgctcgagtttaaaatctgcaaaatgcggccatctgccaagtccctggtttgcgggaaacattggtccgatggagccagccagtggttcgcttctctggtgtcaggatgtacgctattggtcaaggtattttctgtggtacactcggtgcttcacgtagatgtatatcagtacagcggtgttcaggatgctatcaatatcagagacgttttgattcaacaaggctacgctgaactgacagaggagtcttacgagtctaaggtgaacattctacgcgccgcaataaataaattagtttgtgatggcccaaatggatgtaaatgcctcggacctgagcgggtggcccagctgcaggacatcgccaggcagaagttgctgggattattttgccagtctaagcctcgcgagaagattgtgcctaaatggcacgaaaagccatatgaatggaaccaggtcgatcccaaactggtcatggaacaagctgatagggaaagcagtcgcggcaagaacacttttctttaccagctgcacaagctggttgtcctaggaacctag

SEQ ID NO: 23747 - DNA, 906 bp, synthetic construct
  source 1..906: mol_type = other DNA; note = Synthetic coding sequence
atgacccggcacggcaagaactgcaccgccggcgccgtgtacacctatcacgaaaagaaaaaagataccgctgccagcgggtacgggacccagaacattagactctcgagggatgcggtgaaagattttgactgttgctgtctgtccttgcaaccatgccacgaccctgtagtgacaccggatggatatctatatgagagagaggcaatcctggagtatattttgcaccagaagaaggagatcgcccgccagatgaaagcttatgagaagcagcgaggcactcgacgagaggaacagaaggaactgcaacgcgccgcatcacaggatcatgttaggggcttcctggagaaggaatcagctatcgtctctagaccacttaacccttttacagccaaggccctgagcggtacgtccccggacgacgtgcagcctggaccaagcgtggggccgccgtccaaggataaggataaggtgttgcctagtttttggataccctctctcaccccagaagccaaggcaaccaagcttgaaaagccttcaaggactgtgacctgcccgatgtccggaaaacccctgcggatgtctgacctaacacctgtccacttcacgccactggattcctccgtggatagggtgggtctgatcacacggagcgagcgatatgtttgcgcagtgaccagagactctctctccaatgctacaccatgtgccgtcctcaggccaagcggcgctgtcgtaaccctggagtgcgtagagaaactcatacgcaaggatatggttgacccagttaccggtgataagttaacagatcgcgacatcattgttctgcagaggggaggtactgggttcgcaggatcgggagtcaaacttcaggctgagaagagccgccccgtgatgcaggcatag

SEQ ID NO: 23748 - DNA, 1509 bp, synthetic construct
  source 1..1509: mol_type = other DNA; note = Synthetic coding sequence
atgcagagctgcgagagcagcggcgacagcgccgacgaccccctgtcacggggtctccgtagacggggccagccaagagtcgtggtgattggagcgggattggcaggacttgccgctgccaaggcattgcttgaacagggattcacggacgtcactgtgttagaggcttctagccatatcgggggaagggttcagtcggttaagcttgggcatgcaaccttcgaactgggcgcaacatggatacatggatcacacggcaaccctatataccacttagctgaggcgaatgggctgctggaagagaccacagatggtgaacgaagtgtaggccggatcagtctgtactcaaaaaacggagttgcctgctatctaaccaaccacggccgcagaattccgaaagatgttgtggaggagttttcagatctttacaatgaagtgtataaccttacccaggagttttttcgccatgataaaccggtgaacgcagagtctcagaacagtgtgggggtattcacacgtgaggaggtccggaataggatcaggaacgatcctgacgacccggaagctacgaagcgcctaaaacttgcgatgatccagcagtatttgaaggtggaatcttgcgaaagcagcagccactccatggatgaagtatctctttccgccttcggtgagtggaccgaaattcccggggctcatcatataatcccctccggatttatgcgagtagtggaattgctggcagaaggaattccagcccatgtgatccagttaggaaagcccgttcggtgcattcactgggatcaggcttcagcacgcccgcgaggtcctgagatcgaaccacggggagtcctgaagagacaatacacaagcttttttcgcccaggactgcctaccgaaaaagtcgccgcaatccatcgtctgggtattgggacaaccgacaaaatttttctggagtttgaggagcccttttggggtcccgagtgtaactctctccagtttgtgtgggaagacgaggctgaaagtcacaccttgacatacccccccgaactatggtaccgaaaaatctgcggtttcgatgtactttacccaccagagcgctacggccatgttctctcaggatggatctgcggtgaggaagccctggtgatggaaaaatgtgacgatgaggcggtggccgagatttgtaccgagatgctcaggcagttcacaggcaatccaaatatacccaagcctcggcggattttgcgctccgcatgggggtctaatccctactttcggggatcttactcctacactcaggttgggagttccggcgccgacgtggagaaactggccaaacctttgccttataccgagagttccaagaccgcccctatgcaagtgcttttctccggcgaagccactcatagaaagtactatagcacaactcatggggcattgctgtcaggtcagagagaagctgctagactgatcgaaatgtaccgtgatctgtttcagcaaggaacctag

SEQ ID NO: 23749 - DNA, 579 bp, synthetic construct
  source 1..579: mol_type = other DNA; note = Synthetic coding sequence
atgggcaccttcgacctgtggaccgactacctgggcctggcccacttggtgcgtgctctgagcggtaaggaaggacccgagacaagactttctccccagccagaacctgaacccatgcttgaacctgtatctgccctcgagccaatgccggcgcctgagtctgtaccagtccctgggccaaaagatcagaaacggtccctcgaatcgtctccggcccccgagcgcttgtgtagtttctgcaaacacaatggcgaatctagagcaatctaccaatctcacgtgctgaaggatgaggctgggagagttctatgcccgatcctacgcgactacgtgtgcccacagtgtggcgccacccgagaacgagcgcacaccaggcgcttttgccctttaactggacaagggtacactagtgtttacagtcataccacccgtaatagcgccgggaagaaacttgtccggcccgacaaggcaaagactcaggacactggtcacagaagggggggtggcgggggcgcgggcttcagaggtgctggaaagagcgagccatctccctcctgttcacctagcatgtcgacttag

SEQ ID NO: 23750 - DNA, 2568 bp, synthetic construct
  source 1..2568: mol_type = other DNA; note = Synthetic coding sequence
atggccgtggaggacagcaccctgcaggtggtggtgcgggtgcggcctcccacaccacgcgaactagatagtcagcgtaggcccgtcgtacaagtcgtcgacgagcgggtgctggtgttcaaccccgaggagccggacggcggattccccggactgaagtggggcgggacgcatgatggacccaagaaaaagggaaaggatctgaccttcgtttttgacagggtgtttggcgaggcagctacccaacaggacgtgtttcagcatacaacccactccgttttggactccttccttcaggggtacaattgctccgtttttgcctacggcgctacaggagccggaaaaacgcataccatgctcggtcgcgagggagacccaggaatcatgtacctgactactgtcgagttgtatcgccggctggaggcacggcagcaggagaagcatttcgaagtattaatcagttaccaagaggtctacaacgaacagatccatgatctgctggagcccaaaggacccttggcaatacgggaagatcctgacaagggggttgtggtacagggtctttcatttcatcagccagcctcagcagagcaactacttgagatccttactcgtggcaaccggaatagaacccaacatcccacggatgcgaatgccacctcgagccgctcccacgcaatcttccagatattcgtgaagcagcaagatagggtgcccggcctgacacaagctgtccaagttgcgaagatgtccctcatcgacctggctggatcagaacgggccagtagtactcatgccaagggcgagcgtctgagggagggagctaatatcaatagatccctcctcgcgttaataaacgtcctgaacgccctggctgacgcgaagggtagaaagacacacgtgccctatcgcgactccaagttaacacggttactgaaagatagcctgggcggaaactgcaggactgttatgattgccgctatctctccctcctcgctgacatatgaagacacttacaacacgctcaagtatgccgatagggctaaggaaatcaggttgtcactgaagagtaatgtcacgtccctggattgtcatatcagccagtacgcaaccatctgtcagcaactgcaggcagaagttgcagcactgcggaagaagcttcaggtttatgaaggcggcggtcagccccctccgcaggacctccccggtagccctaaatcaggcccccccccagaacatcttccatcctcccccctccccccgcacccaccttcgcagccatgcacccccgagctcccagccggaccacgcgcactgcaggaggagtccctagggatggaagcgcaggtggaacgcgccatggagggcaatagcagtgaccaagagcaatcccccgaagacgaggacgagggacctgccgaagaggtgcctacacaaatgccggaacaaaatcctactcacgcactcccagagtctccacgactcactcttcagcccaagcctgtagtggggcacttctctgccagggaactggatggcgatagaagcaagcagttggccctaaaagtgctgtgcgtggcccagagacagtacagtttgttacaggccgctaatctgttaacacctgacatgataacggagtttgagactcttcagcaactcgtacaggaggagaagatcgaacccggcgcagaagccttaagaacctctggactggccaggggcgcccctctcgcccaggagctttgctccgaaagcaagccacccggttatactgggccagtcacgagaacgatggcacgccggctgagtgggccgttacatacgctgggtatccctccaggaccaaactgtacgcccgctcagggctcaagatggccgatggaaaagaaacggaggcgcccctcagctctcgaagcagactctcctatggcgcctaaacgtggtactaagagacaaaggcagtcatttctgccttgtctacgccgcgggtctctgcctgatacacagccttcacaaggcccttccactcccaagggagagcgagcctcgagcccctgccactcaccaagggtctgtcctgccactgtgataaagtcgagggtacctctgggccccagcgccatgcagaactgtagtaccccccttgctctgcccaccagagacttaaacgccacatttgacctgtcggaagagcctccatctaaacccagcttccatgaatgtattgggtgggacaagattccacaggagctgtcaagactggatcagccctttataccaagagcacccgttccactgtttacaatgaaaggccccaagccaactagctccctaccaggcacctccgcttgcaagaaaaaaagagttgcctcaagttctgtgtcacacggccgttcgcgaatcgcccggctcccgtcttcaactttaaaacgccccgcgggtcccctcgtcttaccagaactgcctttgtcacctctctgcccttctaatcgccgaaacggtaaagatctcatccgcgtgggaagggccctgtctgccggcaatggcgtgaccaaagtgagctag

SEQ ID NO: 23751 - DNA, 444 bp, synthetic construct
  source 1..444: mol_type = other DNA; note = Synthetic coding sequence
atgtggaagttccccggcggcctgagcgagcccgaggaggacatcggtgacaccgcagtccgtgaagtgttcgaggagacaggtattaaaagcgaattccgctccgtactgtctattcgccagcagcacacaaaccccggggccttcggtaagtctgatatgtacatcatttgtaggctaaagccatatagttttactatcaacttctgccaagaggaatgcctgcgatgcgaatggatggatctgaacgatctggccaagacggagaatactaccccaatcacttccagagtcgcaagactactcctttatgggtacagagaaggctttgataaaattgacttaacagttgaagaactccccgcggtctacaccggcctattctataagctgtatcacaaagagctccccgagaattataaaactatgaagggcatcgactag

SEQ ID NO: 23752 - DNA, 3327 bp, synthetic construct
  source 1..3327: mol_type = other DNA; note = Synthetic coding sequence
atggccctgcggcccggcgccggcagcggcggcggcggcgccgccggggccggcgccgggagcgccggcggcgggggtttcatgttccccgttgctggcggtatccgacccccccaggccgggctgatgcccatgcagcaacagggcttccccatggtgtctgtgatgcagcccaatatgcaggggatcatggggatgaattattctagtcagatgagccagggacccatagcaatgcaggcgggaatccccatgggacccatgcctgcagctggaatgccatacttgggccaagcacccttcctgggtatgcggcctccagggccccagtatacacctgatatgcagaaacagtttgccgaagagcagcaaaaaaggttcgaacagcagcaaaaactcctggaggaggaacggaaacgaaggcagtttgaagaacagaaacagaagctgaggttactcagttctgttaaacccaaaacgggagaaaagtccagagatgatgctctggaggctatcaagggaaacctggatggcttcagtcgtgacgcaaagatgcacccgacacctgcttcgcaccctaagaagcccggtgtgggtgtgtttcccagccaagatcccgcacaaccacgcatgcccccttggatttacaatgagtcccttgtgccggacgcgtacaagaaaatcctggagaccactatgacccctactggtattgacacagccaagctttaccctatcctgatgtcaagcggtctgcctcgtgagaccctgggacagatctgggctctcgcgaaccggacaacgccaggaaagttgacgaaagaagagctgtatacagtcctggctatgattgctgtaactcaagtggtgaagccggaggaagacgattttcaggattttcaggacgcctctaagtctggctcattggatgattctttctctgactttcaggaattacctgcttcctccaaaacttccaacagccagcatgggaactccgctcccagccttctcatgcccctccccggcacgaaagccttacccagcatggataaatacgcggtctttaaaggcatcgctgccgacaagtcttccgaaaataccgtgccaccgggggacccaggcgacaagtactccgcgtttcgcgagctggagcagacagcagaaaacaagcccctcggggaatcattcgcggagttccgctctgccggaacagatgatggttttaccgatttcaaaaccgccgactccgtgtctccactggagccaccgaccaaagacaaaacatttccaccttctttcccctctgggaccatacagcagaagcaacaaacacaggttaagaatcctctgaatctagcagacctggatatgttttcatccgtaaactgctctagtgagaagccgctgtctttctcggctgtgttcagcacttccaagagtgtgtccactcctcaatctacaggctctgctgccacaatgaccgcactggctgctactaagacctcatctctagccgacgatttcggcgagttttctctctttggcgaatactccggccttgcaccagtgggagaacaggatgactttgctgacttcatggccttttccaatagcagcattagcagcgagcagaagcctgatgacaaatacgacgctctgaaggaggaggccagtccggtcccgttgaccagtaacgtcgggagtacagttaagggggggcagaattctactgccgctagtacgaaatatgacgtgtttcggcagctgagccttgagggaagcggtttaggtgtagaagatcttaaagacaacaccccttccggcaaaagtgacgacgactttgccgactttcactcctcgaaattttcctccatcaattctgataaatccttaggtgaaaaggccgtcgcgttccgtcatacaaaggaagacagcgccagcgtgaaaagcctggacctgccatctatcggaggctcatctgtgggcaaggaagatagtgaggacgccctcagtgtgcagtttgacatgaaattggcagacgtgggcggggatctgaaacacgtgatgagcgactcgtccttggacttaccaacagtgtccggtcagcatccacctgccgctgctggatctggcagcccttctgcaacatcaatactgcagaagaaagagacttcattcggctcttcagaaaatattactatgacttcccttagcaaggtcacgacattcgtctccgaggatgctttgcctgagactacttttcctgctctggcctccttcaaggacacaattccccaaacctccgaacagaaggagtatgagaaccgagattataaggatttcacaaagcaggacttacccacggcggaaagaagtcaggaagccacttgccctagccctgcttcatccggggctagtcaagaaaccccaaacgagtgttcagacgacttcggcgagtttcagtccgaaaagcccaaaatttcgaagtttgatttcttggtggccacctcccaaagcaaaatgaagagtagcgaagagatgatcaagagtgagctggccacctttgatctgagcgtgcaggggtctcacaaaagatccttgtctctgggggacaaagaaatcagcaggtctagcccatccccagcgttggaacaaccgtttcgagacagatcaaataccttaaatgaaaagccggcattaccagtaatccgggataagtacaaggaccttactggcgaggtagaggagaatgagaggtatgcctacgaatggcagagatgtctaggctcagccttgaatgtcatcaagaaagccaacgacacgctaaacggaatttcttcttcctcggtttgtaccgaagtaattcagagcgctcaagggatggaatacctgttgggtgtcgtggaagtgtaccgcgtgactaaacgagtcgagttaggcataaaagccacagcggtctgcagcgagaagctccagcagcttctgaaagatattgataaggtctggaacaaccttattggctttatgtcattagcaactctgacccccgacgagaattccctggacttctcctcttgcatgctcaggcctgggattaagaacgctcaggagctggcctgcggggtgtgcttgctgaacgtcgattccagaagtcgcaaggaagaaaaaccagccgaagagcaccccaagaaggcattcaattccgagactgacagcttcaaactagcatacggaggacaccagtaccatgcaagctgcgcgaatttctggattaactgtgtggaaccaaagcctcccgggctggttctgcctgacctactttag

SEQ ID NO: 23753 - DNA, 1257 bp, synthetic construct
  source 1..1257: mol_type = other DNA; note = Synthetic coding sequence
atggagacccacatcagctgcctgttccccgagctgctggccatgatttttgggtatttagacgtgcgagacaaggggagggccgcccaagtgtgcactgcatggagagacgctgcgtaccacaagagtgtatggcggggggtggaggccaagcttcacctgcggcgggctaatcctagcctattcccatcccttcaagcacgcggcatacgccgtgtccagatactttccctccggcgatccctgtcctacgtaatccaaggaatggctaacatcgaatctctgaacttgtccggatgttataatttgactgacaacggccttggccatgcattcgttcaggaaattgggtcgttaagggctctaaatttgtctctgtgtaaacaaatcaccgacagctccctgggaaggatcgctcaatacctgaaaggcctggaggtcctggagttgggaggttgttccaacatcactaacacaggtctgttactgatcgcctggggcttgcaacgacttaagagtctgaatctgaggagctgtaggcacttatctgacgtcggcattgggcatttggcggggatgacgagaagcgccgccgagggatgtttgggcttggaacagctcaccttgcaggactgccagaagctcacagacctgtcgctgaaacatataagcaggggcctcaccgggctcagattgctgaatctgtcattctgcggcggaatcagcgacgccggtttactccacttgtcacacatgggaagcttgaggagtttaaaccttcgctcctgtgacaatatttcagatactgggataatgcatctggccatggggagcttgcgtctgtctgggctcgatgtgagcttttgtgataaggtgggagaccaaagtctcgcctacatcgcacagggattggacggtctaaaatctttaagcctgtgttcatgccatattagtgatgacgggattaacaggatggtaagacaaatgcatggtcttcggacactgaatatagggcagtgcgtccgaattactgataaaggactagaattgatcgcagaacatctaagccagttgaccggaatcgacttgtacgggtgcacacggatcaccaaacgcggtttggaaagaattactcagctgccatgcctcaaggttctgaatctcggcttgtggcagatgacagactccgagaaggaagccagaggcgacttctcgcccctattcactgtacgcaccaggggaagttcacggcgctag

SEQ ID NO: 23754 - DNA, 1371 bp, synthetic construct
  source 1..1371: mol_type = other DNA; note = Synthetic coding sequence
atggccgccgccctgaagtgcctgctgaccctgggccggtggtgccctgggctgggagtcgctccccaggcccgcgctctcgctgccctggttcctggcgttacacaagttgataataaatccggtttcctacagaaaagaccacataggcagcatccaggcattctgaaactacctcacgtcagacttccacaggctctcgcaaacggggcgcagttgctcctgctgggctctgcaggacctacgatggagaatcaggtacaaacactcacttcgtacctctggtctcggcatctgcccgtcgaaccggaagagctacagcgccgcgccaggcatctggaaaaaaagttcctcgaaaatccagacttaagtcagacagaggagaagctaaggggtgctgtactgcacgcattaagaaaaaccacctatcactggcaggaactttcttacaccgaggggctgtcgctggtgtacatggcagcaaggttagacggcggatttgctgccgttagccgggcttttcacgaaattagggcaagaaaccctgcttttcagccccagactcttatggattttggatccggaaccgggtcagtaacgtgggccgcacacagtatctgggggcagtctttgcgggaatatatgtgcgtagataggtccgcggctatgcttgtgcttgccgaaaagctgctgaagggcgggtccgaaagtggggaaccttatatcccaggagttttctttcggcagtttttgccggtgtcccccaaagtgcagtttgacgtggtggtttctgcatttagtctttctgaattgccatctaaagcggatcgcaccgaagtcgtgcagaccttgtggagaaagaccggccactttctggtcttggttgagaatgggactaaagccggtcactccctcttgatggatgcgagagacctggttttgaagggaaaagaaaagtccccactggaccctcgcccaggattcgtgtttgctccctgtccccacgagctgccttgcccacagctaacaaacttagcttgttctttctctcaggcctaccaccctataccattcagctggaataaaaaacccaaagaggaaaagttcagtatggtgatattagcacggggtagcccggaggaagctcaccgttggcctcggataacccagccggtgctgaaaagaccgagacatgtgcactgtcacctctgttgtcccgatggccacatgcagcacgcagtccttaccgctcggcggcatggcagagatctctaccgctgtgcccgcgtctcgtcttggggtgacctgctgcccgttttgacacctagcgcctttccaccatcgactgcccaggatccttcggagtcgtag

SEQ ID NO: 23755 - DNA, 756 bp, synthetic construct
  source 1..756: mol_type = other DNA; note = Synthetic coding sequence
atggacatgaagcggcggatccacctggagctgcggaaccggaccccagctgctgttcgagagttggtcctggataactgcaagagcaacgacggtaaaattgaggggctgacggccgagttcgtcaatctggaatttcttagcttaatcaacgttggtctgatttccgtctccaacttacctaaacttccaaaacttaagaagttagagctcagcgaaaatcgtatttttgggggtctggatatgctggccgagaaattaccgaaccttactcacctgaatctttcgggcaataaactgaaggatatttcaactctcgagcctctcaaaaaattggaatgcctgaaatctcttgacctgttcaactgcgaagtgacgaatctaaacgattacagggagtccgtcttcaagttgttaccgcagctcacatacctagacggatacgaccgggaggatcaggaggcccctgattctgacgcagaggtggacggagtcgacgaagaggaagaggacgaagagggcgaagatgaggaagatgaggatgacgaggacggcgaggaagaggaattcgacgaggaagacgatgaggatgaagacgtggagggggacgaggatgatgatgaagtttctgaagaagaggaagaattcggattagacgaagaggacgaggacgaggatgaagacgaagaggaggaagaaggaggcaagggggagaaaaggaaacgagaaaccgatgacgagggtgaagatgactag

SEQ ID NO: 23756 - DNA, 510 bp, synthetic construct
  source 1..510: mol_type = other DNA; note = Synthetic coding sequence
atgagcgccccccccgccctgcagatccgggaggccaacgcccacctagcggccgtccaccgccgcgccgctgagctggaagctagactggatgcggcggaacgaacagtgcacgcgcaggcggagcggctggcgctacacgaccaacagttaagagcagcactcgatgagcttgggagagcgaaggatagggagattgctacactgcaagaacagcttatgacatcggaggccaccgttcactctctgcaggcgacagtacaccagagggacgagctcatccgtcagctgcaaccgcgggccgaactgcttcaggacatttgtagacgccgcccaccattggccggcctactcgacgctctggccgaggcagaacgcttaggacccctgccggctagtgatcctggtcatccccctccaggcgggcccggacctcccctggataactcgacaggtgaggaggcggatcgcgatcacttgcagcctgccgtctttgggacaactgtgtag

SEQ ID NO: 23757 - DNA, 2079 bp, synthetic construct
  source 1..2079: mol_type = other DNA; note = Synthetic coding sequence
atgaagatcttctgcagccgggccaaccccaccaccggcagcgtggagtggctggaagaggatgagcactacgactaccaccaggagatcgctaggagttcctacgccgacatgctacatgataaagatcggaacgtcaaatactatcagggcatcagggccgcggtgtctcgcgtgaaggaccgcggacaaaaggctctcgtgctggacatagggactgggaccggcctgctgagcatgatggcagttacagccggtgctgacttttgctatgcaatcgaggtgttcaagcccatggcagatgcagccgtgaagatcgtcgaaaagaacgggtttagcgacaagatcaaagtgattaataagcattctactgaggtcacagtgggccctgagggcgatatgccctgtcgtgcaaacatcttggttactgagctatttgacaccgagcttattggcgaaggcgccttgccaagctacgagcatgcacatcgacatctggtcgaagagaattgtgaagctgtcccacatagggcgacagtctacgcgcagctggttgaatcaggaaggatgtggtcgtggaacaagctgttcccgattcacgtccagacaagtctgggcgaacaggtgattgtgccacccgtcgatgtcgagagctgcccgggagctccgtctgtgtgcgatatacaactgaaccaggtgtccccagcagattttacagtactgagcgacgtgctaccaatgttctccatcgactttagcaaacaggtctcctcctccgccgcttgtcattccaggcgatttgaacctcttacaagcgggagagcacaggtagtcctgtcgtggtgggatattgagatggaccctgagggaaaaatcaagtgtactatggctccattctgggctcactcagaccccgaagagatgcaatggcgcgatcactggatgcagtgcgtctactttctgcctcaggaagaacccgtggtgcagggatcggcactgtatctcgtggcccaccacgatgactattgtgtgtggtatagtctacagcggacatctccagagaagaatgaaagagttcgccagatgcggcccgtctgtgactgccaagcccatttactgtggaaccggcctcgatttggggagatcaacgatcaggataggaccgatcgatatgttcaggccctgcggacagtccttaagcccgacagtgtgtgcctttgcgtgtccgacggaagcttgttgtctgtccttgcgcaccatttaggcgtcgaacaggtgtttaccgtcgagagctcagccgcttcccacaaactgctccgcaaaattttcaaagcaaatcatctggaagacaaaattaatattattgagaagagacctgagctcctgacaaacgaggacctgcaaggccgcaaggtaagtctcctgctgggggaacccttcttcaccacctcactgttaccctggcacaatctctacttctggtatgtgcggaccgccgttgatcagcacctcggcccgggcgccatggtgatgccccaagccgcaagcctgcatgctgtggtggtggaattcagggacttgtggcgcatccggtcaccatgtggagactgtgaaggatttgacgttcatatcatggacgatatgatcaaacgggccctggatttcagagagagtagagaggcagagccccacccgctctgggagtacccctgtcgtagcctctctgagccttggcagattttgaccttcgacttccaacagccagtccctttacaacccctttgcgccgaaggcacagtggagctccggcgtcctggtcagagccacgccgccgtgctgtggatggaatatcatctgactccagagtgcactctgtccaccgggctactcgaacccgcagaccccgaaggcgggtgttgctggaacccacactgcaaacaagctgtctatttcttttctccggcgcctgacccacgggccctgcttggagggcctcggactgtaagttatgccgtggaattccaccccgatactggcgacattattatggagtttaggcacgccgacacacctgactag

SEQ ID NO: 23758 - DNA, 468 bp, synthetic construct
  source 1..468: mol_type = other DNA; note = Synthetic coding sequence
atgaccgtggagggccccccccccaaggacaccggcatcgcccgggtccctctcgcaggggccgcaggcggccccgggattggtcgagctgcgggcaggggcatacccgctggagtccccatgcctcaagctcctgctggactggcgggacccgtgagaggggtgggggggccctcacagcaggtcatgaccccacaggggagaggcaccgtcgctgcggccgctgccgctgcaacggcttctatcgcaggcgccccaactcagtatccgcccggtcgaggggggcctcctcctcccatgggtcgcggcgcgcctccgcctggcatgatgggcccgcctcctggcatgaggccaccaatgggccctcccatgggcattcctcccggaagggggactccgatggggatgccgcccccaggaatgaggcctcccccacccgggatgagaggaaaatgcctccagtggtag

SEQ ID NO: 23759 - DNA, 402 bp, synthetic construct
  source 1..402: mol_type = other DNA; note = Synthetic coding sequence
atgacccggggcaaccagcgggagctggcccggcagaagaacatgaagaagcagtccgattcagtgaaaggaaagcgccgggatgacggcctgagcgcagccgcaagaaaacagtctgctccctcgtctcttcctcccgggactagaagaagctgttcgcgcagccgtaaaagacagacgagacgcagacgaaacccgtcttcatttgtggcctcttgccctacactgctgccatttgcgtgtgtgccgggcgcgagcccaacgaccctcgccttccctcccgtcgtgcttaccgggcccagcactgatgggatcccgtttgccctgagcttgcagcgcgtgccgttcgtgcttccatcccctcaggtggccagcctgcccttaggtcactcgagaggctag

SEQ ID NO: 23760 - DNA, 1809 bp, synthetic construct
  source 1..1809: mol_type = other DNA; note = Synthetic coding sequence
atggccgagttccgggtgcgggtgagcaccggcgaggccttcggcgccggtacttgggataaagttagcgttagcattgtagggacaaggggcgaaagcccacctcttcctctggacaacctgggtaaggagtttaccgcaggggccgaggaggactttcaagtaaccctgcccgaagatgtgggcagggtgttattgctaagagtccacaaggcgccaccggtattgccccttcttggccctttggcccctgatgcctggttctgtcgctggttccaattgaccccccccaggggaggacacctgttattcccttgttaccagtggctagagggcgcgggtacactggtgctgcaagagggtaccgcaaaggtaagttgggccgaccatcaccccgtgctgcagcagcagcgacaggaagaactccaagcacggcaggagatgtaccagtggaaagcctataaccccgggtggccacactgccttgacgagaagacggtagaggatttggagcttaatataaaatatagcacagcgaagaatgccaacttctacctacaggccgggtcagccttcgccgaaatgaaaatcaagggactcctcgatagaaagggtctgtggcgcagcctcaacgaaatgaagagaatcttcaacttccggaggacccccgctgctgagcatgcttttgagcattggcaggaagatgccttttttgccagtcagtttttgaatggcctcaatccagtcctgattcgcaggtgccactacctgcctaagaactttcctgttacagacgcaatggttgcttccgtgctgggtcctggcaccagcctgcaagctgaactggagaagggtagcctatttcttgtcgatcacggaattctctcaggtatccagacgaatgtaattaatgggaaaccgcagttttcagccgcaccaatgactctgttgtaccagagcccgggatgcggccccctgttacctctggccatacaattgagccagaccccaggccctaatagtcctatctttctgcctacagacgacaagtgggactggttgctggcaaagacctgggtccgaaacgccgagttctcttttcacgaggcgcttacacacctcctccatagccatctccttcctgaagtgttcacattagccacgctcaggcagctgccccattgccatccactgttcaagtctacaggcatcgggattgaaggtttcagtgagctaatacagcgcaacatgaaacaactgaactacagcctgctgtgtctgcccgaggacattcggactaggggtgtcgaggacattcctggttattactaccgcgacgatgggatgcagatctggggtattccctcaagcctagaaacccgggaggctctggtgcaatatgtaaccatggtcatcttcacatgcagtgccaaacatgccgccgtgtcagccggacaatttgattcctgtgcatggatgccgaatctcccgccaagcatgcaattgccacccccaacgtccaagggcctagccacctgtgagggcttcattgcaactttaccaccagtcaacgccacttgcgacgtgatccttgcactttggctgctgtcaaaagaacccggcgatcagcgcccccttggcacttaccccgatgagcattttaccgaagaggctccccgcaggtccatcgccaccttccagagccgcctggcacagatttcccggggcatccaggaacgcaaccaggggttggttctgccctacacttacctggatccacctctgattgagaattccgtgtctatctag

SEQ ID NO: 23761 - DNA, 3123 bp, synthetic construct
  source 1..3123: mol_type = other DNA; note = Synthetic coding sequence
atggtgagcagcgcccagatgggcttcaacctgcaggccctgctggaacagctgtcccaggacgaactgagcaaattcaaatacctgattacaaccttcagcctcgctcacgagctgcagaaaatccctcacaaggaagtcgataaggcagacggcaaacagcttgtggaaattctgacaacccattgtgactcttactgggtcgagatggcatcactccaggtgtttgaaaagatgcatagaatggacctgtctgagcgggcaaaggacgaagttagagaagcggcactcaaatcttttaacaagcgcaaacccctgtccctggggatcactcggaaggagcggcctcctctggacgttgatgaaatgctggagcgtttcaagacagaggcccaggacaaggataacaggtgtcgctatatattgaaaacaaaatttcgagaaatgtggaaatcttggccgggcgacagcaaggaagtacaggtgatggcagagcggtacaagatgctcatcccattctctaatccacgagtgcttccagggcctttctcatatacggtcgtcctctatgggcccgctggcctcggcaaaacgaccctggcacaaaagttaatgctcgattgggcagaggacaatttgattcataagtttaagtacgcgttttatctctcatgtcgcgagttatcccggctaggcccatgttctttcgctgaactcgttttccgggactggcctgaactgcaggatgatatcccccacattcttgcccaggccaggaagatcctgtttgtcatcgacggctttgatgaactgggtgcagcccccggggcattaattgaagatatctgcggtgattgggagaagaagaaacctgtcccagttctgttaggatctttgcttaaccgtgtcatgctgcccaaggccgccctgttagtcacaaccaggccaagggcactccgcgatctcagaatacttgcagaggaaccaatctatattcgcgtggaagggtttctagaggaggacagacgcgcgtacttcctgcgacacttcggcgacgaagatcaagccatgcgcgccttcgagctcatgcgctctaatgctgctctgttccagcttggcagtgcacccgccgtctgttggatagtatgtacaaccctgaagcttcaaatggagaagggtgaggacccggttcccacctgcctgactcggacaggactgttcctgcgctttttgtgttcgagatttccccagggagctcagttgaggggcgcactgaggacattatctctccttgcagcccaaggactctgggctcaaacaagtgtgctacaccgagaggacctggaacgtctgggagttcaggaatccgatctgaggttgttcctggacggggatatcctacgacaagatcgggtaagtaagggctgctacagcttcattcacttatcatttcagcagttcctcaccgcgctgttctacaccttggagaaagaagaagaagaagaccgtgatggccacacttgggacattggcgacgtgcaaaaactcctgagtggggtcgaacgactccgcaatcccgacctcatccaggctggctactatagcttcggcttggctaacgagaaacgggctaaggagctggaggccacattcggttgtaggatgagtccagacatcaagcaggagcttctaaggtgcgatatttcatgcaagggcggtcacagcacagtgaccgatctgcaggagcttttggggtgcctgtatgaatcccaagaagaggagctcgtgaaggaagttatggctcagtttaaggagatttccctgcacctgaatgcggtcgatgtggttccatccagtttttgcgtcaagcactgcaggaatctccagaagatgtcactgcaggtgataaaggagaatctgccagaaaatgtcaccgcaagtgagagcgatgccgaagttgagaggtcacaagatgatcaacacatgctgcctttttggacagatctctgttcaattttcgggtccaataaggacttaatgggcctggccattaatgactcatttctgtccgctagtctggtccggattctgtgcgaacaaattgctagtgacacttgccatcttcaacgggttgtctttaaaaatatctccccggccgatgcccatcggaacctttgtcttgccctccgggggcataagaccgtgacgtatttgacactgcagggtaatgatcaggacgatatgttccccgcgctatgtgaggttttaagacacccagaatgcaacctgaggtaccttggtttggtctcatgctccgctacgactcagcagtgggctgatctgtcattagccctggaagttaatcagtctctgacgtgtgtcaatctgagcgacaacgaactgttagatgagggtgccaagctgttatacacaactcttcgacacccaaaatgcttcttacagaggttatcactcgagaattgccacctgacggaagccaactgcaaagacttggctgccgttctcgtggtatccagagaattaacccacctgtgcctcgccaagaatccaatagggaacacaggcgtgaagtttctgtgcgaggggctcagataccctgagtgcaaactgcagacccttgtactatggaactgtgacataacgagtgacggctgctgtgatcttaccaaactcctacaggaaaaaagttccctgctttgcctggacctaggcttgaatcacattggcgtgaaaggaatgaaattcctgtgcgaggccctgcgtaagcccctgtgcaaccttcgatgtctctggctctgggggtgctccattcctcccttctcatgcgaggacttgtgctccgcactgagttgcaaccagagtcttgtaactcttgatctggggcagaatcctctggggagtagcggagtcaagatgctatttgagaccctgacatgctcgagcggaacactcagaactcttcggctcaagatcgacgacttcaacgatgagctcaataaattgctcgaggagattgaagagaaaaaccctcagctaattattgacacagaaaagcaccacccttgggcagaaaggccatccagccacgactttatgatctag

SEQ ID NO: 23762 - DNA, 3864 bp, synthetic construct
  source 1..3864: mol_type = other DNA; note = Synthetic coding sequence
atggtgcccggcgaggagaaccagctggtgcccaaggaggcccccctagaccacacctctgataagtccttgctggatgccaattttgagcccggaaagaaaaatttccttcacctgacggacaaagatggcgaacagccgcagatcctactggaagactctagtgcgggcgaggatagtgtccatgacaggtttatagggccactgccccgggaggggtccgggggcagcacatcggattacgtatcccagtcatatagttactctagcatcctgaacaaaagtgagactggatacgtcggacttgtcaatcaggctatgacatgttatcttaattcattactgcagactctctttatgacaccagaatttagaaatgctttatataaatgggaatttgaagaaagcgaagaagacccagtgaccagcataccttatcagctccagcgtctcttcgtactgcttcagacttcgaagaagcgggcaatagagacaaccgacgtgactcgctcctttggctgggactcatccgaggcttggcagcagcatgacgtgcaagaattatgcagggtcatgtttgacgcactcgagcagaagtggaagcagactgaacaggcggatctgatcaatgagctgtatcaggggaagttgaaagattacgtgcgctgtctagaatgcggctacgaaggatggaggatcgatacttatctcgatattcccttggtgattcgcccttacggctcctcccaagcttttgccagtgttgaggaagctctgcacgctttcatccagccggagattctggatggacccaatcaatatttctgtgagcgctgcaagaaaaaatgcgacgcgcggaagggcctacggtttcttcactttccctacctccttacacttcagctgaagcgtttcgacttcgactatactacgatgcatagaatcaaactaaatgatcgaatgacctttcctgaagaactggacatgagtacctttatcgacgttgaggatgaaaagtctcctcagactgagtcgtgcaccgactctggagcggagaatgaaggatcctgccactctgaccagatgagcaatgacttttccaatgacgacggtgtggatgagggcatctgtctagaaaccaactcgggcaccgagaagatctcgaagtcaggcctggaaaaaaattccctgatctacgagctgttttctgtgatggttcattccggatccgccgccggtggacactactacgcatgcattaaatcattctccgacgagcagtggtactccttcaatgaccaacacgttagccgcataactcaggaggacattaagaaaactcacggtgggtcaagtggaagccgggggtactattcgtcagccttcgcatcaagcactaatgcctacatgttaatctacaggttaaaagaccccgcccggaacgcaaagttcctggaggtggatgagtaccccgaacatattaaaaatctggtgcagaaagagagagaacttgaagagcaggagaaacgccagcgcgagattgagcgtaatacatgcaaaatcaaactattctgtctgcatccaactaaacaggtgatgatggagaataagttggaggtgcacaaagataagactttgaaggaggcggtggagatggcttataagatgatggatttggaagaagtcataccactggactgctgcagactcgtcaagtacgacgagttccacgattacctggagaggagctacgagggcgaggaggacacccctatgggcctgcttttgggcggcgtgaaatccacctacatgttcgaccttctactggaaacgagaaagcctgatcaggtatttcagtcatataaaccaggtgaagtgatggtgaaggtgcacgtcgtggatctgaaggcggaatctgttgccgcgccaattactgtgcgggcatatctaaatcaaactgtaactgagttcaagcaactgataagcaaagcaattcacttaccggccgagacaatgcggattgttttggagagatgctacaacgatcttagactcctgtccgtgagttctaagactttaaaagccgaggggttttttagatctaacaaagttttcgtggagagcagtgagacactcgattaccagatggcattcgctgattctcacttgtggaaactcctcgacaggcacgccaataccattcggctcttcgtgttattacctgagcagagccctgtctcctattcaaaaagaacggcctaccagaaagcaggcggggactccgggaatgtggatgacgattgcgagagagtgaaaggccccgttgggtccctcaagagtgtcgaggctattctggaagagagcacagagaaattgaaatctctctccctgcagcagcaacaagatggagacaatggggactctagcaagagtactgagacttctgatttcgagaatattgagtcgcctcttaacgaacgcgactcttccgcttccgtggacaacagagagttggaacagcacatccaaactagtgatccagagaatttccaatccgaagaacgcagcgacagcgatgtcaataatgatcggtccaccagtagcgtggatagcgatattctgtcttcgtctcactcctcagataccttatgcaatgctgacaacgcacagatcccgctggcaaacggactcgattcccattctattaccagctccagaagaacaaaagccaacgaagggaaaaaggagacttgggacacagccgaggaggacagcgggacagactctgaatatgacgaatccggcaaaagcagaggagagatgcagtatatgtactttaaagctgagccatacgccgccgacgaaggcagtggcgaaggtcacaagtggctgatggtgcacgtcgataagagaatcacactcgccgcatttaaacagcatcttgagccctttgtgggagtcctaagctcccacttcaaagtgtttcgtgtatacgcatctaatcaagaattcgagtcagtcagattaaatgaaaccctgtcctcattttctgatgacaataagattaccataagattgggccgggctctcaaaaaaggggaataccgggtcaaggtttaccagctccttgtgaacgaacaggagccgtgcaaattcctgctcgacgcagtctttgctaagggcatgaccgtacggcaatctaaagaggaactcatccctcagctgagagagcaatgcggactggagttatcaattgataggtttagattgagaaagaagacatggaagaatcccggtacagtgttcctcgactaccacatatatgaagaggacatcaacatatccagtaattgggaagttttcctcgaggttctcgatggagtagaaaagatgaagagtatgagccagctagctgtactgtcgcgtcggtggaagccgagtgagatgaaacttgatccgtttcaggaagtcgtcctcgagtcatccagtgtggacgaactgagagaaaagttaagcgagataagcggcattcctttggacgacattgaattcgcgaaaggtagaggaaccttcccatgtgatatctctgtacttgatattcaccaggacctggactggaatcccaaggtttctactctgaatgtctggcccctgtacatatgtgacgatggagccgtgattttttacagggacaagactgaagaactgatggagctgaccgatgagcaacgtaacgagctgatgaaaaaagagtccagcaggctacagaagacgggtcatcgtgtgacctacagccccagaaaggagaaggctttgaagatctatttggatggggctcccaataaggacttgacgcaggactag

SEQ ID NO: 23763 - DNA, 420 bp, synthetic construct
  source 1..420: mol_type = other DNA; note = Synthetic coding sequence
atgccctggcgggccggcaacggcgtgggcctggaggcccaggccggcacccaagaagcagggcccgaggaatactgtcaggaggagttaggggcggaggaggaaatggccgcccgcgccgcctggccagtgctccgctccgtcaattctagagaactctcccggatcattatctgcaatcacagcccacgtattgtgctaccagtttggcttaattactatgggaagctgcttccctatctcacgctgttaccagggagagattttcgtattcacaacttccggtcccacccctggctgttccgtgatgctcgcacccacgataagttgctggtcaaccagacagagctcttcgtgccgtcttcaaatgtgaatggccagccagtgtttgcaaatatcacacttcagtgtatcccatag

SEQ ID NO: 23764 - DNA, 582 bp, synthetic construct
  source 1..582: mol_type = other DNA; note = Synthetic coding sequence
atggagggctgcgtgagcaacctgatggtgtgcaacctggcctactctggcaagctagaagagctgaaggagtccattctagcggataaatcattagcaactaggacagaccaggccggttggagcccattgcacattgctgcctccgccgggagggatgagatcgtaaaagcactcctcggcaagggcgcgcaggtcaacgctgttaaccagaatgggtgtacccccctccactatgcagcgagcaagaacaggcacgagatcgcagtcatgctgttggagggtggcgctaaccctgatgccaaagatcattatgaggctacggccatgcacagagcagctgccaaaggcaaccttaagatgatccatatcctactgtactacaaggcttccacaaatatccaggatacagagggtaatactccacttcacttagcgtgcgacgaggagcgagtggaggaggcgaagctgctggtttctcagggcgccagtatatacatcgaaaataaggaggagaagactccactacaagtggcaaaaggaggtctggggctgatcctcaagcggatggtcgaaggatag

SEQ ID NO: 23765 - DNA, 612 bp, synthetic construct
  source 1..612: mol_type = other DNA; note = Synthetic coding sequence
atgagcgagaacgccgcccccggcctgatcagcgagctgaagctggcagtcccctggggacatatcgcagcaaaagcctggggatcgctccaagggcctcccgtgctctgtttgcatggctggttagacaacgctagcagctttgaccggctgatcccactgcttccccaagacttttactatgtggccatggattttggcggccacggactttcttcccattactcacccggcgtgccctactatctccagactttcgtttctgagatacgtagagttgtagcggcactgaagtggaatagattttcaatccttggccatagtttcgggggagtggtgggcggaatgtttttctgcacgtttcccgaaatggttgataaattaattcttttagacactccgctgttcttgctggagtcagacgaaatggaaaacctgctgacttataagcgcagggccatcgaacacgtgttgcaagtggaagcgtcgcaggagccctcacacgtattctctctgaagcagctgctgcagaggcaaagaactgcacttacctcaagcgccggaagttgtgtgaggatcccctcggggtcatgtaggccaatgagttgttag

SEQ ID NO: 23766 - DNA, 765 bp, synthetic construct
  source 1..765: mol_type = other DNA; note = Synthetic coding sequence
atgcccgccggcagcatgagcaccaccggctaccccggcgtgtgctctactacttcatatcgaacgcactgctatatccctgtgaccagctctgtgactctatcctcctcagatctgagcccaactttcggccactgcctcccttcttcctaccagggtaatctgtggctgttggactactgtcaggaaagctacggagaggcccctacctgtaaatctccaagctgcgagccaaaaacatgctcaactaccggttgtgatccctcaaatagtagtgtgccctgcaactctccatccgcaggccaggtcttcagcgtgtgcgagaccactaatgtgtcaccatccccctcatgcagtccgagcacacagaccaatggttatgtctgcaattgtcacatccctaccaggaacgcctcaaaagcctgtcaaaccctccggaatggctctaattgctttggacagctaaattgtctttccaagtcgtttcagaccctgaaccactgcaggctttctacgttaggctacaagtcgtatcagaacccttgtttcataccctcctacgtttcgccgctgtgctacatatccaattcttgccagccccagtcttacttagtgaggaattaccattatagttcctaccgtccaacatcctgcaggcctctgtcctacctgagccgctcatttcggtctttgtcgtatataccctctaccttcccacccttgcgctacctttgctccggctcaagaccgctgaagtgttactag

SEQ ID NO: 23767 - DNA, 1338 bp, synthetic construct
  source 1..1338: mol_type = other DNA; note = Synthetic coding sequence
atgcgggagatcgtgcacctgcaggccggccagtgcggcaaccagatcggggcgaaattctgggaagtaattagcgatgagcacggcatcgaccctaccggtacttatcatggagacagtgacctccagcttgaacggatcaacgtatactataacgaggccactggcggcaagtacgttcccagagcggttttagtggatctggaacccggcaccatggacagcgtccgaagtgggccatttggacagatctttaggcctgacaacttcgtgtttggccaaagtggcgctggaaacaattgggccaagggccattatacagaaggggctgagctcgtggatagcgtactagatgtggtgcggaaagaggccgagtcttgcgattgcttgcagggctttcagctgacccactcactgggcggcggaactggaagcggcatgggcacattgcttatatccaaaattcgcgaagagtatcctgacagaatcatgaacaccttctccgtagtaccttcccccaaagtcagcgatacggtggtagaaccttacaatgcaaccctgtctgttcatcagctcgtggagaacacagacgagacctattgtatagacaatgaggcactgtacgatatctgttttcgtactctgaagctgacaacaccaacctacggtgatctgaatcacctggtgagtgctactatgagtggcgttactacatgcttacgctttcctgggcagctcaacgccgaccttcgcaaacttgctgtgaacatggtaccttttccgcggctgcatttcttcatgcctggatttgcgcctctgacatccaggggtagccagcagtaccgagccctcaccgtcccagagctgactcagcagatgttcgacgccaagaatatgatggctgcttgcgatccacgacacgggagatatttaactgttgcagctgtcttcagggggcggatgagcatgaaggaagtggacgaacagatgttaaacgtgcagaacaaaaatagtagctactttgtggaatggatcccaaataacgtcaagaccgctgtgtgcgacattccacctaggggacttaagatgagtgcgacttttatcggcaacagcactgccatccaagagctattcaagcgaatctcagagcagttcacagctatgttcaggagaaaagccttcctgcattggtacacaggcgaaggaatggacgaaatggaattcacggaggccgaatccaatatgaatgacctggtttccgagtatcagcagtatcaagatgctaccgcagaagaagaaggggaatttgaggaagaggcggaggaggaagtcgcttag

SEQ ID NO: 23768 - DNA, 750 bp, synthetic construct
  source 1..750: mol_type = other DNA; note = Synthetic coding sequence
atggccgagcggggcgagctggacctgaccggcgccaagcagaacacgggagtctggctcgtgaaggtgcctaagtacctcagccagcagtgggccaaggcatccggaagaggcgaggtcggaaagctgcgcattgcgaaaacacagggtcgcacagaggtcagttttacactgaatgaagatttagcgaacatacatgatatcggtgggaagcccgcctctgtcagcgccccacgggagcaccccttcgtgcttcagagcgtgggaggccagacactgacagtgtttacagagtcctcctcagacaagctgagtctcgagggaatcgtggtgcagagagccgagtgccggccagccgctagcgagaactacatgaggcttaaacggcttcagatagaggaatcctccaagcctgtgcggctctcccaacagcttgataaagtcgtgacaactaattacaaacctgttgccaaccatcagtacaacatagagtatgagcgaaaaaagaaagaggacgggaaacgagcccgcgctgacaagcagcacgtattggacatgttgtttagcgctttcgaaaagcatcaatactacaatctgaaagacttggtggacatcactaaacagcccgtcgtctacctgaaagagatcctgaaggagatcggcgtccagaacgtgaaggggatccataagaatacttgggagttgaagcctgagtataggcactaccagggagaggagaaaagtgattag

SEQ ID NO: 23769 - DNA, 2511 bp, synthetic construct
  source 1..2511: mol_type = other DNA; note = Synthetic coding sequence
atgtggagcctgggctgcgtgatcgccgagctgttcctgggctggcctttgtacccgggggcttcggagtacgatcagatccggtacatatctcagactcagggcctgcctgcggaatacctcttgagcgccggcactaaaacaacgagatttttcaatcgcgatcctaacttagggtaccccctctggcgcctcaagaccccagaagagcacgaactggagaccggtatcaagtcgaaagaagcacggaaatacatctttaactgcctagacgatatggctcaggtgaacatgagcacagatcttgaagggactgacatgctggctgaaaaggccgaccggagggagtatatagatctgctcaaaaagatgttgactatcgacgccgataagcgcatcactcctcttaagacgctgaatcatcaattcgttacaatgacacacctccttgatttcccccattccaaccatgttaaatcatgctttcaaaacatggaaatctgcaagaggcgggttcatatgtatgatacagtgtctcagataaagagtcctttcacaactcatgtcgcaccgaacacgagcactaatctcacaatgagcttttcaaaccagctgaacacggttcacaatcaagcttccgtgctcgcatcgtcctctacagctgcggcagctactctctctttggctaatagtgatgtaagcctacttaactaccagagcgcgctgtaccccagtagtgccgcccccgtaccaggtgtagctcagcagggtgtaagcctccagccgggaactacacaaatctgtacgcaaacggacccatttcaacagacatttatcgtctgtccccccgcgttccaaactggtcttcaggccaccaccaaacacagcggattccctgtgcgcatggataatgctgtccctatcgtaccacaggcacctgccgcccagcctttacagatccagagtggggtgttaacccagggctcatgcactccgttaatggttgctacacttcacccacaagtcgccaccatcacgcctcagtacgccgttcctttcactctatcctgcgccgcagggcgaccagcactggtcgaacagaccgcagccgtgcttcaggcttggcccggcggtactcagcagatcctgctgcccagcacctggcagcagctgcctggtgtggcactccataattctgtgcagccgacggccatgatccctgaagcgatgggaagtgggcagcagctggcagactggaggaacgcgcatagccacggcaatcagtattctaccattatgcagcaaccttccttgttgactaaccacgtaaccttggcaactgcccagcctctgaatgttggagtggctcacgtcgtccgacaacagcagtcttcctctctgcctagtaaaaagaacaagcagagtgctcctgttagtagtaagagctcacttgacgtcttaccttcacaggtttacagcctcgttggaagcagcccccttcggactactagctcatataattccctcgtgccggttcaggaccagcatcagcccataatcatccccgacaccccgtccccccccgtatctgttataacgatccgctccgataccgacgaggaggaagataataaatataagccttcatccagcggactcaagccgcgatcgaatgtcatctcctacgtgacagtcaacgatagtcctgactcagatagctctctgtcgtctccctatagcacggacactctatctgccctgagggggaactctggatccgtgctcgagggcccagggagagtggtggcagatggaaccggcactagaaccattatcgttccaccactgaagacccagctcggcgattgtacagtggcgacacaggcctccggcctactgtcgaataaaaccaagccagttgcttccgtctccggtcagtcttcgggctgctgtatcacaccaaccgggtatagagcccagagaggcggaacatccgctgcgcagcccctgaacttgagccaaaatcagcagagttctgctgcccccacctctcaggagcggtccagcaaccccgcccccagaaggcagcaggcttttgtcgctcctttaagccaggccccatatacgttccagcatggaagcccactgcactcaacagggcacccccacctggcacctgcccctgcccacttgccatctcaggcacatctctatacatacgctgccccgaccagtgctgcagccctggggtccacttcctctatcgcgcacctcttcagcccacagggctcttcccggcacgcagccgcatacacaactcatcccagcaccctggtacaccaggtgcctgtcagcgtgggtccttctctgctgaccagcgcgtccgtggctcccgcgcagtatcagcaccagttcgcgacacagagttatataggatcatcacgtggctctactatttacacaggttacccattgagcccaacaaagatctctcagtactcttacctgtag

SEQ ID NO: 23770 - DNA, 2352 bp, synthetic construct
  source 1..2352: mol_type = other DNA; note = Synthetic coding sequence
atgagccaggtgaagagcagctacagctacgacgcccccagcgactttatcaacttctctagcctggacgatgagggggacacccagaatatcgactcttggtttgaggaaaaagccaacctggaaaacaagctcttaggaaagaacggaacgggcggcctgttccaaggcaaaacacctctgagaaaagccaacctgcagcaagcaattgtgacaccgctgaaacctgtggataatacatactacaaagaagctgaaaaagaaaacctggtagaacagagcattccaagtaatgcatgctccagtcttgaggtcgaagccgctatctccaggaagactcccgctcagccccaaaggcgatcgcttagactgtctgcccagaaagatcttgagcagaaggagaaacatcatgtgaagatgaaagccaagagatgcgccacccctgtgattatcgacgagatcttgccatcgaagaagatgaaggtcagcaacaataaaaagaagcccgaggaggaaggatcagcacaccaggatacagccgagaaaaacgcgtcatcaccagagaaagccaaggggagacatacagtgccctgtatgccccctgccaaacagaagttcctgaagtccacagaagagcaagagttggagaagtcgatgaaaatgcagcaggaagtcgtggagatgcgcaagaagaacgaagagttcaagaagctggcgctcgccggtatcggtcaacctgtaaagaagagtgtgtcccaggtgaccaagtctgtagatttccatttccggacggacgagaggataaagcagcacccaaaaaaccaagaagagtacaaagaagtgaattttacgagtgaactaaggaaacaccctagtagtccagcacgcgtcaccaaaggttgcacaatcgtgaagccatttaacctctcacagggcaagaagcgtacatttgacgagacagtgtccacctacgtgcctctagcacaacaggtggaggatttccacaaaagaacaccaaatcgctatcatctgcggtctaaaaaggatgatattaagactggcagctgcagcgtcactcaggctggagtacaatggagagaccacggatcactgcagtgcccgacgcctgggctcaagcagagctcctgcctgtctctgccgaatttattgccgtcgaagagctccgttacgaagatttgccgcgacccacagactcccgtgttgcagacaaaacacagagctagggccgtcacttgcaagtccaccgccgagctggaagctgaggagctggagaaactgcagcaatataagtttaaggcacgcgagttggatccgcgaatcctcgagggcgggcctattctgccgaaaaagcctcccgtgaagccacccactgagccgattggtttcgatctagaaattgaaaaacgaattcaagaacgggagtccaagaagaaaacggaagacgagcatttcgagttccactcccgcccgtgtcccaccaagatcttagaggatgttgtcggagtcccagagaaaaaggtccttcctatcactgtgcctaaaagtcccgccttcgcactgaagaatcggatcagaatgcccactaaggaggatgaggaggaggatgaaccggttgtgattaaggcgcaacctgttcctcattacggtgtgccgtttaagcctcaaatccccgaagccagaactgtagaaatttgtccattttcttttgattctagggacaaggagcggcagctgcaaaaagagaagaagatcaaagaacttcagaagggcgaggtgccaaagttcaaggcattgcctctgccacattttgacactattaacttgcctgaaaagaaagtgaaaaacgtcactcagattgaacccttctgtctagagacagaccggcgcggcgctctcaaagcccaaacctggaaacaccagctggaggaggagctccggcagcaaaaggaggccgcctgctttaaggcccggccgaacacggtgatcagccaagagcctttcgttcccaagaaggagaagaagtccgttgcggaggggttgagtggtagcttagtacaggaacccttccagctggctactgaaaaacgagctaaggaacgccaggagttggagaagcggatggccgaagtcgaagcccagaaggctcagcagctggaggaggccaggcttcaggaggaggagcagaagaaagaggaactggccaggctcaggcgggaactcgtccacaaagcaaatcctatccgaaaatatcagggcctcgagatcaaaagttcagatcaacctcttaccgtgcccgtgagccctaagttttccacccggtttcactgttag

SEQ ID NO: 23771 - DNA, 2061 bp, synthetic construct
  source 1..2061: mol_type = other DNA; note = Synthetic coding sequence
atgggcagctacctgagcgtgcccgcctacttcaccagccgggacctattccggtgcagcgaatgtcaggatagtttgacgaattggtactacgagaaggatggaaagttgtattgccccaaggattattggggaaagttcggggaattttgtcacggctgttctctgttaatgactggtccatttatggtggctggcgagttcaaatatcacccggagtgcttcgcatgtatgagttgcaaagtaataatagaggacggtgatgcctacgctcttgtgcagcacgccacactgtactgtgggaagtgtcacaatgaggtggtgctagctcccatgttcgaacgcttaagcacagaatcagtgcaggaacaattgccctactcagtcactctgatttcaatgcctgccacgaccgagggccgacgaggcttctcggttagtgtggaaagcgcatgttcgaactatgccaccaccgttcaggtgaaggaggtgaacagaatgcatatcagccccaacaaccggaatgctatccatccaggcgataggatcctggagatcaacggcacccctgtgaggaccctccgcgtcgaagaggtggaggacgctatcagccaaacgtctcagacccttcagctgttaattgagcacgaccccgtatcccagaggctggaccagctacggctggaggcacgactggcccctcacatgcagaatgcggggcatccacacgccctgagtacccttgacacgaaggagaatttggaagggacgctgaggagacgtagccttaggcgatccaatagcatctcaaaatctccgggccctagctctccaaaggaacctctgctgttcagcagagacatcagcagaagcgagagtctgcgttgtagttcctcttactcacagcaaatctttcggccttgcgacctgatccatggagaggtgctaggaaaagggtttttcggccaggcaatcaaggtcactcacaaggctacaggcaaggtcatggtgatgaaggagctgattaggtgcgatgaggaaacacagaaaacctttctgaccgaagttaaagtcatgcgcagtctcgatcacccaaacgttctcaagtttataggggtcctctataaggataagaagctgaacttgctgaccgagtacatcgaggggggcaccttaaaggattttttgagaagcatggatcctttcccctggcagcagaaggtgcgcttcgccaagggaattgcctcgggcatggcttatttacactcaatgtgcattatccacagagatctcaactcgcataattgcctcattaagttagacaagaccgtggttgtagccgattttggactatcacgcctcatcgtcgaagagcgtaagagagcacccatggaaaaggccacaaccaaaaagcgcactctcagaaagaatgacaggaagaagcggtatacagtggtcggcaacccttattggatggccccagagatgctgaacgggaagagctacgacgaaacagtggacatcttttcattcgggattgtgctgtgcgaaatcatcggacaggtgtacgctgacccggactgcctgccacgaactctagactttgggctgaatgtaaaactgttctgggagaaatttgtcccgacagactgcccaccagcattcttcccactcgctgcgatatgctgccgtctcgaaccagaaagcagagcccccccgggggctgctggtgagggtcccggctgtgctgacgacgaaggtccagtgcggcgccagggaaaagtcaccattaagtacgaccccaaggagctccgcaaacacctgaatctcgaagaatggattttggaacaactgacacgcctgtatgattgtcaagaggaggaaatctctgagctagagattgatgtcgatgagctcctcgatatggagtctgacgatgcttgggcctctagggtcaaggagctattggtcgattgctataaaccgacagaggcctttatcagcggactgcttgacaaaatcagggccatgcagaagctgagtactccacagaaaaaatag

SEQ ID NO: 23772 - DNA, 840 bp, synthetic construct
  source 1..840: mol_type = other DNA; note = Synthetic coding sequence
atgcgggccctgaccgtgcagcgggtgaagttcgccatggacctgccgctactgaagcgggctggacaagatctagccgagaaaaccaaaaactttgtttcaagatcactcgtcatcggggaggttcttagtatggccgacatggctaccggcgtgaaatgcggcattatatactggttattcggcggcgctattagaaaccttgggtcccccgagcatgtgacaaaatggtttcagcccctacaggagcaaaagtataccggcatgttcgcgatgactgagcgcggacatggatctaacgctagaggcattcagactgaggccacatttgacctaagcgcacaagaattcgtgatagatacaccttgcgagaatgccgaaaaaatgtacattggtaatgcgatgtacggaaattatgctgccgtgttcgcccagttgatcatcgacggacgaagccagggtccccactgcttcatcgtccctgtacgcgatgagaatggttccctttatcccggcgtaacggcaattgacatgatgtacaaggaggggttgcacggggtggacaatggaatattgatttttgacaaggttcggatacctagggagaatctgctcgacaagtttggctccgttgcccccgatggccagtatcactccccgattcgtaataagtcagcccgctttaacgcaatgctcgcggccctaaccccgtctagattggcagtggcatttcaggcaatgggggcgatgaaattgggcctgactattgctataagatactcccaccggagtagaataatctcccaaaactgctgttcggcccccgcaggcctttactag

SEQ ID NO: 23773 - DNA, 597 bp, synthetic construct
  source 1..597: mol_type = other DNA; note = Synthetic coding sequence
atgaccctgcggtgcctggagcccagcggcaacggcggcgagggcaccagatcgcagtggggcactgctggcagcgccgaggaaccctcccctcaggcagcgagactggcaaaggcattgcgcgagctcgggcaaacaggctggtactggggctcaatgacagtcaacgaggctaaagagaagctcaaggaagccccagaggggacctttttgatcagggactcctcacattctgattacctgttgactataagtgtgaagacatctgcaggcccgacaaacctgcgcatcgagtatcaagatggcaagtttagactcgattctattatttgtgtaaagtccaaactgaagcagttcgatagcgtggtccacctgattgactactacgtccaaatgtgcaaggataagcggactggccccgaggcaccacgcaatggcaccgtccatctttacctgaccaagcctctctatacttctgcgccatcactgcagcatctttgccgcctcacaataaataaatgcacaggagccatatggggactgcccctgcccacccggctgaaggattatcttgaagagtataagttccaggtgtag

SEQ ID NO: 23774 - DNA, 570 bp, synthetic construct
  source 1..570: mol_type = other DNA; note = Synthetic coding sequence
atggaggccgacggcgacggcgaggagctggcccggctgcggagcgtgtttgccgcctgtgacgcgaataggagcggccggctggagagggaggaattccgagccctgtgtaccgaactaagggtccggcccgctgatgctgaggccgtttttcagcgcctggatgcagatcgggacggggcgattacgtttcaagagtttgcgcgggggttcctggggagtttaagggggggccgcagaagggattggggcccactggaccctgctcctgctgtaagcgaggctggccccgagacacatgactccgaagaagacgagggtgatgaggatgcggccgcggccctggccacctcttgcgggcctgccagccccggccgcgcctggcaggattttcaggctcggcttggcgatgaggccaagttcattccacggttcggatatacaatttctaaacctgctttcgtgttcgtgcgacacttgattacactgtgcgccttaagttgggccaaaaaggaaggtagagaaactctttggaccatagaagaaggaggggcgaagatggccgaatag

SEQ ID NO: 23775 - DNA, 300 bp, synthetic construct
  source 1..300: mol_type = other DNA; note = Synthetic coding sequence
gccctggacgtggccgtgaagaccttcccccccgagcggcacgtggctgtaaaatgttttgggaaaaaaaaggagaagaagaataacgctaactcccctgcttctgtgtctaacccaaccgtgaccaaacacgcgtttggaatggaggaggagttgcagagagagggaagcattgaaaccctttctaactccagtggcagtacgtcaggatccatcccacgaaactttgacggctacaggagcccactcccaacgaatgagtcccagcccctcagtctcttccctacaggatttccttag

SEQ ID NO: 23776 - DNA, 1170 bp, synthetic construct
  source 1..1170: mol_type = other DNA; note = Synthetic coding sequence
atggagcggaaggacttcgagacctggctggacaacatcagcgtgactttcctgtccctgaccgatctgcaaaaaaacgagactttggaccatctgattagcttgagtggggctgtccagctgcggcatctgtccaataatctggaaaccctgctgaagagggactttctcaagctcctgcctctcgagctgtctttttacctgctgaaatggttagatcctcaaactctgctcacctgctgtctcgtctccaagcagtggaataaagtcatttccgcttgtacagaggtgtggcaaaccgcctgcaagaacctgggctggcagattgacgattcagtccaggacgccctccactggaagaaggtgtacctcaaggctatcttgcgaatgaagcagctggaagaccacgaggccttcgagacttcatccctcatcggccattccgcccgcgtgtacgctctctattataaggacgggctgctttgtaccgtgttcagcgtcgattacaatgatgagttggatatactggtctcaggctcagccgacttcacggtgaaggtgtgggcactctcggctggcacgtgtctaaacacattgaccggtcataccgagtgggtgacaaaggtggtgctgcagaaatgcaaggtgaaatctctcttgcatagtcccggcgattacattctcctaagcgccgataagtacgaaataaagatttggcctatcggaagagaaatcaactgcaagtgtctgaagacactatcagtgagcgaggatcgatcgatatgcctccagccaaggctgcattttgatggaaagtacatagtctgttcgagcgctttgggcctctatcagtgggatttcgcttcttatgacattctgcgggtgatcaagaccccagagattgcgaacctcgccctgctcggatttggggatatcttcgctttactcttcgacaatagatacctctatatcatggatcttagaaccgagagcctgatttcccgttggcctcttcccgagtaccgcaaaagcaaaagagggagcagttttcttgctggtgaggcttcatggctgaatggcctggatggacacaacgacaccggcctcgtgttcgccactagcatgcctgatcatagcattcacctggtcttgtggaaggagcatggctag

SEQ ID NO: 23777 - DNA, 2439 bp, synthetic construct
  source 1..2439: mol_type = other DNA; note = Synthetic coding sequence
atgaagaagcagttcaaccggatgcggcagctggccaaccagaccgtcggccgtgctgagaaaaccgaagtgctgtctgaagacctactccaagtagagaaaaggttagaactggtgaaacaggttagccattccacccataagaagttgaccgcctgtctgcaggggcagcaaggtgctgaggccgataaacgctcaaagaaactccccctgactactctggcacaatgtttaatggaaggcagtgcgattttaggagacgacactcttttgggaaagatgctgaagctttgtggagagacagaggacaagctcgcacaagaactcatacacttcgagcttcaggtcgagcgggatgtgattgaacctctattccttcttgcggaggtcgaaattcctaatatacagaagcagcggaaacatcttgctaagttagtcctggacatggattcctcccgcactagatggcagcagacttcaaaatccagcggtctctccagttctttgcagccggccggggcaaaagctgatgccctgcgtgaagagatggaggaggcggccaacagggttgaaatatgtcgagaccagctgtccgctgatatgtattcatttgtggccaaagaaatagattacgcaaactacttccagactttaattgaggttcaggcagaataccacagaaaatccctgacactcctacaggcagtgctgccacagattaaagcccagcaggaagcttgggtggagaaaccctcgtttgggaagccactcgaagagcacctgactattagcgggcgggagatcgcgtttcccattgaggcttgcgtaactatgcttctagagtgtggaatgcaggaggaaggcctatttcgtgtggccccatctgcctctaagctgaaaaaactgaaggccgctcttgactgctgtgtagtggacgtgcaggagtatagcgctgaccctcatgcgattgccggggctctgaaatcctatctgcgtgaacttccagaaccgctgatgacctttgaactgtacgacgagtggatccaagccagcaatgttcaggagcaagataaaaaattgcaggccttgtggaacgcatgcgagaagttaccaaaggccaaccacaataatataaggtatctcattaagttcctcagtaagctgagcgagtatcaggacgtgaataaaatgactccttctaatatggcaatcgtcctgggtcccaaccttctgtggccgcaggccgaaggcaatattaccgagatgatgactactgtgagtctacagattgtgggaattatagaacctatcattcagcatgccgattggttcttccctggagaaattgagtttaacattaccgggaactatggatctcctgttcatgtgaatcacaatgcaaattattcttcaatgccatctcctgatatggaccctgcagatcgaagacagcccgagcaagcgaggaggccactttcagttgcgaccgacaatatgatgctggagttctacaagaaagacggaatgggagtgcgtgttatggacaccaattgggtagctagacggggctctagcgcgggtagaaaggtttcttgcgcacccccttccatgcaacctccggcccccccagccgagctggccgctcccctgcccagccccctgcccgaacaacccctggactcgcccgccgcccctgccctcagtccctctggcctgggcctccagcctggccctgaacgaacatcaacaacaaagtctaaggaactgagtcctggcagcgcccagaagggctctcccgggtcctcccaaggaactgcttgtgccggaacccagcccggggcccaacccggtgcccagccaggcgccagcccatctcccagccagcctccagcagatcaatctccacatactttaagaaaggtgtccaagaaactggcacccataccgccgaaggtgccctttgggcaacccggggccatggccgatcagagcgctggtcagccatcccctgtcagtctcagccccacacccccgagtacaccatctccttacggactgtcctacccacagggctattctctcgcaagcggacaactctctcccgccgccgcccccccacttgcttcgccaagtgtcttcacgagtaccctttctaagagcagaccgacgccaaagcctagacagcggcccacgctaccgccgccccagcctcccactgtcaaccttagtgcctcttcaccccagagtacagaggcgcccatgcttgacggtatgagcccaggcgagtcaatgagtactgatctggtccattttgatataccatcaattcacatcgagctggggtccactcttaggctttctccactggagcatatgaggagacatagcgtgacagataagagagactccgaggaggagtccgaatctactgccctctag

SEQ ID NO: 23778 - DNA, 1119 bp, synthetic construct
  source 1..1119: mol_type = other DNA; note = Synthetic coding sequence
atgagcaagagcgagagccccaaggagcccgagcagctgcggaagctctttatcggagggctctcctttgaaaccacggatgaatctctgcgaagtcattttgaacagtgggggactctgacggactgtgtcgtgatgcgagatccgaacactaagagatcacgggggtttgggttcgtgacttacgcgacggtggaggaggtagacgcagccatgaatgcccggccacataaggttgatggcagggtggtggagccaaagcgcgccgtgtcacgcgaggactcacagcggcctggggctcacctgacagtgaaaaaaatctttgtggggggcatcaaggaggatacagaggaacaccacctccgtgactactttgagcagtatggtaagatagaagttatcgagatcatgaccgatagaggcagcggcaaaaaaaggggctttgcgttcgtgacattcgatgatcatgactcagtggataagattgtcattcagaagtatcataccgtgaacgggcacaactgtgaagtgagaaaggcgcttagcaaacaagagatggcctccgcctcaagcagccaaaggggcagaagcggctccggaaacttcggcggcggtcgggggggaggttttggagggaacgacaatttcggccggggaggaaactttagcggaagagggggtttcgggggcagcagaggtgggggaggctacggcgggtctggcgacggttacaatggcttcggaaacgatgggggttacgggggtggtggcccgggctacagtggtggctctcgcggttatggatccggcggccagggctacggtaatcagggaagcggttatggaggctcaggaagctacgatagttacaacaatggtggaggcggaggttttggtggcggaagcggctccaactttggcgggggcggctcttacaatgactttggcaactataacaatcaaagttccaacttcgggcccatgaagggcggcaacttcggaggacgcagttccggtccatacggagggggtggccagtatttcgctaaacccagaaaccaggggggttatggtggctcttcctcatcatccagttacgggagcggcaggcggttttag

SEQ ID NO: 23779 - DNA, 1491 bp, synthetic construct
  source 1..1491: mol_type = other DNA; note = Synthetic coding sequence
atgaagctgggcaagaagcccatgtacaagcccgtggacccctacagccgcatgcaaagcacctataactataacatgagaggcggggcctatccccctcgctatttttatccatttcctgttcccccattgctataccaggttgagcttagtgtaggaggccaacagtttaatgggaaaggaaagacaagacaggccgcaaagcacgacgctgccgcgaaggccctgcgtatcctacagaatgaaccactgcctgaacggctggaggttaatgggcgagaatcggaagaggagaatctaaacaaaagcgaaatctcccaggtgttcgagatagcccttaaaagaaatctccctgtgaacttcgaagtggctcgagaatctggtccacctcatatgaagaattttgttaccaaagtgagtgtcggggaattcgtcggtgagggcgaaggtaagtcaaagaaaatctccaaaaaaaacgccgccattgccgtcctggaagaactgaaaaagttacctcctctgcctgccgtcgagagagtcaagcctcggattaaaaagaaaacaaagcctatcgtgaaacctcagacatcacccgaatacggacagggtataaacccaatctccagattggctcagatccaacaggccaagaaggagaaagagccagagtacacactcttgaccgagcggggactgcctagacgtcgtgagttcgttatgcaagtgaaagttggcaaccacactgctgaggggaccggaacaaataaaaaggtcgcaaagagaaacgccgccgaaaatatgttggagattttgggcttcaaagtgccgcaagctcagcccactaaaccagctctgaaatctgaagaaaagacccctataaaaaaaccaggggacggtagaaaggtgacttttttcgaacccggatcaggtgatgaaaacgggacaagcaacaaggaggacgagttcagaatgccctacctatcacaccaacagctacctgctggtatacttcccatggtgcctgaagttgcccaagcagtcggagtctcacaagggcaccacacgaaagactttaccagagccgcacctaaccctgccaaggccactgttacagccatgattgccagagagttgttgtacggcggcaccagtcctactgctgagactatcctgaaaaacaacatctctagcggacacgtcccacacggtcccttgacaaggccaagcgaacagcttgattatctgtcgcgcgtgcagggttttcaggtcgagtacaaagatttcccgaagaacaataaaaatgagttcgtgagtctcatcaactgttcatcccaaccccctctcatcagtcacggaatcggaaaggatgtcgagagctgccacgacatggccgccctgaacatcttgaagctgctgtctgagctggaccagcagtctacggagatgccccggaccggcaacgggccaatgtccgtgtgtggaaggtgttag

SEQ ID NO: 23780 - DNA, 5835 bp, synthetic construct
  source 1..5835: mol_type = other DNA; note = Synthetic coding sequence
atgagcaacttctacgaggagcggaccaccatgatcgccgcccgggatctgcaagagttcgtcccctttggtcgggatcattgcaaacaccatcccaacgcactgaatcttcagctgaggcagctacagcctgcttctgagttgtggtcaagcgacggggccgccggcttagtcggctcactgcaggaggtgaccatccatgagaagcagaaggaatcttggcagctgcggaagggcgtcagtgagattggagaagacgtagattatgatgaagagctgtacgtggctggcaatatggtcatttggagcaaaggcagtaaatcacaggctttggccgtctataaggcctttacagtggattcacccgtgcagcaagctctatggtgtgatttcattatttctcaggataaatccgaaaaggcttatagcagtaacgaggtggagaaatgtatctgcattctccagtccagttgcataaatatgcattcaatcgagggaaaagactatattgcttctctgccttttcaggtggcaaacgtgtggccaactaagtatggcctgctgtttgagagaagtgcctctagccacgaggtgccacccgggtcccctcgtgagcccctccccacgatgttctctatgttacatccactggatgaaattactccgctcgtttgtaagtcaggaagtttattcggttcctcgcgcgtgcagtatgtggtagaccatgccatgaaaatcgttttcctgaacacggacccctcgattgtgatgacatacgacgcagtgcagaacgtgcattcagtatggacactgaggagagtgaaatcagaggaggagaacgtcgtgctgaaattctccgaacaggggggaactccgcaaaatgtggctactagtagctcactgacagctcatcttagatctctctccaaaggcgacagtcctgttacttcgccgttccagaattatagcagcatccacagccagagccgcagcactagcagtccatccctccacagccggagtcccagcatttcaaacatggcggcactgtcgagggcgcactcccccgctcttggtgtgcactcctttagtggcgtccagcggtttaacatttcatctcataaccagtctccgaaaaggcactcaatctctcacagcccaaattcaaatagcaacggctccttcctggcccccgaaactgagcccatcgttcccgagttgtgtatagaccacctctggaccgaaactataacgaacatccgagagaagaacagccaggcatctaaggtctttataacttccgacctgtgtggccaaaagtttctttgtttcttggtcgaatctcagcttcagttgcgctgcgtcaaatttcaggaatccaacgataaaacacagttgatattcggtagcgtcacgaatattcctgccaaagatgctgcccccgtggagaaaatagatacaatgctagtgctggagggctcagggaatctggtcttatatacaggcgttgtcagagtggggaaggtgttcattcccggcttgcctgcacctagtctgaccatgtccaatacaatgccacggccttcgacgcctttggacggggtgtccacccctaaaccgttgtccaaactgctgggaagcttggatgaagtggtgctactctcacccgtacccgagctaagggacagttccaaactgcatgactccctttacaatgaagactgcacctttcagcagctcggaacatacatccattctatcagagacccagttcacaatcgagtcaccctggagctatccaacgggagtatggtgcgcatcactatccccgagattgcgacttcagagctggtccaaacgtgcctgcaggctatcaagtttatcctgccaaaagagattgcagtacagatgctggtcaagtggtataacgtgcactccgctccagggggaccctcctaccactcggagtggaatctgttcgttacctgcttgatgaacatgatgggatataatacagatagattggcttggaccagaaactttgactttgagggctccttgagtccagtcatagccccgaagaaagctagaccctccgaaactgggtcagacgacgactgggagtatctgctgaattcggattatcaccagaacgtcgagtcccatttacttaatcggtccctgtgtctttctcctagcgaggccagccagatgaaggacgaggatttctctcagaatctgtctctggacagctcgaccttactatttacgcatataccagctatcttcttcgtactacatcttgtgtacgaagagttgaagctgaataccctaatgggagaagggatttgtagtttggtggagttgctggtgcaactggccagggaccttaaactcgggccatacgtcgaccactactaccgggactacccgacactggtgcgcactacaggtcaggtttgcacaatcgaccctggacagacaggattcatgcaccaccctagtttctttacaagcgagcctcccagcatttaccagtgggtttcaagttgtctaaagggggaaggcatgccaccttacccttacctgccgggcatctgtgagcgctcaagactggtcgtgctgagcattgccctttatatcttgggcgacgaatccttggtaagcgatgaatcatctcagtatctgacccggattaccatcgccccccagaagctccaggtcgaacaggaggaaaaccgattctccttcagacattcaacttctgtatccagtcttgccgagcgactcgtggtatggatgacaaacgtaggcttcacccttcgcgacttggagactcttcccttcgggattgcattacctattcgtgatgccatctatcactgcagggaacaaccagcttctgactggccggaggccgtctgcttactcattggccggcaggacctctctaagcaggcctgcgaaggcaatttaccaaaaggaaagtccgtgctgagctctgacgtaccgtccggcactgagactgaagaggaagatgacggcatgaacgacatgaaccacgaggtaatgtcactcatctggtccgaggatttacgggtacaggacgtccgaaggcttctccagagcgcacaccccgtgagggttaacgtcgttcagtaccctgagttgtcagatcatgagttcatcgaagaaaaagaaaacagactcctgcagctgtgccagaggaccatggccctacccgtaggtcgaggaatgtttaccctgttcagctaccaccccgtcccaactgagccactgccaatacctaagctcaatctcaccggtcgggccccacctcgaaataccacggtcgatttgaatagtggaaacattgacgtgcctccaaatatgacatcttgggccagttttcacaatggtgtggccgctgggttaaagatagcccccgcttcccagatagatagtgcgtggatcgtatacaacaagcctaaacacgccgagctggcaaatgagtacgctgggttcttaatggcacttggtctgaacggccacctgaccaagcttgccaccctcaatattcatgattacctgacaaagggccacgagatgactagtatcggcctgctgctaggtgttagcgctgccaaacttggcacaatggacatgagcattaccaggctgctgagtattcatatccctgcgctgctgcctccaacgagtactgagttggatgtgccacataatgtgcaggttgccgcggtcgttggaatcggactggtataccagggcaccgcccatcggcacacagctgaggtcctcctggctgaaataggcaggccaccgggccccgaaatggaatactgcactgatagagaatcctatagcctggcagcgggactggcactgggcatggtatgcctagggcatgggtccaacttaatcgggatgtctgatctgaatgtgcccgaacagttgtaccagtacatggtcgggggtcaccgcagattccagacagggatgcatcgagagaaacataagtctccctcctatcagatcaaggagggggatacaataaatgtagacgtgacatgtcctggcgccacacttgccctggccatgatttatctgaagaccaacaacagaagtatagctgattggcttcgagcacctgacaccatgtatttgttggactttgtgaaaccggagttcttattgctgagaacgctggctcgctgtctcatcctatgggatgatatcttgcctaactcaaagtgggttgactctaatgtgcctcagatcatccgcgagaactctatctcattgagcgaaatagagctgccatgcagcgaagatctgaatttggagacccttagccaggcccatgtgtatatcattgccggagcttgcctgtctctggggtttcggttcgccgggagcgagaacctctccgcgttcaactgcttacataagttcgcgaaggattttatgacttatctgtcagcccctaatgcaagcgtgactggcccacataatctagagacctgcctttctgttgtactgctctctctcgcgatggtgatggctggaagcggcaacctaaaagtcctccagctctgcaggtttctgcacatgaagactggcggcgagatgaattacgggtttcatctcgcccaccacatggctctcggcttgctgttcctcggcggcggacgttactctctgagcacttcgaattcttcaatcgccgccctgttgtgcgccttatatccccatttccccgctcactcaaccgataataggtatcacctgcaggctctgagacacctgtacgtgctggctgccgagccccgactgctggtccctgtggacgtcgacaccaacacgccatgctacgcattactagaggtcacctacaaggggacacagtggtacgagcagaccaaggaagagctgatggctcctacgctgctccctgagctccacctcctgaaacaaataaaagtcaaaggccctagatattgggaactcctgatcgacctttcaaaggggacccagcacctgaagagcatcctgagtaaggacggtgtcctgtacgttaaactcagagccggacaactgtcttataaggaagatcctatgggctggcagtcactgttagctcagactgttgctaatcgaaactctgaagcacgtgcattcaaacccgaaaccattagcgcctttacatctgatccagctctgctgtcgtttgccgagtatttttgcaagccaacagtaaacatgggccagaaacaggagatcttggacctgttttcgtcggtactctacgaatgtgtgactcaggaaactcccgaaatgctgcctgcgtacatagccatggatcaagccatccggcggctaggcagacgtgagatgtctgagacctccgagctctggcagatcaagttagtgctcgaattttttagtagtaggagtcaccaggagagattgcagaaccatccaaagcgcggtttatttatgaatagcgagtttctgcccgtggttaagtgtacgatcgacaacacactagatcagtggctgcaagtgggaggggatatgtgtgttcacgcatatttatctggccaaccattggaggaatctcagctctcaatgctcgcctgttttctcgtgtaccatagtgtacctgcgccccaacacctaccccctatcgggctggaaggctctacgagtttcgctgaactgctgttcaaattcaagcagctgaaaatgccagtacgcgctttgttacggctggctccactcttgctgggcaacccccagcctatggtcatgtag

SEQ ID NO: 23781 - DNA, 1263 bp, synthetic construct
  source 1..1263: mol_type = other DNA; note = Synthetic coding sequence
atgctgaaggccgtgatcctgatcggcggcccccagaagggcaccagatttcggcccttatccttcgaggttcctaagcccctgtttccagtcgccggcgtccccatgatccagcaccatatcgaagcatgtgcccaagtgcctggtatgcaggagattctattgataggattttaccagcctgatgaaccactcactcagtttcttgaagccgcacagcaggaatttaacctgcctgtccggtacctacaggagttcgcacctcttgggactggggggggcctgtaccactttagagaccaaatattggctggctcccccgaggccttctttgtactaaacgccgacgtgtgcagcgattttccactgtcagccatgctggaagcacacagaaggcagcggcatcccttcctgctgctgggaactaccgcaaatcggacccagtcgttgaactacggatgcattgttgaaaacccgcagactcacgaggtgctgcattacgtggagaagcctagcacgtttatttctgatatcatcaactgcggcatttacctcttttcccccgaggccctgaaaccattgcgcgatgttttccagaggaaccagcaagatggacagctggaagatagccccggcctctggcccggcgcaggtacaattcggttggagcaggatgtgtttagcgccttggccgggcaaggacagatttatgtccatttgaccgacggaatttggtctcaaatcaagtctgccggctctgctctttacgcttctaggctttatctgtcacgctatcaggacacacaccccgaacgattagcaaagcacacaccgggcggtccatggatcaggggcaatgtttatatccatcctacagcaaaagtggcaccctccgccgttttggggccaaatgtttctatcggcaagggcgtaactgttggcgagggggtcagattgcgagaatcgattgttttgcacggagcaacacttcaggagcacacctgcgtccttcactccatcgtgggatggggtagcactgtcgggcgttgggcacgtgtggagggcacaccctccgatcccaatcctaacgacccgcgtgctcggatggattccgagtccttatttaaggacggaaagctccttcccgctatcaccatcctgggatgtcgtgtccggattccagcagaggtgctgatactgaacagtatcgtacttcctcacaaagagttatcccgctcattcactaaccagattatcctgtag

SEQ ID NO: 23782 - DNA, 1257 bp, synthetic construct
  source 1..1257: mol_type = other DNA; note = Synthetic coding sequence
atgcgggagtgcatcagcatccacgtgggccaggccggcgtgcagatcggcaatgcctgttgggagctttattgtctcgagcacgggattcagcccgatggacaaatgccgtccgacaagactataggggggggggatgatagcttcaatacattcttttctgaaaccggtgccggcaaacacgtgccaagagccgtgttcgtagacctcgagccaacagttgttgatgaggtgcgaactggaacttatagacagctctttcatccagagcaactgattaccggcaaagaggacgccgctaacaactatgcgagaggccactatactattggcaaggaaattgtcgatttggtgcttgaccgcatccgcaagctggcagacctgtgcaccggattacagggatttctgatatttcattccttcggaggcggtactggcagcggtttcgcatccctcctgatggagagactgtctgtggattatgggaaaaagtccaaactcgagttcgccatttaccccgcccctcaggtctctaccgcagttgtggaaccttataactcaatcctaacaacacacacaacattggaacactcagattgcgcattcatggtggacaacgaagctatctatgatatttgtagacgtaacctcgacatcgaaagacctacatatacgaatctgaatcgcctcattggccaaatcgtttcaagtattaccgctagtctgagattcgacggagccctgaacgtcgatctgaccgaatttcagacgaatcttgtcccatatccacggatccactttcccctcgccacatatgcacccgtaataagcgcagagaaggcttatcacgaacagctgtctgtcgccgaaatcaccaatgcttgtttcgagccagccaaccagatggtgaaatgcgatccgaggcatggaaaatacatggcctgctgcatgctgtatcgcggtgacgtggtcccgaaggatgtcaacgctgccatcgcgacaattaaaacaaaaagaaccatccagttcgttgactggtgccctacggggtttaaggtgggaatcaattaccagccaccaaccgtagtacccggcggtgaccttgcaaaggtgcagagagccgtgtgtatgctgtctaatactaccgcgatcgcagaggcctgggctcgtctggacctggctgccctcgaaaaagactatgaagaagtaggtgtggattcagtggaagccgaggctgaggagggtgaagagtattag

SEQ ID NO: 23783 - DNA, 417 bp, synthetic construct
  source 1..417: mol_type = other DNA; note = Synthetic coding sequence
atgcagctgccccccttcgacatgtggaaggactacttcaacctgtcacaggtcgtgtgggctctgattgcgtcccgggggcagcgattggaaacgcaggaaatcgaagaacccagcccagggcctcctctgggtcaggatcaaggcttgggagctcccggtgcaaatggtggactggggacattatgcaacttttgtaagcataacggcgaatcgcgtcacgtttactctagtcaccagctgaagactcccgacggggtggtcgtctgtcctattttgaggcactacgtttgtccagtctgtggagccaccggcgatcaagcccacacgctcaagtattgccctctcaatgggggccagcaatcattatacagacgtagtggaagaaatagcgctggcaggagagtgaaacggtag

SEQ ID NO: 23784 - DNA, 375 bp, synthetic construct
  source 1..375: mol_type = other DNA; note = Synthetic coding sequence
atgcgggccagcccctgcatcagccagcccgccgccagctggcaccctagaccaagcgccctccgacctaccgctggatccggccctgatacccgcacaccggggacagtggaagacggctccgccccatgcccagcgttcagaagtcctgcagtcagtccatgcggtgaagagccctgttgctttcagatcagccccgctgaggagacacttgaattggggaggttagtcagccctggcaactgcgatactctcagcccccgggcagctgggttctatgcatgtcacgtaaggtcgctgatcccctgccggtccacaaagggtcgatggccgctgacggcgtccgccgccggcctgagttcctttagcggctag

SEQ ID NO: 23785 - DNA, 363 bp, synthetic construct
  source 1..363: mol_type = other DNA; note = Synthetic coding sequence
atggccgagcccagcagcgcccggcggcccgtgcccctgatcgagtccgagttgtacttcttgatcgccaggtatctaagtgccgggccctgtagaagggcggcacaggtgctggttcaagaactggaacagtatcagctgctgcccaagcgcctggattgggagggcaatgagcacaatagatcctatgaagaattagtgctgtccaacaaacacgtagcaccagaccatcttctgcaaatttgtcaacgaatcggacccatgctcgataaggaaattcctccatcaattagtcgggtgacctctctcttgggtgctgggcgccagtccctgctgagaacggctaagggaaccctaatctag

SEQ ID NO: 23786 - DNA, 2607 bp, synthetic construct
  source 1..2607: mol_type = other DNA; note = Synthetic coding sequence
atgatccccaagagcctggtgcaggccgccgagacccagcggggcctctgcgagcccgggggtaaaggtcgcgaggggcgctccgggggcaagggtgagacacggcctcgaggcgttggcacccaggaagggaagggcaccatcccaggctcacctcgcgagaaacgtggcgaacgtggcgagggcgaccccgccctcctcccagctgaggacctgtggcgcctgcctggcagcaaggaccgactacgttcttcgcttctccccccccctggcccccccagttctgactctgggccaggacccccaagttcacatagcggcaagacagcccaggggccacgtactttgaattgggctcgcaaacagtccgcccgcacctcaagtaatctgtgcgcttggtctctggccatggctacaaaaatggctgagatccccagttccccctacgaacctggccagagggggatgaaagatactcagcggggggacgcaccccagagagggagcccggagccacgcatcttgcagctggctagggtgggaaatgtatacctaaaggaagaatcttctcggtctgggaggctagaagccaaaaagtggataccgacgaaattccttgaaaacctcagcgtaccgcacgtggacttgggaggcaaccagttgtggagtggcggcatggaagcattgacaacccagcttggaccaggcagggagggctcttcttcgcccaattcaaagcaggaactccagccttactctgggagctctgctctcaagccaaaccaggtgggagagacgagcctttacggagtccccatcgtgagtctggtgatcgatggacaggagcgcctgtgcctcgcacagatcagcaacactctgctgaagaactacagttacaatgaaatacacaacagacgggtggcactcggcatcacttgtgtccagtgcacccccgtgcaactggaaatcctgcggagggctggggctatgcccatctcttctcgaaggtgcggaatgattacaaagcgggaggcagaacgcctgtgtaagtcgtttctcggcgaacacaaacctcccaaacttccagagaactttgccttcgatgtggtgcatgaatgcgcgtggggttcaaggggatcctttatcccagcgcggtacaactcatccagagccaaatgcattaaatgcgggtactgctccatgtatttctccccgaacaagttcatctttcatagccaccgcaccccagatgcaaagtacacgcagccagacgccgcaaacttcaactcgtggcgccgccacctgaaattgtccgataagagcgcgaccgatgagctgtctcacgcttgggaggaccgggggcttgggctggccacaggagcctccggtccagcaggccccggcggccctgggggcggcgctggagtaagaagttatcccgtgatcccagtgccaagtaaaggctttggcctcttgcagaagctgcctccccctctttttccgcacccctacggcttcccaacggcatttggattgtgccctaagaaagatgacccagtgctgggcgccggagagcctaagggcggctcatacgtgagtgcctttaggccagtcgttaaggacacggagtccatcgcgaagctctacggcagcgccagagaagcctacggcgccggaccggcgcgcggaccaggacctggcgctggtagcgggggttatgtaagtccggatttcctgtcggagggatcaagctcttataacagcgcctcgccggacgtggacacagctgacgagccagaggtggatgtggaaagcaatcgattcccagacgacgaagacgctcaggaggaaaccgaaccaagtgccccctccgctggcggcggtcccgacgctgggcgccctgcatttggagatctcgcagctgaggacctcgtgcgccgtccagagcgctctcccccaagtggaggcggcggatatgagctccgagaaccctgcggacccttggggggcccagcccccgccaaggttttcgcccccgagagggatgagcacgtgaagtcagctgcagttgcactgggtccggctgccagttatgtgtgtaccccggaggcacatgaacccgacaaggaggataatcattcaccagcggatgacctagagaccagaaaatcctaccctgatcagcggagcattagtcagccgagcccagcgaacaccgaccgcggagaggatggacttacacttgacgtaacggggacacatcttgtggagaaagatatcgaaaacctagcccgcgaagagttgcagaagttactcctggaacagatggagctacggaagaaactagaaagggaattccagtccctaaaagacaatttccaggaccagatgaaacgagaattggcgtatcgggaggagatggtccagcagctccagattgttagagatacactctgtaatgagctcgaccaggagagaaaagctcgctacgcaattcagcaaaagctaaaagaagcccacgatgccctccaccacttctcctgcaaaatgttgacccctcgtcactgtactgggaactgctcatttaaaccccctctgctgccatag

SEQ ID NO: 23787 - DNA, 3585 bp, synthetic construct
  source 1..3585: mol_type = other DNA; note = Synthetic coding sequence
atgcacgacctgccccccgacagcggcgcccggcggggcggccgggggctggcagatcacagttttcccgcaggtgcgcgcgccccaggtcagccaccatcacggggggccgcgtacagacgtgcctgtccccgcgatggcgagaggggcggaggaggcaggccacgccagcaagtcagcccacctaggtccccacagcgggaaccaaggggcgggcagctccgtaccccccgcatgcgcccttcctgcagccgttcgctggaaagcctcagggtaggggcaaaaccacctcccttccagcgctggccatcagattcttggatacgctgtggcgcccacagggattgggacgaacccccaccccggggggggagaatggacggctggtcaggagatcgagcccgggccgctgctcccactgggctgcaaccccccggatgtaaggaccacgggtgttcctccggatctcccttcagggatccagccggcagtagtgtcatcaggagtggaaaaggcgatagacaggaaggtcccagtttccttcgcccgcccgcagtcaccgtgaaaaagcttcaaaaatggatgtataagggccgtcttctatctctgggaatgaaggggcgcgccaggggaacagctccgaaggtaactggaactcaggccgcctctccgaacgtgggtgccctgaaagtccgagagaaccgcgtgcttagcgtccctcccgatcagaggatcaccctgactgacctgttcgagaatgcctatggcagcagcatgaaaggtcgtgaacttgaggagctgaaagataatatcgagttcaggggtcacaagcctctgaatagcataacagtgtcaaagaagcgaaattggctctatcaatcaaccctcagacccctgaatttagaggaggagaataaaaaatgccaggataggagccatttgtccatcagcccagtgagtctgcctaagcatcagctgtcccagagctttttgaagtcaagtaaggagtactgcacttacgtggtatgcaatgcaaccaactcctcgctgtctaaaaactgcgccctcgacttcaacgaggagaacgatgctgacgacgagggcgaaatctggtataaccccattcccgaggatgatgacctggggattagttctgccctgtcctttggcgaggctgacagtgctgtgttgaaattgccggccgtgaacctctctatgctttcggggagtgatcttatgaaggcagaacgacataccgaggatagcctgtgctcctccgaacacgcaggcgacatacagaccacacggagtaacgggatgaaccccatacatcccgctcattctaccgaattcgttcagcagtacaagcagaagctaggtcataaaactcaggaggggataatggtggaggacagccctatgctgaaatccccttttgcaggctccggcatcttggccgctactaactccactgagttggggatcatggaacccagttcccctaatccctcacccgtaaagaagggcagctccatcaactggtccttgcccgacaagattaaatcccccaggaccgttagaaaactctccatgaagatgaagaaattgcccgaattttcacggaagttaagcgtcaaggggactctcaattacattaatagccccgataataccccaagcctgagcaaatataattgtcgggaagtgcaccacaccgatatcctaccctccggaaataccaccaccgccgcaaaaagaaacgtgatcagccggtaccacctcgacacctcagtaagttctcagcagtcttatcagaagaaaaattccatgagctcgaaatactcttgcaaggggggatatctatcagacggggactctccagaactcaccacaaaggcatccaaacacggctcagagaataaatttggtaagggaaaggagattatctccaatagttgcagcaagaatgaaattgatattgatgcctttaggcactacagttttagtgaccaacccaagtgcagtcagtacatatccggcctgatgtctgtccacttctatggcgctgaggatttaaagcccccccgcattgattcgaaggacgttttctgtgccatacaagtggactcagtgaacaaagccaggaccgccctcttgacctgtcggactacctttttggacatggatcacactttcaatatcgagatcgagaacgcccagcatctgaagcttgtcgtgtttagctgggagccgacaccacggaagaaccgtgtgtgctgtcacgggactgtcgtgctcccaactctattcagggttaccaagactcatcagttggctgttaagctagagccccgtgggctcatctacgtgaaagtgacactgatggagcagtgggagaattccctccacggcttggacataaaccaagagcccattatcttcggcgtggatatacaaaaggttgtggaaaaggaaaacatcggactcatggtacctctgcttattcagaaatgcatcatggagatcgaaaagcgcggatgccaggtagttggtttatacagactctgcggaagcgcagccgttaagaaggagttaagggaggccttcgaaagggacagcaaggccgttgggctgtgcgagaaccagtacccagatatcaacgttataacgggggtgctaaaggactacctgcgtgaacttccaagccccctgatcacaaaacagctttatgaagcggtgctcgacgccatggccaaatcacccctcaagatgagctcaaatggttgcgagaacgacccaggcgacagcaaatataccgtagatctgttggactgtctgcctgaaatcgaaaaggcaactctgaaaatgctgcttgatcatctgaagctggttgcgagctatcacgaggtgaacaagatgacgtgccagaacctcgcagtctgtttcggccccgtgctgctctctcagcgccaggaacctagcacacacaataaccgcgtattcaccgacagcgaggaactcgcatctgcacttgacttcaagaagcatatcgaggtcttgcactacctcctccagctctggcccgtgcagcgcttaactgtgaagaagagcaccgacaacctgtttcctgagcagaagtcttccctaaactatctgcgccagaaaaaggagcgcccccacatgttaaatctcagcggtacagattccagcggggttctcaggccaaggcaaaacaggctcgattctccgctctccaatcggtacgctggggattggagcagctgtggcgagaactatttcctgaatacaaaagaaaaccttaacgacgtggactatgatgatgtgccatcagaggatcggaagataggggagaattatagcaagatggatggacccgaggtcatgattgagcaacctattcctatgtctaaagagtgtacctttcaaacataccttactatgcaaacagtagagagtaccgtcgatcgcaagaacaacctaaaggatctgcaggaaagcattgacacgctcatcgggaatctcgagcgggaattgaacaaaaacaagctaaatatgagcttttag

SEQ ID NO: 23788 - DNA, 1353 bp, synthetic construct
  source 1..1353: mol_type = other DNA; note = Synthetic coding sequence
atggaccccggcaacgagaacagcgccaccgaggccgccgccatcattgatctggaccctgactttgagcctcagtccagaccccgctcctgcacttggcccttgcctaggcccgagattgctaaccagccttccgagccccccgaagtggagcccgaccttggcgagaaagcaatcgagagcgcccctgagaagaggctaaccctagcacagatttacgagtggatggtgcgcaccgttccatacttcaaggacaagggagactcaaactcctccgcaggctggaaaaactccatccggcacaacctcagcctgcactcgaagtttatcaaggtccacaacgaagcgaccggtaaatcatcttggtggatgcttaatccagagggaggcaagtccggaaaagcacctagaagacgagcagcctccatggattccagttctaagctcctcagaggccgtagcaaggctcctaaaaagaagccatctgtgctgccagctccgcctgaaggggccacccctacctcacccgtcgggcatttcgctaaatggagtggaagcccgtgttcccgtaacagagaagaagctgacatgtggaccacgtttagaccccgtagcagctcgaatgcgagttctgtctccactcgactctcacctctgcgcccagagtctgaagtgctcgcagaggaaatccccgcctctgtgtccagttatgcaggaggcgtgccccccaccctcaacgaaggactggaactactcgatggactgaacctcacgtcttctcattccttactctcccgatccggattgagcggcttttcacttcagcacccaggagtgactgggcctctacacacctattcaagctccttattttctccggctgagggccctctgtctgctggtgagggctgttttagtagttctcaggctctggaggctctgctcactagcgacactccccccccgccagcggacgtgctgatgacccaggttgatccaattctgagccaggctccaaccctactactcctgggaggcctgccgtcctcctccaagctggccaccggggtgggactgtgccccaaaccacttgaagctccaggacccagcagtttagtccccactctctcaatgatagctcctcccccagttatggcgtctgcccccattccgaaagcccttgggacccccgtgctgaccccacctacggaagcagcgagtcaggatagaatgccacaagatctggacctggacatgtacatggagaaccttgagtgtgacatggataatattattagcgatctaatggatgagggcgaaggtttggactttaattttgaacctgatccctag

SEQ ID NO: 23789 - DNA, 1125 bp, synthetic construct
  source 1..1125: mol_type = other DNA; note = Synthetic coding sequence
atggccggctacctgagcgagagcgacttcgtgatggtggaggagggattcagcacaagagatttactgaaggaattaacgttaggagcctcgcaggcaaccaccgacgaagtcgctgccttttttgtcgcagatctcggggcaattgtgcgcaaacatttctgcttcctgaaatgcctgcccagagtgagacctttctacgcagtgaagtgcaattcctccccgggcgtactgaaggtgctagcccaactggggttgggcttctcttgcgcaaacaaggcggaaatggagctggtccagcacattggcatcccagctagcaagatcatctgtgctaatccttgcaagcagatcgcacagatcaaatatgcggctaaacacggtatccaattattgtcctttgacaatgagatggagctggctaaggtcgtgaagtcgcaccccagcgctaaatttgtgcagcagagaggtactgcgtgcctgatccgaatggtgctctgtattgccacggatgacagccattcgctgagttgcctgtccctgaagttcggggtgagtctgaagagctgccggcatctcttggagaacgctaaaaaacatcacgtggaagtggtgggagtcagtttccacattggaagcgggtgtccggatccccaggcatatgcacagtctattgccgatgcgaggctggtgtttgagatgggaactgaactaggtcacaagatgcacgtcttggacctcggtggcgggtttccaggcactgaaggcgctaaagtccggtttgaggagattgcgtctgtaattaattcagctctggatctgtatttcccagaggggtgtggcgttgatatctttgctgaactgggtcggtactatgtcacctccgccttcaccgttgccgttagcataattgccaaaaaagaagttctgttggatcagccaggacgggaggaagagaatgggagcacaagcaagacaatcgtatatcacttggatgaaggagtgtacggtattttcaatagtgtgctctttgacaatatttgtcctacaccgatcttgcagaagtccaaaaaccattccccgtgttacatgtccctagagagcatccacttcattgctgtctag

SEQ ID NO: 23790 - DNA, 1629 bp, synthetic construct
  source 1..1629: mol_type = other DNA; note = Synthetic coding sequence
atggaccggagcaagcggaacagcatcgccggcttccccccccgggtcgaacgactggaggagttcgaaggtggagggggcggtgagggaaatgtgtctcaggtaggacgcgtgtggccctcgtcctatagagccctgattagcgctttttcacggcttacccgcctggacgactttacctgtgaaaagattggatcaggcttcttttcggaagttttcaaggtccggcacagagcctccgggcaagtaatggctctgaaaatgaatacccttagttcaaaccgagcgaatatgttaaaagaggtgcagctgatgaatcgtttgtcacatccaaacatcctcagatttatgggcgtttgtgttcaccagggtcagctgcacgctttgacagagtacattaacagtggcaatcttgaacaactgctggactcaaacctgcacttgccttggactgtgagagtgaaattggcatacgacatcgccgtgggactctcctacctgcacttcaaggggatattccaccgggatctgacgagcaaaaattgtttaatcaaaagagacgaaaacggctactctgcagtggtggcagactttggacttgccgaaaagattccagacgtttccatggggtccgagaagttagcagtggtggggtcgcccttctggatggctcccgaagttctgagggacgaaccgtataacgagaaagccgacgtgttctcctacggcattattttgtgcgagatcatcgcgagaattcaggcggacccggactatttaccaaggactgagatggatcccaagttgaggccctccttcgtcgagatcggcaaaactttggaggagatcctatcgcgcctgcaggaggaagagcaggagagggacagaaaacttcagccaactgctcggggtctcttagaaaaggcacccggcgtgaagcggctttcgagtctggacgacaagatcccccataaatctccatgccctcggcgaacaatctggctatctcggagccaaagcgatatcttttcaagaaagccccctcgaactgtgtcagtcttagacccttattaccggcccagagacggtgctgccaggacacccaaagtcaatcctttttctgctagacaagatctgatgggcgggaagatcaaattcttcgacctgccttctaaaagcgtgatttcattggtcttcgacctggacgcacccggcccaggcacaatgcccctcgctgactggcaggagccccttgccccccctatcagacgttggcggagcttacccggttcaccggaatttctgcatcaggaggcttgtcctttcgtgggccgtgaggagtcactgagcgacggccccccgccccgactcagtagcttgaagtacagagttaaagagataccccccttcagagcttcagctctcccggcagctcaggcccatgaggccatggattgctccatcctacaagaggaaaatggcttcggctccaggccccagggaacctcaccttgtccggctggagcctcagaagaaatggaggtggaggaacgccccgccggatctacacctgcaaccttctccactagcggtatcggactgcagacgcaggggaagcaggacgggtag

SEQ ID NO: 23791 - DNA, 786 bp, synthetic construct
  source 1..786: mol_type = other DNA; note = Synthetic coding sequence
atgggcagccggaagaaggagatcgccctgcaggtgaacatcagcactcaggaactgtgggaggagatgctgagcagcaagggcttgaccgtggtggatgtgtaccagggctggtgtggtccatgtaaacctgtggtgtctctgttccagaagatgcgaatagaagtaggcttagacttactgcattttgccttaatcaaagatgaggctctgtcagatgaggacgagtgcgtgtctcatggcaaaaacaacggagaggacgaggatatggtgtcaagtgagaggacctgcaccctagccatcattaaaccagatgctgtcgcacacgggaagaccgatgaaattattatgaagattcaggaagcgggtttcgaaattctgaccaacgaagaacgcactatgacagaagctgaggtgagactgttctaccagcataaggcgggtgaggaggcattcgagaagctggtgcaccacatgtgttccggacctagccacttactcatcctgaccaggacagaggggttcgaggatgttgttactacatggagaaccgtgatggggccgcgggatccaaacgtcgcgcggcgagagcaacctgaatctctgcgagcccagtatggcacagaaatgccattcaatgcagtccatggtagccgtgatcgagaagatgccgatcgagaactcgctctgctgtttccctcactgaagttctctgataaagataccgaggcccctcagggtgaaagcagtacacaaccaagactaaagattacagacttagattag

SEQ ID NO: 23792 - DNA, 1767 bp, synthetic construct
  source 1..1767: mol_type = other DNA; note = Synthetic coding sequence
atggaggccgccgacgccagccggagcaacggcagcagccccgaggctagggacgctagaagcccctccggtccatcggggtcactggagaatgggaccaaagcagatggcaaagacgccaagacaaccaatggacatggaggcgaggccgctgaagggaaatcgttgggcagtgccctcaaacctggggaaggacggtcggccctgtttgccgggaatgaatggcgtcgcccaatcattcagttcgtagagagtggcgacgataagaattccaactattttagcatggattccatggaaggcaagcgaagcccatatgctggcctgcagctcggggcagcaaagaaacccccagtgacattcgcagagaaaggggaacttcggaaaagcatcttttccgagagcagaaaacctaccgtgtcaatcatggaacccggcgagacaaggagaaactcttacccacgggcagatactggcctgttctctcgatcgaaatccggctcggaggaggtcctatgtgacagttgcatcggtaacaagcagaaggcagttaagtcgtgtctggtgtgccaggcctctttctgtgaactccatctcaagccccacctggagggtgcagccttccgcgaccatcagttgctagagcctataagagactttgaggcgcgcaagtgtcccgtccacggtaagactatggaactattttgtcagacggaccagacctgcatctgttacctctgtatgttccaagagcataaaaatcacagtacagtcacagtggaagaggcgaaagcagaaaaggagacagaactgtccttacagaaagaacaactgcagctgaagataattgaaattgaagacgaggcagagaaatggcagaaggagaaagatcgcataaagagcttcacaactaacgagaaagcaattctggagcagaattttagggatctcgtaagagatttggaaaagcaaaaggaggaggttcgggcagcccttgagcaacgtgaacaggatgcagtcgaccaggtcaaggttattatggacgcccttgatgagagggcaaaggtgctacacgaagacaaacaaactcgggaacagctacacagtatcagcgatagtgtgctcttcctgcaagagttcggtgccctgatgagtaactattcgctgccccctccgctccctacataccatgtgctattagagggtgagggattaggccagagcctcgggaacttcaaggacgacctgctcaatgtttgtatgcgacatgtcgaaaaaatgtgtaaagccgatctgtctcgcaactttatagaaaggaatcacatggaaaatggtggcgaccaccgctatgtgaataactacaccaactcattcggcggagagtggagtgctccagatactatgaagcgctacagcatgtatcttacccccaagggtggcgtgcggacttcttatcagccttcttcccctgggagatttacgaaagagacaacccagaaaaactttaacaatctatatggtaccaagggaaattatacaagtagggtctgggagtattcatcatctatccaaaactcagacaatgacctgccagtggttcagggctcttcctcattttcgctaaagggatacccatcactgatgcggagtcagtctccaaaagctcaaccccagacatggaagtccggtaaacagacgatgctctcacactatagaccgttttacgtgaataagggcaacggcattgggtctaatgaggccccatag

SEQ ID NO: 23793 - DNA, 3567 bp, synthetic construct
  source 1..3567: mol_type = other DNA; note = Synthetic coding sequence
atgaagaagaagcagaccgtgcagggcaccttcagcaagctgttcggcaaaaaacatacgaccaccccaagcacatctctttatgccacaaatcccccgtggattttcacgcaggaagcccccgaagagggcacaggcggcttcgacgggatctactatggtgacaaccgattcaacacagtgtcagaatctggtacggcgaccctgaaggcccgaccacgcgtcagacctctgctcacttttctgccactgaatgcgcaggaaaaccacggcctggctgtgcctactcccagtgtgcctgacgacttcgctgacaaagaggtgacagggacttccagtctcgttaatgggaaccttaggctttacagtagcgttggtgatctgaggcccggacagtatggccaggatctgctcatccccccccctccaccaggacccgcacctggaccaccacaggacatctcagaaccaccaggcgggagtccactccctagtcccccttcaaccgcccctccacctcccccacttttgcttgagccgcccccaccaccctcgatggctccacctccccccccagtgctggaggctctgtccccgccccacactctgtcaagcccatccattccgacacctcctgattttattccacccgcaccacccctcgcttttctggctccaccgcctcctcccgtgcctgcccccgctccaccagccccggcttctcctcacaccgtaggcacccggctgtttcccccaggaggcgttaccaaatggaagagtgatgtggccctgaatggtcggcaagctgaggcaaccagggcctctcccccccgtagccctgccgagcccaaagggagcgccctcggaccgaatccggagccacacctgactttcccaaggagctttaaagttcccccaccaacaccggtaagaacctccagcattcccgtccaagaagcccaggaagcccccaggaaagaggaaggagccacaaagaaggctccttccagactgcccctacctcccagctttcacattagaccagcttctcaggtttatcctgatagggctccagagcccgactgcccgggggagttaaaagcaacggctccggcctcccccagactgggccagagccagtcacaggcagacgaacgggccggcaccccgcccccagcaccacccttgcctcctccggccccgcctctccccccacctgcaccacctttgcctcctgcagccccccctctgccgtgcgcccaaaaggctgctcacccgcctgcaggattcacaaaaacaccaaaatcatcttcccctgctttaaagccgaagcccaacccccctagtccagagaacactgctagcagtgccccggtcgactggcgggacccatcccagatggagaagctcaggaatgagttggccgcttacttgtgcggctctcggcgagaggatcgcttcttgagtcaccgcccgggccctacggtagctccacagagtaaggagggaaaaaagggcccccggctgccagaaaaggagacattactttctttacccgccaaggataccccccccggcgttcctgagaagagcctcgggggtagttcactcactgagactgaggcagccccgagtcttaccctgccgagtgtggattatattccccaagacagccctactccgagcgtgcggcagatccgaaatgagctggaggcaaggctgtcttctgccgccgagaaggaggccaaacctagtattggctctctgcctccaaagcctcgtctcgagggaggcagaatttgtgaaaacggcgcagatgatgataagctgtccaaaccggtcgcgaagaacctcccacctcagagtactacactgctccctaccacctccctccaaccaaaggcaatgctgggcccagccatccctcccaaagctactcccgagcctgccattcctcccaaagccactctctggcctgccacccccccaaaagccacgctgggacctgccacgcctctgaaagccacgagtggtccaacgacgccccttaaggccacgtccggccctgcaatcgcctcaaccgctacaaccctgcctactactacgtcccagcttatggccgagaaagatagtgggcccgccggccagcccgagaaacctgcgtcccaagaagtcagtactccaagtcaagctcgtggcgaggggtctcctagcgaagcaacgcgtcttccaactcagggagcccgtagcagcgctgcatttcccccaaagacttccccagggggaggcgaggtcccatgcctgtataagcctcactgtcatcagagtagtctgtcccgcgaagtggcagttgtaatgccaaccctcgccaggggaggcgcagccggaccaggagaacccgtcgaagtcaaggaaccgccgggattgccagcaaaaccccccgcatcagcccagccaaccgatgaactgctgcggcatcctgtgacaggcgaagtggtagagcgcggtagccccatggcacttttgctcgccgctcggcagcgggcgcagaaaggaaggagtgtcggggctgctctggggagaagctctctccctggaagcctcagagaccattcccaccaagcggaggcatcctccgattctatttttcactcccaggggacgcccaattctttcactgtggtgccaaagctcccgaaggaagctgagaaagactctccactgaccacagagatcccgaacaagtggggcccacggttgggtcgcgatgccgagggcactgaactaagcagaaggcacaattggacgaagcctgaacctcaagccccagtggcctgggagcgggttgctccttccaacctcccacaagggcaccctcttccaaaaagcttctcttcccctcctagtccgagcaataaacgtgaggaagaggaagaagaattcaattttgaagttataccccccccaccagaattctccaacgaccctgagccccctgcccccgccttgcagtatctaggccgtcagtcaagcccaccccgcaataactattcagacttgaggcagctacccaatgcaggccctggggctcccccagccttgggattcagccgttttcccgccggtgcccgctacgctggcgcagggggcctggagcggttctcaggcggggggagaagcctcatcaaaaaacgtctttacgttggggagccccacaggggccccggcttgccacacgggggtactggacgcagcttgagctctcctaattgcttcgggcctcagccgggaggtccagagatgcgaagagtgaactcggcaggtcgggcgccccccggagggttgcatgcacccagactgtccctcgaaggtgctgccaggggggcagctgaagcgaaacacaaggcaccaggcagcgccgattatgggtttgctccggccgccgggagatctccttatacgacgactcgatatggctctcctatcaacacattcactgtgcgtcctgggacacgtcaccccatctcatacgtatgcagcggggctcacagaaaggctacttcatag

SEQ ID NO: 23794 - DNA, 2598 bp, synthetic construct
  source 1..2598: mol_type = other DNA; note = Synthetic coding sequence
atggccgtggcccgggtggacgccgccctgccccccggcgagggctctgtggttaattggagcggacagggcctgcagaaactgggacctaaccttccctgtgaagcggacatccacacactgattctggacaagaatcagatcatcaaactagaaaatctggagaaatgcaagaggctgattcaactgtctgtggccaacaaccgcttggtgcggatgatgggagttgctaaactgacccttctccgagtgctgaacctcccacataattcgatcggctgtgtagaagggctgaaagaactggtacacttggagtggctgaacctggccgggaataatttaaaggcaatggagcagataaactcctgcaccgccctgcagcacctggacctctccgacaataacatcagccagattggggatctgagcaaacttgtctctctcaaaactctgctgcttcacggtaatattataaccagcctaagaatggctcccgcttacctcccccgatcactcgccatcctgtctctggccgaaaatgaaatccgtgacctgaatgagatttccttcctcgcctcgttgactgaacttgagcaactgtcaataatgaacaatccatgcgtgatggccaccccctctatccctggctttgattataggccttacatcgttagttggtgcctgaatctgcgcgttctggatggatatgtcataagccaaaaagaaagccttaaagccgagtggctgtatagccagggcaaaggccgggcctatagaccagggcagcatattcagctggtgcagtacttagccaccgtatgcccactcacatccacgcttgggctgcagacagctgaggacgccaaactggagaaaatcctgagcaaacagcgcttccatcagcgacagctcatgaaccaatcccagaatgaggaactctctccactggttccggtggagaccagagcaagcctgatacctgagcatagctcacctgtgcaggactgccaaatctctcaggaatcggagccggtgatccaggtcaactcatgggtgggcattaattcaaatgacgatcagctcttcgcagtgaagaacaatttccctgcttcagtacacaccacccgctattcccgcaacgacctccacctggaagacatccagaccgatgaagacaaactcaattgttcattgttgtctagcgagagcacttttatgccagtcgccagcggcctcagtcctctaagccccaccgttgaactccggctgcaaggcatcaatttgggcttggaagacgatggtgttgccgacgagtctgtcaagggactggaatcccaggtcctggataaagaagaagagcagcccctgtgggccgccaacgaaaattctgttcagatgatgaggtccgagattaacaccgaggtcaatgagaaggctggcttactcccctgtccagagcccactatcattagtgcgatcctcaaggacgataatcattctctgaccttttttcccgaatccacagaacagaagcagtcagacatcaagaaacctgaaaacacccagcctgaaaacaaagagacaatatcacaggccaccagtgagaagttgcctatgattctcacacagcgctcagttgcgctaggccaggataaagtggctcttcagaaactgaacgacgcggcaacaaagctgcaagcctgctggcgcgggttctatgctaggaactacaacccccaggcgaaggacgtcagatacgagatccgactgaggaggatgcaggagcacattgtgtgtttaacagatgaaattaggcgcctgaggaaggaaagggatgaagaacgcattaagaaatttgtgcaggaggaggccttcagattcctgtggaaccaggtgagatcgctgcaggtatggcagcagactgtcgatcagagactaagtagctggcataccgatgttccaccaatcagcagcaccttagtgccttcgaaacatccactgtttactcagtcccaggagagtagctgtgaccagaatgccgattggttcattgcatctgatgttgccccccaagaaaagtccctgccagaattccctgactccggttttcattcatcccttactgagcaggtccactcattgcagcacagtctcgatttcgaaaagtcctccacagaaggttcggagagctctatcatgggcaacagcatcgacacagtacggtacggaaaagagtccgatctgggcgacgtaagcgaagagcatggcgagtggaataaggagagctcaaacaacgagcaggataactcgttactcgaacagtacttgacctctgtgcagcagcttgaggatgcagacgagagaactaatttcgataccgagacacgtgactctaagttacatatcgcttgcttcccagttcagctggacactttatccgacggtgccagcgtggacgagagccacggcatctctccaccgttgcagggagaaattagccagactcaggagaattcgaagcttaacgctgaagttcagggacagcagcctgagtgcgatagcacctttcagctgctgcatgtgggagtcaccgtgtag

SEQ ID NO: 23795 - DNA, 1275 bp, synthetic construct
  source 1..1275: mol_type = other DNA; note = Synthetic coding sequence
atgagcgtgggctgccccgagcccgagcccccccggagcctgacctgctgcggaccagggacggcccctggacccggagcaggcgtgccactgctcacagaggatatgcaggcactgaccctgcggactctcgccgccagtgacgtgactaaacactacgaactagtccgagagcttgggaaaggaacttatgggaaagtggatctggtagtatataaaggcactgggaccaagatggcactgaagtttgtgaataagagcaagaccaagttaaagaactttctccgggaagtttctatcacaaatagtctgtcgtcttccccgttcatcatcaaggtgttcgacgtggtttttgagacagaggactgttacgtattcgcccaggagtacgccccagccggggacctgtttgacatcatacccccgcaggtgggactaccagaggataccgtgaagagatgtgtgcagcagctggggttggcgctggactttatgcacgggcggcagctcgtgcatagagacataaaaccagagaatgtgctgctgttcgatagggagtgtcgccgggtgaagttagcagacttcggcatgacgaggcgcgtcggctgccgggtcaagagggttagcgggactattccgtacactgcgcccgaagtgtgtcaggccggccgcgcagatggactggccgtggatactggagtggacgtctgggcattcggcgtgctgattttctgcgtgctgacgggaaactttccttgggaggcagcgtctggggccgacgctttcttcgaggagtttgtccggtggcaacgtggccgtctccccgggctcccctctcagtggcgccggtttacagaaccggctctgcgcatgttccaaaggctcttggcattagaacccgaacgccgtgggcccgccaaagaggttttcagatttctgaagcacgaactgaccagcgaacttaggagaagaccctcacaccgcgcaaggaaaccccccggtgatcggcctccagcagccggcccgctgcgcttggaggctccaggtcccctgaagagaacagtgctcactgaatcaggatccggtagcagaccggccccaccggcagtgggtagtgtcccattacccgtcccagtgcctgttccagtgcctgtcccggtgcctgtgccggagcctggcttggcacctcaggggcccccaggcagaacggacggtcgcgctgataaaagcaaggggcaggttgtacttgccacagccatcgagatatgtgtttag

SEQ ID NO: 23796 - DNA, 1632 bp, synthetic construct
  source 1..1632: mol_type = other DNA; note = Synthetic coding sequence
atggccacccggcggctgggcgtgggcgagaccctgggcgccctgaacgcggcccttggacctggaggtccagtctggatcaaggaaactcgcacccgacatttgcgatcccgcgattttctcgcaccccacagggcccttcaggctaggttcgacgacggccaggtgcctgagcatctgctgcacgctctcgcatgtcttcagggacctggcgtcgcacctgtattacggtgtgcccctacacccgcaggtctctccctccagctacagaggagtgccgtattcgaacgtgtgcttagcgccgtcgccgcctacgccacaccagcctccccggcctccctgggtcagagggtgctgttgcattgccctgcactgcggtcatccccatgcgccttgaggctgtcgcagctcagaacggttctcgtggccgatcacctcgcgagagctctacgtgcacatggcgtgtgtgttcggctcgtgccggcagtgcgcgacccccacatgctgacatttctccagcagctccgtgtggattggcctgccgcttccgaaagagcttctagtcataccctcagatcacatgcattagaggagctgacttccgccaatgacggtcgcaccctctcccctggtatactgggtaggctgtgtcttaaagagctggtggaggaacaaggacgaacagcaggttatgaccccaatttagataactgtctggtcactgaggacctgctttcagtgctggctgagctacaagaggccttgtggcactggccggaggactcccaccccggtctcgctggggcatcagataccggaactggtggctgtttggtagtgcacgttgtgagctgtgaggaagagttccagcagcagaagctagacttgctgtggcaaaagctagtcgacaaagctccactgcgccagaagcacctaatttgcggcccagtaaaagtggccggtgctcctgggaccctgatgacagcgcccgaatactacgaatttcgtcacacccaggtgtgcaaagccagtgcgctcaaacatggaggtgaccttgcacaggaccctgcctggactgagatcttcggagtgctgtcagtcgccactattaaatttgagatgttgagtaccgcaccccagagccagctatttctcgccctagctgacagcagcataagcacaaagggcaccaagtcaggcacattcgtcatgtacaactgcgctcggctcgctacgctgtttgaatcctataagtgttctatggaacaggggctatatccaacatttcccccggtcagcagtttggacttctcactactgcacgacgaaggggaatggctgctcctgttcaacagcatacttccttttcccgatcttctttcacggacagcggtgctagactgtacggcacctggactccatatcgctgtgcgcactgagatgatctgtaaattccttgtccaactgtcgatggacttttctagctattacaacagggtgcacatcctcggtgagccacgaccgcacttgttcggtcagatgtttgtgcgcctccagttgttacgggccgtgcgggaagtgttacacacaggcttggccatgctaggactcccccctctctctcacatttag

SEQ ID NO: 23797 - DNA, 1353 bp, synthetic construct
  source 1..1353: mol_type = other DNA; note = Synthetic coding sequence
atgggcaagagcttcgccaacttcatgtgcaagaaggacttccaccctgcttccaagtctaatatcaagaaagtctggatggcggagcagaaaatcagctacgataagaaaaagcaggaagagctgatgcagcagtacctgaaggaacaagagtcgtacgataatcgccttttgatgggcgacgaaagggtgaagaatggtttgaattttatgtatgaggcacctccaggtgcgaagaaagaaaataaggagaaggaagagacggagggcgagaccgaatacaagttcgagtggcaaaagggagcaccacgcgaaaagtacgcaaaggatgacatgaacataagagaccaaccttttggcatccaggtacggaatgttagatgcataaaatgtcataaatgggggcacgtgaatactgatcgagaatgccccctgtttggcctgtctggaatcaatgcatcctcggtgcccacagatgggtcaggtccaagcatgcaccccagcgagttaatcgccgagatgaggaacagtggatttgccctgaaacggaatgttctggggagaaatttaaccgcgaatgacccgagtcaggaatatgtagcttctgagggggaggaagacccagaagtggagttcctgaagagccttaccaccaaacagaagcaaaaactcctgaggaaactggatagattggaaaagaagaagaaaaagaaagatcggaagaagaaaaaatttcagaaatcccgatccaaacataagaagcacaagtcctcctcttccagttcgtcttccagttcctcgtccagcagtacagagactagcgagtcttcttccgaatcagagtctaacaacaaggagaaaaagatccagaggaagaaaagaaagaagaacaagtgctctgggcacaataacagtgacagcgaggaaaaagacaaatccaagaagaggaagctgcacgaggagcttagcagcagccatcacaatagagaaaaggcaaaagagaagccccgctttctgaaacacgaatcctcccgggaagatagtaaatggtcacactcggactccgacaaaaaatcaaggacccataagcacagcccagaaaagcgggggagtgagagaaaagaggggagttctcgctctcacgggagggaggaacggagcagaaggtcgagatctcgatcccccggctcctataagcagagagaaactcggaagcgggcccagcggaatcccggagaggagcagagcaggaggaatgattctaggagccacggtaccgatctctaccggggggagaagatgtatcgagagcatcctggtggcacacataccaaagtgacgcagagagaatag

SEQ ID NO: 23798 - DNA, 1152 bp, synthetic construct
  source 1..1152: mol_type = other DNA; note = Synthetic coding sequence
atgagccccgaggtggccctgaaccggatcagccccatgctgagcccatttatctcttccgttgtcaggaacggcaaggtgggcttggatgctaccaattgtctcagaatcaccgatctgaagtcagggtgtacttcccttacacctggcccaaactgtgacaggtttaagctccacatcccatacgccggagaaacgctgaagtgggacatcattttcaacgcccaatatcccgagctgccaccagatttcattttcggggaagacgccgaatttctgccagacccatctgccttacaaaacctggctagctggaacccgtccaatcccgaatgcctcctcctcgttgtaaaagagctggtccagcagtatcaccagtttcagtgctctagactgagggaatcctctagactcatgttcgaataccagaccctgctggaggaacctcaatacggagagaatatggagatttatgcaggcaagaagaataactggaccggggaattcagcgcaagattcttgctcaagctccccgtggattttagcaacatccccacatatttacttaaggacgtaaacgaagacccaggcgaggatgtggcactcctgtctgtgtcattcgaggataccgaggcgactcaggtgtatccaaagttgtacttatcacctcgcattgaacatgctctgggagggagctcggctctccatatcccagctttccctgggggcggatgcctgattgattacgttccccaggtgtgtcatctcttaaccaacaaggtgcagtatgtgatacagggctaccataagcgaagagagtacatcgctgcctttctttcccacttcggaaccggcgtggtcgaatacgacgccgaaggctttactaaactgacgctgttacttatgtggaaagacttctgttttctggttcacatcgacctgcctctttttttcccacgagaccaaccaacattgacattccagtccgtgtatcatttcaccaactccggccaattgtactcacaggctcagaagaactatccttattcccccagatgggatgggaatgaaatggccaaacgggccaaagcctatttcaaaaccttcgtaccacagtttcaggaggcggcttttgcgaatggaaagctgtag

SEQ ID NO: 23799 - DNA, 675 bp, synthetic construct
  source 1..675: mol_type = other DNA; note = Synthetic coding sequence
atgcccaaccggtgcggcatcatccacgtgcggggccccatgccccctaataggatctctcacggcgaagtgctagaatggcagaaaacttttgaagaaaaactgactcccttactaagcgtgcgggagtcattgagtgaagaagaggcacaaaagatggggaggaaggatccagagcaggaggtggaaaaattcgtgacctctaacactcaggaactggggaaagataagtggctgtgccccctctcgggaaaaaaatttaaggggcctgagtttgtgcgcaaacacatcttcaacaaacatgctgaaaagatcgaagaggtgaagaaagaggtagccttttttaataatttcctaacagacgccaagcggccagccctccctgagatcaagcccgcgcaacccccaggtccagcacaaatactgcctccggggctgacacctggcctcccctatccccatcaaaccccacagggactgatgccatacggccagccaaggccacctatcgggctgtggtcttggtgctgccctccctgttcaccacaagaggccctccacacccccatgccacgcatggtactagtagaaggcacaatgatgccatcagaggctcgagaggttatactcggaaacctcgctacagggtggtttgttgagacgcagggcccttag

SEQ ID NO: 23800 - DNA, 4806 bp, synthetic construct
  source 1..4806: mol_type = other DNA; note = Synthetic coding sequence
atggaggccggcagcgtggtgcgggccatcttcgacttctgcccctccgtttcagaagaactcccactcttcgtgggggatatcatagaagtattggcagtggtggacgaattttggctgctggggaaaaaggaagatgtgaccggccagtttccaagctccttcgtggaaattgtgacgataccatcactcaaggaaggcgaacgcctattcgtgtgtatttgcgaatttacctcacaggaacttgataacttgccactccatcggggtgatcttgtgattttggatggcatccccacagccggatggttgcagggacggtcttgctggggggcccgaggattcttcccatcctcatgcgtcagggaactgtgtctatcaagccaatctcgccaatggcactcacaatctgctctgtttcagatcccagaatacagtatgggtcaagcgcgcgccttgatggggctttccgcccaacttgacgaggaattggatttcagagaaggtgacgtgatcaccatcattggcgtccctgagcctggatggttcgaaggggaactggaggggcgcagaggcatttttcccgaaggctttgtcgagcttctcgggccacttcgcacggtggacgaaagtgttagttctgggaatcaagatgactgtatagttaatggtgaggtggatactccggtcggcgaggaggagatcggacctgatgaagacgaggaagagcccgggacttacggggttgcgttgtacaggtttcaggcgctggaaccaaacgagctggactttgaggtaggggataagattcgcattttggcgaccttggaagacgggtggcttgagggctcgttaaagggaagaaccggcatctttccctatagattcgtgaagttgtgccctgacaccagggtggaggaaacgatggcgcttccccaggaaggatcgttggcgagaattcctgaaacatccctggactgtttggagaataccctcggcgttgaagagcagcgacacgaaacctctgaccacgaggctgaggagccagactgcatcatcagtgaagcccctacttcccccctcggacacctgacgtctgagtatgataccgaccgcaatagctatcaagacgaggacaccgcaggtggaccacccagatcacctggagtggagtgggagatgcctctggccaccgacagcccaacaagcgaccccaccgaggttgtgaacgggatttcgagccaaccgcaggtgccgtttcaccctaatctacagaaatctcagtactacagcacagtggggggcagccaccctcattccgagcagtatcctgatttgctccccctggaggcacgaactagagactatgcctccctgcctcccaagaggatgtattcccagcttaagacactccagaagcccgtgttgcctctttacaggggaagttctgtttcagcttcccgggtggtgaagcccagacaatcttcgcctcaacttcacaacttggcctcttacaccaagaaacatcacacctctagcgtgtactccataagtgagcggctagagatgaaaccaggaccccaggctcaggggttggtcatggaggcagccactcattctcagggggacggcagtacagacctcgactctaaactcactcagcagctcattgaatttgagaagagcctggccggccctggcaccgagcctgacaagatcctgagacactttagtatcatggatttcaatagtgagaaggacatcgtccgcggctcgtccaagctaatcactgagcaagagctgccggagaggcgcaaggccctgcgaccaccccctccacggccctgcacacctgtgtccacctcacctcacctgctcgtggaccaaaatctgaagccagcaccaccactggtggtgcggccgtcaaggcctgcccccctgccaccttcagcccagcagagaaccaacgctgtgtcccccaaactgcttagccgacaccggcctacatgtgaaacactggaaaaggagggacccggtcatatggggaggtccctggatcagacttccccttgtccgctggttcttgttcgcatcgaagagatggagagagacttagacatgtacagccgggcacaagaggaacttaacctgatgctggaagagaagcaagacgagtcgtcccgagccgaaacccttgaggacctgaaattctgtgagagtaatatcgagtcattgaatatggagttacagcagctgcgcgagatgacccttttgagcagccaatcctcctcactggttgccccatccggctccgtgagcgccgagaatcctgaacaaaggatgctcgagaagcgcgcaaaagtgatagaagaactgctgcagaccgaacgggactacattcgcgatcttgagatgtgcatcgagagaattatggtaccgatgcagcaggcccaggtccccaacattgactttgagggtctgtttgggaatatgcagatggtgattaaggtatcgaagcaacttttggctgccctggaaatttccgacgcggtcggccccgtattcctgggccaccgtgatgagcttgagggtacttacaaaatctactgtcagaaccacgacgaggcgatagcgctgctcgagatttatgaaaaggacgagaaaattcagaagcatctgcaggacagcttagcagatcttaagagcttgtacaacgaatggggctgtacaaactatatcaacctgggcagtttcctcattaagcctgtgcagagggttatgcgctaccctctcctgcttatggagcttctgaattcaaccccagagagccaccccgataaagtccccctaaccaacgcggtactggcggtcaaagagattaacgttaatatcaatgagtacaagcgtagaaaggacctcggcaaaaactcaattatcgcggaaaaagagtacgcacatgctgaggagtcagccttcctgacctactccctcgtgctgaagtatcgtaaaggggacgaggattcattaatggaaaagatcagcaaacttaacatccactcgatcatcaagaagtcaaacagggtgtcttcccacttgaagcaccttaccggattcgccccacaaatcaaggacgaagtgttcgaagagaccgagaagaacttccgcatgcaggagagattgattaagtccttcatccgagatttatctctctacttacagcacatccgggagtctgcctgcgtcaaagtggtggctgcagtctccatgtgggacgtgtgcatggagcggggtcaccgggatctggaacaattcgaaagggtccacaggtatatatccgaccaactgttcacaaacttcaaagagcgcaccgagagacttgtgatctcccctctaaaccagttgctttccatgtttacaggtcctcacaagctggtccagaagagatttgacaaactgctcgacttctacaactgcacggagcgcgcagagaaactcaaggataagaagactttggaagagctgcagtcggccagaaacaattatgaggcccttaatgcccagttattggatgagcttcctaaatttcaccagtacgcacagggactcttcaccaattgtgttcacggatacgccgaagctcattgcgattttgtgcaccaggccctggaacagttgaaaccccttctgtcactcctgaaggtagccggaagagaaggaaatttgatagccattttccatgaggagcattctcgtgtgctccaacagctgcaggtgtttactttctttcctgaatccttgcctgcaacaaagaaaccttttgaacgcaagaccattgatcgccagagcgccagaaagccgttgttgggtctgccgtcctacatgctacagagcgaagaattgagggcctcactcctggcccggtatccccccgaaaaactgttccaggctgaaaggaattttaacgccgcccaggaccttgatgtcagcctcttggagggcgaccttgtcggggtcattaagaaaaaagatcccatgggcagccaaaatcgttggctcattgacaatggagtgacgaaagggttcgtgtacagcagctttctgaagccctataacccaagaaggagccactcggacgcaagcgttggtagccactcgtctactgagtctgagcacgggtcaagctcaccacgtttcccccgtcagaatagcgggtcaactctgacgtttaacccgtctagcatggcagtgtctttcacatcgggctcttgtcagaaacagcctcaggatgcctctcctcctcccaaggagtgcgatcaaggcactctttcagcaagcctcaatccctcgaactctgaatccagcccatcaagatgtccttccgacccggatagtacctcgcagccccgcagcggcgattccgccgacgtggctcgggatgttaagcaacccaccgcgacgcccagatcgtaccgaaactttcggcacccggagatcgttggctactccgtgcctggtcgcaatgggcagagccaggatctggttaaaggctgcgcccgcactgcacaagctccagaagatcgatccaccgaaccagatggatccgaagcagagggtaaccaggtgtacttcgccgtgtacaccttcaaagcacggaatcccaacgagctatcagtctctgccaatcagaagctgaaaatcttagaatttaaagacgtgaccggaaacaccgaatggtggctagctgaagtcaacgggaagaagggctatgtcccgtcaaattacatacgcaagacagagtacacatag

SEQ ID NO: 23801 - DNA, 1596 bp, synthetic construct
  source 1..1596: mol_type = other DNA; note = Synthetic coding sequence
atgaagtgccactacgaggccctgggcgtgcggcgggacgccagcgaggaagaacttaagaaagcatatcgaaaattggctctgaagtggcatccagataaaaacctggataacgcagcagaagccgcagagcagttcaaactcattcaagcggcctatgacgtcctgtcagatccccaagaacgagcttggtatgataatcatagagaggcccttttaaagggaggcttcgatggagaataccaggacgacagtctagatctgcttagatattttaccgttacctgctattccgggtacggagacgatgaaaagggcttctacactgtctacaggaatgtatttgagatgatcgccaaggaggagctagagtctgttctggaggaggaagtggacgactttccaacctttggcgactcccagtcggattatgacacagtggtccacccattctacgcgtattggcagagcttttgtacacagaaaaatttcgcttggaaagaggagtatgacaccaggcaagcctccaacagatgggagaagcgcgcaatggaaaaagagaataagaaaatcagggataaggcacgtaaagagaagaatgagctggtgaggcagcttgtagcgttcatacgaaaaagagacaaaagggtgcaagctcaccggaaactcgtggaagagcagaatgccgaaaaggcaagaaaggcagaagagatgcgacgccagcagaagctgaaacaggccaaactcgttgaacagtaccgggagcagagctggatgaccatggctaatctggagaaggaactccaagagatggaggctcggtacgagaaggaattcggagatggatctgacgaaaacgagatggaggagcacgagctcaaagacgaagaggacggtaaggacagtgatgaagcagaggacgctgagctttatgatgatctgtattgtcctgcctgcgacaagtcttttaagactgagaaggccatgaaaaatcacgagaagtcaaagaagcacagagaaatggttgctctgctcaagcagcagttagaagaggaggaagaaaatttctcacgccctcaaatcgatgagaatcccctcgacgacaatagcgaagaagaaatggaggacgcaccaaaacagaagttgagtaagaaacagaagaagaagaagcagaaaccagcccagaactacgatgataactttaatgtcaatggcccaggagagggggtaaaggtcgaccccgaggacacgaatcttaaccaagattccgctaaggagttagaggattctccccaggagaacgtgtccgttacggaaataatcaagccctgtgatgaccctaagtctgaggccaagagcgtgccaaaaccgaaggggaagaaaacgaaagatatgaagaagccggtgcgggtgccagccgagccacaaacaatgagcgtcctgatctcatgcaccacctgccattcagaatttccaagccgtaataagctgttcgatcatctaaaagcaactggacatgctcgggcaccaagctcctcaagcctgaatagtgcaacctcgtctcagagtaagaaagaaaagagaaagaacaggtag

SEQ ID NO: 23802 - DNA, 1353 bp, synthetic construct
  source 1..1353: mol_type = other DNA; note = Synthetic coding sequence
atggtggtgcaggccgccgtggcccccaaccggagccagcggctgttgctgaagataccctatgggtctctgcgtcgcaggagcgttgagcggatgaccgagggccggcgatgccaggtgcacctgctcgatgaccgcaaattggagctcctggtgcagcctaagctgcttgctaaagagctgcttgacttggtggcctctcatttcaatcttaaagagaaagagtattttgggatcgcctttaccgatgagaccggacacctgaactggctgcagctggaccgacgggtcttagaacacgacttccccaagaagtctggaccagtggtgttatacttttgtgtgaggttctacattgagagtatatcttatctaaaggacaacgccaccatcgagctgttcttcctgaatgcaaagagctgcatttataaagaattgatcgatgtcgacagcgaggtcgtcttcgagttggcgagttacattttgcaggaggcaaaaggcgatttttcgtccaatgaagtggtcagatctgaccttaagaaactccctgctctcccaacccaggccctgaaggaacacccctccctagcctattgtgaagaccgtgttatcgagcattataagaaactgaacgggcagacccgcgggcaggctatcgtaaactacatgagcattgtggagagtctgcccacctacggtgtacattactacgcggtaaaagataagcagggcatcccttggtggcttggcctatcgtataagggaattttccagtatgattatcacgacaaagtaaagcctaggaagatctttcagtggcgccagttagagaatctttatttccgagaaaagaagtttagcgtggaggtccacgatcccagacgagcaagtgtgacgcgcagaactttcggtcactctggcatagccgtgcatacctggtatgcttgcccagctctgatcaaatctatctgggctatggctatctcccagcatcaattctaccttgatcggaaacagtctaagagcaaaattcatgccgcaagaagtctttcagaaatagccattgacctgactgagacaggcactttgaaaaccagtaagctggccaatatgggttcaaaaggcaaaatcatttccggctcgtcgggctcactgcttagttccggacgacagcggcccgctggaggaacacctcccgagcacggatgggaccctagaggagatccaggacggtggggggagctgcagctcggtcggttgcagggtaaattgttgcagtcctggctctgttttcccgaccagggttgggacccaaacgccaatctgaggaaactgcttcccggaatcaagtag

SEQ ID NO: 23803 - DNA, 1020 bp, synthetic construct
  source 1..1020: mol_type = other DNA; note = Synthetic coding sequence
atggagggcgagcccccccccgtggaggagcggcggcggctgcaggaggagttgaatgagttcgttgagagcggatgccgcacactagaggaagtgaccgcatccctgggctgggatctggattctctcgaccctggcgaagaggaagcggcggaagacgaagttgttatttgcccatacgacagtaatcatcacatgccgaagagttctctggcgaaacacatggcctcctgccgcctcaggaagatggggtacacgaaagaggaggaagacgagatgtacaatcccgaatttttttatgaaaatgtcaagattccgtctattacacttaataaagattctcagtttcaaattatcaagcaggcccggaccgctgtcggcaaggacagcgactgttataaccagcgtatctatagttcactccccgtggaggtaccactgaatcacaagcggtttgtgtgcgatttgacacaggccgaccgactggctctctacgacttcgtcgtcgaagagaccaagaagaagcgctccgatagtcagatcattgaaaacgacagcgatcttttcgtcgacctcgcagccaagatcaatcaagataacagccgcaagagtcctaaaagctacctggaaatcctggccgaagtacgagattataaaaggcgaaggcagtcttatcgtgctaaaaatgttcacatcacgaaaaaaagctacaccgaagtcattcgggacgtcattaatgttcatatggaggagctgagcaaccattggcaagaggaacaggagaaggctgaagacgacgccgagaaaaacgaagaacgtcgctccgcatctgtggatagccgccaatccggcggtagctatttggatgctgaatgctcgagacataggcgggaccgatctaggtcccctcataaaaggaaaaggaataaggataaggataaaaattgtgagtccagacgaagaaaagagcgagatggggagcgacatcactcccacaaacggagaaagcagaagatctag

SEQ ID NO: 23804 - DNA, 6810 bp, synthetic construct
  source 1..6810: mol_type = other DNA; note = Synthetic coding sequence
atggccgagcccagcagcgcccggcggcccgtgcccctgatcgagtcagaactgtatttcttaattgctaggtatctgagcgcgggaccgtgcaggcgagctgctcaggtgctcgtgcaggagcttgaacagtaccagctgctaccgaaacggctcgactgggaggggaacgagcacaaccgtagctatgaagagctcgtgttgtctaacaagcacgttgcacctgaccacctactccaaatttgccaaaggattggcccgatgcttgataaggagatccccccatccatttcgcgcgtgacttccttactgggtgcaggaagacagagcctcttgcgaaccgccaaggattgccggcacacagtatggaaaggatcagcttttgcggcccttcataggggtcgccccccggagatgcctgtgaattacgggtcccccccgaaccttgtcgagattcacaggggaaagcagctgacggggtgctctacctttagtactgcctttcctggaaccatgtaccagcacatcaaaatgcacaggagaatcctgggccacctgtctgcagtctactgcgtggcctttgaccgcaccgggcacagaatctttaccggatccgatgattgtctggtcaagatatggagcacccacaatggacgcttactcagcaccctccgcggccactccgcagagatcagcgatatggccgtgaattacgagaatactatgatcgctgctggctcctgtgacaaaatcatcagggtatggtgtctcagaacatgtgcaccggtcgcagttctccaggggcacaccggcagtataacaagtctgcagttcagtccaatggcgaaaggttcacaacgatacatggtgtccacaggagccgacgggacagtctgcttttggcagtgggacctggagagcctgaaatttagtccaagaccactcaagtttactgagaagccaagacctggcgtgcagatgctgtgctccagtttctctgtagggggaatgttcctggccaccggaagtacagaccacgtcattaggatgtacttcctgggatttgaagcccctgagaagattgctgaactggaaagccacaccgacaaggtcgactccatccaattttgcaacaatggtgacaggtttctatctgggagccgcgatgggacggcaaggatatggcgtttcgagcagcttgagtggcggtcaatcctgttggatatggccacgagaatctcaggggatttatcgagcgaagaagaacggttcatgaaaccaaaggttacaatgatcgcatggaatcaaaacgattctatcgtggtgacggcggtcaacgatcatgtcctaaaggtgtggaacagctatactgggcagctgttacataatcttatgggtcacgccgatgaggttttcgtactggagacccatccgttcgatagtcggattatgctgagcgccggacatgacggcagcattttcatatgggacatcaccaaagggaccaaaatgaagcattattttaatatgatagaaggccagggacacggagctgtctttgactgcaagttcagccaggacggacagcacttcgcctgtactgattctcatggacatctgttaattttcggtttcggatgctcaaagccgtatgaaaaaatcccggaccaaatgttcttccatactgactaccgcccactcatacgggactctaacaattacgtcttagacgagcagacacaacaggcgcctcacttgatgccaccgccattcctcgtggacgtcgacggtaatccgcatcccactaagtatcagaggttggtccccggacgcgagaatagcgcagacgagcatctgatccctcagctgggatacgtggcaacatccgacggcgaagtgattgaacaaataatttcacttcaaaccaacgataacgatgaaagaagtcccgagagctcaatcctggacgggatgattagacagctgcaacagcagcaggaccaacgcatgggtgctgaccaggataccattccaagaggtttatcaaacggcgaagaaaccccacgacgcggattccggagactgtcccttgatatacaatctccgcccaatatcgggcttcgcaggagcggtcaagtggagggagtgcgccagatgcatcagaatgccccaaggagtcagatcgctactgagagggacctccaggcttggaagcgtagggtggtcgtgccagaagttccgctgggcatttttcgaaagctggaggactttcggttagagaaaggcgaggaggagcggaacttgtacatcatagggcgcaagaggaaaacattacagctaagccacaagtccgacagcgtggttctggtttcccagtcccgacaaagaacctgtagacggaaatacccaaattacgggcgacgtaaccggagttggagagaactcagcagcgggaatgagagtagcagttctgtgcggcacgaaacatcgtgcgaccagtccgagggtagcgggtctagtgaggaagatgaatggcgttccgacagaaagtctgagagttattcagaatctagcagcgacagctcgtccaggtacagtgactggacagccgatgcaggcatcaacctgcagcccccgttacgaacttcctgtagaagacggattactagattttgtagttcatctgaagatgaaattagcaccgagaacctcagccccccgaaaagacgaaggaaacgcaaaaaggagaataagccgaaaaaagagaatctgcgcagaatgaccccagcagagctggccaatatggagcacttatatgagtttcatccccctgtgtggatcacggacaccacactgcggaagtctccttttgttccacagatgggcgatgaggtcatatattttcggcagggacacgaggcctatattgaagccgtgcgacggaacaatatctatgaacttaatccaaataaggagccttggcggaagatggacttgagggatcaggaacttgttaaaatcgttggcattcgctatgaagtcggccctcccaccctctgctgccttaaactggcctttatcgacccagctaccggaaaattgatggataaatcctttagtatccggtaccacgatatgcccgatgtgatcgactttcttgttctgcggcaattctatgatgaggcaagacagcgtaactggcagagttgtgatagattcaggtcaatcatagacgacgcctggtggtttggaacagtgctcagccaggaaccgtatcagcctcagtaccccgactcccacttccagtgttatatcgtgaggtgggataatacagagattgaaaagctctctccgtgggatatggaacctatccctgacaatgtggaccctcctgaggagcttggcgctagtatcagtgtgactaccgacgagctggaaaaacttctgtataagccacaggccggagagtggggccagaagagcagagatgaggaatgcgatcggatcatttctggcatcgatcagctactaaatcttgacatcgcagccgctttcgccggcccagtcgacttgtgcacctatccaaaatactgcacagttgtcgcctaccccacagatctctacacaatccgcatgcgactggtaaatcgattctatcgcagacttagcgccttagtttgggaggtgcgttatattgagcataacgctcgcaccttcaatgaacctgagtcggtgatcgccaggtccgccaagaagattaccgaccagctcctgaaatttattaaaaaccagcattgtacaaatatcagcgaactaagtaatacctccgagaacgatgagcagaacgccgaggacctggacgatagcgacctgccgaagacctccagtggtaggaggagagtgcacgacgggaaaaagtcaatccgcgccactaattatgttgaatcaaactggaaaaagcagtgtaaggaactagtcaacttaattttccaatgcgaagatagcgaacccttccggcaaccagtggacttggtcgaatatcccgattatcgtgacattattgacactcctatggatttcggtactgtgagggagacgcttgatgctggcaactacgattctcccctcgaattctgcaaggatattaggctcattttctccaatgcaaaggcctatactcccaacaagcggtccaaaatttactctatgaccctcagactctcagccctgttcgaagaaaagatgaagaaaatcagctccgatttcaagataggccagaaattcaacgagaaattgagaaggagtcagcggtttaagcagcgccagaattgcaagggtgattcccagcccaataagtccatcagaaatcttaaacctaaacgcttgaagtcccagaccaagattatccctgagttagtaggctcaccaacccaatcaaccagcagtaggacagcctatctgggtacacataagacttcagccggaatctcctctggagttacttcgggcgattcaagcgactcagctgagtcctccgagcggcggaaacggaaccggccaatcacgaacggaagcactctctccgaatccgaggtggaagacagcctggccacctctctgagctcttcagcttcaagctcttccgaagagagcaaggagtccagtcgagcaagagaatcttcatccagaagcggcctgtcccgcagttctaaccttcgggtcactagaacaagagctgcacaacgcaagactggtcccgtgagcctggctaatgggtgcggacggaaggcaacaagaaagagggtctatctcagcgacagcgacaataactccttggaaacaggtgaaatcctgaaggctcgcgcgggcaacaatcgaaaggtattgagaaaatgcgcagcagtagcggcgaacaagatcaagctcatgtcagacgttgaagagaattcttcctcagaatccgtgtgcagtggtcgaaagttaccacatagaaatgcctcggcagtggccagaaaaaaactgctgcataactcggaagatgagcagtctctcaagtctgaaattgaggaagaagagctcaaggatgaaaaccagctgttgcccgttagttccagtcatacggcacaaagcaatgtagatgaaagcgaaaatagagattccgagtccgagtcagacctccgggttgctaggaagaattggcatgccaacggctacaagtcccataccccagctccaagtaaaactaagttcctcaagattgagtcaagtgaggaagactcgaagtcccacgattccgaccacgcgtgcaatcggacagctgggccaagcacttcagtgcagaaactgaaggctgagagtatctccgaggaggccgactccgaacctggacggagcggaggcagaaagtataataccttccataagaacgcgagcttttttaagaagactaaaattctcagcgactcagaagactcagaaagcgaggagcaggacagggaagacggcaagtgccacaaaatggagatgaacccaatctcaggaaatctcaattgtgatccaatcgctatgtcacagtgctcgagcgaccacggttgtgagactgatcttgactcagacgatgacaaaattgagaaaccaaataattttatgaaggatagtgcttcccaggataatggactatcccgcaagatcagccgcaaaagagtttgtagtagtgactccgattcttccctgcaggtggtcaagaagagctccaaggcccggactggtcttctgagaatcacaagacggtgtgccgctacagctgctaataagatcaaactgatgtcggacgttgaggatgtgtccctggagaatgtccataccagaagcaaaaacgggcgaaaaaagccactccatctcgcctgtaccaccgcaaaaaagaagctatcagattgcgaaggtagtgtgcattgcgaggtgccaagcgagcagtatgcctgtgaaggaaagccccctgatcccgattctgagggctcaaccaaggtcctttcacaagccctcaacggggactctgattcagaagacatgctgaattcggaacataagcacagacatacaaatattcacaagattgacgcgccttccaagcgaaaatcatcgtcggttacctcaagcggagaagactctaagagtcacatccccggtagtgagaccgatcgaacattcagttcagagagcacactggcccagaaggcgactgccgaaaataatttcgaagtggagctcaactatggacttcgccgctggaacggccgcagactccgtacgtatggaaaagcacccttttccaaaaccaaggtaatccacgattctcaggaaacggctgaaaaggaggtcaagagaaaaagatcccacccagagttagagaatgtaaagatctccgagactactggcaactcgaaattcaggccagacacctctagtaaaagctctgacttaggctctgtcacagagtctgacatcgactgcacagataacacaaagaccaagcgccgtaaaactaaaggtaaagcgaaggtggtgagaaaaggcaaaaccttcacagctaatatcagcaaaaccgtacggaggcagagacaatccaagaggccacggcttagtgtggacgataacgactgggaggatttggactacgctaaaagcaaacgcgtgctccgaagaagtaagattaaaacccggaatcaaggccgcaggactgtgcgataccatgacggtgatgacgaccgtagcttagaaaacgtcctcgatttcaacggatgcaccttgtag

SEQ ID NO: 23805 - DNA, 492 bp, synthetic construct
  source 1..492: mol_type = other DNA; note = Synthetic coding sequence
atgaccgcccccagctgcgccttccccgtgcagttccggcagcccagcgtgagtgggctgtcccagatcacaaagtccttatacatatcaaacggggtggctgccaataataagttaatgcttagctccaaccagatcaccatggtgattaacgttagcgttgaagttgtgaacacactgtacgaggatattcagtacatgcaggtgcctgtcgctgactccccaaattctagactgtgcgatttcttcgaccccatcgcagatcacatccactccgtcgagatgaagcagggaagaacccttctgcattgcgccgcaggcgtgagccggtcggcggccctgtgcttggcgtacctgatgaaatatcatgctatgtctctgctcgacgcacacacttggactaagtcatgtaggccaattatacggccaaactctgggttctgggaacagctgatacactatgaatttcaattgttcggcaagaatacctag

SEQ ID NO: 23806 - DNA, 756 bp, synthetic construct
  source 1..756: mol_type = other DNA; note = Synthetic coding sequence
atgatcagcaccaccagcaaggagaccaagaaggacaccaagctgtattgcatctgcaagactccctacgatgagagcaaattctatattggttgtgacctatgcaccaactggtaccacggggaatgtgtaggtattacggagaaggaggctaaaaaaatggatgtgtacatctgcaacgattgtaaacgtgcccaagagggtagcagtgaggaactgtactgcatttgcagaacgccatacgacgaaagccaattttacatagggtgcgataggtgccagaactggtaccatggaaggtgtgtcggcatacttcagtctgaggccgagcttatcgatgagtatgtttgcccccaatgtcagtccaccgaggacgcaatgaccgtgctgacgccactaacagaaaaggactatgaaggtttgaagcgagtgctgagatcactgcaggcccataagatggcatggccttttctggagccagtcgatcctaatgacgcccccgactactacggggtgattaaagagcccatggacctcgctaccatggaggaaagagttcagagacgctactacgaaaagctgacagagtttgttgctgatatgaccaaaatcttcgacaactgtcgctactataaccctagcgattcacctttctaccagtgcgctgaggtcctagagtctttctttgtgcagaaactgaaggggtttaaagccagtcgtagccacaacaataaacttcagagtacagcgtcctag

SEQ ID NO: 23807 - DNA, 501 bp, synthetic construct
  source 1..501: mol_type = other DNA; note = Synthetic coding sequence
atgtacagcctgaaccaggagatcaaggccttcagccggaacaaccttcgcaagcagtgcactagggtgaccaccctcaccggcaaaaaaattattgagacctggaaagatgcccgaatacacgtggtggaggaggtagaacccagttccggaggcggatgtggttacgttcaggacctgtcatctgacctacaagtgggtgttatcaaaccctggctgctgctgggtagccaggatgctgcccacgatttggatacgctcaaaaagaataaggatggggtcgtgctggtacactgcaatgctggtgttagccgggctgctgcaatagttatcggcttcctcatgaacagcgaacagacgagcttcacatcagcatttagcctagtgaagaatgcccggcccagcatttgcccgaacagcggctttatggagcaattgcgtacctatcaggagggaaaagagtctaacaagtgcgaccggattcaggaaaatagcagttag

SEQ ID NO: 23808 - DNA, 963 bp, synthetic construct
  source 1..963: mol_type = other DNA; note = Synthetic coding sequence
atgagcaagagcgccagccccaaggagcccgagcagctgcggaagcttttcatcggtggactgtcatttgagacaacggacgagagccttcgcagccatttcgagcagtggggcacactgacggattgtgtggttatgcgggatccaaacaccaaacgatcgcggggttttgggtttgtgacctatgcgactgtggaggaggtcgacgctgcgatgaatactaccccacacaaggtagacggccgcgtcgtcgaaccaaagagagctgtgtcaagggaggattctcaacgccccggcgcccacctcacagtgaagaagatattcgtgggaggaatcaaggaagacaccgaggaacaccacctgagggactattttgagcagtacggcaaaattgaggtgatcgagatcatgaccgatcgcgggtcaggaaagaagcgaggcttcgcttttgtaacttttgacgaccatgactccgtcgataagatcgttatccagaaatatcataccgtgaagggccataactgcgaagtgcggaaagcgctgcctaaacaggaaatggcttctgcctcctctagccaacggggcagacgggggtctggaaactttggaggaggtcgaggagacggcttcggcgggaatgataactttgggcgcggcggcaatttctctggcagagggggctttgggggctcgtgtgggggaggaggctacggcgggagcggcgacggctacaatgggttcgggaatgacggatctaatttcgggggggggggttcctataatgattttggcaattataataaccaaagttcaaattttggaccaatgaagggagggaactttggcggacgatccagcggtccgtatggcggcggtggacagtatttcgccaaacctcaaaaccagggagggtatggggtctctagcagttccagctcgtatgggagcgggaggcgattctag

SEQ ID NO: 23809 - DNA, 357 bp, synthetic construct
  source 1..357: mol_type = other DNA; note = Synthetic coding sequence
atgagcctgctgaacaagcccaagagcgagatgacccccgaggagctccagaaaagggaagaggaggagtttaataccggtcccctttccgttctcactcagagcgttaaaaataacacccaggtgttgatcaactgtcggaataataagaagctgctgggacgcgttaaggcctttgatcggcactgtaacatggtgctagaaaatgtgaaggaaatgtggacagaggttcctaaatcggggaaaggcaagaaaaagtcaaagcccgtaaacaaggatagatatatttccaagatgtttctgcggggcgactccgtgattgtggtcttacgcaaccctctgatcgccggaaaatag

SEQ ID NO: 23810 - DNA, 1179 bp, synthetic construct
  source 1..1179: mol_type = other DNA; note = Synthetic coding sequence
atgaaggacaccctgggccaggcccagcagcgggtggccgagctggagcccctcaaggaacaactgagaggggcccaagagctggccgcctcatcccaacagaaagcaaccttgctaggggaagaactggctagcgcggccgccgcccgcgaccgtacaatagccgagttacacaggagtaggttagaagtggcagaagtcaacggaagactggccgagttaggattacacttgaaggaggagaagtgtcaatggtctaaggagcgtgccgggcttctgcagagcgtagaggcggagaaggataagatcctcaagctttctgccgaaatacttcgtctggaaaaagcagtgcaggaagaacgcacccaaaaccaggtttttaagactgaattagctcgtgaaaaggattctagcttggttcagctgagcgaaagtaagagagagctcacagaattaaggagcgcacttagggtgctccagaaggaaaaggagcagctacaggaagagaaacaggaattgttggagtacatgaggaagctggaagcccgcctggagaaagtggccgacgagaagtggaacgaagatgccacaactgaagacgaggaggccgcagtgggactctcatgccccgcagctcttacagactcagaagatgagagcccagaggatatgcgccttcctccctacggcctttgtgagagaggagatccaggaagctctcccgcaggcccccgcgaggcaagcccacttgtggtaatctcacagcctgcaccaatttccccacatctcagtggtcctgccgaggactctagctccgacagcgaagcagaggatgaaaagtccgtgctgatggcggccgtccaatccggcggcgaggaagctaacttgctcctgccagagctcggatccgccttttacgacatggcttcaacgatcttctgcagagcacaaattgctcttttacctttatctccagcttccactcccagccctacaacttcgggattcacagtcggaacactcagtgagacaagcactggagggcccgccacccctacttggaaagaatgtcccatttgcaaagagcgatttcccgccgagtcggataaagacgccctcgaggatcacatggacgggcattttttcttctccactcaagatccttttacgttcgaatag

SEQ ID NO: 23811 - DNA, 600 bp, synthetic construct
  source 1..600: mol_type = other DNA; note = Synthetic coding sequence
atgacccccctggccccctgggaccccaagtacgaggccaaggccgggcccaggcctgtctggggagcaaattgcagttccggggccagttttagcggccgtaccctgtgtcacccctcattttggcctttgtacgaggcagccagcggtcgtgggctgaggccagtggctccggccactgggcattggaacggtcaacaagctcctccagatgcaggcttccccgtcgtttgttgtgaggatgtcttcctgtccgaccctctcctgcctaggggccaacgggtgccactctatctgtccaaggctccgcagcagatgatggggagtctgaaacttctgcccccgcctccaattatgagcgccagggtgctgcctcgcccatctccctcccggggccctagtaccgcttggttaagtggacccgagctcattgccctaactggattgctgcagatgagtcaaggggagcctaggccctcttcctccgccgtgggacccccggaccatacctccgatcctccttcaccgtgcggtagtccctctagcagtcagggggcagatctgtcattgccccagacccccgacacccactgtccctag

SEQ ID NO: 23812 - DNA, 1155 bp, synthetic construct
  source 1..1155: mol_type = other DNA; note = Synthetic coding sequence
atggagggcctgggccggagctgcctgtggctgcggcgggagctgtctcctcccaggccaaggcttctgctgctggattgcagatcccgtgagttatatgaatcggcaagaatcgggggggcgctttccgtggccttgccggcactcctgctgagaagacttcgcagggggagcctgtccgtaagagccctgctgcctggaccccctcttcagcctccgccccccgcccctgttctgctgtatgaccagggcgggggcaggagaagacggggcgaggcggaggccgaggccgaagagtgggaggctgaaagtgtattgggcacactactgcagaaactacgtgaggaaggataccttgcttactacttacaaggcggattctctaggtttcaagcggaatgccctcatctgtgcgagactagcctggccggacgcgccgggagtagcatggccccagttcccggaccggttccagtggtgggactggggtcgctctgcctcggatctgactgcagcgacgcagagtctgaagccgatagggattccatgtcttgcggtctggacagtgaaggggcaaccccccctccagtgggtctgcgtgccagtttccccgtacagattcttcccaacttgtatttaggtagcgccagggacagcgctaacctggagtctctagcaaaactcggcataaggtacatcctaaatgtgacccccaatctgcctaattttttcgaaaaaaacggagacttccactacaagcagatccctatttccgaccactggagtcagaatctgtctcggtttttccccgaagcgatagaattcatcgatgaggcactgtctcagaactgtggagtactcgtacactgccttgctggagtgtctagaagtgttacagtaaccgtcgcttacctcatgcagaagctccacctaagccttaatgatgcatatgaccttgtcaagcgcaagaaatcaaacattagcccaaacttcaatttcatgggccagctgctcgactttgagcggagtctgcgccttgaagagaggcactcccaggaacagggctcggggggccaggcctcagcagcttcgaatccaccatcttttttcactacccccacaagcgacggagcattcgagctggctcctacatag

SEQ ID NO: 23813 - DNA, 2208 bp, synthetic construct
  source 1..2208: mol_type = other DNA; note = Synthetic coding sequence
atggccgagcccctgctgcggaagaccttcagccggctgcggggcagagagaaattgcctcgaaaaaaatcggatgccaaggaaagaggccacccagcacaacgccctgagccatcccctcccgagccagagccacaggccccagagggaagtcaggccggtgccgaggggccaagcagcccagaagctagccgtagccctgcgaggggcgcctatctccagtctctcgagccctctagtaggagatgggtgctgggtggtgcgaagcccgcagaagacaccagcctgggacctggcgtgcctggcaccggcgaaccagctggggaaatctggtacaaccctattccagaagaagatccacgtccacccgcaccggagccaccaggtccccagcccgggtcagccgaaagtgaagggctcgcaccacagggagctgccccagcaagtcctcctacgaaggctagccgcacaaaaagcccagggccagcccgccggctctcgattaaaatgaagaagctgccagagttgagacgacgcttgtctcttagaggcccacgagccggcagagaacgggagagagctgctccagccggatcagtcattagcaggtaccacctcgactcatcggtcggcggacctggaccggccgctgggccaggcgggacccggtcccccagggctgggtatttaagcgacggggactccccagagaggccagctggtccccctagccctactagtttccgtccctatgaggtgggcccagcggctcgggccccccccgctgccctttggggcaggctgtcactccatctgtatgggctgggcgggcttcgccccgcgcctggcgcgacacctagagatctttgctgtctgctacaggtagatggagaagcccgggcccgcaccggccctctgaggggagggcctgattttctgcgactggatcatacattccacctagagctggaggcagccagactcctgcgtgctctggtcctggcctgggacccgggcgtgcgacgccatcggccgtgcgcccagggcactgtgctgctgcccaccgtgtttcgcgggtgccaagcccagcagctagccgttagattagaaccccaaggcctcctatatgccaaactgacactcagcgaacagcaggaggcccctgccaccgcagagcctcgcgtctttggtctcccactccctctgctggttgaacgggagaggcctcctgggcaggtgccactcattattcagaagtgtgtggggcagattgagcggcggggacttcgcgtagtgggtctttaccgcctgtgtggcagcgcagccgtgaagaaggagctaagggacgcttttgagcgagatagcgccgccgtttgtctgagtgaggacctctaccctgacatcaacgtgattacaggcatcctgaaagactatctcagggaacttccgacccccctgatcacacagccactgtacaaggttgtcctggaggccatggccagggatcccccgaaccgggtacctcctacaaccgagggaacccgcgggctgctctcctgtctacctgacgttgagcgagctacactgaccttactccttgaccatctacggttggtgtcttccttccacgcttataatcgtatgacgccccagaacttagccgtttgcttcggtccagtgctgcttccagcccgccaggcacccacaagaccacgcgcccggagttctgggcccggattggccagcgccgtcgatttcaaacatcatattgaggtgctacactacctgctgcagtcctggccggatccccgactgcccagacagtcaccggacgtcgcaccctatctccgaccgaaacggcagccccccctgcatcttccgctggccgacccagaagtagtcaccaggccccggggtagaggcggccctgaatctccccctagtaatcggtatgccggggactggagcgtgtgtgggcgggattttctgccatgtggtagggatttcctgtctggtccagattacgaccacgtaaccgggtctgatagcgaagatgaagatgaggaggtaggcgagcctagagtgaccggcgatttcgaggacgattttgacgctccatttaaccctcaccttaacctgaaggacttcgatgctctcatcctggacctggagagagaattgagcaagcaaataaacgtgtgtctgtag

SEQ ID NO: 23814 - DNA, 660 bp, synthetic construct
  source 1..660: mol_type = other DNA; note = Synthetic coding sequence
atgccccggggccggaagagccggcggcggcggaacgcccgggccgccgaagaaaacagaaacaatcggaaaatacaggcctcagaggctagtgagaccccaatggccgcgtccgtggtcgcgagcacaccagaagacgacctgagcggtccagaggaggatccttcaacccccgaggaggctagtaccacgccagaagaggcctcttccaccgcccaggctcagaagcctagcgtcccacgttctaattttcaaggcacaaaaaagagcctgctgatgagcattctggctttgattttcataatgggtaactctgctaaggaagccctggtttggaaagttttaggaaagctgggcatgcagcctggacggcagcactctattttcggggaccccaagaagattgttacagaggaattcgttcgccggggatatctgatatataaacctgtgccgaggtcctcccctgtggagtacgaatttttctggggtcctcgagcccatgtcgagagctcaaagctcaaggtgatgcattttgtcgcgcgggtgcgtaatcgctgctcaaaggactggccttgtaattatgactgggactcagatgacgacgccgaggtggaagccattttaaactccggcgcgagaggctattcggcaccctag

SEQ ID NO: 23815 - DNA, 702 bp, synthetic construct
  source 1..702: mol_type = other DNA; note = Synthetic coding sequence
atgaacctgaacttcaccagccccctgcaccccgccagcagccagagacccacatccttttttattgaagacattctgttgcacaagcccaaaccactcagggaagtagctcctgaccacttcgcctcctccctggcttcacgcgtgccccttcttgattatggctaccctcttatgcccactccgaccctcctggcaccccacgctcatcaccccctccataagggtgatcatcatcacccatatttcctgaccacctcggggatgccggtccccgcgctattcccacaccctcaacacgctgaactcccaggcaagcattgcaggaggcgcaaggcacggaccgtcttcagcgactcccaactgtctggtctcgaaaagaggtttgagatccagcgctacctgagcaccccagaacgggtcgaactggccaccgcactgtctctatccgaaactcaagtgaaaacatggtttcagaatcgccggatgaagcacaaaaagcagctcaggaagagtcaggatgagccaaaggcgccagacgggcctgagagtcccgagggcagtcctcgaggcagcgaggctgctacagcagcagaggcaaggctgtcattgcccgcaggacctttcgtactgaccgagcccgaggatgaagtagacatcggagacgaaggagagcttggttctggtcctcatgtgctgtag

SEQ ID NO: 23816 - DNA, 873 bp, synthetic construct
  source 1..873: mol_type = other DNA; note = Synthetic coding sequence
atggagctgcccgccgtgggcgagcacgtgttcgccgtggagagcatcgagaaaaagcgaatccgaaagggtagagtcgagtacttggtgaaatggagaggatggagtcccaaatataatacctgggagcccgaggaaaacatcctggatccgaggctactgatcgcatttcagaatagggagcgtcaagaacagttaatgggctaccggaaaaggggaccaaaaccaaaacctcttgtggtacaggtgccaacgtttgcacgtagatctaatgtcttgaccggcctacaggactcctccacagacaatcgggcaaagttggacctcggagcccaggggaaggggcagggccaccagtacgaactgaatagcaaaaaacatcatcatcatgcagttggtcttaatctgtcccacgtcagaaagcgctgcctgtctgagactcatggtgagcgagagccctgtaagaagagactgaccgccaggagtatcagcacgcctacatgcctcggagggagtccagcggcggaacgccctgcggacttacctcctgccgcagctttgcctcaacccgaagtgatactgctcgactctgatctcgacgagccgatcgacctgcgttgcgtgaaaactagatccgaggcaggcgagcctcctagctcacttcaggtgaaaccggaaacccctgccagtgctgcagtggctgtggccgcagctgccgccccaaccacaaccgccgaaaagcctccggccgaggcccaagatgaacctgctgagagtctaagcgagtttaaaccattctttggcaatatcattatcactgacgtgaccgcaaattgcctgaccgtgaccttcaaagagtacgtgaccgtttag

SEQ ID NO: 23817 - DNA, 744 bp, synthetic construct
  source 1..744: mol_type = other DNA; note = Synthetic coding sequence
atgaccgaggacagccagcggaacttccggagcgtgtactacgagaaggtggggtttcggggagtggaggagaagaagtccctggagattctgctgaaggacgacagattggacactgagaagctttgcaccttctcacagagatttccactacccagcatgtaccgggctctagtttggaaagttcttcttgggatattgccgccccaccacgagtcccacgccaaagtaatgatgtatcgcaaagagcagtacctcgacgtgctccatgctctgaaggttgttagatttgtcagcgatgccacgccacaggctgaagtatatcttagaatgtaccagttggaaagtggcaagctcccacgttccccatcctttccattaccgaaagcatttgagcagtatcttaacctggaagacgggcgtctgttaacccacttgcggatgtgcagcgcagcccccaagcttccatatgacctttggttcaaacgctgttttgctggctgtctgcctgaatcgagtttgcaacgcgtgtgggacaaggttgtgtcaggcagttgtaaaattctggtgtttgtcgccgtagagatactcttaaccttcaagataaaggtgatggcccttaactccgccgagaagatcaccaagtttctggagaacatcccccaggattcgtcagacgctatagtgtctaaagctattgatttgtggcacaagcactgtggaactccagtgcatagcagttag

SEQ ID NO: 23818 - DNA, 546 bp, synthetic construct
  source 1..546: mol_type = other DNA; note = Synthetic coding sequence
atggtgagcagctgctgcggcagcgtgagcagcgagcagagctgcggactcgagaactgttgccgaccttcttgctgccagactacatgttgcagaactacctgctgccgcccaagttgctgcaaaccacagtgctgccagtctgtatgctatcaacctacctgctgccatcctagctgctgtatctcctcttgttgcagaccttactgctgcgaatcaagttgctgcaggccgtgttgctgccaaactacctgctgccggacaacttgttgccgaaccacatgttgctgtccttcctgttgcgtgtcgagttgttgccggccccagtgctgtcaatctgtatgctgtcagcctacatgctgccgaccctcctgctgcatttcaagctgttgccacccttcctgctgtgaaagttcttgctgccggccgtgttgttgtgtgaggcctgtctgtgggcgcgtctcctgccatacaacctgttatagaccaacctgtgtaataagcacctgtccccgtccattgtgttgtgcctcttcatgctgttag

SEQ ID NO: 23819 - DNA, 1086 bp, synthetic construct
  source 1..1086: mol_type = other DNA; note = Synthetic coding sequence
atggccctgaacgtggcccccgtgcgggacaccaagtggctgaccctggaggtttgccggcaatttcaacgcggcacgtgttccagaagtgacgaagaatgtaaattcgcccatccacccaaaagctgtcaggtggagaatggtcgcgtcatcgcttgttttgacagcttgaaaggcaggtgctcgcgagaaaattgtaagtaccttcatccaccaacacatcttaagacccagctggaaatcaatgggcgcaacaacctgatccagcagaaaacagcggcggccatgttggcgcagcagatgcaatttatgttcccaggcacccctcttcacccggtccccaccttcccagtgggtccggctatcgggactaataccgcaatcagctttgcaccatacctcgctcccgtgaccccgggagtgggcctagtacccactgaaatcctgcctacaactccagtgattgtgcctggaagtcctccggtgacagtccctggaagtaccgccactcagaagctcctgaggacagataagctggaggtatgtcgcgaatttcagcgcggaaactgcgcaagaggagaaactgactgtcgctttgcacaccccgctgactccaccatgatcgacaccagtgataatactgtgaccgtttgtatggattatatcaaaggccgctgcatgcgagaaaaatgcaaatatttccaccctcctgcccacctacaggctaagatcaaggcggcccagcaccaggctaaccaggcagctgtcgcggcccaggcagctgccgcggctgccaccgtgatggcgttccctcctggggcattacatcccctgcctaagagacaagccctcgaaaagagtaacggaactagcgcagtgttcaatccatcagtgctgcactatcagcaggctttaacctctgcacagctgcagcaacacgcggccttcatcccaaccgacaactcagaaataatttctcgtaatggtatggaatgccaggagtcggcactccgtattactaagcactgttattgcacatattaccccgtttcatcaagtatcgaactgccacagaccgcctgctag

SEQ ID NO: 23820 - DNA, 1017 bp, synthetic construct
  source 1..1017: mol_type = other DNA; note = Synthetic coding sequence
atgctgaagaacaagggccacagcagcaagaaggacaacctggccgttaacgctgtggccctgcaggaccacatcctccatgacttacagctcagaaacctgtctgtggctgaccattccaaaactcaggtgcagaagaaagaaaacaagtctttgaaacgggataccaaggccattattgacacgggactcaagaagacaacacagtgtccgaaactcgaggactctgagaaggagtacgtgcttgatccaaagccccctcctctaaccttagcacagaagcttgggcttataggacctcccccgcctcctctgtccagcgacgagtgggaaaaggtgaaacaacgcagcttgctccagggagatagcgttcagccgtgtcccatctgcaaggaggaatttgagctacgacctcaggtcttctcaatccgaggaaagaaccagtaccagacacgggtgattcatgatggcgcccggctgttccgaataaagtgcgttacccggattcaggcttattggcgtggctgtgtggtgaggaaatggtaccgcaacctgcggaaaaccgtgcctcctaccgatgccaaactgaggaagaagtttttcgagaagaagtttactgagatctctcatcgaattctgtgttcctacaatacaaacatagaggagctctttgccgagatcgaccagtgcctcgccatcaatcgctcagtgctgcaacagttggaggagaagtgtgggcatgagatcactgaagaagagtgggagaagatccaggttcaagctttgcgccgcgaaacgcacgagtgtagcatctgcttggcccctctctctgctgcagggggtcagcgcgtaggagcgggcagaaggagccgtgagatggctctgttgagttgtagccacgtgtttcatcacgcctgtttattagcattagaggagttctctgtaggtgataggccccctttccacgcctgtcccctctgtcggagttgttaccaaaagaagattctggagtgctag

SEQ ID NO: 23821 - DNA, 1098 bp, synthetic construct
  source 1..1098: mol_type = other DNA; note = Synthetic coding sequence
atggccgccgccgccgccggcaccgccaccagccagcggttcttccagagcttttctgacgccttaattgatgaagatcctcaggctgccctggaggagctgaccaaggccttagagcagaaaccagatgacgcacagtattactgccaaagggcctactgccatatcctgctaggcaattattgtgttgccgttgccgacgccaagaaatcgctggagctgaacccaaacaactcaactgccatgcttaggaagggaatttgcgaataccatgagaaaaattatgctgccgccctcgaaacattcaccgagggccagaaactcgatatcgaaaccggctttcatagggtgggccaggcaggcctgcaactgctgactagctcagacccccccgcactcgactcacaatcggcagggattactggagccgatgctaacttctctgtttggattaagcggtgtcaggaagcgcagaacgggtccgaatcagaagtgtggacgcatcagagcaagatcaaatacgattggtatcagacagagtctcaggtagttatcacacttatgattaagaatgtgcaaaagaatgacgtgaatgtcgagttttccgagaaagaattatcagcccttgtgaaactgccttccggagaagattataaccttaagctagaactcctgcatcccattatccccgaacagagtacttttaaagtgctgtctactaagatcgaaataaagcttaaaaagccagaagcagtgagatgggaaaaattagagggccaaggcgacgtgcctaccccaaagcagtttgtggccgatgtgaaaaatctctacccttccagcagcccctatacgagaaactgggacaagttggtcggagaaatcaaggaggaggaaaaaaacgaaaagctggagggcgatgctgcgctgaatcggctgtttcagcagatctacagcgacggtagtgatgaagtcaagagggctatgaataagagcttcatggagtcagggggaaccgtcctaagtacgaattggtccgacgtgggaaagcgcaaggttgagatcaatccgccagacgatatggagtggaagaaatattag

SEQ ID NO: 23822 - DNA, 1389 bp, synthetic construct
  source 1..1389: mol_type = other DNA; note = Synthetic coding sequence
atggacaaggacagccagggcctgctggacagcagcctgatggcctcgggcaccgctagccggtccgaggatgaagaaagcctggccgggcagaaaagagccagttcacaagcactgggaaccattccaaagcgccggtcaagctcaagattcattaaaagaaagaaatttgacgacgagctggtggaatccagccttgccaaatcaagcacccgagctaagggcgcttccggagtggagcccggaaggtgttcggggtcagagccatcttcgtccgaaaaaaagaaagtgagcaaagccccaagcacacccgtgccacctagccccgcccctgcaccaggcttgacaaagcgagttaaaaagtcaaagcagccacttcaagttactaaagacctcggccgatggaagcccgccgatgacctgcttctgatcaatgctgttctgcaaacaaacgacctgacaagcgtgcatttgggagtgaagttctcgtgccgcttcacgctgagagaggtgcaggaaagatggtatgccctgctgtatgaccccgttatttcgaagctcgcctgtcaggcgatgcgtcagctgcacccagaagcaattgctgctattcaatccaaggcgcttttctctaaggccgaggaacagcttctgagcaaggtaggctccacaagtcagcccaccctggagaccttccaggatctgcttcaccgacatccggacgctttctatttggctcgaacggcaaaggccctccaggcccattggcagttgatgaagcagtactacctcttggaggaccagactgtacagcctctccccaagggagatcaggtgctgaacttttctgatgctgaggacctcattgatgattctaaattgaaggacatgcgggacgaggtgttagagcacgagctgatggttgcagaccgtaggcaaaaacgggagatcaggcaattggagcaagaactgcacaagtggcaggtgctggtcgattctattactggaatgtcaagtcctgatttcgataaccaaacactcgccgtgctacggggtcgaatggtgcggtacctgatgaggtcacgggagatcaccctgggccgcgcaacaaaggacaaccaaatcgacgtagacctcagccttgaggggcccgcatggaaaatctccaggaagcaaggggtgatcaagctcaagaacaacggcgacttttttatcgcaaacgagggaagaagacccatctacatagacggacgccccgtcctctgtggaagcaaatggcgactcagtaacaattctgtcgttgaaatcgcatcattgcgttttgtcttccttattaatcaagacctgatcgctttgattagagctgaggctgctaagattactccccagtag

SEQ ID NO: 23823 - DNA, 963 bp, synthetic construct
  source 1..963: mol_type = other DNA; note = Synthetic coding sequence
atgagcgtgggcttcatcggcgccggccagctggcctacgccctggccagaggcttcaccgctgccggaatcttatcggcccacaagatcatagcctccagccctgaaatgaaccttccaaccgtctctgctctgcgaaaaatgggagtgaatctgacccgcagcaacaaagagactgtcaagcacagcgatgtcctctttctggcagtgaagcctcacatcattccattcatactagatgagatcggggcagatgttcaggctagacatattgtggtgtcttgcgctgccggggtgacgatcagctccgtggagaagaaattgatggctttccagcccgctcccaaggtcataagatgtatgacgaacacaccggtagttgtgcaggagggcgcaacggtgtacgccaccggaacccacgccttggtagaagacggccagcttctggaacaactgatgagctcagtgggcttctgcaccgaggtggaggaggatttaatcgacgcagtaactggcctaagcgggagcgggcccgcttacgcctttatggctctggacgctctggccgatggaggtgtgaaaatgggattaccccgcaggctggccattcagctcggcgcacaggcgctgctcggcgcagcaaaaatgttgctggacagcgagcaacacccgtgccagctgaaggataatgtctgcagccctggtggtgcaactatccatgcacttcattttctcgaaagtggaggatttagatccctattgattaacgctgtcgaagcaagctgcattagaacccgcgagctccaaagcatggccgatcaggaaaaaattagtccggctgccctcaaaaagacattgctggacagggtcaaactcgagtcaccaacggtgagcacgctgacaccatcatcaccaggtaaactcctcactagaagtctcgcgcttggcggaaagaaggactag

SEQ ID NO: 23824 - DNA, 2370 bp, synthetic construct
  source 1..2370: mol_type = other DNA; note = Synthetic coding sequence
atggaggacggccccagcaacaacgccagctgcttccggcggctgactgaatgctttttgagcccaagcctgacagatgagaaagtcaaagcctacctttccttgcacccacaagttctagacgagttcgtgtctgagagtgtgtcggccgaaactgtggaaaagtggctcaaacgcaagaacaataagtcagaagatgaatctgccccaaaggaggtgagccgctatcaggacacaaacatgcaaggtgtcgtctacgagctaaacagctacatcgaacaacgcctggacactggtggcgataatcagctgctgttgtatgaactgtcctcaatcatcaagatcgctacaaaggccgacggattcgcattatatttcctgggggagtgtaacaactcactctgcatttttactccacctggcatcaaagagggaaagcctaggttaattccggctgggcccattacacaaggtacaactgtgtctgcatacgtggctaaaagccgcaaaacattgctggtggaagatatattaggggatgaacggtttcccaggggaacaggattggagtctggaactagaatacaaagtgttttgtgtctacccattgtgaccgcgatcggcgatctgatcggtattttggagctttatagacactggggtaaagaggccttctgtcttagccaccaagaggttgccactgctaacctggcttgggcctccgttgccatccaccaggtacaagtttgcagagggttggcgaagcagaccgaactcaatgattttttgctggacgtgtctaaaacctactttgataatattgtcgctattgattctctgttggagcacatcatgatctatgcaaaaaatcttgtcaacgccgaccgctgcgccctattccaggtggaccacaagaataaagaactgtattcagacttgtttgacattggcgaggagaaagagggcaagccggtttttaaaaaaactaaggaaatcagattctctatcgaaaagggtatagcaggccaggtcgccaggacaggcgaggtcctgaatatcccggacgcatatgcagatccccggttcaacagggaagtggacttatacaccggatacaccaccagaaatattttgtgcatgccgatcgtgtcgagaggtagcgtaattggcgtcgtgcaaatggtcaacaagatctctggctccgctttttctaaaactgacgagaacaattttaagatgttcgcagtgttttgtgcacttgccctgcactgtgctaacatgtaccatcgtataagacactccgagtgcatatacagggtgacaatggagaaactaagttaccactctatttgcacatccgaagagtggcagggcctcatgcagtttactctgccagtacgactgtgcaaggaaatcgagttattccacttcgacatcggtccattcgaaaacatgtggccaggaatttttgtctacatggtgcatcggagttgcggcacctcgtgttttgagttggagaaactctgcaggttcataatgagtgtaaagaaaaattatcgaagggtgccctatcataactggaaacacgctgtcactgttgcacactgtatgtacgccattctgcagaataaccacacactttttacagatctggagcgaaaaggccttttgattgcttgtctctgccatgatctggaccatcgtggtttttcaaacagctatctgcagaagttcgatcacccactggccgctctgtattccacctcaactatggagcagcaccatttcagtcagacagtgagcatcctgcaacttgaagggcataacattttcagtacactctccagctcagaatatgaacaggttctggagattatccgcaaggctatcatagccacagaccttgccttgtattttgggaatcggaaacaattagaggagatgtatcaaaccggttcccttaacctgaacaatcaaagtcatagggatcgtgtaataggtctgatgatgaccgcatgcgatctttgttcagtgacgaaactgtggccagttaccaaattgaccgcaaatgatatctacgcggaattctgggcagaaggcgacgaaatgaagaagttaggaatccagcccattcccatgatggacagggacaagaaagatgaagttccacaaggccagctgggattctataacgctgtggcgatcccttgttacacaactctgactcaaattctcccgcctaccgagccattattgaaagcctgtcgcgacaatctctcccagtgggaaaaggtcattcggggtgaggaaacggccacttggatatcatccccttccgttgcccagaaagccgctgccagcgaggactag

SEQ ID NO: 23825 - DNA, 645 bp, synthetic construct
  source 1..645: mol_type = other DNA; note = Synthetic coding sequence
atggacgacagcgagaccggcttcaacctgaaggtggtgctggtgagctttaaacagtgtctcgacgagaaagaggaggtgttgcttgacccctacattgcgtcgtggaaggggcttgtgcgtttcttaaactccttgggcactatcttctcattcatcagtaaagacgtggtatctaaattgagaatcatggagcgcctccgcggcgggccacagtccgaacactatagatccttgcaggcaatggtcgcccatgaactgagcaaccggcttgtggatctggagaggcgttctcaccatcctgagtccggttgcagaaccgtgctgcgtctgcatagagctctgcactggctgcaattgtttctggagggtctgaggacctccccagaagacgctcggaccagcgctttgtgtgccgactcttacaacgccagccttgccgcttatcacccctgggtggtgcgaagagccgtaaccgtggccttctgtacactgcctactcgtgaagtgttcctcgaggccatgaacgtggggcctcctgagcaggcggtgcagatgctgggcgaggctctacctttcatccagagagtctacaacgtgtctcagaaattgtacgctgagcacagtctactcgatctgccatag

SEQ ID NO: 23826 - DNA, 4293 bp, synthetic construct
  source 1..4293: mol_type = other DNA; note = Synthetic coding sequence
atgaccagcgccgccgagatcaagaagccccccgtggcccccaagccaaagtttgtcgttgctaataataagccggcccctccgcccatcgcccctaagcctgacatcgtgattagcagtgtgccacagtctactaaaaagatgaaacctgctattgctccaaaacccaaggtcctcaaaacttctcccgtgagagaaatcggtcagtcacctagtcgcaagataatgctcaacttggagggccacaaacaggagcttgcggaaagtaccgacaacttcaactgcaagtacgaaggtaatcagagtaatgactacatatccccaatgtgtagctgcagcagcgagtgtatccacaaacttggccacagggaaaacctgtgtgttaaacagttagtgctggagccgctggagatgaacgaaaatcttgagaatagcaagattgacgaaactcttactattaagacacggtccaaatgcgacctgtacggggagaaagcgaagaaccagggaggagttgttctcaaggcctctgtactcgaagaggaactgaaggatgctcttatccaccagatgccccctttcatctctgcgcagaagcaccggccaactgattcccccgaaatgaatggaggatgcaatagcaatggccaatttcggattgagttcgccgacttatcccccagtccttcctcctttgaaaaagtgcccgaccaccattcctgccacctgcagctgccctccgacgagtgtgaacactttgaaacatgtcaggacgattccgagaagagtaataattgttttcagtcaagtgagctcgaggccctggaaaacggcaaacgaagcacacttatatcctctgatggcgtaagtaaaaagtccgaggtgaaagacctgggcccactggaaatccatctggtaccatacacacccaagttccccacacccaaaccccgcaaaacccgcacagctcgactgctgaggcagaaatgcgtagatacaccttcggagagtacagaagaacctggtaacagcgacagcagcagctcctgcttaaccgaaaactcacttaagatcaataagatttcagttctccatcagaacgtcttgtgtaagcaggagcaagtcgataaaatgaagttaggcaataagagtgaactaaatatggaatcgaactccgatgctcaagacctggtgaatagtcaaaaagccatgtgcaatgagactactagcttcgaaaaaatggctccctcgttcgacaaagattctaacctgtcatcagattccaccaccgtggacggcagctctatgtccctggccgtggacgagggaacaggcttcattagatgcacggtttctatgtcgctgccaaagcagctgaagttgacctgtaatgagcacctacagagtggcagaaacctgggtgtctcggccccccaaatgcaaaaggaaagcgtgatcaaggaggaaaactccctgcggatcgttccaaaaaagccacagaggcacagtctccctgcaacaggcgtgctgaagaaggctgcttccgaggagttgctggaaaagagctcgtatccgtcaagtgaagaaaagtcttccgagaaaagcctggagaggaaccacctacaacatctgtgcgctcagaaccgcggcgtttcaagttcatttgacatgcccaaaagagcctcagagaaacctgtctggaaacttcctcacccgattctgcctttttccggcaaccctgagttcttgaagtctgtgacagtgtcttcaaatagcgagccctctaccgccctaaccaaaccacgcgcaaaatcactgtcagccatggatgtggagaagtgtaccaagccctgtaaggatagtactaaaaagaactccttcaaaaagctcctgtcaatgaagctgtcaatatgcttcatgaaatcggactttcagaagttctggtcgaagtcctcccagctcggtgacacaacgacagggcacctaagctctggcgaacagaagggtattgagtccgactggcagggtctactggttggagaagagaaaagatccaagcctattaaggcctattccactgaaaactattccctagagtcccagaaaaaacggaagaagtctaggggccaaacttcggccgccaacggtctccgagccgagtctctcgacgaccaaatgctgagcagagaaagctcaagccaagcaccctacaaaagcgtgacctctctgtgtgctcccgagtatgagaacatccgccattatgaggagattcctgaatatgagaatctcccctttatcatggccattcggaaaacccaggaacttgaatggcagaacagttcaagtatggaggacgcagatgcgaatgtctacgaggtggaggagccttatgaggccccagacggccaactccaattggggccaagacaccagcacagtagctccggggcctctcaggaagagcagaacgaccttggcttgggggatttaccttctgatgaggaagaaattattaactcatcagatgaagacgatgtatccagcgagtcctcaaaaggagagcctgacccgctcgaagataagcaagacgaggataacggcatgaaatcgaaagtgcatcacatcgctaaagagatcatgagctcagagaaagtcttcgttgatgtgctgaagttgctacacatcgactttagagacgctgtggcacacgctagcaggcagctggggaagccggtgatcgaggaccggatccttaatcagatactctattaccttccccagctctatgaactgaaccgtgatctcctgaaagagctggaagagaggatgctgcattggaccgagcagcagagaatcgctgacatcttcgtgaaaaaaggtccttacctgaagatgtattccacctacataaaagagttcgataaaaatatcgcactacttgacgaacagtgcaaaaaaaacccgggtttcgctgctgttgtgcgggagttcgaaatgtctcctaggtgtgctaatctggccctcaagcactatttgctgaagcctgtacagcgcattccccagtaccggttactgctcactgattatctgaaaaatctgatcgaggatgctggcgactacagggatacacaggatgcgcttgcagtggtgatcgaagtggccaaccacgcaaacgacacaatgaagcaaggagataatttccagaaactgatgcagatccagtacagccttaatggacaccatgaaatcgtccagcccgggcgcgtcttcctcaaagaaggaattttaatgaagctgagtaggaaagttatgcagccaagaatgttttttctgttcaacgacgcgttattatatacgaccccagtccagtccgggatgtataagctgaacaacatgctgagcctggccgggatgaaggtccggaaacccacccaggaggcctatcagaatgagctcaaaattgagagcgtcgagaggtcatttatcctctcggctagttcagccactgagcgggatgaatggctggaagctatttcaagggccatagaagagtatgccaagaagaggatcacgttttgccccagtaggtctttggatgaggcagattctgagaacaaagaagaggtgagtccattgggctccaaagctcctatttggatccctgatactcgcgctaccatgtgtatgatttgtacaagcgaattcacgctcacttggcggcggcatcattgtagggcatgtggcaagattgtctgtcaggcctgttcatcaaacaaatatggcctggactacctgaagaaccaacctgccagagtgtgtgaacattgcttccaggagctgcagaagttagatcatcaacatagtccaagaattgggtccccaggaaatcataaatccccctcgagtgcactgtctagtgtactgcacagtattccatccggcaggaagcagaaaaagattccggccgccctgaaagaagtaagtgctaatacagaagacagctctatgagcggctacctgtacaggtcaaagggtaataagaaaccgtggaagcacttctggtttgtgattaagaacaaggttctgtatacttacgcagcctctgaagacgtggctgccttggaaagccagccacttctaggtttcaccgtcatccaggtgaaggacgaaaattcagagtctaaggtgtttcagttactccacaagaatatgctgttttatgtcttcaaagctgaggacgcacactctgcccagaaatggatagaagcctttcaggagggtacaattctctag

SEQ ID NO: 23827 - DNA, 1641 bp, synthetic construct
  source 1..1641: mol_type = other DNA; note = Synthetic coding sequence
atgggcgcctacctgagccagcccaacaccgtgaagtgcagcggcgacggcgtcggagcacctcgtctccctctcccgtacgggttctctgctatgcagggctggagggttagcatggaggatgcccacaattgtattccggaactggattccgagaccgccatgttttcagtctacgatggacacggaggagaagaagtggctctttactgcgccaaatacttgcccgatataattaaggaccagaaagcgtacaaagagggaaaactgcagaaagcacttgaggatgcattccttgctatagacgccaagttgaccacagaggaggttatcaaagagctggctcagatcgccggaagacctactgaggacgaagatgagaaagagaaggtcgcggacgaggacgacgtcgacaatgaggaggctgctctgctacatgaggaagcgactatgactatcgaagaactcctaacaagatacggacagaattgccacaagggacctccccactctaagagcggcggggggactggagaagagcccggttcccagggcttgaatggcgaggctggccctgaagactccactcgagagacaccctctcaggagaacgggcccaccgcaaaagcttatacaggcttcagttctaacagcgagcgcggcacagaggcaggacaggtgggagaaccaggaatccctaccggcgaggctgggccatcgtgcagcagcgcgagcgataaactgcctcgtgtcgctaagtccaagttcttcgaagactcagaggacgagagcgacgaggctgaggaggaagaggaggatagcgaggagtgtagcgaggaagaagatggttatagtagcgaggaagcagaaaacgaagaggacgaagatgacactgaggaagcggaggaagatgacgaggaggaggaagaggaaatgatggttccagggatggaaggtaaggaggaacctgggtctgacagcggcaccaccgcagtggtggcactgattcgtggcaagcagctgatagtggccaacgctggggacagtcgctgcgtggtgtctgaggctggaaaggccctggatatgtcttacgaccataagcctgaggatgaggtagagctggccagaatcaaaaacgccggcggcaaagtgaccatggatggcagggtcaatgggggtctcaacttgtcccgcgctattggcgaccacttctataagcgcaataaaaaccttccacccgaggagcagatgattagcgcattgcccgacatcaaagtcctgacgctgaccgatgaccatgagttcatggtgatagcctgcgatggaatttggaatgtgatgagttcccaggaagtggttgatttcatccagagcaaaattagtcaaagagatgaaaatggagaactgagactgctgtcctctattgtggaggaactgctggaccagtgcctcgctccagatacatccggtgacggaacgggatgcgacaacatgacttgtattattatatgtttcaaaccacgcaacacagcagagctccagcctgagtccggcaagcggaagctggaggaggtactgtctactgagggggctgaagagaatggaaactctgacaagaaaaagaaagccaaacgggattag

SEQ ID NO: 23828 - DNA, 273 bp, synthetic construct
  source 1..273: mol_type = other DNA; note = Synthetic coding sequence
atgagcaccgccatgaacttcggcaccaagagcttccagccccggcccccggacaaggggagcttccctttagaccacttaggggagtgcaagagctttaaggagaaatttatgaaatgcctccacaacaacaattttgaaaatgccctctgtcggaaggaatcaaaagagtatctggagtgccgcatggagagaaaactcatgctacaggaacccctggaaaaactggggttcggcgatttgaccagtggcaaatccgaggccaagaaatag

SEQ ID NO: 23829 - DNA, 726 bp, synthetic construct
  source 1..726: mol_type = other DNA; note = Synthetic coding sequence
atgaacagcggccggcccgagaccatggagaacctgcccgccctgtatacaatctttcagggagaagtggctatggtgacagattacggggcattcataaagataccaggctgtcgcaaacagggactggtgcatcggactcatatgtcaagttgtcgggtggataaacccagtgagatcgtcgatgtcggggacaaggtttgggtgaaattgatcgggagagaaatgaaaaatgataggatcaaggtttccctgtccatgaaagtggtcaatcaaggaacagggaaggacctggatcctaataacgtgatcatcgaacaggaggaaagacggaggagatcatttcaagactacacagggcagaagatcacactcgaggctgtcctcaataccacctgtaagaagtgcggctgcaaggggcacttcgcaaaagattgctttatgcagcccggcggcactaagtactcccttattccagacgaggaggaggaaaaagaagaagcaaaaagcgctgagtttgagaaacctgacccaacgcgaaatccttcacgcaaaagaaaaaaagagaaaaaaaaaaagaaacacagagacaggaaaagtagcgactcagacagttccgatagtgaatcagatactggcaaacgcgcaaggcatacaagcaaggactccaaagcggcgaagaagaagaagaaaaaaaagaagcacaaaaagaagcacaaggaatag

SEQ ID NO: 23830 - DNA, 1758 bp, synthetic construct
  source 1..1758: mol_type = other DNA; note = Synthetic coding sequence
atggccgccgccgccgccgccgtgggccccggcgccggcggcgccggaagcgccgtccctggaggagcaggcccttgcgctacagtgtctgtctttcctggggcaagactgctcactataggtgatgccaacggcgaaatccaacgacatgcggagcaacaggccctccgactggaagtgcgggcgggtcctgactctgcaggtatcgcgctatactctcatgaagatgtgtgcgtgttcaagtgctccgtgagtcgggaaacagagtgttcacgggtgggcaagcagtctttcattatcacactgggctgcaatagtgtacttatacaattcgcaactccgaacgatttctgcagcttttataatattctgaagacatgcagagggcacacattggaaaggtccgtctttagtgagaggaccgaagaaagttctgcagtacagtacttccagttttatggctatctctcacaacagcagaacatgatgcaggattatgttcgaactgggacctaccagagggccatattgcagaatcacaccgatttcaaagacaagatagtgctggacgttggctgtgggagcgggatcctgtcattcttcgcagcccaggccggggcccgcaaaatctacgctgtggaggcttcgacaatggcacagcacgccgaagtgctcgtgaagtctaataatctgactgacaggatagtagtcattccagggaaagtcgaggaggtgagcttgccagaacaagtcgacatcatcattagcgaacctatgggatatatgctgttcaacgaaaggatgctcgaatcctacttgcatgctaagaagtatctgaagccatcaggtaatatgttccctaccatcggggacgtgcatctcgcgccctttacagacgaacagttatatatggaacaattcactaaggccaatttttggtaccaacctagctttcacggagtcgacctgtcggcgctgagaggcgctgctgtagatgaatatttcaggcagcctgttgtggacacattcgatatacgaatactgatggccaagtccgtgaagtacaccgttaactttctcgaagcgaaggagggcgatctccataggatcgaaatcccatttaaattccatatgctgcactcaggcctagtccacggccttgccttttggttcgatgtggccttcatcgggtccattatgaccgtctggctctccaccgcacccaccgaacctctgactcactggtaccaggtcagatgcctgtttcagagccccctttttgctaaagccggagacacactgtccggaacatgtctcctgatcgccaataagaggcagtcttatgacataagcatagttgcacaagtggatcagacagggtctaaaagcagcaacctgttagatctcaagaaccccttttttcgctataccggaacaactccaagcccacctcccgggagtcactatacctccccctctgaaaatatgtggaacactggatcaacatacaatctctcctccggaatggctgtggccggaatgccaactgcctatgatctaagttccgtgatcgcgagcgggtcatccgtaggacacaacaacctgatacctctgggaagcagcggggcgcagggaagcggaggcggcagcacaagcgcccactacgcagttaactctcaattcaccatgggaggcccagccatcagcatggcttctcctatgtctatcccaaccaacactatgcactatggcagctag

SEQ ID NO: 23831 - DNA, 771 bp, synthetic construct
  source 1..771: mol_type = other DNA; note = Synthetic coding sequence
atggccagcggccggcccgaggagctgtgggaggccgtggtgggcgctgctgaaaggtttcgggcacgcaccggaaccgaattagttctattaactgccgctcccccccccccaccgaggccgggtccctgtgcgtacgcagcccacggccgaggggcacttgccgaggctgcgcggagatgcctgcatgatatcgccctggcccatagggcggcaacggccgctagaccaccagctccgcctcccgccccgcagccaccttccccaactcccagcccaccgcggcctacgctcgcccgagaggataatgaagaggacgaagatgaacccacagaaacagaaacatccggcgagcaactgggtatcagcgataacggcggactattcgtgatggatgaggacgccacattacaggaccttcccccattttgtgaatctgaccccgagagcactgatgacggaagcctttcggaggaaacgccagctggcccacccacctgttccgtacccccagcctctgcactgcccactcagcaatatgcaaagtctcttcctgtgagtgtccctgtctggggctttaaagagaagaggacagaggcccgcagctcagacgaggagaacggccccccttcatcccccgacctggaccgtatcgctgcttccatgcgtgctctggttctgcgagaggctgaggatactcaggtgttcggcgatttgcccaggccccggttgaatacttcggactttcagaagcttaaaagaaaatactag

SEQ ID NO: 23832 - DNA, 4293 bp, synthetic construct
  source 1..4293: mol_type = other DNA; note = Synthetic coding sequence
atgtgcctggagagcaacctgagcagctgcaagcacctgccctgctgcggcaagcttcacttccaaagctgccatggcaatgttcacaaactgcaccagttcccatccctccagggctgtacgtcagccggttacttcccctgttccgatttcacttcaggtgcaccaggacacctggaggagcatatctcccaaagcgagcttaccccccatttgtgtacaaattctctccacctcaacgtagtaccgcccgtgtgcctcaagggtagtctctactgtgaagactgtctcaataaaccagctcgaaattcaattatcgacgcggctaaagtctggccaaacatccctcctccgaacacacagcccgctccattggccgtgccactgtgcaacgggtgtgggacaaagggcactggcaaggagactacactgctgctggccaccagcttggggaaggccgcgtctaagttcggaagccccgaagtggcggtcgcgggccaggttctggagaatcttcctccaatcggggtattctgggacattgagaactgttctgttccctctggtagatccgccaccgctgtggtgcaacgtatacgggagaagttcttcaaggggcaccgcgaagccgaatttatctgtgtttgcgatatcagtaaggagaataaagaggtgatccaagagctaaataactgccaggtgacagtcgcccacattaacgcaacagctaagaatgccgccgacgacaagctgcggcagtctttacggcgctttgcgaatactcacactgctccagcgacagtggtacttgtctcgacagatgttaactttgcactcgagctctcagaccttaggcaccgacatggctttcacataatactggtgcataaaaaccaggcctcagaggccctgttgcatcacgcaaatgagctgataaggttcgaagagtttattagcgacctcccgccacgactcccactgaaaatgcctcaatgtcacactctgctgtatgtatacaatcttcccgcaaacaaagacggaaagagcgtatcaaataggttgcggcgcttatcggataattgtggtgggaaagttttatccataactgggtgtagcgccatcctgcggtttatcaaccaagacagcgcagaaagggcacagaagcggatggaaaatgaagacgtctttgagaaaaaggataaagaggaaacggtgttccaggttagttacccttctgccttcagtaagctagtggcgtcacgacaagtgagcccgctcctggcttctcagagttggtctagtcgggcgtccccacttgcattcaacatagctaactccagttctgaggccgactgtccagacccctttgccaacggcgccgacgtgcaggtgtccaacatcgactatcggctgtcccgcaaggagctgcagcagctgcttcaggaagcattcgcccgccacggcaaagtgaagagcgtggagctgtcgccccacactgactaccaactgaaggctgttgtccagatggagaatctccaggatgctattggagccgtcaactcgctccatagatataagatcgggagcaaaaagatcttggttagcttagcaacaggagcggccagcaaaagcctgtctctgctcaggtttggacacaagcttaatgtctcggacctctacaagctgacagatactgtggccatccgagagcaaggaaatggtaggctggtgtgcttactgccttccagccaagcccgccagagtcctctcgggtctagtcagtctcacgatgggagttccacgaattgtagccctattattttcgaagaattggagtatcacgagcccgtgtgtagacaacattgttccaacaaggacttctcttttccggactgttacattgccgaatttggcgaccttgaagttgtacaggagaatcagggtggggtgcctctggaacactttattacatgcgtgcccggagttaatatcgccaccgcccagaacggaataaaagttgtcaaatggatccataataagcccccaccgcccaataccgatccttggctgctgcgctctaaaagtcctgtcggtaacccccagctgattcaattttcaagggaagttatcgatttattgaaatcccagccatcttgcgttatcccgatcagtcattttatccctagctaccaccatcatttcgcaaagcagtgtagggtatctgattacggttactcgaagctaatcgaactgctagaggccgtgcctcatgtacttcagattctcggtatgggctctaagaggcttctcacccttacgcaccgagctcaagtgaaacggtttacgcaggaccttttgaagcttctgaaatctcaggccagcaagcaggtgatcgttcgggaatttagccaggcgtaccattggtgtttcagcaaggactgggacgtcactgaatacggggtctgtgaacttatcgatatcgtgtcagagattcccgatacgacaatttgcttgtcacagcaggataatgaaatggttatttgcatccctaagcgagagaggacacaggatgaaatcgagcgtacaaagcagttctcaaaagatgtggtcgatctcttaagacatcagccacatttcaggatgcctttcaataaatttatcccatcatatcatcaccacttcggcagacaatgcaaactggcatactacgggtttacaaagctgctagaactcttcgaggccatccccgatacactacaagttctggagtgtggagaagaaaaaattctgactctgacggaggtcgaacggtttaaggcgctggcagcccagttcgtgaagctgctccgcagccagaaggataactgtttgatgatgactgacctgcttacagaatacgcaaagaccttcggatacaccttcagattgcaggactacgatgtgtcctctatttccgctctgacccagaagctgtgccatgtagtgaaagtagcagacattgaatccggtagacaaatccagttgatcaatcgcaagtccctgcggtccctgactgcccagctcctggtgctgctgatgtcttgggaggggacgacgcacctttctgttgaggagttaaagagacactacgaaagcacacataataccccacttaacccatgcgaatatggctttatgactttgactgaactgctgaaatctctcccttacttagtggaaaccgctgcggccttcgacctgcagattgagcttaaatttgcaggaggctacagcctcctgttggaggagatccttgagtacattccccctcctttcctgtcccccttgcctagcttcctgccaccccctccattctttttcttcgtctttttcgttatcttcatctttttcatcttcgtgttcgtccagttcgtcgttttcgtgtttttcatcgtagtgttcgtctttttcatcgtagtgttcgtcttcactaacgacaaaatggaggagtgcgttaagctgaccagcctgtacctgttcgcaaagaatgtgcgctccctactccatacttaccactatcaacaaatctttctccatgagttctccatggcctatacaaaatacgtaggggaaacactacagcccaagacatacggacacagctctgttgaggagctgctgggcgcaattcctcaggtggtggtccaatttctccagaagaacgggaaggagctgtcctgcgaaaactacctgaatctgtatgctaaggccgggagactgtcctcccttagcttatccccagcgaaccatgaaaatcagccctcggagggcgaacgaatcctggaggtacccgaatctcacaccgcgagcgaacttaagctgggggccgatggatcagggccaagccatactgagcaagaactgctcaggttgaccgatgattctcctgtggatctactttgcgcccccgtgccgtcatgtttgccttccccccaactccgacctgacccagtcatcctgcagtctgcagacctgatccaatttgaagaaagaccacaagaaccttctgagattatgatactcaatcaagaggagaaaatggagataccaataccaggaaagagtaaaactttaacatccgacagctcatccagctgtatttctgccgccgtgccagtaccaccttgtccctcatccgagactagcgagagcctgctctctaaagatccagtcgagtctcctgccaaaaaacagccaaagaatagggtgaagctcgcagcgaatttcagtctggcccctatcacaaagctgtag

SEQ ID NO: 23833 - DNA, 2346 bp, synthetic construct
  source 1..2346: mol_type = other DNA; note = Synthetic coding sequence
atgggccagctgcgggactggttccccaacacccaggacctggccggtaacgatcaggaaaacatccgacacgctgataggaataattcggatgacaaccaccttgcctccgaggacacctccgcaaaacagtccgggaagccaggcatttacgaggacagagatcccttacgagtgtcaatatccagggaacagtcgttctttgggagcccccttgcccacgatccattcagttgccttcagctggttggacaggaaaatgtgtgtggtgatgactatgacgaagccgtgaaacttaaagaatcggttgtcgaaaatcatgctgtgctgagttatgcggtcgaagaggagcacgcctacctcggaccaaccgtgaaaccagacgataaggccaagacattatcctacgaacccctgagctccgccacggtgagtaccggtagcttactgtcttacgagaacaccgatctttctctgaccgatcccgaaagcttcagcgaacacatggacgactctaagcaggaaagcactacctctaaggaggaagaaacaaacataatctcctccatcgtcccttccacccaggatatctaccaaagacagaactcctcagatgttcacaaatcgctgcttccagctgtggatgagacaacatgcggccacacacatttccagcagatgatcgacaagtacatcaacgaggctaaccttatccctgaaaaaaccgacttgcaggagcttgaacatatttttcctaatctgcaccatcaacttttcaaacctttagagcctcaccctgactttgatctgagcagctcatccagcggcatatcaccagataacagggacttttatcaacggagtgacagctcaagtgagtcacactgtgccaccggtctctcaaagagcaccgtttatttcaccgccctcaggcgtacaagcatgcattcctccctcaacaccagccctaaccaacagcctgacactaatctcgcgcacgtgggggcacatagcttcgccaccgagaatatcattggcgggtctgagcagtgttttgaacagctgcaaccggagtactcatcgcaagaagagagtcagcacgctgatctgccaagcattttctccatcgaggccagggactccagccaaggcatgaagaaccagaattatccgtcagaagaacataccgaaatcttgcagaataaaaagaagattgtccatttccagctgtctatcggcaacctaagtagtgtatatagctcgagcgacgaggccaatgtgtttgaccagcttaacgtgcaacactcaactccatgtggatctaattctagcgaatgcagtacgaagcatcagcttgaatcccgcaaggaatcgatgggatttgaagaactaagtaagaggggcgttgtcactatgctgcagtcacaggggctgatcgaggacaataaaaatgagacctgccgggtgttggacatcaacccccaggtggaggagacagactctcggttgtgcgtgcgcacggtcgaaatgggaacttccatacaagccccttactccttaacaacacagaacgaaaagtacttcgaaaattctgccgaaactgatatccccaagatcacaaagaaactgtcccagctgggggaatccgagctgtttgctagcagcggctcgttctcacttcagagctccatccctgtttgggaaaccgaaaccggccacggcattatggaggaacccgaattaactctgatctcaacaaccgataccagcatagccgaaatggacttcgctaatctcaccctggaagagaaatctgaaaacgaggcaaaatgcttcttccaggtctcagaattcctgcccttggtgtccgcaaccgaagcctcagactatcctgctgtgagtgaactgagcatcgaaaagccccgcacagcgtctaccgagacacctaggaggcttacacccgtcccaggcagtttacaagaagcattcatcaagcgcaagaagtcttttatggagaggagccaccagaggcaaaaggagattaggaataagattcatgtgtctgagaactcccagatcaaaactgtaaaggaaaagccgtctatttcatcatcggtaagtcggttgaaaggagtaaataaggttagggcttccttcccagaagaccggaagaccactcaagcactgagacaccagagagggctccggctttacaatcagttagccgaagtcaagcagcaaaaagaggagaagactaagcaggaagcatacgcccagaaccgcgcgcgggctaaagaattccataagaagacacttgaaaagctgcgcgccaagaatacctgttag

SEQ ID NO: 23834 - DNA, 513 bp, synthetic construct
  source 1..513: mol_type = other DNA; note = Synthetic coding sequence
atgggcaagcggtacttctgcgactactgcgaccggagcttccaggacaatctccataaccggaaaaagcaccttaacggcctgcagcacctaaaagcgaagaaagtctggtacgacatgttccgagatgccgcggctatcctactggacgagcaaaataagcgcccttgtcgaaagttcctgctgactggccagtgcgatttcgggtcgaactgtcgcttctctcatatgagcgagcgggatctgcaggagctgagcatccaggtagaggaggagagacgggccagggagtggctgttggatgcccccgaactgcccgagggccacctagaggactggcttgaaaagcgagccaagcggctgtcctccgcaccctcaagccgagcggagcccattaggacgactgttttccagtaccccgttggctggccgccagtccaggaattgcctccgtcacttagggccccccctccgggcgggtggcctctccagccacgcgtgcagtggggttag

SEQ ID NO: 23835 - DNA, 1542 bp, synthetic construct
  source 1..1542: mol_type = other DNA; note = Synthetic coding sequence
atggccagcgtgctgagccggcggctgggcaagcggagcctgctgggggctagagtgcttgggccatccgcaagcgaaggaccaagcgctgccccgccttctgaaccactgctagagggcgctgcgccacagccattcactaccagcgatgacacaccttgtcaagagcagcctaaggaagtgctgaaggctcccagcacctcagggctgcagcaggtcgcatttcagccggggcagaaagtctacgtgtggtacggggggcaggaatgcacaggcctggtagagcagcattcgtggatggagggtcaggtcacagtatggctgcttgagcaaaagttgcaagtatgttgtcgggtggaggaggtgtggctcgcagaattgcaaggcccttgcccccaggcgccccctctcgagccaggcgcccaggctctggcctatagacccgtgagcagaaatatcgatgtgcctaagcggaaaagcgacgccgtcgagatggatgagatgatggccgccatggtattaacatcactctcgtgtagcccagtggtgcagagcccacccggcaccgaggccaacttctcggcaagtcgtgctgcctgcgatccttggaaagagagcggagatatctctgacagcggctcgagcaccacgagcggccactggtctggctctagtggtgtgtctaccccttcaccaccgcacccacaggcttcccccaaatacctcggagacgcgttcgggtctccgcagacggaccacggattcgaaacggatcctgacccatttttgctcgacgaaccagcaccaagaaaacgaaagaactctgtgaaagtgatgtataaatgcctctggccaaattgtgggaaggtcttacggagcattgttggaattaaaaggcatgtgaaagcccttcacctcggggatacagttgacagtgaccaattcaagcgggaggaggatttctattacacagaggtccagctgaaagaagaatcagccgccgccgccgcagccgctgccgctggtacacccgtacctggcacacccacatcagaacctgctcctaccccaagcatgactggcctcccgctgtctgcactgcctcccccccttcacaaagcgcagtcaagtgggcccgaacaccccggaccagagtcaagcctgccctctggagcactctcaaaaagcgcaccggggtcgttttggcacattcaagctgatcatgcctaccaggctcttcccagcttccagattcctgtttcgcctcatatttatacttcagtgtcttgggctgcagcccctagcgcagcgtgttcattgtcacccgttaggtcccgatccctgtctttttcagaaccccagcagcccgctcccgctatgaagtcacacttgattgtcacatcacctcccagagcccagagtggtgccagaaaggcacgaggcgaagctaaaaagtgtaggaaagtctatggcattgagcacagagatcaatggtgtacagcctgccgctggaagaaagcatgccagcgtttcttagactag

SEQ ID NO: 23836 - DNA, 555 bp, synthetic construct
  source 1..555: mol_type = other DNA; note = Synthetic coding sequence
atgggcaacggcatgaacaagatcctgcccggcctgtacatcggcaatttcaaagacgcaagagatgcagaacagttaagcaagaataaagtgactcatatattaagcgtccatgactcagcacgccccatgctggaaggagtgaagtatttgtgtatcccagctgccgattctccttcgcagaatctgacacgccatttcaaagagtctattaaattcatccatgagtgtagactgcggggcgagagctgtttagtgcattgtctggctggggtgagtcggagcgtcaccctggtcattgcgtacattatgaccgttactgacttcggttgggaagacgcccttcacacggtcagggctgggaggtcttgtgcgaaccccaatgttggcttccagagacaattacaggaattcgagaagcacgaagttcatcagtataggcaatggctaaaagaggagtacggcgagtcccccctacaggatgcagaagaagccaaaaatattttagctgcaccaggtatcctgaagttctgggcatttctccgtcgcctctag

SEQ ID NO: 23837 - DNA, 642 bp, synthetic construct
  source 1..642: mol_type = other DNA; note = Synthetic coding sequence
atgctgcagctgcgggacagcgtggacagcgccggcaccagccccacagctgtcttggctgctggcgaggaagtcggagctggaggcggacctggaggaggaagaccaggagccgggactccattacgacagacgttatggccgttaagcatccatgatcctacccgaagagctcgagttaaagaatacttcgtgttcaggcccggatctattgagcaagctgttgaagagatacgcgtggttgttagacccgtcgaggatggggagattcagggtgtttggctgttaactgaacgtgaaggtttcgggattcgaatacaatgggataagcagtcgagaccttccttcataaacagatggaatccctggagcactaatgtcccgtacgctacattcactgagcatcctatggccggcgccgatgagaaaaccgcgagcttgtgtcagcttgagagcttcaaggcgctcctgattcaagccgtgaagaaggcccagaaggaatcccccctgccgggacaggctaacggcgtcttgatccttgaacggcccctgctgatcgaaacctacgtgggccttatgtccttcataaataatgaagcaaagctgggatattcgatgaccagagggaagattggcttttag

SEQ ID NO: 23838 - DNA, 888 bp, synthetic construct
  source 1..888: mol_type = other DNA; note = Synthetic coding sequence
atggagctgatccaggacaccagccggccccccctggagtacgtgaagggagtgcccttgatcaaatatttcgccgaggccctggggcccctgcagtcttttcaggcccgacccgacgacctacttataaacacttatccgaaatcgggcaccacatgggtctcccagatactagacatgatttatcaaggtggggaccttgagaagtgcaaccgcgcaccaatatacgtgcgggttccctttttggaagtcaacgatccaggagagccctccggacttgagacacttaaagatacccctcccccgaggctgattaaaagccatctgccccttgccctgttaccccaaacattgctagaccaaaaggttaaggtcgtttatgtggccaggaatcctaaagatgtggcagtgtcctactaccacttccatcgaatggaaaaggcccaccccgagccaggaacgtgggactcattcctggaaaagtttatggcaggagaagtgtcatacggatcctggtatcagcatgtacaggagtggtgggagttatcgaggacgcacccagtgctgtacctattctacgaggatatgaaggaaaaccccaagagagagatccagaagatactcgaattcgtgggtaggagtctgccagaggaaactatggattttatggtgcaacacacgtcatttaaagagatgaagaaaaaccctatgacaaattatacaacggtgccacaggagctgatggaccattccatttcccccttcatgcgcaaagggatggccggcgactggaagacgaccttcaccgtggcccaaaatgagagattcgatgcggactatgcagagaaaatggctggatgcagcctcagcttccgatctgaattatag

SEQ ID NO: 23839 - DNA, 3867 bp, synthetic construct
  source 1..3867: mol_type = other DNA; note = Synthetic coding sequence
atgccccggaagggcacccagcccagcaccgcccggcggcgggaggaagggccccccccccctagccccgacggtgcatctagtgatgctgagccggagcccccatcagggagaactgagtcccccgcgactgcagcggaaacggcgtctgaggagctcgataacagatccctggaagaaatcttgaattctatcccaccccctccaccacctgcgatgaccaatgaggccggcgcaccacggctcatgattacccacatcgtcaatcaaaatttcaagagttacgcaggcgaaaaaatactcggaccatttcataagagattctcttgtattattggtcccaacgggagtggtaagtcaaacgtgattgatagcatgctattcgtgtttgggtatagggcgcaaaaaatccgttcgaagaagttatccgtgctcattcataattccgatgagcacaaagatatccaaagctgcaccgtcgaagtccacttccaaaaaatcatcgataaggagggagacgattatgaggtgatcccgaactccaatttctacgtcagccgaactgcgtgtcgtgacaacacgagtgtctaccatatcagtggcaagaagaagacattcaaggacgtcggtaacctgctgagatcccatggaattgatcttgatcataacaggtttctcattctccaaggcgaagtggagcagatcgcaatgatgaaaccaaagggacaaacagagcatgacgaggggatgctagaatacctggaagacattatcggttgtggcagactcaacgaacccataaaagttttgtgcagacgcgtggagatactcaatgagcaccgcggcgaaaagctgaaccgtgtaaaaatggtagaaaaagagaaggacgcacttgaaggtgaaaagaatatcgcaatagagtttctgacacttgaaaacgaaattttccgaaagaaaaaccacgtctgccagtattacatatatgagctgcagaaaaggattgccgaaatggagacacaaaaagagaaaattcatgaggataccaaggagatcaatgagaagtctaacatcctgtctaatgaaatgaaggccaagaacaaagatgtgaaagacaccgagaaaaagctaaacaaaataacgaaattcatcgaggagaacaaagagaaattcacgcagcttgatctcgaagacgtgcaagtgcgggaaaaactgaaacacgccacgagtaaggccaaaaaactggagaagcaacttcagaaggacaaggagaaagtagaagaatttaaaagcattccggccaagtctaacaacatcataaacgagaccacaacccggaataacgcactagagaaggagaaggagaaggaggagaaaaagctgaaagaggtgatggactccctcaagcaggagactcaaggactgcagaaggaaaaagagagcagagagaaagagctgatgggatttagcaagtctgtgaacgaggcaaggtccaagatggacgtggcgcagagcgagctagacatctacctgagccggcataatacggccgtttcccagctgacaaaggccaaagaggcactcattgcggcatccgaaacactgaaggaaagaaaggccgctatccgagacattgaggggaagctcccacagaccgaacaggaactcaaggaaaaggagaaggaattgcagaagctcactcaggaggaaaccaacttcaagtccttggtgcacgatctgttccagaaggtggaggaggctaaaagctctctggcaatgaaccgatcccggggaaaggtattggacgcaatcatccaagaaaagaaatctggaagaattcccggcatttatggccgactgggagacctcggcgccatcgacgagaaatatgacgtagcaatctcaagctgctgccacgcgcttgactatattgttgtcgactcaattgatattgcgcaggagtgtgtcaacttcttgaagagacagaacattggcgtggcaacctttattggtctggataaaatggctgtgtgggccaagaagatgactgaaatacaaacgcccgaaaacaccccgcgcctgttcgatctagttaaagttaaagatgagaagatccgacaagccttttactttgctctgagggacacgctggtcgccgacaatttggaccaggctacgcgcgtggcttatcaaaaagatcgtcgctggcgggtagtgaccctgcagggccagatcatcgagcagagcggaaccatgaccgggggaggatccaaggtgatgaaagggcggatgggtagctctctggttatcgaaatatctgaggaagaagtcaataaaatggaatcacaacttcagaacgattctaaaaaggccatgcagatccaagagcagaaggttcaattagaagagcgggtagttaagcttaggcacagtgagagggaaatgcggaacacgcttgaaaagtttactgcctccatccagaggctgattgagcaggaagagtatctgaacgttcaagtgaaagagctggaggcgaacgtcctggctacagcgcccgacaagaaaaaacagaagctgctcgaagagaacgtgagtgcctttaagaccgaatatgacgccgtcgccgaaaaagcaggcaaagtggaggctgaagtcaagcgtctacataacactatagtggaaatcaataatcacaaactgaaggctcagcaagataagctcgacaagatcaataagcaactcgacgagtgcgcctccgccataacaaaagcccaggtagcgatcaaaaccgcggaccggaatctgcaaaaggcccaggattccgtgctccgcacagaaaaggaaattaaggatactgagaaggaagtggatgatcttaccgctgagttgaagtcactagaagacaaggccgccgaggttgtcaaaaacactaatgcggcagaggaaagcctgcctgagatccaaaaggagcatcgtaacttgttgcaggaactcaaggttattcaggagaacgaacacgcccttcagaaggacgccttgtcaatcaagctgaaactcgagcagatagatggccacatcgctgagcacaactctaagatcaagtactggcacaaagagatcagtaagatatcactccaccccatcgaggataatcccatagaagagatttcggtgctctccccagaggacctcgaggcaattaagaacccagactccatcacaaaccagattgcactcttggaggcacgctgtcacgaaatgaagcccaatctgggtgccatagctgaatataagaaaaaagaggagctttatttacagcgagtcgcagaactggataagatcacgtacgagcgagactcctttaggcaggcctatgaggatctacgcaaacagcggctgaacgagttcatggcggggttttatataattaccaataagctgaaggaaaactaccagatgttgactctggggggggatgcggagctggaactcgtcgatagcttggacccattcagcgagggtattatgttctccgtgcgccctcccaaaaagtcctggaagaagatcttcaacttatccggaggcgaaaagaccctgagcagcctggcactggtatttgctctgcaccattataagcccacacctctgtacttcatggacgaaatcgacgccgccctagatttcaaaaatgtatcaatagtggctttttacatttatgaacaaacaaagaatgctcagttcatcataattagtctcaggaacaatatgttcgagatatcagaccgcctgattgggatctacaagacttacaatatcaccaagagcgtcgcagtgaaccccaaagagatcgcctccaaagggctgtgctag

SEQ ID NO: 23840 - DNA, 2856 bp, synthetic construct
  source 1..2856: mol_type = other DNA; note = Synthetic coding sequence
atgctgggcagcatggcccggaagaagccccggaacaccagccggttaccactcgcactcaaccctctcaaatcaaaagacgttctggccgtccttgcagagaggaatgaggccatcgtgcctgtgggggcttgggtggaaccagcaagtcctggctccagcgagataccagcctacacttcagcgtacctaattgaagaggagctcaaggaacagcttcggaaaaaacaggaggccttaaagcatttccagaagcaagtgaagtatcgtgttaaccaacagattcggctccgtaagaagcagcagctacagaaatcttacgagagagcgcagaaggaaggctctatcgcgatgcaatctagcgccacccatttaacttcaaagagaacatccgtgtttccaaataaccttaacgtggctattgggtcctcacgcttgccacccagtctaatgcccggcgatggcatagaggacgaggaaaaccagaatgaactcttccagcaacaagcccaggccctgtctgaaaccatgaagcaggcccggcacaggctggcatcattcaaaacagtgatcaagaagaaaggcagcgttttcccggacgacggccgaaaatctttcttgaccagagaagaagtacttagcagaaagcccgcttcaactggcatcaacacaggcatcagaggggaattacctattaaggtgcatcaaggcctgctggcagcagtgccttatcagaattacatggagaatcaggaactcgattacgaagaacccgattacgaagaatcttctagcctcgtcacagatgagaagggcaaagaggatctgttcgggcggggccagcaggaccagcaagcaatacactctgaagacaaaaacaagccattctctcgagtgcagaaagtgaaatttaaaaaccctctttttgtgctaatggaggaagaagagcaaaaacaactgcacttcgagggcttgcaggacatactcccagaggcgcaggattactttttggaggctcagggcgatctgctggagacccagggggacctgacggggatccagagtgtgaagcccgacactcaagccgtggagatgaaagtgcaggttactgagcctgagggccaggcgattgaacctgaggggcagcccatcaagaccgaaacccagggaataatgcttaaggcccagtcgattgaactcgaggagggcagtatagttctaaaaacgcaggactttctcccaacgaaccaggcactcctcaccaagaaccaggatgttcttcttaaggaccactgcgtcttgccaaaggatcagtccatattactgaaatatcaggatcaggatttcctccctcgcgatcagcatgtgcttcacaaggatcaagatatcctgcccaagtaccaggaccagaacttccttcccaaagatcaaaatttcctcagcagggaccaacatgtgcttcctaaagatcaggacatcttacccaaataccaggaccaaaattttctgcccaaggaccagaatttcctttcacgcgaccaacatgtgctgcccaaggaccagaacatcctccccaaataccaaggtcaggacttcttgcctaaagaccaggacttcctgtctagggaccagcacgtcctgccaaaggactggaatattctgcctaagtgtcaggatcaagactttttgccacgcgatcagggtgttcttcctaaagatcagaacatactgcccatctgccaagaccaggatttccttccccgcgaccagggatacttgcctaaagatcagaatatactgccgatctgtcaggaccgtgatttccttccgcgggacctgcacgtgctttcaaatgatcaaaacatccttccgaaatgtcaagatcaggatttcctccccaagtaccaaaaagttcacttcaaagagccatattctgacatgacggatgaaaaaggacgcgaagacttcagtctggctgactaccagtgtttgccccccaagtcacaagaccaagatgatatcaagaaccaacagcctgcttccttcatgcgcgaagagcgagttcgcgaagagctccctctggattaccaccaatatgtggtgcccaaaattcaggatcaggatagcccgagggagcagaacaaacacataaagttgccatcatcctttgaaaagtgggaaatcgcacgcggaaatacccccggagttcccctggcatacgacaggtaccagtccggactcagtacggagttccaggccccattagcattccagagtgacgtggataaggaggaagacaaaaaggagagacagaagcaatacctcagacatcggcggttatttatggatattgaaagagaacaggtaaaagagcagcagcgccagaaagagcagaaaaagaagatcgaaaaaataaagaagaagcgcgaacaggaatgttacgccgcggaacaacggattctgcggatgaattttcacgaagatccatatagcggggagaaactgagcgagattctcgcgcagttacagctccaagagatcaaaggtacacgggaaaagcagcagagggagaaggaatacctgaggtacgttgaagctctaagggctcagatacaggaaaagatgcagctctataatattactctgccccccctgtgctgctgcggccccgacttttgggatgctcatcctgacacctgcgcaaataactgtatcttttacaagaatcaccgcgcatacaccagagcgttgcattctttcatcaattcctgtgacgtacccggagggaactccacactgcgcgttgccattcacaatttcgctagtgcacacagaaggaccttgaagaacctttag

SEQ ID NO: 23841 - DNA, 1248 bp, synthetic construct
  source 1..1248: mol_type = other DNA; note = Synthetic coding sequence
atgagccccgaggtggccctgaaccggatcagccccatgctgagcccgtttatcagcagcgtggttcggaacgggaaggtgggacttgacgcaactaattgcctccgcataactgatctgaaatccggctgtaccagcttaacccctggcccaaactgcgatcgcttcaaactgcatatcccgtacgctggcgagacgttgaagtgggacattatctttaatgcacaatatcccgaactccccccagactttatattcggcgaggacgcggagtttctgcctgaccccagcgctttgcagaatcttgcctcctggaaccccagcaatcctgagtgcttgctcctcgtggtgaaggaacttgtacagcagtaccatcagttccaatgctcccggctcagggagagctcaagattgatgtttgaataccaaacacttttagaagaaccacaatatggtgagaatatggagatctatgctggaaaaaaaaacaattggaccggagaatttagcgcaaggtttctgctgaaactacctgttgacttttcaaacatccctacctacctgcttaaagacgtgaatgaggaccctggcgaggatgtggcgcttctctctgtgagcttcgaagatacggaagccacgcaggtgtatccaaagctctacttgtcgcctcgaatagagcatgcccttggcggctcatctgctttgcacattcctgctttcccaggaggtgggtgtcttattgattatgtgccccaggtttgccatctactgacaaataaagtgcaatacgtcatccagggttatcacaaacggcgggagtatatcgcagcatttctctctcacttcggcacgggggttgtggaatacgacgccgaggggttcaccaagctgaccttacttcttatgtggaaagatttctgcttcttggtacatatcgaccttccactcttcttccccagggatcaacccaccctcacattccaatcggtgtatcacttcaccaatagcggacagctatactcccaagcacaaaaaaactacccttactccccaagatgggatgggaacgagatggcgaaaagagccaaaggatgccaggggtcaagggacgcatgctcgccatgggagcaggtcttagcttttgccgtggcgaagacgggatgtaagctgctgcagccccaaagaaattggccctcttctcgggggccaccctggagggcatcggagggcgagaggaccgcgcagtag

SEQ ID NO: 23842 - DNA, 903 bp, synthetic construct
  source 1..903: mol_type = other DNA; note = Synthetic coding sequence
atgctgagcgccgtggcccggggctaccagggctggttccacccctgtgcccgcctgagtgttcgaatgagctctactggtattgatcggaaaggtgtgctggccaacagggttgcagtcgtcaccgggagcacgagtgggatcgggttcgcaatcgcccgcaggctggcacgtgatggtgcccatgtagtaatctcttcccgaaagcagcagaatgtggatagggctatggccaagctgcaaggcgagggcctgtcagtagcgggcattgtatgccacgtcgggaaggccgaggatcgcgaacagctcgttgctaaggcgttggaacactgtggtggagttgattttctagtctgctccgcgggagtcaatcccttggtgggaagtaccctgggcacatccgaacaaatctgggataaaatactaagcgtgaacgtgaagtctccagccctgctccttagccagctcttaccctatatggagaataggcgcggagccgtcatcctggtttcatccatcgccgcctacaatcccgtcgttgcactcggagtctacaacgtctcaaagacggctcttctcggcctgacccggacacttgcacttgagttagcgccaaaagatatccgtgtgaactgcgtggttcctgggatcatcaagactgatttcagcaaggtcgtcaggattggctttatggggatgtctctcagcgggaggacgagtcgaaacatcataagttgtcgcggcctgggaagtcagcgaaccgttcaggaaagctgccctagctgcgccttgcaaatgcccgccaccagtacaggcagaaccctgcgatggcaggccacacccctgggttccgagcgcagtggcggaggctgcgtcgcagtggtgcccggcccaggtgcttag

SEQ ID NO: 23843 - DNA, 1014 bp, synthetic construct
  source 1..1014: mol_type = other DNA; note = Synthetic coding sequence
atgcggttcgacaccctgtgggagaacaagctgatgcagagccgggccgtggacggctttcactctgaagagcagcagttactgctacaggtccagcagcagcaccaaccccagcagcagcagcaccaccatcaccaccaccaccagcaggcccagccccaacagactgtcccccagcaggcacagacccagcaggtgttaattcccgcatctcagcaggctaccgccccacaggtaatcgtcccagacagcaaattaattcagcatatgaacgccagtaacatgtctgcagcagccactgcagctacattggcgttacctgccggggtaacaccagtgcagcaaattctgacaaatagcgggcagctcctccaggtggtgcgcgctgcgaatggcgcccagtacatcttccagccgcagcagtctgtcgtgctgcagcagcaggtgatcccgcaaatgcagccaggaggtgtccaagcgcccgtaatacaacaggtcctcgcaccgttacctggaggcatatcaccccagactggggtgattattcagccacagcagattctgtttaccggcaataaaacgcaggtgatcccaacaaccgtggccgccccgacccccgcacaagcacaaattacggccacaggacagcagcaacctcaggcccagcctgcccagactcaggcccctctcgtcctccaggtggacgggaccggtgacacatccagtgaggaggacgaagatgaagaggaagactatgacgatgatgaagaggaagataaagaaaaagacggagccgaggacggacaagtggaagaggaaccacttaatagtgaagacgacgtgagtgacgaggaagggcaggaactgtttgatactgaaaatgtggttgtatgccagtacgacaaaatacaccgaagtaagaacaagtggaaatttcatttaaaagacggaataatgaatctgaatgggagggactatatcttctctaaagcaattggggacgcagaatggtag

SEQ ID NO: 23844 - DNA, 282 bp, synthetic construct
  source 1..282: mol_type = other DNA; note = Synthetic coding sequence
atggcccagagcggcggcgaggcccggcccggccccaagaccgccgtgcagatccgcgttgcgattcaggaggccgaggacgtggatgagttggaagacgaagaggagggcgccgaaacccggggtgctggggatcctgcccggtatctaagcccaggatggggatcggccagcgaagaggagcccagccggggccaccggaatcgttcgtctgtgaatagcaggactatgttggctagtttcatcgtgtcctcagcgccaagcaccgcacctagtacatag

SEQ ID NO: 23845 - DNA, 255 bp, synthetic construct
  source 1..255: mol_type = other DNA; note = Synthetic coding sequence
atgaaggtgaagatcaagtgctggaacggcgtggccacctggctgtgggtagcaaatgacgaaaattgtggaatctgtcgcatggcatttaatggttgctgtcccgactgcaaggtgcccggggatgactgtcccctggtgtggggtcaatgctcgcattgttttcatatgcactgtatcttgaaatggctccacgctcagcaagtgcagcagcattgccctatgtgccggcaggagtggaagttcaaggaatag

SEQ ID NO: 23846 - DNA, 612 bp, synthetic construct
  source 1..612: mol_type = other DNA; note = Synthetic coding sequence
atggcccacgtgagcagcgagacccaggacgtgagccccaaggacgagcttacagcctccgaggcaagcacccggtcaccattgtgtgagcacacctttcccggcgattccgacctccggagtatgatcgaggagcacgccttccaggtactatcacagggcagtttactcgagagtccatcctacacggtgtgcgtgtccgagcccgataaggacgacgattttctgagtctgaactttcccagaaaactgtggaagattgttgaaagcgaccagttcaagagcatttcgtgggatgaaaatgggacctgcatcgttataaatgaggaacttttcaaaaaagagattttagagaccaaagctccgtaccgaatcttccaaacggacgcaatcaaaagcttcgtgcgacagctgaatctctatggtttcagcaaaatccagcagaatttccagcggagtgcattcctggctacattcttaagcgaagaaaaagaaagctctgtgctcagtaagatacgatttacaaagatgaaattgtccagaagcagtacatacgagaatcggtatctctgttgcaacctacatctgaaggacgagtccaattactcatag

SEQ ID NO: 23847 - DNA, 1794 bp, synthetic construct
  source 1..1794: mol_type = other DNA; note = Synthetic coding sequence
atgcccagcccccagctgctggtgctgttcggcagccagaccggcacagcccaggatgtttcagagcggctcgggagggaggcaagaagaaggcgcttgggctgtagagtccaggccctcgactcctatcctgtcgtgaatttaataaacgaacccctcgtgatcttcgtatgtgctacaaccggccagggcgatccgccggataatatgaagaatttctggcggtttatattcaggaagaacttgcccagcacagccctttgtcagatggactttgcagtcctgggtcttggggattctagttacgcaaagtttaatttcgtcgcaaagaaactgcacagaaggctgctgcagctaggcggctctgcacttctccccgtgtgtttaggagatgatcaacacgagttgggtccagatgcggcagtcgacccgtggctccgtgacctatgggatcgtgtccttggcctttatccaccgcccccaggcttaaccgaaatccctcccggcgtacctctgccctccaaattcactctgttattcctgcaagaggctccttccactggatcagagggccagagggtggcgcatccagggtcacaggagccacctagcgagtcgaagcctttcttagcaccgatgatcagcaaccaacgtgtaactgggccatctcatttccaggacgtgcgtctcatagaatttgatatcctcgggagcggaatctccttcgctgccggcgacgtcgtcctcatccagccgagtaatagtgctgcccatgtgcaaagattttgccaggtcttaggactcgatcccgatcagctgtttatgttgcagcctagagaacccgatgttagctctcccaccaggctcccccagccatgctcaatgagacacctggtatctcactaccttgatatcgcctctgtcccgcggcggagcttctttgaactgctggcttgtctgtccctgcacgaactggaacgcgaaaagcttttggagtttagcagcgcccagggtcaagaggagctgttcgagtactgtaatagacctcgtaggactattctggaggttttgtgcgattttcctcacaccgccgcagcgatacctcccgattatctgctggacctcatccccgtgataagaccccgtgcattttccatcgcttcttctctgctaactcacccctctaggctacagatcttggtggccgtggtccagttccagacacgcctgaaggagccaaggcgcgggctgtgttccagttggctggccagtctggaccctgggcaagggcccgtacgagtgcctctgtgggtaaggccaggttccctcgcttttccagaaactcccgacactcccgtgatcatggtcggcccgggcaccggggtcgccccctttcgcgccgctattcaggagcgggtggctcaagggcaaaccggcaacttcctgtttttcggatgccggtggagggatcaggatttctactgggaggcagagtggcaagagctggaaaagagggactgtctgaccttgatccccgcttttagtcgcgagcaggagcaaaaggtctatgttcagcacagactccgggagttgggctcccttgtatgggagttacttgacagacaaggtgcctacttctatctggcaggaaacgcaaaaagcatgcctgctgacgtctctgaagcattaatgtccatctttcaggaggagggcggactgtgttctcctgatgccgctgcctacctcgcacgcctgcagcaaacaaggcgttttcagaccgaaacgtgggcgtag

SEQ ID NO: 23848 - DNA, 1860 bp, synthetic construct
  source 1..1860: mol_type = other DNA; note = Synthetic coding sequence
atggacgaccagcaggccctgaacagcatcatgcaggacctggccgtattgcataaagcatcacggccagccctgtccctacaggaaacgagaaaagctaagtcctcatcccccaaaaagcagaatgacgttagagtgaagttcgagcatcggggggagaaaaggattttgcagtttcctcggcctgtgaagttggaagatctgaggtctaaagccaaaatcgcatttgggcaaagcatggaccttcactacacaaataatgaactggtgatccccctcacgactcaggacgatctggataaagccgttgaattgcttgataggtccatccacatgaaatccctgaaaatattgctggtcattaacggttcaacgcaagctactaatctggagcctctgccctcactcgaggacctggacaacacagtcttcggtgccgagcggaaaaagcgcctgagcatcattggcccaaccagtagagaccgcagtagtccccctcctggatacataccggacgaattacaccaggtggcccgaaatgggtcattcaccagcatcaactccgaaggcgagttcatccccgagtctatggatcagatgcttgaccccctttcactgtcatcacctgagaatagcggaagcggatcatgcccatctctggattctcctctagacggagaatcatacccgaaatcccggatgccaagggctcagtcatatcccgacaatcaccaggagtttagcgattacgacaaccctatattcgagaagttcggaaaaggcggcacttaccccagaaggtaccacgtcagctatcatcatcaggagtacaacgacggcagaaagacatttcctcgagcgcgccgcacacagggcacttctcttcgctcccctgtctcttttagccccaccgatcactcactaagcacatcctcgggctctagcatctttacgccagagtacgatgattctaggattaggagacgcggctcggatatcgataatccaacactgaccgtgatggatatatcccctcccagccggtcacctagagccccaaccaactggcgtctcggaaaactgctgggacagggagcattcggtcgagtgtatctttgttatgatgttgacacaggcagggagctggccgtgaagcaggtgcagtttgaccccgacagtccggaaacttctaaagaggtaaacgccctggaatgcgagatccaattacttaaaaaccttctacatgagagaatcgtccagtactacggttgtttacgggatccacaggagaagacactgtccatttttatggagtatatgcccggagggtccatcaaggatcagctgaaggcttatggcgcgctcaccgaaaatgtgacaagaaaatacacacggcaaatcctggaaggcgttcattatttgcattccaacatgatcgtgcatcgcgatattaagggcgctaatatcttgcgcgactcaactggtaacgtgaaactcggagattttggtgccagcaaaagactgcagactatttgcttgtccgggacggggatgaagtccgttacaggtacaccatactggatgagccccgaagtgattagtggagaaggctatggcagaaaggccgatatatggtccgttgcctgtactgtggtcgaaatgctcacagagaaaccaccttgggccgagttcgaggccatggctgccatttttaagatcgccacccaacccaccaaccctaaactccctccccatgtctccgattatacgcgtgattttctcaagcgcatttttgttgaggcaaaactgcgcccgtctgcagacgagctcctccgccacatgtttgtgcattaccactag

SEQ ID NO: 23849 - DNA, 828 bp, synthetic construct
  source 1..828: mol_type = other DNA; note = Synthetic coding sequence
atgagcaccatcggcagcttcgagggcttccaggccgtgagcctgaaacaggagggtgacgaccagccttcagagacagaccatttgtcgatggaggaggaagacccaatgcctcgccagatttccagacagtcctctgttactgagtccacactttacccaaacccctaccatcagccctacatcagcaggaagtattttgccacaaggccaggagccattgagaccgccatggaagatcttaagggtcacgtggcagagacctccggggaaaccattcagggcttttggctgctcaccaagattgaccattggaacaacgaaaaggagcggattctacttgtgactgacaagactctactaatttgcaagtatgatttcattatgctctcatgcgttcaactgcagcggatccctctctccgcagtgtatcgtatctgtcttgggaagtttacgtttcccgggatgtccctcgacaaaaggcagggcgagggtctgagaatctattggggttctccagaagaacagtcgctgctgtccagatggaatccgtggtccacagaagtgccctatgcaacgtttacggagcaccctatgaaatataccagcgagaaatttctggaaatatgcaaacttagcggatttatgtccaagctcgtgcctgctatacagaacgcccataagaattctacgggctcagggaggggcaagaaacttatggtgttaaccgagccaatcttgatagagacatatactggcctgatgtcctttatcggcaacaggaacaaattgggatatagccttgccaggggcagcatcgggttttag

SEQ ID NO: 23850 - DNA, 1629 bp, synthetic construct
  source 1..1629: mol_type = other DNA; note = Synthetic coding sequence
atggccgccgccgccggcgccgccgccgcccccggcagccgggagcctcaggaccgcccagaatgcggagccggccaccccgggccccgctattaccggcaccctgagaggtggttgctgaggccagaagcctttctaggacctctgaggactagagccccctccgcagaagatagccagagggagaggcctgctgccagatcaggacctgcgatgtctcggcgggtggtgaggcagagcaaattccgccacgtatttggtcaggccgccaaagctgatcaggcctatgaagatatccgagtgagcaaagtgacatgggattcaagcttctgcgcagtcaatcccaagttcctagccattatcgtagaggcaggcggtggtggcgccttcatcgtcttgcccctggcaaagacagggcgggtcgataagaattatcctctggtgactggacatacagctccagtgctggacatagactggtgcccgcataatgacaacgttatcgcgagcgcctccgacgatactacaattatggtgtggcagatcccggactacacaccaatgcggaacattaccgagccgataattacactagagggccactcaaagcgcgtgggaattctttcatggcatccaaccgcccgcaatgtgttacttagcgcaggcggggacaacgttatcattatctggaacgtggggacaggagaggtacttctgtctctggatgacatgcatcccgacgtgatccattctgtttgttggaattcaaacggatctctcttggcaactacttgcaaagataaaacactccggattatagaccctcggaagggtcaggtggtggcagaacgttttgcagcacatgaagggatgcgtcctatgcgcgccgtattcacgcggcaaggacatatcttcaccaccgggtttacacgtatgagccagagggaactaggtctgtgggatccaaacaactttgaggaacccgtagcactgcaggaaatggacacatccaatggggttcttttacccttctatgatcctgacagctcaatcgtgtatttgtgtgggaagggcgacagcagcattcgttacttcgaaattactgacgagcctccctttgtccattatcttaacacgttcagctcaaaggaaccgcaaagaggtatgggtttcatgccgaagaggggtcttgatgtgagcaagtgcgagattgccagattctacaaactgcatgaacggaagtgtgagcccataattatgacggttcctagaaaaagcgatctgtttcaagacgacctgtatccagatacacccgggcccgagccagctcttgaggccgatgaatggttatcagggcaggatgcagaacctgtgcttatctctttgagagacgggtacgtgcctccaaagcaccgggagttgcgggttaccaagcggaacatcctcgacgtcagaccgccttcggggccccgtagatcccagtccgcctcagatgccccactgtctcagcatacactagaaacactgctggaggagatcaaagccctgcgggagagagtgcaggctcaggagcagcggattacagccctggaaaacatgctttgtgagctggtggacggtacagattag

SEQ ID NO: 23851 - DNA, 2550 bp, synthetic construct
  source 1..2550: mol_type = other DNA; note = Synthetic coding sequence
atgagcgacacccggcggcgggtgaaggtgtacaccctgaacgaggacagacagtgggacgaccgggggacggggcacgtgagttcaacctacgtggaagagctcaaagggatgtccctgttagtgcgcgccgaatctgacggtagtctgctcctagaatcgaagatcaaccccaacacagcctatcagaaacaacaggacacgctgatcgtctggtctgaagctgagaactacgatctggccctgtcttttcaggagaaggctggttgcgatgagatatgggaaaagatatgccaggtgcaaggcaaggacccctcagtggaagtgacccaggacctgatcgatgaatctgaagaggagcgctttgaagagatgccagaaacctctcacctcatcgatctgcccacgtgtgaactgaacaaacttgaagagattgctgatcttgttacttcggtgttatccagccctatacggagagaaaaactggcattagcattggaaaatgagggttatataaaaaagctgctccagctgtttcaggcatgcgaaaacctcgagaacaccgagggactccaccatttgtatgagatcatccgcggcattctgttcctgaacaaagccaccctctttgaagtaatgtttagtgacgaatgcataatggacgttgtaggctgccttgagtacgatccagccttagcccagcccaaacgccaccgcgagtttctcactaagaccgccaaatttaaagaagtgattcccattactgatagtgaactgaggcagaagatccatcagacctacagggtccagtacatccaggatatcattctgcctactcctagtgtcttcgaagagaattttttaagcacgcttacttcctttattttcttcaacaaggttgagatcgttagcatgctgcaggaagacgaaaaatttctgtctgaagtgttcgctcagttgactgatgaggccaccgacgatgacaaacgacgggagttagtgaacttctttaaagagttttgcgcattttctcagaccctccagccccaaaacagagacgcgttctttaagacactcgctaagcttggaatcctcccagccctggaaatagttatgggcatggacgacctccaggtgcgatccgctgctaccgatattttttcctacctggtggagttctctccttctatggtgagggagttcgttatgcaggaggcacaacagtctgatgacgacattctgctcattaacgtcgtcattgagcagatgatctgtgacaccgatcccgaactcggcggggcggttcaactcatgggactgctgagaaccctgatcgacccagagaatatgctggctacaacaaataaaaccgaaaagtccgaattcctgaactttttttacaatcattgcatgcatgtgctcactgctcccctcctgaccaatacttccgaggataagtgtgaaaaggactttttcttgaagcactacagatacagctggtcgtttatatgtactccctcgcactcccactctcatagtactccctcctcatcaatttctcaggataatatcgtaggatcgaataaaaacaacaccatctgccccgacaactatcagaccgcccagctgttggctcttatactggaactcctaacattttgtgtggagcatcatacttaccacatcaagaattacattatgaataaggacctgctaagacgggtgctggtgctaatgaattcgaagcatacattcctcgcattgtgcgctctcagattcatgaggcgcatcattggactgaaggacgaattctacaacagatacatcaccaaaggtaacttgttcgaaccagtaataaacgcccttctggacaatgggactaggtacaatttgctaaattctgccgtgattgaactgttcgaattcattagagtggaggacatcaagtctctgaccgcccacatcgtcgaaaacttttacaaagctctggaatccattgaatatgtccagacctttaagggcctcaagacaaaatacgagcaagaaaaggatagacagaaccaaaaactgaatagcgtgccgtcaatccttaggtctaacaggttcaggcgagatgctaaggccctcgaagaggacgaggagatgtggtttaacgaggacgaggaagaggagggtaaagccgtggttgcccctgtggagaaaccaaaacctgaggatgattttcccgataactacgaaaagttcatggaaactaagaaagctaaagaaagcgaggacaaagaaaatttacctaagagaaccagcccagggggcttcaaattcactttctcccactccgcttctgcggccaatggaacgaatagtaaatcggttgtggcgcagatccctcctgccacaagcaacggctcctcgagtaagacaactaatctacccacgtctgtaactgctaccaagggttcactggtcgggttggtggattatcccgatgacgaggaagaggatgaggaggaagaaagttccccacggaaaaggccgagacttgggagctag

SEQ ID NO: 23852 - DNA, 669 bp, synthetic construct
  source 1..669: mol_type = other DNA; note = Synthetic coding sequence
atgggcgacatccccgccgtgggcctgagcagctggaaggccagcccagggaaggttacagaggcggttaaagaagctattgatgcgggctataggcacttcgattgcgcctatttctatcacaatgagcgcgaggttggggctggcatacgctgcaaaatcaaagagggagctgtccgacgcgaggatctgtttatcgcaacaaagttatggtgcacatgccacaaaaaatcactcgtagaaacagcctgtaggaagtcacttaaagccctgaagttaaattatctcgatttgtacctcattcattggcccatggggtttaaaccccctcaccccgaatggatcatgagttgttccgaactgtcgttctgcctgtcccaccctagagtccaggatctgccccttgatgagtctaacatggtgatacccagcgacactgactttctggatacctgggagattctcattcgcttccagatccagcgaaatgtgatcgtaattcctggatccattacaccctcacacatcaaggaaaatattcaggtgttcgacttcgaactaacccagcatgatatggataacatccttagcctcaacaggaacctccgcctggcgatgtttccaataacaaagaatcataaggactatccctttcacattgagtactag

SEQ ID NO: 23853 - DNA, 1080 bp, synthetic construct
  source 1..1080: mol_type = other DNA; note = Synthetic coding sequence
atgcccaaccccagcagcaccagcagcccctaccccctgcccgaggaaatcagaaatctgctggcagatgtagagaccttcgtcgcggatattttgaagggtgagaatctatccaaaaaggcaaaggaaaagcgagaatcgctaatcaagaagattaaagacgtgaagtcaatctacttgcaggagtttcaagataagggggacgcggaagatggcgaggagtatgacgatccgtttgccgggcccccggacaccataagtcttgcctcagaaaggtacgataaggatgacgaagccccgagcgacggcgctcaatttcctccaattgcagcgcaggaccttccattcgtgctgaaggcaggctacttagaaaagcggaggaaagatcactcattccttggatttgaatggcagaaaagatggtgtgccctgtctaaaacagtcttttattactatgggagcgacaaagacaaacaacagaagggcgagttcgcaattgatggctacagtgtgcgtatgaataacaccctgcgcaaagacggcaaaaaagactgttgttttgagatcagtgcccctgacaagagaatataccagtttaccgcagcctcccccaaagatgcagaggagtgggttcagcaactgaaattcgtcttgcaggacatggaatccgatattattcccgaagattacgacgagcgcggagagctttacgacgatgtagatcatccactcccaatcagtaatcctttgacctctagtcagcctattgatgatgagatttacgaggaactccccgaagaagaggaagactctgcacccgtaaaggtggaagaacagcggaaaatgtctcaagatagtgttcatcacactagtggagataaaagtacggactacgccaatttctaccagggcctgtgggattgcactggtgcattttccgatgagctgagctttaagcggggtgatgtgatctacattctaagcaaggagtataacaggtatggctggtgggtgggggaaatgaagggtgcgatcggactcgtgcccaaagcctacataatggaaatgtacgatatatag

SEQ ID NO: 23854 - DNA, 1227 bp, synthetic construct
  source 1..1227: mol_type = other DNA; note = Synthetic coding sequence
atgaagtgcgagcactgcacccggaaggagtgcagcaagaagaccaaaaccgacgatcaggaaaacgtgtcagcagacgcaccttctcccgcacaggagaacggagaaaaatgcgacactagtaagcataaggtgctcgttgtatccgtgtgtccgcagagcctgccttatttcgccgctaagttcaaccttagtgtgaccgacgcaagtcggcggctgtgcgggttcttgaaatccctgggggtccactatgtgtttgatacaaccatcgccgccgactttagtatcttagagagtcaaaaggaatttgtgcgtcgctaccggcagcatagcgaagaagaacggaccctccctatgttaactagcgcttgtcccggctgggtgaggtacgcagagagggttctgggaaggcctatcacagcacacctgtgtacagcaaagtctccacaacaggtgatgggaagcttggtgaaagattattttgctcgtcagcaaaacctatcccctgagaagattttccatgttatcgtggccccatgttatgacaagaaactcgaggctctgcaagagagtctgcctcctgcgcttcacggcagcagaggagcggactgtgttttgacaagcggggagatcgcccaaatcatggaacagggggatctcagcgtcagggacgcagccgtcgacactctttttggcgaccttaaagaggacaaggtgactcgacacgatggagcaagcagcgacggtcatctggcgcacatctttaggcacgccgctaaagaactatttaatgaggatgtcgaagaggtcacttaccgggccctgaggaacaaggacttccaggaggtgaccttggagaaaaatggagaggtggtcttacgcttcgctgctgcgtacgggtttcgcaacatccagaatatgatcctcaagctgaaaaagggcaaattccccttccatttcgtggaagtcctcgcctgcgccggcggttgcctgaacggacgtggccaggcccaaacacctgatggtcatgccgacaaggcattgctcaggcagatggagggaatttacgctgacatcccagtgcgcagacccgaatcctcagcgcacgtgcaagaattgtaccaggagtggctggaagggattaactctcccaaggccagggaggttctccataccacataccagagtcaggaacgtggaacccattcactggatataaagtggtag

SEQ ID NO: 23855 - DNA, 1104 bp, synthetic construct
  source 1..1104: mol_type = other DNA; note = Synthetic coding sequence
atggccctgaacgtggcccccgtgcgggacaccaagtggctgaccctcgaggtgtgccgtcagttccagaggggcacctgcagcaggtcagacgaggagtgtaaattcgcccaccctcccaaaagctgccaagtcgagaatggcagagtaatagcgtgttttgactcattgaagggcaggtgtagtagggaaaattgtaaatacctgcatccccctacccacctgaaaacccagctggagattaatggacggaacaacctaatccaacagaagactgctgctgcgatgctcgcccaacaaatgcagttcatgttcccgggcacccccctccaccccgtcccaaccttcccggttgggccggccattggaaccaacacagccatttcgtttgctccctatctagcacctgtgacgcctggcgtgggacttgtgcctaccgaaattttgcccaccacaccggtcatcgttccagggtccccacctgtcacagtcccaggaagtactgccactcaaaaacttctgcggacagataagctcgaagtgtgtcgagagttccagcgcggcaactgtgcccggggcgaaacagactgtcggttcgcacacccagccgatagcaccatgatcgacacatcagacaacacagttaccgtttgtatggactacattaagggacgatgtatgagagagaaatgtaagtattttcatcccccagcacacttgcaggccaaaatcaaggcagcccagcaccaggcgaatcaggctgctgtcgccgcccaggccgccgctgctgccgccactgtcatggcatttcccccaggggctttgcaccccttgcccaagcgccaagccctagagaaaagcaatggaacctcggctgtctttaatccatctgttttacattaccagcaagctttgacatccgcccagttgcaacagcatgccgccttcatacccacaggttcagtgctatgtatgacgccagctacatctatagtgcctatgatgcatagcgctacgtccgccacagtgtcagccgctacgacccctgcaacttcagttccttttgcagccacagccacagcaaaccagattatcctcaaatag

SEQ ID NO: 23856 - DNA, 3909 bp, synthetic construct
  source 1..3909: mol_type = other DNA; note = Synthetic coding sequence
atggccctgcggcccggcgccggcagcggcggcggcggcgccgccggggccggcgcaggttccgccggaggaggaggcttcatgttccctgtggctggcgggatacggccaccacaggctgggctgatgcccatgcagcagcagggatttcctatggtgtctgtcatgcagcctaacatgcagggcattatggggatgaactatagctcacagatgagccaaggcccaatagctatgcaggcaggaatccccatgggcccgatgcctgctgccgggatgccatatcttggtcaggctcctttcttagggatgagacctcctgggccccaatacacaccagatatgcaaaaacagtttgcagaggagcagcagaaacgtttcgagcaacaacaaaaactgcttgaggaggagagaaaaagaaggcagttcgaagaacagaagcagaaactgaggctgctcagctctgtgaaacctaagaccggagagaaatctagagatgatgctctcgaagctatcaagggcaaccttgacggtttcagcagggacgcaaaaatgcacccaactcctgcctcccatccgaagaagcccgggccctcgctggaggagaagtttctcgtgtcctgtgacatctctacctccggccaagagcagattaagctcaacaccagcgaggtcgggcacaaagctctgggaccggggtcatcaaagaagtacccctcattgatggcttctaacggggtggctgtcgacgggtgcgtgtccgggactacaacggctgaagcagagaataccagtgaccagaacttgagcatagaggaatccggggtgggggtctttccaagtcaggatcctgcgcagcctaggatgcccccatggatttataatgagtcactggtgcctgatgcatataaaaagattctggagaccacaatgactcccactggcattgataccgctaaactgtatccaatccttatgtccagtgggttgccccgcgagacccttggacagatttgggctttggcaaatcggacaacccccgggaaattgaccaaagaggagttgtacaccgtattggcaatgatagctgtcacccagaggggcgtgcctgccatgagcccggatgctttaaatcagttcccggcggcgccaattcccaccctgtccggcttttccatgaccctccccacaccagtgagccagcctacagtaatcccatcgggcccagctggcagtatgccactttccctcggacagccggttatgggcattaacttggtgggacctgtaggcggagcggccgcccaggccagtagcggttttattcccacataccctgcgaaccaggtcgtaaaacctgaggaagacgattttcaggatttccaggacgctagcaagagtggatcactcgacgacagttttagtgactttcaagagctccctgcctcaagcaagacctccaactcacagcacggaaacagtgcccctagcctgctgatgccacttcccggcactaaggcactgccgtcaatggacaagtatgctgtcttcaaagggatagccgctgacaagagtagtgaaaacacggtgcctcccggcgatcctggagacaagtacagcgcattcagagagttggagcagacggctgaaaataagccgttaggggagtcattcgctgaattcaggtccgctggtacagatgatggatttacagacttcaaaactgccgacagcgtctcaccccttgaacctcctaccaaggacaaaacatttcccccaagtttcccctcaggcacaatccagcagaaacagcagacacaggttaagaatccacttaacttggcagatttagatatgttttcaagtgtgaactgctcttccgagaagcccctgagtttttcagccgtgtttagcacaagcaagagtgtttccactccacagagcacagggagtgcggcaacaatgaccgccttagccgctaccaagacgtcttcactcgccgatgacttcggagagttctcattgttcggagagtactctggtctggcccccgtcggagagcaggatgacttcgccgattttatggccttctccaattccagcattagctctgaacagaagcctgatgacaagtatgacgccctgaaggaggaggccagtcccgtgcccctgactagcaacgtaggtagcaccgttaagggagggcagaatagcacggccgccagcaccaagtacgatgtcttcaggcaactgtcattggaggggtccggactgggggtggaggatctcaaagacaataccccatcaggaaaaagcgacgacgacttcgccgactttcatagtagtaaattctccagcatcaattcagataagagcttgggcgagaaggcggtggcgttccgtcataccaaggaggattccgcaagcgttaagtctttggatctaccctccattggagggagtagcgttggaaaagaggacagtgaagacgctctctcggtgcagttcgacatgaaactggccgacgtgggcggagacctcaagcatgtaatgtcagacagctcattggacctccccacagtctctgggcaacaccccccggccgccgacattgaggatttgaagtatgcggcatttggttcctactctagtaacttcgccgtgtccacacttacgagttatgactggtccgatagggatgacgccacccagggcaggaaactctcgccgtttgtgttaagcgctggcagtggctcacccagtgcaacctctattttacagaaaaaagaaacatcgtttggctctagtgaaaacattacaatgacctcgctcagcaaggtgacaaccttcgtctcagaagatgccttgcctgaaaccactttccccgctttagcttcattcaaggacacaataccgcagaccagcgaacagaaggagtacgagaatcgggattacaaagacttcaccaaacaggatctccccaccgccgaacggtctcaagaggccacctgtccttctccggcctcatccggagcttcgcaggaaacacctaacgagtgtagtgacgactttggagagttccagtctgagaagccgaagatctccaagttcgacttcttggtggctacaagtcagagcaaaatgaaaagctctgaggaaatgattaagtccgagttagccacttttgatctctctgtgcaaggctcccacaagagatcgttgtcactcggagataaggaaatttctagatcgtccccatcacccgcgctggaacagccttttagagatagaagcaatactttgaacgaaaaacctgcgttacccgtaatccgcgacaagtataaggacctgaccggagaggtagaggaaaacgaacggtacgcctacgagtggcaacggtgcctgggctcagccctgaatgtcattaagaaagctaacgacaccctcaatgggattagtagcagctctgtgtgcaccgaggtcatacaaagcgcccaaggaatggagtatctcttgggggtggttgaagtctaccgggtaacgaagagagtggaacttggcattaaagccaccgccgtgtgctcagagaagttacagcagctgctgaaggacatagacaaagtatggaataacctcatcggttttatgagtctcgccacccttactcccgatgaaaacagcttagacttcagcagctgcatgctccggcctggaattaaaaatgcacaggagcttgcttgcggcgtgtgtctacttaatgtcgactctagatcgagagcttttaattctgagacggacagcttcaagctggcatacggtggccaccagtatcacgctagttgtgcgaacttttggattaattgtgttgaacctaaaccacctggtctagtgctcccagatctgttatag

SEQ ID NO: 23857 - DNA, 1011 bp, synthetic construct
  source 1..1011: mol_type = other DNA; note = Synthetic coding sequence
atggagagcgtgctgagcaagtacgaggaccagatcaccatcttcactgattacctcgaggagtatcccgatacagacgagctcgtgtggatcctaggtaaacagcacttgctgaagacagaaaaatctaagctgctgagtgatatctccgccagactctggtttacataccgtcggaagttctcccccattggggggactggtccttcctccgatgcagggtggggctgtatgcttcggtgcggtcagatgatgctagcacaggctctcatctgccgacacctggggagagattggtcctgggagaaacagaaagaacagccaaaggagtatcagcgaattttgcagtgtttcttggatagaaaggactgctgttacagtattcaccaaatggcccagatgggggtcggggaaggtaagtcaattggagaatggttcgggcctaatacagtggcccaggtgctgaaaaaattggctctctttgatgaatggaatagtctggctgtctacgtttcaatggacaacacagtcgtgattgaagacatcaaaaaaatgtgcagggttcttcctttatctgctgataccgctggggatcgtcctccagactcccttaccgccagcaatcagtcagacgagctgatcttcctcgacccacacacaacacagacatttgtcgatacagaggagaacggtactgtcaatgaccagaccttccattgtttacagtcgccacagcggatgaatatcttaaacttagatccctcggtagcattaggctttttctgtaaggaagagaaagacttcgataactggtgctccctcgtgcagaaggagatcctgaaagaaaatctgcggatgtttgagctagttcagaagcatccaagccactggccccccttcgtcccacccgccaagccggaagttactaccacaggcgctgagttcattgactccactgagcagctcgaagaatttgatctcgaagaggattttgagatcctgtcagtctag

SEQ ID NO: 23858 - DNA, 3018 bp, synthetic construct
  source 1..3018: mol_type = other DNA; note = Synthetic coding sequence
atgctgcggaccgccggccgggacggcctgtgccggctgagcacctacctggaagagctagaggcagttgagctgaagaaatttaagctttatttgggaacagcaaccgagctgggcgaaggcaaaatcccctggggttccatggagaaggccggaccactggaaatggcacagttattaataacacattttggcccagaagaagcatggcgtttagcactgtccacattcgagcggatcaatagaaaagatctgtgggaaagagggcagagggaagacctggtgagagacactccacctgggggaccaagctctctcgggaaccagtcaacgtgcttgctggaggtgagtttggtgaccccacgaaaggacccacaggaaacatatcgggactatgtgcgaaggaaattcagattaatggaggatcggaacgctcgcctgggcgagtgcgtcaatcttagtcaccggtatacaagactccttcttgtgaaagaacactccaatcccatgcaggtgcaacagcagctcttggatacaggacgcggtcacgctagaactgttggccaccaggctagccccatcaaaatcgagacgctgttcgagcccgacgaagagcgaccagagccaccacgcacggtggttatgcaaggggcggctggcattggtaagtcaatgctagcgcataaagtgatgctcgactgggctgatgggaagctgttccaaggtcgctttgattatctgttctatatcaactgcagagaaatgaatcagtccgctacggaatgtagcatgcaagacctgattttcagttgttggcctgagcccagcgcacctctgcaggagctgattcgcgttcccgaacgccttctgttcattatcgacgggttcgacgagctcaaaccctcatttcacgatcctcagggcccatggtgtctttgctgggaggagaagcgtccgaccgaactcctgctcaatagtctaatccgcaagaaacttctccccgagctgagcctcctcatcacaacgaggccgaccgctttagagaaactacacaggctgctcgagcatccccggcacgtcgagatcctcggatttagcgaggccgaacggaaggagtacttctataaatactttcacaatgccgaacaggctggacaagtcttcaactacgtgagagacaacgagccactgttcacgatgtgttttgtgccgttggtgtgctgggtggtctgtacctgccttcaacagcagttggaggggggcggactcctgcgacaaacttcgcgtacaacaaccgcggtttatatgctctacctgctatcattaatgcaacctaagccgggtgctccgagacttcagcctccaccgaaccagcgcggactctgttcacttgcagctgatgggctgtggaatcaaaagatcttattcgaagagcaggacctgaggaagcatggcctcgacggagaggatgtctccgcttttcttaacatgaacatttttcaaaaggatattaattgcgaaaggtactacagtttcatccatttgtctttccaagagttcttcgccgctatgtactacatccttgacgagggcgagggaggggccggccctgatcaagacgtgaccaggctactgaccgaatacgcattttccgaaagatcattcctcgccctgacgtcacgctttctgttcgggctgctaaacgaggaaacccgcagtcacctggaaaaatccctatgctggaaggtgagcccccatatcaaaatggatctgctgcaatggattcagagtaaagcacaatccgatggttcgaccctgcagcagggctcactggaatttttctcctgtctttacgagatccaagaggaggagttcatccagcaggctctgagtcacttccaagtaatagttgtaagcaacatcgcctccaagatggaacatatggtttccagtttttgcctcaaaaggtgtcgttccgcgcaggttctacatctctacggggccacctactcagctgacggagaagacagagcccggtgtagcgcgggcgctcacactctactggtgcagctgcgtccagagcgtaccgtgttgctcgatgcatactctgagcatctcgccgcggctttatgcaccaatccgaatcttatcgagctctcactgtacaggaatgcgcttggatcccgcggtgtgaaacttctttgtcagggcctgaggcaccccaactgtaaacttcagaatttacgcctcaaacggtgtcggatatccagctccgcttgtgaagatctgagcgccgccctgattgccaataagaacttgactcgcatggatctgagcggaaatggtgtgggctttccgggaatgatgcttctgtgcgaggggctccggcacccacaatgtcggctgcagatgatacagcttaggaagtgtcagctagagagtggagcctgccaggagatggcctccgtccttgggaccaatccccacctcgtggagctcgatttgactggaaatgcactggaagatcttggtctcagactgctgtgtcaaggtctccggcacccggtctgtcgactgcgcacattgtggctcaagatctgccgactgactgccgccgcctgcgatgagctggcgtctaccctttctgttaaccagagtctgagagagttagacttaagtttgaacgagttgggcgacctgggggtgctgctgctttgtgaaggcttgaggcatcctacatgcaagcttcaaacccttagactgggaatctgtagactggggtcagcagcctgtgagggactgtcagtagtgctccaggccaaccacaatttaagggaactggacttatccttcaacgatctcggtgattggggcttgtggctcctcgctgaaggcctccaacatccagcctgtcgccttcagaagctgtggctgtttggcatggacctgaataagatgacacatagtcgcctggccgctctccgcgtgaccaagccatatctcgatattgggtgttag

SEQ ID NO: 23859 - DNA, 618 bp, synthetic construct
  source 1..618: mol_type = other DNA; note = Synthetic coding sequence
atggtgagcagctgctgcggcagcgtgtgcagcgaccagggctgcggacttgaaacctgctgtcggccatcgtgttgtcaaaccacatgttgccgcacgacatgctgtcggccctcatgctgcgtctcgtcatgttgccgtccccaatgctgccaaagtgtctgttgccagccgacgtgttgccggccctcttgttgcccatcttgctgtcagaccacctgctgccgaaccacttgctgcagaccctcatgttgcgtgtcatcttgttgcaggccacaatgctgccagagtgtgtgttgccagccaacttgttgtaggccatcgtgctcaatctcttcttgttgtaggccttcctgttgtgtttcgcgctgttgccgttcgcagtgttgtcagagcgtctgttgtcagcccacatgctgcagacctagctgttgtataagttcatgctgtagacccagctgttgcgaatcctcttgctgcaggccctgctgctgtcgaccctgttgttgtctgcggccagtctgcggtcgcgtgagctgtcataccacttgttatcgccctacctgcgtgattagcacatgccctcggccactttgctgcgcttcttcttgctgttag

SEQ ID NO: 23860 - DNA, 573 bp, synthetic construct
  source 1..573: mol_type = other DNA; note = Synthetic coding sequence
atgcagagctgcgagagcagcggcgacagcgccgacgaccccctgtccaggggactccgtcggcggggacagccaagggtggtggtcattggcgccgggctagccgggctggctgctgccaaagctctgctggagcagggatttactgacgtcaccgtgctggaggcaagttcacacataggaggcagggtccaaagcgtaaagctgggccacgccacctttgagctgggggcaacgtggatccatggcagtcacggcaaccccatctaccatcttgctgaggctaatggactgctggaagaaacaacagacggagagcggtccgtgggccggatatctctctactccaagaatggcgttgcatgttatctcacaaaccacggaaggcggattccaaaggatgttgtggaagagttctctgacctttacaatgaacctatgcaggtgctcttctccggcgaggcgactcacagaaaatactactccactactcatggggcactactatcgggacagcgagaagctgctcggttgatcgagatgtatcgagacctttttcagcagggaacctag

SEQ ID NO: 23861 - DNA, 3945 bp, synthetic construct
  source 1..3945: mol_type = other DNA; note = Synthetic coding sequence
atggccctgcggcccggcgccggcagcggcggcggcggcgccgccggggccggtgccggttctgccgggggggggggtttcatgttccccgtggcgggagggattcgccccccccaagccggccttatgcccatgcagcagcaggggtttccgatggttagcgtgatgcagcctaacatgcagggaattatggggatgaactacagcagccagatgtctcagggacctatcgctatgcaggccgggattccaatgggccctatgccagccgccggtatgccatatctggggcaagcccccttcctggggatgcggccacccggacctcagtacacacctgacatgcaaaagcagtttgccgaggaacagcagaaacggtttgagcagcagcaaaagctactcgaagaagagcgcaagcgtagacagtttgaggagcagaagcagaagctgcggcttttgtcaagtgtaaagccgaaaactggggaaaaatcccgggatgatgctctagaggctatcaaaggcaatcttgatggtttctccagagacgctaagatgcatccaactccagcatcccatcccaaaaagccaggtccctctctggaggaaaaattcctggtgagctgtgacattagcacgagtggtcaggagcagattaaactgaatacttctgaggtaggtcacaaagccctcggaccaggttcatcgaaaaaatatccgagcctaatggctagtaacggagtcgccgtggatggttgcgtgagtggaaccactactgccgaggcagaaaatacttctgaccagaacctgtccatagaggagagtggcgttggagtgttccctagccaggatccagctcagcccagaatgccaccttggatatacaacgagtccctggttccagacgcctacaaaaaaattctggagaccactatgacccccaccgggatagacacagctaagttgtatccaattttaatgtcttctggactcccacgggagaccttgggtcagatctgggcccttgctaataggaccacaccaggtaagctgaccaaggaagagctttacacagtgctggccatgatcgccgttacccaacgcggcgtgccagcgatgtctcccgatgccttgaatcaattccccgctgcacctatacctactctgtccggtttctcaatgacactacctacccctgtgtcccaaccaaccgttatccccagcgggcccgccggcagcatgccactctcgttgggccagccagtcatgggaatcaacttggtaggcccggtgggaggcgcagccgcccaggcttcctccgggtttatcccaacgtatcccgccaatcaagttgtcaaacccgaagaggacgatttccaggattttcaagacgcctctaagtccgggtcattagacgatagtttttctgattttcaagaacttcccgctagcagcaagacgtccaactctcaacatggtaactctgccccctcccttttgatgccactccccgggaccaaagccctcccttccatggataagtacgccgtgttcaaaggcatcgctgctgataagagttccgaaaacactgtcccaccaggcgaccctggggataagtacagcgcattccgagagctggagcagaccgcagaaaacaaacctctcggggagagttttgcagagttccgatctgccggaacagatgatgggttcacagattttaaaaccgctgatagcgtgtcccctctagaaccacccaccaaagataaaaccttccctccatctttccctagcggcacgattcagcagaaacaacagacacaggtcaaaaatccactgaatctcgccgatttagatatgttctcttctgtaaactgttcatcagaaaagccgttatctttctccgccgtgttcagtacatctaagtccgtgtctactccccaatccactggcagtgccgccaccatgacagctctggccgctaccaaaacgagttcactggcagatgattttggagaattcagccttttcggcgaatacagcgggctggcaccggtaggagagcaagacgacttcgctgacttcatggccttcagcaattcttccatcagctccgagcagaagcctgacgacaagtatgatgcccttaaagaagaggcatctccagtgcccctgacatcgaacgttggaagcacggtaaaaggcggccaaaacagtacagccgcgtctaccaaatacgatgtgtttcgccagctgtcactggagggcagtggcttgggggttgaggacctcaaagataatactccctctggtaagagcgacgatgatttcgctgattttcactctagcaagttctcaagtattaacagcgacaaatcattaggagaaaaggccgtcgctttcagacacactaaagaagattcggcgtccgtgaagagcctggatttaccatcaattgggggaagctctgtgggcaaagaagatagcgaggatgctctgtctgtgcaattcgacatgaaactcgccgacgttggaggcgacttaaaacatgtgatgtccgacagcagcctggacctgccaaccgtgtccggccaacaccctccggccgcagatatagaggatctcaaatacgctgccttcggatcatacagctcaaacttcgccgttagcacactcacaagctacgactggtccgatagagacgatgccacgcaggggagaaagttaagcccctttgttctctctgccggatccggttcccctagtgctaccagcattttgcagaaaaaggagacgtcttttggcagcagcgaaaatattacgatgacctcgctctctaaggtgacaacttttgtctctgaggacgccctgcctgagactacctttcccgcgttggcctcattcaaggatactataccccagacctctgagcaaaaagagtacgagaaccgcgattacaaggactttacaaagcaggatctgcccaccgccgaacgcagccaggaggcgacatgccccagcccagcttcctcgggcgcgagccaggaaacccccaatgaatgttccgacgacttcggagagttccagagcgaaaaaccaaagatctcgaaattcgactttctcgtggctacctctcagtcaaagatgaagagcagcgaggaaatgatcaagtcagagcttgcgacatttgacctgtctgtccaaggcagtcacaagagatctttatcactcggggataaggaaatctctcgatccagtccttcccccgcactcgaacaacctttccgcgaccggagtaacacattaaacgaaaagccggccttacccgtgattagagacaagtataaggacctgacaggggaagtggaggagaatgagcgatacgcatacgaatggcaacgctgtctgggatcagcactgaatgtcattaaaaaggccaatgatactcttaatggaatctcatcatcttctgtgtgcacagaggtgatacagtccgcacagggtatggagtacctcctgggagtcgttgaggtgtatcgcgtaacgaagcgagtggaactaggtattaaagccaccgcagtctgtagcgaaaagctgcaacagctgctaaaggacatagataaggtttggaacaatctgatcggctttatgtctctcgcaactctgaccccggacgagaactccctcgacttttcttcttgtatgctgcgccccggaattaagaacgcgcaggaactggcctgcggcgtctgtttgctaaatgtagactcacgtagcagaaaggaggagaagcccgcagaggagcatccgaaaaaagcattcaatagcgaaacagactcttttaaactcgcatatgggggacaccagtatcatgcaagctgcgcgaatttctggatcaattgcgtggagcccaagcctcctggactggttttgccagatttattgtag

SEQ ID NO: 23862 - DNA, 531 bp, synthetic construct
  source 1..531: mol_type = other DNA; note = Synthetic coding sequence
atgagcgacgacgacagccgggccagcaccagcagcagcagcagcagcagttctaaccagcaaacggagaaagagaccaacacccctaagaagaaggagtcaaaggtttcaatgtctaagaattcaaagcttctctcaaccagcgccaaatccgccggtccaaaaggtgataatatatatgagtggaggtcgacaatattgggccctccaggctctgtatatgagggaggggtattttttctggatatcaccttcaccccagaatacccctttaaaccaccaaaggtaacttttcggacacgcatctatcattgtaacatcaactcacagggcgtaatatgtttagatatactcaaggataattggtccccagcactgacgattagtaaggttttgctgagtatctgttcccttctgaccgattgcaatcctgctgatccgctcgtcggatcaatagcaacccaatacatgacaaatcgcgcagagcatgaccgcatggcacgtcagtggaccaaacgatacgcaacatag

SEQ ID NO: 23863 - DNA, 7029 bp, synthetic construct
  source 1..7029: mol_type = other DNA; note = Synthetic coding sequence
atggacggcgtgagcagcgaggccaacgaggagaacgacaacatcgagcggcccgttcggagacgccattcgtcgatcctgaaacccccgaggtccccattgcaagatctgagaggagggaacgagcgggttcaagaatccaatgccctcagaaacaaaaagaactcccggcgcgtctctttcgctgacacaattaaagtcttccagactgaatcgcatatgaaaattgttcgtaaatccgaaatggaaggctgctcggctatggtgccgagccagctgcaactcttgccccccggattcaagagattctcatgtctcagccttcccgaaaccgagaccggcgaaaatctactgcttatccagaacaaaaagctggaggacaactattgcgaaataaccggtatgaatacactcttatccgcacctatccacacgcagatgcaacagaaggagtttagtatcatagagcacacaagggagagaaagcacgctaacgatcagactgttatcttctctgacgagaaccagatggatttgacctcttctcataccgtgatgatcacgaaaggactgttagacaacccgatttctgaaaagagtactaagattgacaccacatctttcctcgccaacctgaaattacacaccgaagatagtaggatgaagaaggaggtgaattttagtgtggaccaaaacacttcctctgaaaacaaaattgacttcaacgattttattaagagactcaagacaggtaaatgttcggcatttcccgacgtgccagataaagagaactttgagataccgatctacagtaaagagcccaactccgcctcctccacacatcagatgcatgtgagtctgaaggaggatgaaaataactccaacatcactcgcttgttccgcgagaaggacgacggcatgaactttacgcaatgccataccgctaacatccagacactgattccgacaagctccgagactaattcacgcgagagcaaaggaaatgatataacgatctatgggaacgacttcatggatctgacattcaatcataccctccaaattttgccagctactggtaactttagcgaaatagagaatcagactcaaaatgcaatggacgtaacaaccggatatggaacgaaggctagcgggaataagaccgtgttcaagtcaaagcagaatactgcttttcaggatctgagcatcaactcggccgataaaattcacatcaccaggtcccacataatgggggctgagacgcatatcgtgagccagacctgcaaccaggacgctcggatcctagccatgacacccgagtccatctacagcaatcctagtatccaaggctgtaaaactgtgttctactcatcgtgcaatgatgctatggaaatgaccaaatgtctcagcaatatgcgtgaggaaaagaacctcctgaagcacgattctaattacgccaaaatgtactgtaaccctgacgcaatgtcctccctgacagagaaaaccatatacagcggtgaggagaacatggacattaccaagagccacacagtggcgattgacaatcaaattttcaagcaagatcagagcaacgtgcaaattgcagccgcaccaacacccgagaaggaaatgatgctccagaacctgatgacgaccagcgaggatggcaagatgaacgtgaactgtaacagcgtcccccacgtgtccaaagaacggattcagcaaagcctgtccaaccccctgtctatttccctcacagaccggaagaccgaattgctgtccggggagaacatggatctgaccgaatcacacaccagcaatttggggtcccaggtaccactggctgcctataacctggcgcccgagagcacgagtgagagccactcccagtccaaaagttcctcggacgagtgtgaggagatcacaaagtcccgcaacgagccttttcagcgatcggatattattgccaaaaattccttgacagacacatggaacaaggataaggactgggttctcaagattctgccctatttagacaaggacagcccccagtcagccgattgcaatcaggagatcgccaccagtcacaatatcgtatattgtgggggagtactggataaacagatcactaaccgaaatacagtcagctgggagcagagtctgttctccaccacaaaacctctgttcagtagtgggcaatttagcatgaagaaccatgatacggcaatttcatcccacacggtgaaatctgtgctagggcagaacagtaagctagccgaacctctgagaaaaagcctttcaaatcccacaccggactattgccacgataagatgattatttgcagtgaagaagagcaaaacatggatctgactaaaagtcacacggtcgtgatcgggtttggaccatccgagctgcaggaattaggaaaaactaaccttgaacacactaccgggcagttgactactatgaacaggcagattgcagttaaggttgaaaaatgcggtaaatcaccgatagagaagtctggcgttttgaagtcaaactgtatcatggatgtcctggaggatgaaagcgtccagaagccgaaattccctaaagaaaaacagaatgttaagatatgggggagaaagagtgtgggaggtcccaagatcgataagaccatcgtgtttagcgaagatgacaagaacgacatggacataactaagagctacaccatcgagattaatcacagacccctcttggagaagcgcgattgccacctggtgccgcttgccggtacttcagaaaccattctctatacttgtcgccaggacgacatggagataactagaagccacaccacagctcttgagtgtaaaaccgtgtctccagacgaaattacgacaaggcctatggacaagacagtggtattcgttgataaccacgttgagctggaaatgacagagtcgcatactgttttcatcgactatcaagaaaaagaacggacagaccgcccaaacttcgagctgtcccagcgtaagtccctgggaactcccacagtcatttgtactcccactgaggagtccgtgttctttccagggaacggcgagtcagatagacttgtggctaacgacagccagctgactccactcgaagagtggagcaataataggggtccggtggaggtggccgacaatatggagctgtccaagtctgctacatgtaaaaatatcaaggatgtgcagtcaccggggttcttgaacgaacccttgtcatctaaaagccaacggagaaaatcgttgaaactgaagaatgacaaaaccattgtgttcagtgaaaaccacaagaacgacatggatattactcagtcatgcatggttgagatagacaacgaaagtgctctggaagacaaggaggattttcatctcgctggcgcatcgaagaccatcctctattcttgtgggcaggatgacatggaaatcactcggtcccacactacagctctagaatgcaagactttactaccgaacgaaattgccataaggcccatggacaagacagtgctgtttactgacaattacagcgatctggaagtgaccgacagccacactgtattcatcgattgccaggcgactgagaagatactggaggagaaccccaagttcggcataggcaaaggcaagaacctgggtgtgagcttccccaaggacaactcttgcgtccaagagattgccgagaagcaagctttggctgttggcaacaaaattgtgctgcacactgagcagaaacagcagctctttgccgccacgaatagaacaaccaacgaaatcatcaagtttcatagcgccgctatggacgagaaggtgatcggcaaggtggttgaccaggcgtgcaccttagagaaagcccaggtggaatcctgccagctgaacaatagggatcgacgaaatgttgacttcacttcttctcacgcgactgctgtttgcggttcatcggataactactcatgcctgccaaacgttataagttgcacggataacttggaggggtccgccatgctcctgtgcgacaaagacgaggagaaggctaattattgtcctgttcaaaatgacttagcctacgcaaatgatttcgcttcggagtattatctggaatctgaggggcaacccctctccgcaccctgccctttgctcgaaaaagaggaggtgattcagactagcaccaaagggcaacttgactgcgttattactctgcataaagaccaggatctcatcaaagatccacggaacctgctggccaaccaaactctggtgtattcgcaagacttgggcgagatgaccaaattgaattccaaacgcgtgtccttcaaattgcccaaggaccagatgaaagtgtatgtggacgacatatatgtcatccctcaaccccatttcagcaccgaccagcccccgttgcctaagaaagggcagtcgagcattaacaaggaggaagtgatcttatcaaaggcagggaacaagagtttgaatatcatcgaaaattcatctgctcccatctgtgagaataagcccaaaattcttaatagtgaggaatggttcgccgccgcctgcaaaaaagaattaaaagaaaacatacagaccacgaattataacactgccctggattttcattcgaattccgacgtaactaaacaagttatccagacccatgtgaacgctggggaggcgcccgatccagtcattaccagtaacgtcccatgttttcattcgataaaaccgaatcttaataacctgaatggtaagactggagaattcctagcctttcagaccgtgcacctgcctcctttgccggaacagctgctcgagctgggcaataaagcacataacgacatgcacatagtccaggccactgagattcataacatcaatattatctcttccaacgccaaagactcgcgggacgaagagaataaaaaaagccacaacggagcagagaccacctctctgccccccaagaccgtgtttaaggacaaggtccgtaggtgctctttaggcatcttcctccctcgactgcctaataaaaggaactgtagtgtgacgggcatcgacgacctggagcagatccctgctgatacaactgatatcaatcacctggagacgcagcctgtctcctcaaaggatagtgggataggcagcgtagcaggcaagctcaacctgtctccttctcaatacataaacgaagaaaacctgcccgtctaccccgacgaaatcaactcctctgactctattaatatcgagaccgaggagaaggccctcatcgaaacctaccagaaagagattagcccttacgaaaacaaaatgggcaaaacatgcaacagccagaaacggacctgggtgcaggaagaagaggatatacataaggaaaagaagatcagaaagaatgaaataaagttttctgacaccactcaagaccgtgaaatcttcgaccaccatacagaggaggatattgacaaatccgccaatagcgtccttatcaagaacttgtctaggacaccttcctcctgtagctctagcctggacagtataaaagcggacgggacctcactggacttttcaacctacaggtcctcccaaatggaaagtcagttcttgagagacacaatctgcgaggagagtcttcgcgaaaaactgcaagatggacggattactatccgcgagttttttattctgctgcaggtccacatcctgattcaaaagcccaggcagtccaacttaccggggaactttacggttaatacaccaccaactcccgaggatctgatgctgtcccagtacgtatatagacccaaaattcagatataccgggaagactgcgaagccagacgtcagaagatcgaggaattgaagctgtccgcatctaaccaggataagctcctggtagatatcaataaaaacctgtgggagaaaatgcggcactgtagtgacaaagagctgaaagctttcggcatctacctaaataaaatcaagagttgctttacgaagatgaccaaggtcttcacgcaccagggaaaagtggccctgtacggcaaactggtacagtccgcccagaacgagagagagaagctacaaatcaagattgatgaaatggacaaaattctgaaaaagatagacaattgtctaacagagatggagaccgagaccaagaacctcgaagacgaggaaaagaataatccagtggaggaatgggatagcgaaatgcgcgccgcagagaaagaactggagcagctgaagactgaggaagaagagcttcagaggaacctgctggagctagaagttcaaaaggagcaaactctggcacagatcgactttatgcagaagcagcgaaatcgaacggaagaattgctagatcagctgtctctgagcgagtgggatgttgtggaatggtcggacgatcaggctgtgtttactttcgtgtacgacactatccagcttactattacgttcgaggagagcgtggttgggtttccatttcttgacaaacgataccgcaaaattgtcgacgttaactttcagagccttctggacgaggaccaggcccctccctcttccctgctcgtgcataaactgatcttccagtatgttgaagaaaaggagtcatggaaaaagacctgcaccactcaacaccagttacccaaaatgctggaggagtttagcttggtcgtacaccattgcagacttcttggcgaggagatcgaatacttgaaaaggtggggccctaactacaacctcatgaacatcgatatcaataacaacgagcttcgcctcctgttctcaagcagtgccgccttcgctaagttcgagattacactcttcctgagcgcgtattatcccagcgtgcccttaccatctacaatccagaaccacgtgggcaacactagccaggatgatatcgccaccattctctccaaagtacctctggaaaataactatttaaagaatgtcgttaaacagatttaccaggatctgtttcaagattgccatttttaccactag

SEQ ID NO: 23864 - DNA, 1638 bp, synthetic construct
  source 1..1638: mol_type = other DNA; note = Synthetic coding sequence
atgagcagctgcgtgagcagccagcccagcagcaaccgggccgccccccaagatgaactcgggggtaggggcagttcatccagtgaaagccaaaagccctgtgaggctctcagagggctgtctagccttagcattcatcttggaatggaatccttcatcgttgtgaccgaatgcgagccgggatgtgcggtcgatctcggcttagctcgagatcggcccctggaggccgacggtcaagaggtgccccttgatacctccggatcgcaagcccgccctcacctgagcggacgcaagctgtccttacaggagaggtcgcaaggcggccttgcggccggggggtccctggatatgaacggacgctgcatctgcccttcactgccctattcacctgtgtcatcaccccagtctagtcctcgcctcccgcgtcggcctacggtggagtcacatcatgtcagcattaccgggatgcaagactgcgtgcagctaaatcagtatacattaaaagacgaaataggcaaaggcagctatggagtcgtgaaacttgcctataacgagaacgataacacctactatgcaatgaaggtcctctctaagaagaaactaatacgacaggccggattccccagaagacctcctcctcggggaactcggcccgcgcctgggggctgtatacaaccccgcggccctattgaacaggtgtatcaggagattgctatcctgaagaaattagatcatccaaatgtggtgaagttagtcgaggtcctcgatgaccctaatgaagaccatttgtatatggtttttgagctcgtgaatcaggggccagtgatggaggtccccactctcaagcccctaagtgaagaccaagcccgattttactttcaggacctgattaaggggatcgagtacctgcattaccagaagatcatacaccgagatattaaaccatccaacctcttggtaggggaggatgggcatatcaagattgctgatttcggcgtctctaacgagttcaaaggatcagatgctctactctccaacaccgtcgggacgcccgccttcatggctcctgagtctcttagcgagaccagaaagatcttctcaggaaaggccctcgatgtatgggccatgggggtcactttgtactgtttcgtgttcggacagtgtccctttatggatgaacggatcatgtgcttacattcaaagataaagtcccaggcgcttgaatttcctgaccagcccgacatcgcagaggatctcaaagatctgattactaggatgctggataaaaaccccgaatccagaatcgtagttcccgaaatcaagattctcgtaaaaacaatgatccgcaaacgctcctttggtaatccattcgaaggatccaggcgcgaagagcggtctctgtccgctcctggaaatttactgaccaagaaaccaaccagagaatgtgaaagtctctcagagctgaaggaagcccgtcagcgccggcagccgcctggtcatcggcccgcgcctcggggaggtggagggagtgctctggtgcgtggcagcccttgtgtggagagctgctgggcacccgcccccggaagcccagccagaatgcaccccctaagacccgaagaggctatggagcctgagtag

SEQ ID NO: 23865 - DNA, 333 bp, synthetic construct
  source 1..333: mol_type = other DNA; note = Synthetic coding sequence
atgcccaagcggagctgccccttcgccgacgtggcccccctgcagcttaaagtgcgcgtgtcacagcgggaactctctaggggggtgtgcgcagagagatactctcaggaagtttttgacccatctggcgttgcatccatcgcctgttcctcatgtgtcagagcagttgacggtaaggctgtctgtgggcaatgtgaaagagcactctgtgggcaatgcgtgcggacctgctggggctgcggatcagttgcctgtaccctgtgcggcctagtggactgcagtgatatgtacgaaaaagttctgtgcacatcatgcgcaatgttcgagacctag

SEQ ID NO: 23866 - DNA, 2253 bp, synthetic construct
  source 1..2253: mol_type = other DNA; note = Synthetic coding sequence
atggaggacctgttcgagaccttccaggacgagatgggcttcagcaacatggaggacgatgggcccgaggaagaagagagagtggcagagcctcaagcaaacttcaacaccccacaagccctgagattcgaagaactgttggctaacctgctgaacgagcaacaccaaattgctaaggaactgtttgaacaactaaaaatgaagaagccttcagcaaagcagcaaaaggaagtggagaaggtaaagccacagtgtaaggaagtgcatcagacccttatactcgaccctgcgcagagaaagcggttgcagcaacagatgcagcaacacgtgcagcttctaacacaaattcacctccttgccacctgcaacccaaacctcaaccccgaggcgagcagcacgcgcatttgtctcaaagaactgggaacctttgcccagagctctatcgcattgcaccaccagtataaccctaagtttcagactttatttcagccttgcaacctcatgggggcaatgcagttgatcgaggattttagcacgcatgttagcatcgattgtagcccccataaaactgttaagaaaacggccaatgagtttccttgtcttccgaagcaagtggcatggatcctcgctacctcaaaggtattcatgtaccctgagctactgccagtatgttcactgaaggccaagaatccccaagacaagatactctttactaaagccgaagataatctattagctctcgggctgaagcatttcgaaggcaccgaatttctgaatcccctgatcagcaaatacctcctgacctgtaaaacagcgagacagctgaccgtgcggataaaaaacctgaatatgaacagagcgcctgacaatattattaagttttacaaaaaaaccaagcagctcccagtgttgggcaagtgctgcgaagaaatccagccccatcagtggaaacctcctattgagagagaggagcaccgtttgcctttctggctgaaggcttctttaccatcaatccaggaggagctgagacatatggctgacggcgcaagggaagtgggaaacatgaccggcacaactgaaatcaatagtgatcagggcctggagaaggacaactcagaactgggttcagaaacacgttacccactgctcctgcccaaaggagtcgtgctgaaattgaagccagtggccgatcgctttcctaagaaggcctggcgccaaaaacggtcgagcgttctcaagcctctcctgatacaaccttcacccagcctccagcccagctttaaccccggtaaaacccctgctcagtctacccactccgaagcacccccaagcaagatggtgctccggataccacacccaatacaacctgcaaccgttttgcagacggtcccaggcgtccccccccttggcgtgtctggaggcgagagctttgagtccccagccgcgttgccagcgatgccacctgaggcaaggacatctttccctctcagtgaatcccagaccctgttgtccagtgcgcctgtccccaaggtcatgatgccgtctccggctagctcaatgttccggaaaccctacgtccgccgtagaccttccaaaagaaggggggccagggcctttaggtgcatcaagcccgccccagtcattcaccctgccagcgttatctttaccgtacccgctactactgtcaagattgtgtcccttggtggcggttgtaatatgatccagccagtgaatgccgccgtggcacagagtccccagacgattcctatcgctaccttgctcgtgaatcctacgagctttccttgccctctgaaccagcccttggtcgcatcctctgtgagccccctgatagtctccggaaattccgtgaatctgcctatcccaagcaccccagaggacaaggcgcatatgaacgtggacattgcctgtgctgtagccgacggcgagaatgccttccaggggcttgagcctaagctggagcctcaggagctgtcccccctgagtgctacagtttttcctaaggttgaacattcacctggacctccccccgttgacaagcagtgccaggagggactctccgagaactccgcctatcgttggacggtggtgaaaacagaggaaggacgacaagctctggagcccctccctcaaggaattcaggaatcactgaataatagtagccccggggacctagaagaggtcgtaaagatggaacctgaagacgcaacagaggagatctccggatttttgtag

SEQ ID NO: 23867 - DNA, 2604 bp, synthetic construct
  source 1..2604: mol_type = other DNA; note = Synthetic coding sequence
atgcaggccgaggccgccgactggttcagcagcatgcccttccagaagcacgtgtattatcctctggctagcggtccagaaggcccagatgtcgcagttgcagccgcagcagcgggggcagccagtatggcctgcgccccacccagcgctgcctcggggcccctgcctttctttcagttcaggcctagactggagtcagtcgactggagaagactgtctgctattgatgtggacaaggttgctggggcggtagacgtgctcactctacaagagaatatcatgaatatcacattctgcaaactcgaagacgagaagtgcccccattgccagtccggcgtggatcccgtgctactgaaacttatcaggcttgcgcagtttacgatagagtacctgctgcacagccaggagttcctgacctctcagctgcacactctggaggagaggctgagactttctcactgtgatggggaacagtccaagaagctgttgactaagcaggcaggggaaattaaaacactcaaagaagaatgtaaacgccgaaaaaaaatgatctctacacagcagcttatgatcgaagctaaagcaaattactaccaatgccatttctgcgataaagcgtttatgaaccaggccttcttgcaatcacacattcagcgcaggcacaccgaagaaaactctcacttcgagtaccagaaaaatgcccagattgagaagctcaggtcagaaatcgtagtgctgaaggaagaactccaactgaccaggtcagaactggaagccgctcatcatgctagtgccgtacgattttctaaggaatatgagatgcagaagaccaaagaggaagatttcctaaaactgtttgacagatggaaggaggaagaaaaagagaaactcgtcgacgagatggaaaaggtcaaggagatgttcatgaaggaatttaaggagctcacatcaaagaatagtgcccttgaataccaactgtcggagatccagaaaagcaatatgcagatcaagtctaatatcggtactctcaaggacgctcacgaatttaaggaggatcgtagtccgtatccgcaggatttccataatgtgatgcaacttcttgactcccaggaatccaaatggaccgcaagagtgcaggctatccaccaggagcacaagaaggaaaaaggcaggctgctgagtcatatagagaagctccggacctccatgattgatgacctcaatgcctctaatgtcttttacaagaaaagaattgaggaactgggccagaggctgcaagaacagaacgaactcataataactcagagacaacagatcaaggattttacctgcaaccctctcaattccatcagcgaacctaaaggaaacccgctggcatggcaggcatttgagtcccagccagccgcacctgctgtacccatgaatgccccagctctccacactctagaaacaaagtcttctctgccgatggtacatgagcaagctttcagctcacacattcttgaaccaatagaagagctctcagaagaggaaaaaggccgtgagaatgagcaaaaactgaataacaacaagatgcatctgcggaaggctctgaagtccaactcttccctgaccaaaggcctacgaacaatggtggaacagaaccttatggagaaactggaaactttgggtatcaatgccgatattcgtggaatttcttcagatcagctgcaccgcgtgctgaagagtgttgagtctgagcgtcataagcaagagcgcgaaattccgaactttcaccagatcagggagttcttagagcatcaagtgagctgcaagattgaagagaaggcactgctgagctccgaccaatgctcggtttcccaaatggataccctatcaacaggggaagtgcccaagatgattcagctcccgagcaaaaatagacagcttatacgacagaaagccgtcagtaccgaccgcacttcagtgcctaagatcaagaaaaatgttatggaggaccccttccccaggaaatcaagtacaattaccaccccaccgttcagcagcgaggaggagcaggaagacgatgatctgattcgggcatatgcttctcccggaccccttcccgtcccccctccccagaataagggtagctttggcaagaatacagttaagtccgacgccgacggtactgaaggttcagaaatcgaggataccgacgattcacccaagccagcaggagtcgccgtgaaaaccccaaccgaaaaggtcgaaaaaatgtttccccaccgcaagaatgtcaacaaacccgtggggggtacgaacgttcccgaaatgttcatcaagaaggaggagctccaggagctcaagtgtgcagacgtggaggacgaagactgggacatatcctcactggaagaggaaatatccctcggaaaaaaatccggcaaggagcaaaaggagcccccccccgcgaaaaatgagccgcacttcgcacacgtccttaatgcgtggggcgctttcaatccaaaaggcccaaaaggcgaggggctgcaagaaaacgaatcgagcacccttaaatcttctttagtgacagtgaccgactggtctgacaccagtgatgtttag

SEQ ID NO: 23868 - DNA, 1860 bp, synthetic construct
  source 1..1860: mol_type = other DNA; note = Synthetic coding sequence
atgagcggcctggtgctgggccagcgggacgagcccgccggccacaggcttagccaggaggaaattttggggtcaacaagactcgtgtcacagggactagaagctctacggagtgaacatcaggcagtactgcagtcactatcccagactatcgaatgtctgcagcaaggaggccatgaagagggtctggtgcatgagaaagctagacagcttagaagatctatggaaaacattgaactcgggctgtccgaagcccaggtgatgctggcgctcgcttcacatctttcaactgtcgaatcagagaagcaaaagcttcgggctcaagtgagaaggctgtgccaagagaatcagtggctccgggatgagctggccggcactcagcagcggctacaacggagtgagcaggccgtggcccaacttgaggaagaaaagaaacacctggagtttttaggtcaactgcgccagtacgatgaggatggccacacctctgaggaaaaagagggggatgcaacaaaggatagcttagacgacctgtttcctaacgaagaggaagaagacccatcaaatggactgtccaggggccagggagctaccgccgcccagcaaggagggtacgagatacctgctcggcttaggaccctgcacaacttggtcattcagtacgctgcccagggccggtatgaggtggcagtcccgctgtgtaagcaggccttggaggatctggaaaggaccagcggacgcggacatccggatgtcgccaccatgctgaacattctggccctggtgtacagggaccagaacaagtataaagaagctgcgcatctcctaaatgatgctctgtctatccgtgaaagtaccttagggccagaccatcccgcagtcgccgctacactgaataacctggccgtgctgtacggcaaacgtgggaagtacaaggaggccgagcccctctgccagcgcgccctggaaattcgtgagaaggtgttaggcaccaaccaccccgacgtagcaaaacaactgaataatctcgctctgctttgccagaaccagggcaaatatgaggccgtggagcgatattatcagcgtgccttagccatttacgagggtcaactgggcccagacaaccccaatgtagctcgcacaaagaataatctggcttcctgttatctcaagcagggaaagtacgcagaggcagagaccttgtataaggagatacttacgcgcgctcacgtccaggagtttggctccgttgatgacgaccacaagccaatttggatgcacgctgaggagagggaagagatgtccaaaagtcgacatcatgaaggcgggaccccctatgccgaatacggtggctggtacaaagcatgtaaggtgagtagtcccaccgtgaacaccaccttacggaatctaggagctctctaccgaagacaaggcaagctcgaggctgcagaaacactcgaggagtgcgcattgcgaagtcgaaggcagggcacggaccccatttcgcagacgaaagtagcggagctcttgggtgagtctgatggtagacgaactagccaggaggggcctggcgattctgtcaagttcgagggaggtgaggatgctagtgttgctgtggagtggtctggagacggctccggaaccctgcagcgatccggcagcctgggtaagattagagatgtgttgcggcgttcctccgaactcttggtaagaaaactgcagggcacagagcctcgcccatcttcgtccaacatgaagcgggccgcctctctgaattatttaaatcaaccctcagccgcacccctgcaagtgtcaagaggtctgagcgcctcaactatggacttatcatctagttcctag

SEQ ID NO: 23869 - DNA, 1137 bp, synthetic construct
  source 1..1137: mol_type = other DNA; note = Synthetic coding sequence
atgaaggagcagctgcccgacctgcacagccacttcagcgacctgaacttagaggcccacatgtatgcctcgcagtggtttcttaccttgttcaccgccaaatttccactttgcatggtgtttcatattatcgatctgttactgtgtgaaggcctcaatataatttttcacgtagctctcgccctcctgaaaaccagtaaagaggatctgctgcaggcggatttcgaaggcgctttgaaattcttccgtgtgcaactgcccaagagatatagagcagaagaaaatgcgagacggttaatggagcaggcctgtaacattaaggtcccaaccaaaaaacttaaaaagtatgagaaggagtatcagacaatgcgggaatcccaattacagcaagaagatccaatggaccgatataagagggagaaccgtcgactccaggaggcgtctatgcgcttggagcaggagaacgatgacctggcccatgagctcgtgacctccaagattgccttgaggaacgatttagaccaagccgaggataaggcggatgttctaaataaagaactgctgcttacaaagcaaagactagtcgaaacagaggaggagaagcgaaaacaggaagaagagaccgcacagctgaaagaggtgttcagaaagcaacttgaaaaggccgaatatgaaataaagaaaactactgccatcattgccgagtacaaacagatttgtagtcaactttctacgagattggaaaaacagcaagctgccagtaaagaagagctagaggtggtgaaagggaagatgatggcttgcaagcactgctctgacatcttttccaaggaaggtgctctaaagctggcagccacaggcagagaagaccagggaatcgagactgatgacgagaaggactccctgaaaaagcagttgcgggagatggaattggagctagcacaaacaaaattgcagctcgtggaggctaaatgtaaaattcaagaacttgaacaccagcggggcgctctcatgaatgaaatccaagcggccaagaacagttggttctcaaagacactcaatagtattaaaactgccacaggtacgcagcccctgcagccagcgccggtcactcaacctcccaaagagagcacttag

SEQ ID NO: 23870 - DNA, 2631 bp, synthetic construct
  source 1..2631: mol_type = other DNA; note = Synthetic coding sequence
atgggcgacagcgacgacgagtacgaccggcggcggcgggacaagttcagaagggaacgctctgactatgatcggagtagggaacgagatgagcggcggcgaggggatgactggaatgatcgagaatgggaccggggtcgtgagaggaggtccaggggcgagtaccgtgattacgaccggaatcgtcgcgagcgtttttcaccgccgcggcacgagctaagcccgccgcagaagagaatgcggagggattgggatgagcattcctccgatccctatcattccggctacgaaatgccttacgcgggcggtggaggaggccccacatacggtccaccgcagccatggggccacccggacgtccacatcatgcagcaccacgtcctgcccatacaggctcgactgggatccattgctgagattgacttaggggtacccccccctgttatgaagacgtttaaggagtttttgctgagcctcgatgactcagttgatgagacggaggcagtgaagagatacaatgactataaactcgactttaggcgacagcaaatgcaagattttttcctcgcccacaaagatgaggaatggttccgtagtaagtaccatccggacgaagttgggaagcggaggcaagaggcccgtggtgcactgcagaaccggcttagagtattcctgtccctgatggagactggctggttcgataacctcctgttagatatcgacaaggctgacgcaattgtcaaaatgctggacgcagcggtgattaagatggaagggggaaccgaaaatgacttgcgtattctcgaacaggaggaggaggaagaacaggccggcaagcctggagaaccgtctaagaaggaagaggggcgagccggggctggtctgggcgacggagaacgtaaaaccaatgacaaggacgaaaagaaggaagacggcaaacaggccgagaatgactcgagtaacgatgacaagacaaagaaaagcgaaggcgacggagacaaagaagagaagaaagaagactcagaaaaggaagccaagaagtccagcaagaagagaaatcgaaaacactctggggacgacagcttcgatgagggttccgtgtccgaaagtgagagcgagagcgagagtggccaggctgaggaggaaaaagaagaagctgaggaagccctcaaggaaaaggaaaaacctaaggaggaggaatgggaaaaacccaaggacgccgcaggactggaatgtaaacctaggccattacacaaaacctgcagcctgttcatgaggaatatcgccccaaatatctcgagggcggaaataatcagtctgtgcaaaaggtatcctggatttatgagggtcgctttgagcgagcctcagccagagcgcagattttttcgaagaggatgggttacctttgacagatcggtcaatattaaagaaatttgctggaatcttcaaaacatacggttacgtgaatgtgagctgagtccaggcgtcaatcgcgaccttacccgtcgcgtcaggaacatcaatgggatcactcagcataaacagatcgtccggaatgacatcaagctcgcagccaagcttatacacaccctcgatgataggacacaactgtgggccagtgagccagggacaccccctcttcctacttccctgccatcccagaatccaatcctcaagaacattactgattacctaatcgaagaggtatcagcagaagaggaggagctgttaggcagcagtgggggggcgcccccagaggagccaccgaaagaggggaacccagcagagattaacgtagaacgggatgagaagctgatcaaggtgctggacaagttgctgctttacctgcgtatagttcactcgctcgattattataacacttgcgagtaccctaacgaggatgagatgccaaaccgatgtggaatcattcacgtgcgggggcctatgcctcccaatcgcatctcacacggggaagttctggagtggcagaagacttttgaggaaaagttgacccccctcctttccgtgcgcgagagcctgtccgaagaagaggcacagaaaatgggcaggaaggatccagagcaggaggtagaaaaatttgtcaccagcaacacgcaggagctgggtaaggacaagtggttatgtcccctgagcggaaagaagtttaaggggcctgagttcgtgaggaaacatattttcaacaaacatgcagaaaagatcgaggaggtgaagaaggaggtcgcatttttcaataacttcttaaccgacgccaaacggcctgcacttcccgagataaaaccagctcaacctcccggtcctgcccagatacttccgcccggtttgacccctggactcccttatccacatcagaccccccagggtctgatgccttacggtcagccccgtcctcctattctggggtatggagctggtgctgtgcgacctgctgtgccaactggggggccgccttaccctcatgctccctacggggcaggccgcggaaattatgatgcctttcgcggacagggcggataccccggcaagcctcggaacagaatggttaggggcgatcccagggccatcgtcgagtatagagacctggatgctccagacgatgttgattttttctag

SEQ ID NO: 23871 - DNA, 1491 bp, synthetic construct
  source 1..1491: mol_type = other DNA; note = Synthetic coding sequence
atgaagctgggcaagaagcccatgtacaagcccgtggacccctactctaggatgcagagcacctataattacaacatgaggggcggcgcgtatcccccccgatacttctatccgtttccggtaccccctctcctgtaccaggtcgaactctccgttggcggccagcagttcaacggcaagggaaagacccgtcaagctgccaagcacgacgccgctgctaaagcattacgaattttgcaaaacgaacctctgcccgagcgactggaggtgaacggaagagaaagtgaggaggagaacctgaacaaatcagagatctcccaggtgttcgaaatcgccctgaagagaaatctgccagtcaacttcgaagtcgcgcgggaaagcggacccccccacatgaaaaacttcgtgaccaaggttagcgtcggcgagtttgtgggggaaggagagggcaaatcaaaaaaaattagcaaaaaaaatgccgcgattgccgttctggaagagctgaaaaaactgcccccgctcccagctgttgagagagtgaagcctcggatcaagaagaagacaaaaccaattgttaagccgcagacatcacctgagtacggtcaaggaattaacccgatttcacggttggctcaaatacagcaagctaaaaaagaaaaagaacctgaatacacccttctaacagagcgggggctccctcggaggagggaattcgttatgcaggtcaaggtgggaaaccatactgctgagggtacagggacgaacaagaaggtggctaagaggaatgccgccgaaaatatgttggaaatcttggggtttaaagtgccccaggcccaaccaaccaagccggccctgaagagtgaggagaagacccccattaaaaagcccggtgacggaaggaaggtgactttcttcgaaccaggatcaggggacgagaatgggacttccaataaggaggacgaattccgcatgccctatctctcacatcaacagctccctgcaggcatccttccaatggtgcccgaagtcgcccaggcagtgggcgtgtctcagggtcaccacaccaaagattttacaagagccgcccccaaccctgctaaagcgaccgttaccgctatgatcgccagagaactcctgtatgggggcacctcgcctaccgccgagaccattcttaagaataacatcagttctggccacgtgccccacggacctcttacacgccccagtgagcaactggactatctctcaagagtccagggatttcaggtggagtacaaagacttccctaagaacaataagaacgagttcgtgtccctgattaattgtagcagccaacctcccctgatctctcatgggattggaaaggatgtggagtcttgccacgatatggctgccctgaatatcctgaagctgctgtccgagcttgatcaacaatccaccgaaatgccacgcacggggaatggcccgatgtctgtatgtgggcgatgctag

SEQ ID NO: 23872 - DNA, 318 bp, synthetic construct
  source 1..318: mol_type = other DNA; note = Synthetic coding sequence
atggccctgcggtaccccatggccgtgggcctgaacaagggccacaaagtgacaaagaatgtcagtaaaccccggcactctcgcaggcgaggcagacttaccaaacacaccaagtttgtgagggatatgatccgcgaggtatgcggctttgcgccttacgagcgtagggctatggagctgctgaaagtttcgaaggacaaaagagccctgaagtttatcaagaagcgggtggggacacacattcgagctaaacgcaaaagagaagagctgagcaatgtcctcgccgctatgagaaaagccgccgctaagaaagattag

SEQ ID NO: 23873 - DNA, 3720 bp, synthetic construct
  source 1..3720: mol_type = other DNA; note = Synthetic coding sequence
atggccaacgacagccccgccaagagcctggtggacatcgacctgtcctccctgagagaccctgcaggaatcttcgaacttgttgaagtggtgggaaacggcacctacggacaggtgtataaagggcgccatgtaaagacaggacagctggcggccataaaggtgatggacgttacagaagacgaggaagaggagatcaaactggaaattaacatgctgaaaaagtatagtcaccaccgcaacatcgccacctattatggagccttcataaaaaaaagtccaccgggccacgacgaccagctgtggctggtgatggagttctgcggcgcaggttctattaccgacctggtcaagaacaccaaagggaataccctgaaagaggactggatcgcctacatttccagggagatcctccgcgggctggcccacctccacattcaccatgtgatccatcgcgatattaagggacaaaacgtgcttcttaccgagaacgcagaggtgaagctggttgacttcggggtctctgctcagctggaccggactgtggggcgcagaaatacctttattggtaccccttattggatggcccccgaggtaattgcctgtgacgaaaacccagatgctacctacgactaccgttcggatctgtggagctgcggaattactgctatcgagatggcagaaggggccccaccactctgcgatatgcatcccatgagagccctgttcctcatcccccggaacccaccccccaggttgaaatccaagaagtggtccaagaagtttttctccttcatcgaaggctgtctcgtcaagaactatatgcagaggccatctactgagcagctactgaagcatcccttcatcagagatcagccaaacgagcggcaggtgaggatacagctgaaagaccatatcgatcgaaccagaaaaaaacgcggagagaaagacgaaactgagtatgagtactccgggagcgaagaagaggaggaggaagtgcccgagcaggaaggggaacccagtagcatagtcaatgtcccgggagagtccaccttaaggagagacttcctccgattgcagcaggagaacaaagaaaggagcgaagctctcaggagacagcagctgctgcaagaacaacagttgagggagcaggaagagtacaaacgacagcttctcgcggagagacagaaaaggattgagcagcagaaggaacaaagacgcagacttgaggaacagcagcgccgagagagagaggctcgaaggcagcaggagcgcgagcagcggagaagggagcaagaggaaaaacggaggctggaggaattagagcggcggcgcaaggaggaggaggagcggcgccgcgctgaggaggagaagcggagggtggagagagagcaggaatacattaggcgccaactcgaagaggagcaacgccacctcgaagttctgcagcagcagctactgcaggagcaggcaatgctgctggagtgccggtggagggaaatggaagaacaccgtcaggccgagcggctgcagagacaactgcaacaggagcaagcctacttacttagcctgcaacacgaccaccggcggccacatccccagcactcacagcagccaccaccacctcagcaggagaggtccaagccatcttttcacgctcccgagcctaaagctcattatgagccagctgatagggccagggaagtggaggacagatttcggaaaaccaaccactccagccccgaggctcagtcgaagcagactggaagagtgctcgagcctccagtcccctcccgatccgagtccttctccaatggtaactctgagagcgtgcacccagctctgcagagacccgcagagccccaggtccccgtccggaccacatcgcgaagccctgtgctgtctcggagagacagcccccttcagggttcagggcagcagaattcccaggctggccagcggaacagcactagcatcgagccacggcttctatgggagagggtagaaaaattggtgcctcgacccggctccggctcatcttccggctcttctaactctggttcccagcccggtagtcatcccggaagccaaagcgggtcaggagaaaggttccgggtacggtctagttccaaaagcgaaggttcccctagtcagcgcttggaaaatgctgttaagaaacccgaggacaaaaaagaagtgtttagaccacttaaacccgcggacttgacagccctggcaaaagagcttcgtgctgttgaggacgttcgcccacctcacaaggtgaccgactattcctccagtagcgaggaaagcggaacgacagacgaggaagatgacgacgtggaacaggagggggccgatgagtcgacttcaggaccagaagacacaagagctgcatcctccctaaacttaagtaacggcgaaacagagtcagtgaaaactatgatcgttcatgatgacgttgagtcagagcctgcaatgacacctagtaaagaagggacccttatcgtacggcagacacagagcgcaagtagcacgctgcagaagcacaagtctagctcatcatttacgcctttcatcgacccaaggctcctacaaatttctccttccagtggaactactgtaacttccgtcgtgggctttagctgcgacggtatgcgcccagaggcgattcggcaggatcccacaaggaaaggcagtgtggtaaatgtgaatccaaccaacacacgtccccaatcagacacaccagaaatcaggaaatacaagaagcgatttaacagtgagatcctctgtgcagcattatggggcgtgaacctcctcgtggggactgaatctggcctaatgttgttggaccgctccggtcagggtaaagtgtacccactgattaataggcgccggttccagcagatggacgtgttggagggactaaacgtgcttgttactatcagcggcaagaaagacaaactgcgggtgtactacttgtcttggcttaggaacaaaattttgcacaatgacccagaggttgagaagaagcaaggctggacgactgtgggtgacttggagggatgcgtgcattataaggtggtgaaatatgagagaattaagtttttagtgattgccttaaagagttctgtggaagtctatgcctgggcccctaagccctaccacaagtttatggcatttaagagcttcggggaactagttcacaagccgttgcttgtggatctgaccgtggaagaaggtcaaaggttaaaagtaatatacgggagctgcgctggctttcatgcggtcgatgtggactccggatctgtatatgacatctatctccccacccacatccagtgctctattaagccacacgccatcattatattgcctaacaccgacggtatggagctcctcgtttgttacgaggacgagggggtatacgtgaatacttacgggcgtataacgaaagatgttgtactccaatggggcgagatgccaaccagcgttgcttatatcaggagcaaccagaccatgggttggggtgaaaaagccattgaaattcgcagcgtcgaaactggtcacctggacggcgtattcatgcacaaacgagctcagagattgaagttcctgtgtgagcggaatgacaaggttttcttcgctagcgtgaggtccggcggcagctcacaggtttacttcatgacattagggcgaaccagcttactgtcatggtag

SEQ ID NO: 23874 - DNA, 2847 bp, synthetic construct
  source 1..2847: mol_type = other DNA; note = Synthetic coding sequence
atgtacggcagcgcccggagcgtgggcaaggtggagcccagcagccagtccccaggccggtcaccgagactccctcgttctccccgacttggacatcgccgaacgaactccacagggggttctagcggatcctccgtgggcggcggcagtggcaagacccttagcatggaaaatattcaaagcctcaacgccgcatacgccacgtccgggcctatgtacttaagtgatcacgaaaatgtgggcagtgagacccccaaatccacaatgaccctggggcggtctggtggtagactaccgtacggggtgagaatgactgctatgggaagtagtcccaacatcgcctcttccggggtcgcatcggacaccattgcctttggagagcaccaccttccacccgtctcgatggcttcaaccgtgccccatagcctgagacaagctcgagacaacaccatcatggacctgcaaacccagctcaaggaagtcctacgagagaatgatctgctgcggaaagacgtggaagtgaaggagtcaaaacttagcagttcgatgaattccattaaaacattttggagccccgagttgaaaaaggagcgggccttgaggaaagatgaggcctccaaaattacaatctggaaagaacagtacagagtcgtgcaggaggagaatcagcacatgcagatgaccatccaggcattacaagatgaacttagaatccagagggatcttaatcaactgttccagcaggactcctcaagtcgcactggggagccctgtgtggctgaactaaccgaggagaacttccagcgtcttcacgctgagcatgagcgacaggcaaaggagctgttcctcctgcggaaaaccctggaggaaatggagctgaggatcgagacgcaaaagcagactttgaatgcacgggatgagtcaatcaaaaagttgctggaaatgctgcagagcaaagggctgtccgccaaagcaacagaagaagatcatgaaagaactcgcaggcttgctgaagctgagatgcacgtccatcacctagaaagcctgctggaacagaaagagaaggagaattccatgttgcgagaagaaatgcaccggagatttgagaacgcaccagattccgctaaaaccaaggcgttgcagacagttatcgaaatgaaggactctaagatttcctcaatggagagggggctcagggacttggaagaagagatccagatgctcaagtctaacggcgccctgagtaccgaagaacgagaagaggagatgaagcagatggaggtttacagaagccacagcaagtttatgaaaaacaaaatcgggcaggtcaaacaggagcttagcagaaaggatactgagctcttggccttgcagaccaagttggaaacactgacaaatcagttctcagactccaaacaacatattgaagtgctgaaggaatctctcaccgccaaagagcagagagccgccattcttcagacagaggtcgatgcactgcggctgcgcctcgaggagaaggaaactatgttaaacaaaaaaactaagcagattcaggacatggccgaggaaaaaggcactcaagcaggagagatccatgatttgaaagacatgttagacgtgaaggagcgcaaggtgaacgtgctgcagaagaagatagaaaacctgcaggagcagctgcgagataaagagaagcagatgtcttcccttaaagagcgcgtgaagagcctgcaggccgatactacaaatactgatactgccttgaccacccttgaggaagccctggctgaaaaagagaggaccatagagcgcctgaaggaacaacgggacagggatgagcgagagaagcaggaggagatcgataattataaaaaggacctgaaagatttaaaagagaaagtgtcccttctccagggggacttgtctgaaaaagaggcaagcctgctggatcttaaggagcatgcctcctcccttgcctcttctggattaaagaaagatagtcgactcaaaacactggaaatcgcacttgaacagaaaaaggaagagtgcctcaagatggaaagtcaacttaaaaaagctcatgaggccgccctcgaagccagagcaagtccggaaatgtccgatagaattcagcatctcgagcgcgaaatcacccggtataaggacgagtccagtaaagcccaggccgaggtcgatagactcctcgagattctgaaggaggttgagaatgagaaaaacgacaaggacaaaaagatcgccgagttggagagcctgacttcgagacaagttaaggatcagaacaaaaaggttgccaacctaaaacacaaagagcaagtggagaagaagaaatctgcccagatgctcgaggaggccagacgaagagaggataatcttaatgatagctcccagcagctacaggttgaggagctcctgatggcgatggagaaggtgaagcaagagttagaatctatgaaagcgaagttgagcagtacgcagcagtcactggccgagaaggaaacgcacctgaccaacttaagggctgaacgtcgcaagcatcttgaagaagtccttgaaatgaagcaggaagccctgctagctgccatttctgagaaggatgccaacattgcccttctggagctgagctccagtaaaaaaaagacacaagaggaagttgcagctttaaagcgcgagaaggacaggttagtgcaacagcttaagcagcagacacaaaatcggatgaagctgatggccgataattatgaagacgatcactttaaatccagtcactctaatcagactaaccacaaacctagtccggaccaggatgaggaagagggtatttgggcatag

SEQ ID NO: 23875 - DNA, 2733 bp, synthetic construct
  source 1..2733: mol_type = other DNA; note = Synthetic coding sequence
atggccgccaccgtggagggccccgagctggaggccgccgccgccgccggtgacgccagtgaagacagcgatgctggcagcagggcactgcccttcctggggggtaatcgcttatcattggatttatacccaggcgggtgtcagcagctgcttcatctctgtgtgcagcaacccttgcagttgcttcaggtggaattcttgcgactttcaactcacgaggaccctcaattgctggaggcaacgttagcgcagttgccccagtctttgagttgcctgcgcagcctcgtgttaaagggtggtcagcggagggacacactgggtgcttgcttgagaggggcactcacaaacctgccagctgggctctccggcttggctcatttggcacacttagatctgtcttttaatagcctggaaacactgcctgcctgtgttttgcagatgcgcggactaggagccctccttctttcacacaattgtctttccgaactgcctgaggcgttgggggccctgcccgcacttacttttttgaccgtcacccataaccgactgcagacactgccaccagctctgggtgctctgagcaccctccagagactggatctttcccagaacttgctggatacactaccaccggaaatcggggggttgggcagtctgctcgagctgaacctggcctctaaccggctgcaatccttgcctgcctccctagcaggactccgcagtctgagacttcttgtcctgcacagtaacctcctggcatcagtccctgctgatttggctaggctcccactcctcacgcggcttgatctgcgcgataaccagttacgcgatctcccccctgaacttctggatgcaccattcgtcagactccaaggaaacccgctcggcgaggccagtcctgacgccccctcttcacctgtagcagctctgatcccagaaatgccccggctatttctgacctcggacctcgactcatttcccgtcacaccacagggctgtagcgtgacgctagcgtgcggggtacggcttcagtttccagcaggcgccactgctactccgattactattaggtacaggctactgctgccagagcccggcctcgttcctctgggcccccatgacgcattactgtcgcacgtcctggagctccagccccacggagttgcttttcaacaggatgttggactctggctgctcttcaccccaccccaggccaggagatgcagggaagtggtggttagaactaggaacgacaattcgtggggtgaccttgagacatacctggaagaggaagcgccccaacgactctgggctcactgccaggttcctcacttttcctggtttcttgtcgtctctaggcccgtatcgaacgcatgtcttgtccctccggagggcactctcctgtgctcgtccggccacccgggagtaaaagtgatcttccccccaggcgccacagaggaaccacgccgcgtgtctatgcaggtcgtgagaatggctggtagggagttgcaagcactgctgggcgaacccgaagccgctgtctcaccgcttctgtgtctgtcacaatcgggacccccctccttcctccagcccgtcacagtacaactcccattgccgtccggtatcacaggcttgtcccttgacagaagccggctgcacctgctatattgggccccacctgctgctacttgggatgatatcacggcacaggtggtgctcgaactgacccacctatatgcccgcttccaggttactcacttcagctggtactggctgtggtacactacaaaaaactgcgtgggtggcctcgcacggaaagcctgggaacgtctccgactgcatcgggtgaacctgatcgctctccaaagacggagggatccagagcaggtcctgctccagtgtttgccacgcaataaagttgatgccaccctgcggcgcctcctggagcgatatcgaggcccagaaccttccgataccgtagaaatgtttgaaggcgaggaatttttcgctgctttcgagcgtgggatcgacgtagacgctgaccgccccgactgcgtggagggaagaatttgcttcgttttctatagccatctgaagaacgtgaaagaggtatacgtcaccacaaccctggacagagaagctcaagccgtgagaggccaagtgtcgttttatcggggagcagtgcccgtcagagtccccgaagaggcagaagccgcgagacaaaggaagggtgcagacgccctatggatggccactcttcctatcaagctcccgcggttaaggggtagcgaagggccccggagaggcgccggactgagcctcgcaccattaaatctaggcgatgcagagaccggatttttaactcaatctaatctgctttcagtagccggccggctcggactggattggcccgccgttgccctgcacttaggcgtttcctatcgtgaagtccagagaatccggcacgaatttcgcgatgacctggatgaacagataagacacatgctgttctcatgggccgagaggcaggctggccaacctggggccgtgggcctgttggtgcaggccctggagcagtcggatcgacaggatgtcgccgaggaagtgcgcgcagtcctcgagttgggccggcgcaaatatcaggatagcatccgcaggatgggccttgccccaaaggaccccgccttgcccggaagttctgctcctcaaccacccgagcccgcccaggcctag

SEQ ID NO: 23876 - DNA, 2961 bp, synthetic construct
  source 1..2961: mol_type = other DNA; note = Synthetic coding sequence
atgagccagtggacccccgagtacaacgagctgtacaccctgaaggtcgacatgaaaagcgaaatcccatctgatgccccaaagacccaggagtctctcaagggtatattgctccaccctgaaccaattggagcagccaagtcttttccggctggagtggaaatgatcaactcaaaggttgggaacgaatttagccatctgtgcgatgattcacagaagcaggaaaaggaaatgaacggaaaccagcaagagcaggaaaaatctcttgtcgtgcgcaaaaagcgaaaaagccagcaggctgggcccagctacgtgcaaaactgcgtcaaggagaaccaagggatcctgggccttaggcaacatctgggcactccctcggacgaagacaacgattctagtttctccgactgtctctcttccccctcatcatccctgcacttcggcgatagcgatactgttacaagcgacgaggacaaggaggtcagtgtgcgccatagtcagaccattctgaatgccaagagtcgcagccattctgcccgcagccataagtggccgaggacagaaaccgagtcagtatccggattactcatgaagcggccatgcttgcatggcagctctctgagaaggctgccgtgcaggaaacgcttcgtgaagaataatagttcccagagaacacagaagcaaaaggaaagaattttaatgcaaaggaaaaagcgggaggtgctggcaagacggaagtacgcccttcttcccagcagcagctccagtagcgagaacgacctgagctccgaatcttcgagctctagctcgactgaaggcgaggaagacttgttcgtcagtgctagcgagaatcatcaaaacaatccggccgtgccctccgggtccatagacgaggacgtggtcgttatcgaagccagttcaaccccgcaagtgactgctaatgaggagataaatgtcacgagtaccgactccgaggtggagattgtgacagtgggcgagtcatacagatccaggtccacacttggccacagtaggagccactggagccagggatccagttcccacgcctccagaccccaggaaccccggaacaggtctcggatttctactgtgatacagcctctgcggcagaacgcggcagaggtcgtggacctgacggtcgatgaggacgagcccactgtagtgcctacaacttctgctagaatggaaagccaagcaactagcgcttctattaacaattccaacccctctacctctgagcaggcgtctgacaccgctagcgctgttactagcagccagcccagtacagtgtcagaaacctccgcaacgttaacctctaactccacaaccggcacatctataggggacgatagtcggagaacaacttcatccgccgtgactgagaccggtcccccagcgatgcctcggttgccatcttgttgcccccagcactccccttgcggtggatcttcccaaaaccaccatgccctgggccaccctcacacgtcatgcttccaacaacacggacatcattttcagcaccatcaccatcaccatcatacccctcatccagccgttcccgtttctccttctttcagcgacccagcttgcccggtggaaagaccacctcaggtgcaagccccatgcggggccaacagctcctcaggaacctcttatcatgagcagcaggcactgccagttgacctgagcaattcaggcatacgctcccacggctctggctccttccatggtgcaagcgctttcgatccctgttgtcccgtctcttcaagtcgcgcagccattttcggccaccaggcggctgcagctgcaccttcgcagcccctgagtagcatcgatggctacggaagttcaatggttgcacaaccgcagccccaaccccctccacagccaagcctcagctcctgtcgtcactatatgcctcctccttacgcctccctgacacggcctttgcatcatcaggcctctgcctgcccgcacagccacggcaatccccccccccagacccagcctcctcctcaggtagactacgtcatcccacaccctgtgcacgctttccactcgcaaatctcatctcatgcaacaagccatccagtggctcccccacctccaacacatttagcttcaaccgctgccccaattcctcagcaccttcctccgactcaccaacccataagtcaccatatacctgccactgcacccccagcacaaagactgcaccctcacgaagtgatgcagagaatggaggtgcaacgtcggagaatgatgcagcaccccacacgggcacacgaacggcctcccccccatccgcaccggatgcaccccaattacgggcatggacaccacatccacgtgcctcagaccatgtcatcacacccgaggcaggccccagagaggtctgcctgggagttaggcatagaggccggggtcactgccgccacttataccccaggcgccctacaccctcatctggctcactatcatgccccacctagacttcatcacctgcagctgggagccttacctctaatggtgcccgatatggcgggttatcctcacataaggtatatctcttccggcctcgatgggacaagctttaggggcccattccgagggaactttgaagaactcatccatctcgaagaacggctgggaaatgtcaaccggggtgctagccaggggaccattgaaaggtgtacgtatccccataagtataagaagcggaagcttcattgcaagcaggatggtgaagaagggactgaagaagatacagaggaaaaatgcacgatatgcctctccattctggaagagggggaggacgtcagacggttgccgtgcatgcacctatttcatcaggtttgcgttgaccagtggctcataacaaacaagaaatgtcctatatgtcgagttgatatagaggcccagctaccgagtgagtcatag

SEQ ID NO: 23877 - DNA, 372 bp, synthetic construct
  source 1..372: mol_type = other DNA; note = Synthetic coding sequence
atggccaagatcaaggcccgggacctgcggggcaagaagaaggaggaactgctgaaacagctcgacgaccttaaggtggagctgagccagctgcgcgttgccaaagtgaccggtggagcggcctcaaaactcagtaaaattcgggtggttcgcaaaagtatcgcgcgcgtgctgacagttatcaatcagacccagaaggaaaatctcagaaagttttacaaaggtaagaagtacaagccgctggatctgcggcctaagaagaccagggccatgcgacggcgccttaacaaacatgaggagaatctcaagaccaagaagcaacagcgcaaggaacgcctctatccgcttaggaaatatgctgttaaggcctag

SEQ ID NO: 23878 - DNA, 1635 bp, synthetic construct
  source 1..1635: mol_type = other DNA; note = Synthetic coding sequence
atgaagatcttctgcagccgggccaaccccaccaccggcagcgtggaatggcttgaggaagacgaacactacgactaccatcaggagatcgctcgttcatcctacgcagatatgttgcacgacaaggacaggaatgtgaagtactatcagggaattagagcagccgtgtcacgcgtgaaggacagaggccaaaaagcgctggtgcttgacatcggcactggcacggggctgttgagcatgatggccgtgaccgctggagccgatttctgctacgccatcgaagagaattgcgaagctgtgccccatagggcaacagtctacgcgcaattggtggagagtgggagaatgtggtcctggaacaagttgtttccaatacacgtgcaaacgtcactcggtgaacaagtgattgtaccgcccgtggacgtggaaagctgcccaggagcgcctagtgtgtgtgatatacagctgaatcaggtgagtcccgctgactttacagtgctgagcgacgtcctgcccatgttttccatcgatttttccaagcaggtgtcatcatccgccgcttgtcacagcaggaggttcgagccattgaccagcggacgtgctcaggttgtcctgtcatggtgggacatcgagatggaccccgaaggtaagatcaaatgtacaatggcacccttttgggcccacagtgaccccgaggaaatgcagtggagggatcattggatgcagtgtgtgtatttcctgccgcaggaggagcctgtagtgcagggtagcgccctttacctagtggctcatcatgacgactattgtgtctggtactctctccagagaacatcacccgagaagaacgaacgggtacgccagatgagaccagtgtgcgactgccaggcccatctcctatggaatcgccccaggttcggagagatcaatgaccaggaccgcactgacagatatgtccaggccctgcggaccgtgtcgctccttctgggagagccgttcttcacgaccagtttattgccttggcacaacctttatttctggtacgtgcggacagcagttgatcaacatctcggccccggtgcaatggtcatgccgcaggctgccagcctgcatgccgtcgtcgtcgagtttcgggatctatggaggatccgatctccctgcggcgactgcgagggtttcgacgtacacattatggacgacatgatcaaaagagcactcgattttcgtgaaagtagagaagccgagccgcacccattatgggagtatccatgcagatcgttatctgaaccctggcagattctgacattcgacttccaacagcctgttcctctacagcccctgtgcgccgagggcactgtggagctgaggagacctgggcaaagtcatgcggccgtgctgtggatggagtaccatctgacaccagagtgcactttgtcaacaggactgttggagcccgcagatccggagggcggatgttgttggaatccccactgcaagcaggctgtctacttctttagccctgcccctgatcctcgcgcgcttctcggaggacctcgcacagtctcctacgccgtcgaatttcaccctgataccggtgacatcatcatggaattccgacatgcagatactccggattag

SEQ ID NO: 23879 - DNA, 1131 bp, synthetic construct
  source 1..1131: mol_type = other DNA; note = Synthetic coding sequence
atgcccctgcaggtgagcgactacagctggcagcagaccaagaccgcagttttcttgagcctgcccctcaaaggcgtgtgtgtaagagacacagacgtcttctgcaccgaaaactatctgaaggttaactttccgccgttcctttttgaagcatttctctatgcacccattgatgacgaaagctccaaggccaagataggcaatgatacgatcgttttcactctgtacaaaaaagaggcagcaatgtgggagacccttagtgttactggcgtggataaagaaatgatgcaaagaattagagagaagtctattctgcaggcacaggaaagagccaaggaagccaccgaggcaaaggcggctgctaagagggaagaccaaaaatacgcgttgagcgtgatgatgaagatagaggaggaagaacggaaaaaaatagaggatatgaaggagaacgaaagaatcaaggctaccaaagccttagaggcctggaaggagtatcaaaggaaagcagaggaacaaaagaaaatccagagagaagagaaactgtgtcagaaagagaagcaaattaaggaggaaaggaaaaagattaaatataaaagcctgacaaggaatctggcgagtagaaacttggcccccaaaggccggaacagcgagaacatcttcaccgaaaaactcaaagaggattcaatacctgcgccgcggtcagtcggtagcatcaagattaatttcacccccagagtgttccccaccgcattacgtgaatcgcaggtggccgaggaagaggagtggctgcacaagcaggctgaagccaggcgagccatgaatacagatattgccgaactctgtgacctaaaggaagaagagaaaaatcctgagtggctcaaggataagggtaataaactcttcgccacagaaaactacctggcagcgattaacgcctacaatctcgctattcggctcaacaacaaaatgcccttactgtatttgaacagggccgcctgccacctgaaactgaagaacctgcataaagcaatagaggattcttccaaggcttacaggattatgaaacggcacctccgcctgatccatcccactaagttgtataaactgatgttgaggcggtttggcatgtag

SEQ ID NO: 23880 - DNA, 4221 bp, synthetic construct
  source 1..4221: mol_type = other DNA; note = Synthetic coding sequence
atgtggagcctgaccgccagcgagggcgagagcaccaccgcccactttttcctcggcgcaggcgacgaagggctgggaacaaggggtatcgggatgaggccggaagaatccgacagcgagctgctcgaagatgaggaggacgaagtccctcccgagcctcagattatagtgggtatatgtgccatgaccaaaaagtcaaaatccaagccaatgacccagattttggaacgtctgtgtaggtttgactatctgacagtggtgattcttggtgaggacgtgatcctgaatgagcctgtcgaaaattggccctcttgccactgcctgatctcatttcacagtaagggcttccctctggataaggcagtggcctattctaaattgagaaatcccttcctgatcaatgatctcgcaatgcagtactacatacaggacaggcgagaggtttaccgcattctccaggaggagggcattgatttacctaggtacgctgttctcaaccgggaccctgcccggccagaagaatgtaatctcatcgaaggagaggatcaggtggaagtcaatggcgctgtgttccctaagcccttcgtggagaaaccagtgtctgccgaggatcataatgtctacatttactatcccagcagtgccggaggcggcagccaacgactatttaggaagatcggttcaaggtcatctgtgtactcaccggagtcctcagttaggaagacaggttcctacatctatgaggaatttatgcccactgacgggaccgacgtgaaagtttacactgtcgggccagattacgcgcatgccgaggcccgcaagtcccccgccttggatggcaaagttgaaagggatagcgaggggaaggaaattagatatcccgtcatgctgacagctatggaaaaactcgttgcacgcaaggtgtgtgtcgcctttaagcagactgtatgcggatttgatctcctgcgagctaacggccacagctttgtgtgcgacgttaatggtttctcatttgtgaaaaatagtatgaagtattatgacgattgcgccaagatcctgggcaacaccatcatgagagagctcgcaccgcagttccaaatcccatggtcaattcccaccgaagccgaggatatccctattgtgccaactacaagtgggacaatgatggagctaagatgtgtcatcgcgataatccggcacggggaccgaacccctaagcagaagatgaagatggaggtgaagcaccccaggttcttcgctctcttcgagaaacacggcgggtataagaccggaaaactgaagttgaaacggcccgaacaactgcaggaggtgttggatatcaccaggctgctactggccgagctggagaaggagcctggaggagagatcgaagaaaaaaccggaaagcttgagcagctcaagtccgtgctcgaaatgtacgggcatttctccggaataaaccggaaggttcaattgacctactatcctcatggagttaaggctagcaacgaagggcaggatccacagcgagaaactcttgccccgtctttgctgctggtgctgaaatggggcggggagctgactcctgctggtagggtccaggccgaagaactaggccgggctttcaggtgtatgtacccaggcggccaaggcgactacgccggatttcccggctgtggcctgctgcggctccacagtaccttccggcacgatctcaagatctacgcgagcgacgaagggagggttcaaatgacagcggctgcctttgccaagggcttgctagccctggaaggcgaactcacgcctattctggtgcagatggtgaaatcagccaatatgaacggcttgttggattccgatggagactctttaagcagctgccagcacagagttaaagccagactgcaccacatactccagcaggatgccccctttggacccgaggattacgatcagttggccccaactcggagtacaagcctgctgaactccatgaccattatccagaaccctgtcaaagtatgtgatcaagtgttcgcattgatcgaaaacctgacccaccagatcagagagagaatgcaagatcctcgcagcgtcgacttgcagctttaccactccgaaactctggaactgatgttgcagagatggtcaaaacttgagagagatttccgccagaagtccggccgttacgacatctccaaaattccggacatctacgattgtgtcaagtacgacgtgcaacacaatgggtccctcggcctgcaaggcaccgcagaacttctgcgcctgtccaaggccctggccgacgtggtgatcccgcaggagtacggcatatcacgggaagaaaaattggagatagccgtcggcttttgtctccccctcctgcggaagattctactggatcttcagagaactcatgaagacgagtccgtaaataaactgcaccctctgtacagtagaggtgtcctgagccctggccggcacgtcaggactcggctatactttacttctgaatctcatgttcactctttgctcagtgtgttccgctatgggggtcttctggacgaaacgcaggacgcgcagtggcaacgagccctagactacctgtccgcaatatctgagcttaattacatgacgcagattgtgatcatgctctacgaggacaatacccaggacccgctgtcagaggagagattccacgtggaacttcacttctcgcccggggtcaaaggggttgaggaggaggggtctgcgcccgccgggtgcggattccgccctgcttctagcgaaaacgaggagatgaagacaaatcagggctcaatggagaacctctgtccgggaaaggcaagcgatgaacctgatcgggcactgcagacgagtccacagcccccagaaggacccggtttacccaggcgtagccccctgattaggaatagaaaagctggctcaatggaggtgctgagcgagactagtagctcacgtccaggtgggtataggctgttcagtagctccagaccgccgaccgagatgaaacagagtggactgggtttcgaagggtgttctatggtccccaccatataccctttagagacactccacaacgccctcagtttgaggcaggtttcagaatttctctctcgagtatgccaaagacatacagatgcccaggctcaggcttcagcggcactgttcgactcgatgcattcctcccaggcttctgataacccttttagcccgccccgcacactccatagtccccccctgcagctgcagcaacgctctgagaagcctccatggctggagacacgcttctgccatgtgggccaggcggggctcgagttgttgacctcatcagatctgcctgcctccgcctcacagtccgcaggaatcacaggggtgtcacacaggacacaaccagattcttccgggcccagttctaccgtgagtagcgccggcccatcaagccccacaacggtggacggaaacagccagttcggatttagcgatcagccctccctaaacagccatgttgctgaagaacaccaagggcttggtcttctacaagaaacgcctgggtcaggagcccaggaactgagcatcgagggtgagcaggagctgtttgaaccaaaccaaagtccccaggtgcccccgatggagacttcgcagccatacgaggaggttagtcagccttgccaggaagtccccgacatatcccagccgtgtcaggatatttcagaggctttgagtcagccttgccaaaaagtcccagacatttcacagcagtgccaggaaaaccacgacaacggcaaccacacatgccaggaggtcccacatatttctcagccctgccagaaatcctcccagctttgccaaaaagtgtcagaagaggtgtgtcagctgtgccttgaaaattccgaggaagtgagccagccctgccagggagtgtccgtagaagttggaaagctcgttcacaagttccacgtcggggttggttctttggttcaggagaccctagttgaggtgggatccccggcggaggagatccccgaagaggtcatccagccctatcaggaattctctgtggaagtgggcagactggctcaagaaacgtcagcaattaacctcctgagtcaagggatccctgagatcgacaagccaagccaggaattccctgaggagatcgaccttcaggcccaagaggttcccgaagaaataaactag

SEQ ID NO: 23881 - DNA, 1338 bp, synthetic construct
  source 1..1338: mol_type = other DNA; note = Synthetic coding sequence
atggtgctggagggcaaccccgaggtgggcagcccccggaccagcgatttgcaacataggggcaacaaaggatcctgcgtactctcctctccaggtgaagatgcccagcccggcgaagagcctataaaatatggtgaactgatcgtactgggctataacggttgcctggcctcaggagacaagggccgccggagatctcgactggccctttctcggcggtctcacgctaacggcgtgaaacctgacgtaatgcatcacatatcaactcccttggtctccaaggcgctgtccaacagagggcagcactctatcagctacacactgtctcgtagtcactccgtcatcgtggagtatactcacgactccgatactgatatgtttcaaataggcagatcaacagagaacatgatagacttcgtagtcacagatacttccccaggcgggggcgccgccgaaggcccttccgcgcagagcacaatttccaggtatgcctgccggattctatgcgatcggcggccaccatacactgccaggatttacgctgccggttttgatgcctcgagcaatatttttctgggagagcgcgcagccaagtggcgaacacccgacggtcttatggatggtctaacaactaatggggtcttggtgatgcaccctgccggagggttttccgaggattccgccccgggcgtgtggcgggaaatatcagtctgcggcaacgtgtatacgcttcgagatagcaggtctgctcagcagcgggggaaactggttgagaacgagagtaacgtgttgcaagacggatccctgattgatctatgtggtgccacacttctctggcggacaccagctggcctgctgagagcgcctaccttaaaacaattggaagcacagcggcaagaggcaaatgctgctcgaccgcagtgcccggtcggtctttctacccttgccttcccaagtccagcacgaggaaggactgcccccgataagcaacagccatgggtatatgtgcgctgtggacatgttcatggttaccacggctggggatgccgccgcgaaagagggccccaagaacgggaatgcccactgtgccgattggtcggcccctacgtgcccctgtggctgggacaggaagccggcctgtgcctagaccccggaccccctagccatgccttcgccccgtgcggccatgtgtgctctgagaagacagcccgttattgggctcagactccgctcccccatggaactcatgcctttcacgcggcatgcccattctgtggggcgtggctaacaggagaacacggttgcgtgcgtctgattttccagggtccactagactag

SEQ ID NO: 23882 - DNA, 1950 bp, synthetic construct
  source 1..1950: mol_type = other DNA; note = Synthetic coding sequence
atgggcaccgccctggtgtaccacgaggacatgaccgccacccggctgttgtgggacgaccctgagtgcgagatcgagaggcctgagaggctcaccgccgcactggatcggctccgccaaagaggcctggaacaacggtgcttgaggttaagtgcccgcgaggcctcagaagaagaactaggcctggtacatagcccagagtatgtgagtctggtgcgcgagacacaggtgctcgggaaggaggagctgcaggcacttagtggacagttcgatgcgatttattttcatccatctacattccattgcgcccgcttagctgctggcgccgggctgcagcttgtcgacgcagtcctcaccggtgctgtccagaatggcctggcattggtaaggccaccaggacatcacgggcagagagctgcggcaaacggtttttgtgttttcaacaatgtagcaattgccgccgcccacgccaagcaaaaacacggcctgcaccgcattcttgtggtggattgggacgtacatcacggacaggggatccagtacctctttgaggatgacccttccgtcctctatttcagctggcaccggtacgaacacggtcggttctggcccttcctccgggaatcagacgcagatgctgtagggcgaggacaggggcttggctttacagtaaaccttccatggaaccaggtggggatgggaaacgcagactacgtagcggcattccttcaccttctgttacccttagcgttcgagggccagatgcaggccactcctgagtgtttcgcccatttaacacagttgctgcaggtcctggccggcggaagagtttgtgctgttctggaaggtggctaccacctcgaaagtcttgcggagagcgtctgtatgactgtgcagacattgttgggggaccccgctccacccttgagcggaccaatggctccttgtcaatccgctctagaaagcatacaatccgctagagcagcgcaagctcctcattggaagtctctgcagcaacaagatgtgaccgcagtgcctatgtcgcctagtagccattcgcctgagggccgaccccctcctctgctgccgggaggccccgtgtgcaaagcggccgcctcagcacctagctcgctgctggatcagccctgtctctgcccggcaccttctgtccggacggccgtggctctgactactcctgacattactctggtgcttcctcctgacgtcatacaacaggaagccagtgctcttcgagaggaaactgaggcttgggctcggccacacgagtccctggcgagagaggaggccctgaccgcattaggcaaactgctctatctgctggatggtatgctggatgggcaggtgaactctggaatcgccgcgacaccagctagcgcagcggccgccaccttggatgtggcggttcgtcgcggcttgagccatggggctcagcgcttgttatgtgtggccctgggccagctcgaccgtcctccagaccttgcccacgacggacgctccctgtggctaaatattcgggggaaagaggcggctgctctctcaatgttccacgttagcacccctctgcctgtgatgaccgggggcttcctgtcttgcatccttggccttgtgcttcctttggcttacggattccagcccgatctggttctggtagcgctgggccctggtcacggcctgcaaggtcctcacgctgccctgttggctgccatgctgcgaggactggcaggtggcagagtattagcactgcttgaagagaactcaaccccccagttggctggaatccttgcgcgggttttaaacggggaggcacctccatctctcgggccctcttctgtggcatctcccgaagatgtgcaggctcttatgtatctccgtggacagctcgagccccaatggaaaatgctgcagtgtcacccgcacctagtggcctag

SEQ ID NO: 23883 - DNA, 795 bp, synthetic construct
  source 1..795: mol_type = other DNA; note = Synthetic coding sequence
atggccggcgagcagaagcccagcagcaacctgctggagcagttcattctacttgcaaaagggacttcagggagcgcccttactgctctgattagccaggttctggaagctccaggagtatatgtgttcggagaattactagaactcgctaacgtgcaggagctggcggagggggctaacgcggcctacctgcagcttcttaatctgtttgcttacggtacctacccagactatatcgcaaacaaagaatcattgccagaactgtcaacggcacagcagaataaactcaagcacttgactatagtttcattagcttcgcgaatgaaatgtataccatatagcgtgcttctcaaagatctggaaatgagaaaccttcgcgagttggaagacctgatcattgaagctgtttacacagatatcatacagggaaagcttgatcagagaaatcagctcttggaagtcgacttctgcatcggtagagacatccgcaagaaagatattaacaacatagtgaagaccctgcatgaatggtgcgacgggtgtgaggccgtgctgctggggatagagcagcaagtgcttcgtgccaatcaatataaggaaaatcacaatcggacccaacagcaagtagaggccgaggtgacgaatatcaagaagaccctgaaggccaccgcgtcctccagtgctcaggagatggagcagcaattggccgagagagagtgccccccccatgcggaacagcgtcaacctactaagaagatgtcaaaagtgaagggcctggtgtcctctaggcactag

SEQ ID NO: 23884 - DNA, 726 bp, synthetic construct
  source 1..726: mol_type = other DNA; note = Synthetic coding sequence
atgagcgccagcctgaactacaagagcttcagcaaggagcagcagaccatggacaatctggagaaacagctgatctgtcccatttgcttagagatgttcaccaaacccgtagtcatccttccctgtcagcacaacctgtgcagaaagtgcgcatcggatatcttccaggcttctaacccatacctgcctacgaggggtggtaccacaatggcttcaggcggaagattcaggtgcccatcttgtagacacgaagttgtgctcgaccggcacggggtgtacggtcttcagaggaacctcctcgtcgaaaatattattgacatctacaagcaggaatcgacccgtcccgagaagaaatccgatcagcccatgtgtgaagagcacgaagaagaaaggatcaacatttactgtttaaattgtgaagtgcctacctgttccttgtgcaaggtgttcggagcccacaaggactgtcaggttgcacctttaacccacgtttttcagagacagaaaagcgagctctccgacgggatagctatccttgttgggtcaaatgaccgagtacagggggtaatttcacagttggaggatacttgcaagactatcgaaatcggcttcgaggccccacccttacaaggccaggctgccgcgcccgcctccggaagcggagccgatagcgagcccgcccggcatattttttccttctcttggctgaattctttgaatgaatag

SEQ ID NO: 23885 - DNA, 3501 bp, synthetic construct
  source 1..3501: mol_type = other DNA; note = Synthetic coding sequence
atggccaacgacagccccgccaagagcctggtggacatcgacctgtcctcacttcgcgacccggccggtatattcgagctcgtggaggtcgtgggtaacggtacttatggtcaggtctataaaggtaggcacgtgaagacggggcagctcgccgcaatcaaagtgatggacgttactgaggacgaagaggaggagattaagcttgagattaacatgctgaagaagtactcccaccacagaaacattgccacatactacggcgcgtttatcaaaaagtcaccaccaggtcatgatgaccagctatggctggttatggaattttgtggcgcaggtagcattaccgatctagttaagaacacaaagggcaacacacttaaagaggactggatcgcttacatttctcgggagattttaaggggtctcgcacacctgcatattcatcacgttatccaccgggacataaagggacagaacgtgctgttaacggagaatgccgaggtaaagctcgttgatttcggtgttagcgcccagcttgatcgcaccgtgggaaggcgaaacacttttattggcacaccatactggatggcaccggaggtgattgcttgtgatgagaaccctgatgccacatacgactatagaagcgacctatggagctgcggcattaccgccatcgagatggcggaaggagctccacccttatgtgacatgcatccaatgagggccctgtttctcattccacggaacccacctccccgtctgaagagcaagaagtggtccaagaagttcttcagctttattgaggggtgtcttgttaagaattatatgcaacggccttcgacagagcagcttctgaagcacccttttatccgtgatcagccaaacgagcggcaggttcggatccaattgaaggaccacattgaccggacacggaagaaacgcggcgagaaggacgagacggagtacgaatattccggctcagaggaggaagaggaagaggtgcccgagcaggagggcgagccaagcagtatagtgaacgtccccggcgaatcaaccctgaggagggattttttaagattgcagcaggagaacaaggaacgaagcgaagctctaaggaggcaacagttgttgcaggagcaacaattgagggaacaggaggagtacaagcggcaactgctggcagagaggcagaagcggatcgagcagcagaaggagcaacgtcggcggctagaggaacaacaaagaagagagagagaggctcggaggcagcaggagcgcgaacaacggaggagagaacaggaggagaaacgcaggttggaagagctcgaacgacggagaaaagaagaggaagaacgtagacgggctgaggaggagaaacgacgggtggaacgggagcaggagtacatcagaagacagctcgaggaagaacagcgtcacttggaggtcttgcagcagcaactattgcaggaacaggccatgctgctacacgaccaccgccgcccccacccacagcattcacagcagccgccccctcctcagcaggaacgatctaaaccgtcctttcacgcgccagaaccgaaggcccattatgaacctgctgatcgtgcccgggaagtgcctgttagaactacctcacgatcgcctgtgctctctagacgggacagccctttacaggggtccggtcagcagaactcgcaggcaggacaaaggaactctaccagttccatcgagccccgactgctttgggaaagggtggaaaagctcgtgccaagaccgggtagcggaagttcttctggcagtagcaactccggctcccagcccggctcccaccccggaagccagtccggcagcggcgaaaggtttagggtgaggtcctcaagcaagtctgagggctccccaagtcagagattagagaatgccgtgaaaaagccagaagataaaaaagaggtcttcaggccactgaagcctgccgttagaatagacctgaccgctctggcaaaagagctgcgcgctgtcgaagacgtgagacccccacataaggtgacagactattcatccagtagcgaagagtctggcactactgacgaggaggatgacgatgtggagcaggaaggcgccgatgaatccacttctgggccggaagatacaagagccgcttcctccctaaacctcagcaatggagagacagagtcagtaaagacaatgatagtccacgatgacgtcgaatcggagccagcaatgacacctagcaaagagggaactctgatcgtaaggcaaactcagtccgcctctagtaccctgcagaagcacaagtcgtctagctcctttacccccttcatcgacccacggcttttgcagatctcaccctcatctggcacaacggtgacctccgtggttggctttagctgcgacggaatgaggcccgaggcaatccgccaagatcctacgcggaaaggctctgtggtcaacgtaaatcccaccaatacgcgcccccaatcagacacacccgagattagaaagtacaagaagcgcttcaacagtgaaattctttgcgctgcactctggggtgttaacttgctggttggcactgagagcgggctgatgcttctcgatcggagtgggcagggcaaagtgtatcctctaatcaatcgccgcaggttccaacagatggacgtgctcgaaggcctaaatgtgcttgttaccatttctggaaaaaaagataagctgagggtgtactacctatcatggctcagaaataagattttacacaatgatcccgaggttgaaaagaagcagggctggaccaccgtaggcgacttagaaggctgtgtgcattacaaggtggtgaagtatgaaaggattaaattcctggtgatagcactgaagtcttcagttgaagtatacgcgtgggcccccaagccttatcacaagttcatggcattcaaaagttttggcgagctcgtacacaaaccactcttggttgacctgaccgtagaggaagggcagcgcctgaaagtgatctatggatcttgcgccggttttcatgcggtcgacgtggactccggttcggtatatgacatctacctacctactcacgtgcgcaaaaacccacacagcatgatccagtgtagcataaagccccatgcgatcatcatcctgccaaatactgacgggatggagctgctggtgtgttatgaggacgagggtgtttatgtgaatacctacgggcggatcacaaaggatgtggtgcttcaatggggggaaatgccaaccagtgtggcctacattagatccaaccagactatgggatggggcgagaaagccattgagatcagaagtgtcgagaccggccatctcgacggagtgtttatgcacaaaagggcacagcgcctgaaattcttatgtgagcggaacgataaagtcttctttgcctctgtccgcagtggggggtcttcacaggtctatttcatgaccctgggaagaaccagcctgctgagctggtag

SEQ ID NO: 23886 - DNA, 2466 bp, synthetic construct
  source 1..2466: mol_type = other DNA; note = Synthetic coding sequence
atggtggcccccgtgctggagaccagccacgtgttctgctgccccaacagagtacgcggagtcctaaattggagcagtggaccaagagggcttctggcatttgggaccagctgttcagtggtgctgtacgacccattgaaacgcgttgttgtgactaacctaaacggccataccgctcgggtgaattgcattcagtggatttgcaaacaggatgggagccctagtacagaacttgtatccgggggctctgataaccaggtgatccactgggaaatagaggataatcagcttctgaaggccgtacatttacagggacatgaaggccccgtttatgccgtgcacgcggtttaccagcggagaacctccgacccagctctgtgcacactcatcgtgagtgccgctgctgactccgccgtgaggctatggtcaaagaagggtcctgaagtgacctggaaaacaggccaggtggaaagaggcagagcttggaaacctccggcttccttggcgctatgttctcggtcctgtgatagtatggtctcatgttatgcttccattctgtgtaaggccctctggaaggagaagctccacaccttttggcaccacaatcgaatctcctttcttccatccgcttttcgacccatccctattctggcctgcgggaatgacgactgccgcattcacatattcgcacaacaaaacgatcagtttcagaaagttctgagcctctgcgggcacgaagattggatccgcggggtggagtgggccgcatttggcagagacctgtttctagcctcgtgctctcaggattgcctgattaggatttggaagctctacattaagtcgacaagtttggaaacacaggatgacgacaatatcaggctcaaagagaatacattcacaatcgagaacgagagtgtgaaaattgccttcgctgtgacgctagaaaccgtgttggccggccacgagaattgggtaaacgcagtgcactggcaacccgtgttctacaaggacggcgtgttgcaacagcccgtccggctgctttccgcttcgatggacaaaaccatgatattatgggctcccgacgaagaatccggcgtgtggctggagcagagagagtggacccctgagatcgtcatctctggacacttcgacggagtgcaagacctcgtatgggatcccgagggcgaattcatcatcactgtaggaaccgatcaaactactaggttgttcgccccatggaaacgcaaggaccaaagccaagtgacgtggcatgaaatcgccaggccccaaatacacgggtacgacctcaagtgcctggccatgatcaaccgattccaatttgtctctggggcagacgagaaggtattacgcgtgttctccgcccccagaaactttgtggagaatttctgcgccatcaccgggcaaagcctgaaccacgtgctttgtaaccaggattccgatctgcccgagggtgcaaccgttcctgcccttggcctctccaacaaagctgtgtttcagggagacatcgcttcgcagccttccgatgaagaggagctcttaacttccacaggctttgaatatcagcaagtggcctttcagccttccatcttgacagaaccacctacagaggaccacctgctgcagaatacactgtggccagaggtccagaagctatatggccatgggtatgagattttttgtgtgacgtgtaacagtagcaagacccttctggccagtgcctgcaaggccgcgaagaaggaacacgccgccatcatcctttggaatacaactagttggaaacaggttcagaatctcgtttttcattcattaactgtcacccaaatggcattctctcctaacgagaaattcctgctcgccgtttccagagatcgaacttggtctctgtggaaaaaacaggataccattagcccagagtttgagcctgtatttagcctcttcgcctttacaaataaaatcacttctgtccactcacggatcatatggagttgcgactggtctcccgacagtaagtatttcttcacaggaagccgcgataaaaaggtggtcgtttggggggaatgcgattctaccgacgattgtattgagcacaacattggaccatgttcaagtgtgctggacgttgggggcgctgtgactgcagtgagcgtttgccctgtgttacatccctcacaaaggtatgtggtggccgtcggtctggaatgtggaaagatctgtctctacacgtggaagaagaccgaccaggtgcctgagatcaacgattggactcactgtgtggagactagtcagagccagtcccacactcttgccataagaaagctgtgttggaagaactgtagtggcaagaccgagcaaaaagaggccgagggcgccgaatggctgcactttgcatcttgtggggaggatcacacggttaagatacaccgggtgaacaaatgcgctctttag

SEQ ID NO: 23887 - DNA, 969 bp, synthetic construct
  source 1..969: mol_type = other DNA; note = Synthetic coding sequence
atggtgagcgtgatcaacaccgtggacaccagccacgaggacatgattcatgacgcacagatggattattacggcaccagactcgctacctgttcaagcgacaggtctgtaaagatttttgatgttcgtaatggtgggcagattttgatcgccgacctgcgcgggcatgaagggcccgtgtggcaggtggcgtgggcccatccaatgtacggcaacatcctggccagttgctcttatgaccgcaaagtcattatatggcgcgaagaaaacggtacctgggagaagtcccatgagcatgctgggcacgactcgtccgtgaactctgtctgttgggctccacatgactatggtttaatcctagcatgcggatcctcggacggcgccatttctctcctcacctacactggggaagggcagtgggaagttaaaaaaattaataacgcacacacaatcggctgtaatgctgttagttgggcaccagcagtcgttccgggatcccttattgaccacccctccggacagaaacccaattacataaagaggttcgcgagtgggggctgtgacaacctgataaagctttggaaggaagaggaagacggacagtggaaagaggagcagaaactggaagcccactcagattgggtgcgcgatgtggcctgggcgcctagcattggcttgccaacctccaccattgcctcctgttctcaggatgggcgagtattcatctggacatgcgacgatgcttcctcaaatacatggtcgcccaaactgcttcataagtttaacgacgtggtgtggcacgttagttggagcatcactgcaaacattctggccgttagcgggggcgacaacaaggtgactctatggaaggagtcagtggatgggcagtgggtatgcatctctgacgtgaacaagggccaggggagtgtgtcggcgagtgtcacagaaggccaacagaacgagcaatag

SEQ ID NO: 23888 - DNA, 1347 bp, synthetic construct
  source 1..1347: mol_type = other DNA; note = Synthetic coding sequence
atgagcagccggaagctgagcggccccaagggccggcggctgagcatacatgttgtcacctggaacgtagcatcagccgcccctccgctggacctgtccgatctattacaactcaacaaccggaatctgaatctggacatatatgtaatcggtttgcaggagctgaacagcgggattatctctctcctttcagatgcggcctttaatgactcctggtctagttttcttatggacgtcctgtcgcccttgagcttcatcaaggtgtcccatgtccgaatgcagggcatcttactgctggtcttcgctaagtaccaacaccttccctacatccagatcttgagcacaaagagcaccccgaccggactattcggatattgggggaataaggggggggtgaatatatgcttaaaactgtatggctactacgtgtcaatcatcaactgccacctccctccacacatttccaataattatcagcgcctggagcattttgatagaattctggagatgcagaattgtgagggtagagacataccgaacatcctggatcacgacctgatcatctggttcggagacatgaattttcgcatcgaggactttggcctccatttcgtccgggagagtatcaagaaccggtgttatggaggtctctgggagaaagaccaactgtcaattgcaaagaaacacgatccattgttaagagagtttcaagaaggacggttactgttccctccaacatacaaattcgatcggaactcgaacgattacgatacctcagagaagaaacggaagcctgcctggacagacagaatcttatggagactgaaaaggcaaccatgcgccgggccagatacccccattccccccgcatcccactttagcctgagcttgaggggctatagttcacatatgacatacgggatctcagaccacaagcccgtgtctggtacatttgaccttgagttgaagccgctggtgtcagcccccctgatcgtactgatgcctgaagacttgtggaccgttgagaatgacatgatggtctcttattcttccacaagtgactttccatcctccccctgggattggattgggttgtataaagtgggactgagggacgtgaacgactatgtgagctatgcttgggtgggcgactccaaggtgtcctgctccgacaatttaaatcaggtttatattgacatctccaatattcccaccaccgaggatgaattcctgctgtgctactactccaatagcttgcgctcagtggtggggatctctcggcccttccagatccctcccggcagcttgcgggaagaccctttgggcgaggctcagccccagatctag

SEQ ID NO: 23889 - DNA, 1641 bp, synthetic construct
  source 1..1641: mol_type = other DNA; note = Synthetic coding sequence
atgggcgcctacctgagccagcccaacaccgtgaagtgcagcggcgacggcgtcggcgctccacgactgccactgccgtacgggttctcagccatgcaaggatggagagtgtccatggaggatgcccacaactgtattcctgagctggactccgagacggccatgtttagtgtctacgatggccatggcggcgaagaggtggccctttattgcgccaagtatcttcctgacattatcaaggatcagaaggcatataaagagggtaaacttcagaaggccctggaggacgcttttttggccatcgatgccaagctgacaaccgaagaagtcatcaaggaactggcacaaattgccgggaggcccactgaggacgaggacgaaaaggagaaagtggctgacgaagatgacgtggacaatgaagaggccgcccttctgcatgaggaagcaaccatgacgatcgaagaattgctgaccaggtatggacagaattgccacaaagggccgccccactccaaaagtggcggaggaaccggcgaggagcctggttcccagggactgaatggcgaggccggcccagaggactccaccagggagacaccatctcaggagaatggacccactgcaaaggcgtatacaggtttcagcagcaacagcgagagaggcacagaagccggccaggttggcgaaccaggtatccccactggtgaggcaggaccctcctgctcttcggcctcagataagctacctagagtggccaagtcaaaattcttcgaagattctgaagacgaaagcgacgaggctgaagaggaggaggaggattccgaagagtgcagtgaggaagaagacgggtactccagcgaggaagccgaaaatgaggaggacgaggatgacactgaagaagccgaagaagacgatgaggaagaggaggaggagatgatggtgcctggcatggagggaaaggaggagcctggcagtgactctgggactactgctgtggtcgcgctcatcaggggcaagcagctgatcgtagctaacgcaggagacagtaggtgcgtcgtgtctgaggcaggcaaggccctggacatgtcatacgatcataaaccagaagacgaggtagaactggccagaattaagaatgctggcgggaaggtgacaatggatgggcgagtgaacggcgggcttaacctgtcccgagccataggtgaccacttttataaaaggaataaaaacctcccacctgaggagcagatgatttccgcactcccagatattaaagtgttaacccttactgatgaccatgagttcatggtaatcgcttgtgatggcatttggaatgtgatgtcaagccaggaggttgttgacttcattcaatctaaaatctcccagcgagatgaaaatggggagctcaggcttctgtccagcatcgttgaggagttattggatcaatgtttggcacctgatacttccggggacgggacaggctgtgacaatatgacctgcattatcatatgtttcaagccacgcaacaccgcggagctgcagccagaatcagggaagaggaaattggaggaggtcttatctactgagggggccgaagagaatggcaattcggacaaaaaaaagaaagccaaaagagactag

SEQ ID NO: 23890 - DNA, 3840 bp, synthetic construct
  source 1..3840: mol_type = other DNA; note = Synthetic coding sequence
atgctgcaggccctgcagctgcggaccggcttcttctgcttccgggtgttggttgccttgagtccatgcgccctgcacgattccggtcggcttaccacaggctcattcaacgttgtcagagatgaggaagaagaaatcaagctggaaattaatatgttgaagaagtattctcatcaccggaacattgcaacctactatggtgcgtttattaagaaaagcccaccaggtcacgatgatcagttgtggctggtaatggaattctgtggtgcaggcagcataaccgatctggtgaaaaatactaaggggaacaccctgaaggaggactggatagcctatatatctcgagagatcctgcgtggtttagcccacctccacatccaccatgtgatccacagggacatcaaggggcagaacgtcctgctcaccgagaacgctgaggtgaagctagttgacttcggtgtgtcagcccaattggaccggactgtcggacggcggaataccttcattggtactccctactggatggcaccagaagtcatcgcctgcgatgaaaaccccgacgccacatatgactacaggtctgatctgtggtcctgcggtataaccgcaatagagatggccgagggggcccctcctctgtgcgatatgcacccaatgcgagctctattccttattccaagaaacccccccccaagactcaagtctaagaaatggtccaagaagttcttttccttcatcgaagggtgcctggtgaaaaattatatgcagagaccttcaactgaacagttactgaaacacccttttatccgcgatcagccaaacgagcgccaggtccggattcaactcaaagatcacatcgaccgtacacggaagaagcgaggcgagaaggacgagaccgaatacgagtattccggatcggaagaggaggaagaagaggtgccagaacaggagggagagccctccagcattgtgaatgttccaggcgaatcaacgttgcgcagagacttccttcgcctccaacaagaaaacaaagaacgaagtgaagctttacgcagacagcagctgctccaggaacagcagttgagagaacaggaggagtataagcgccaactgttggctgaaagacagaaacgcatagaacagcagaaagagcaacgtcggcgactggaagaacaacagaggcgggagcgggaagctcgacgccaacaagagagggagcagaggagacgggagcaagaggagaagcgccgccttgaagaacttgagcgccgtaggaaggaagaggaggagcgccggagagcagaggaggaaaaaaggcgggtggagcgggagcaggaatacatacggcgtcagcttgaggaggagcaacggcatctggaggtcctacagcaacagctgttgcaggaacaggccatgctgcttcacgaccacagaaggccacatccccagcactcccagcaaccacccccccctcagcaggagagatctaagccttccttccatgccccagaacctaaagcccactatgagcccgctgatagggcacgggaagtccagtggtcccacctggcctcattgaagaacaatgtcagccccgtgtcccggtcacactcctttagcgatccctcaccaaaattcgcgcaccaccatttaaggtctcaggatccttgccctccgtctagatcagaggtgctctctcaaagttcagactcgaaaagcgaggcacccgaccccactcagaaggcatggtctagaagcgacagcgacgaagtgccaccgcgcgtccccgtgcgaacaaccagccgaagtcctgtcctgagtcgacgtgactcgcctctgcagggtagcggacagcagaactcccaagccggccagagaaatagcacatctagtatagaaccacggctgttatgggaaagagtcgagaagctcgtaccaaggcccgggtccgggtctagctctggctcatctaatagtgggagccagccaggatctcaccctggctcccagtcgggttctggagagaggtttcgtgtgcggagttcttctaagagcgaggggtcaccttcccaacgactggaaaacgctgtgaaaaaacccgaagacaagaaagaagtttttcggccactgaagccggccgtcaggattgaccttacagcactggccaaggagcttagggcagtggaggacgtaaggcctccacacaaggtgacagattattcttctagctcagaagagtctggaaccacggacgaagaggatgatgatgtggaacaggaaggggccgacgagtcgaccagcggcccagaagatactagggcagctagcagtctcaacctgtccaacggagaaacagagagcgtgaaaacaatgatcgttcacgacgatgtagaatctgagcccgcaatgaccccctctaaggaggggacccttattgtacggcagtctaccgtggatcagaagagagcatctcaccatgaatcgaatggtttcgcaggaagaatccacttacttccagatctgctacagcaaagtcatagtagctcaaccagctcaacatcctcaagccccagtagctctcagcctacgcccactatgtcgcctcagaccccacaggacaaactgactgcaaatgagacccagtctgccagcagtactctgcagaaacacaagagcagcagctctttcaccccattcatcgaccctagactgcttcagatatctccctcaagcggcaccaccgtgacatcggtggtcggcttctcctgcgacggaatgcgccctgaggctattaggcaggatcctactaggaaaggatcggtcgtcaacgtcaacccaacaaataccaggcctcagtctgacacaccagagattcgaaagtataaaaaacgatttaacagcgagatcctttgtgctgccctctggggggtgaacctcctcgtcgggaccgagtcggggctcatgctgttagacaggagtgggcagggcaaggtgtacccgcttattaacagaaggagatttcagcagatggacgtgctcgaagggttaaacgtgctcgtgacaattagcgggaaaaaggataagcttcgggtgtactatctcagctggctgagaaacaaaatcctccacaatgaccccgaagttgaaaaaaaacagggctggaccacagtaggcgatctggagggatgcgtacactacaaggtcgtcaaatacgagcggatcaagttcctcgtgattgctctcaaatcctcagtggaggtgtatgcctgggctcccaagccttaccacaaatttatggcctttaagtccttcggtgaactggtccataagcctctgctggtggatctcaccgtagaggagggacagagactgaaagttatatacggttcttgcgccggattccatgcagtggacgtagacagtggcagtgtgtacgacatttacttgcctactcacatccaatgctcaatcaagccccacgccatcattatcctgcccaacacagatggcatggagcttctcgtgtgctacgaggacgagggggtttacgttaacacttatgggaggatcactaaagatgtggtgctgcagtggggcgagatgcctacatctgtcgcgtatatcagatcaaaccagactatgggatggggagaaaaggcaattgagattcgctcggttgaaaccgggcatctggacggcgtcttcatgcacaagcgcgcccagcggttgaaattcctctgcgagcgcaacgacaaagtcttctttgctagcgtgcgctcgggcggatcaagtcaggtctactttatgacgttggggaggactagcctgctatcatggtag

SEQ ID NO: 23891 - DNA, 1989 bp, synthetic construct
  source 1..1989: mol_type = other DNA; note = Synthetic coding sequence
atggccagctgccccgacagcgacaacagctgggtgctggccggcagtgagtcattgccagtcgagacactggggcccgcaagcagaatggatcccgagtctgaaagagcactgcaggcccctcattccccctcaaaaacggatggtaaagaactggctggcacgatggacggcgaagggaccctgttccagacggagtctccccagtccggatccattcttaccgaagaaactgaagtcaagggcaccctcgagggggacgtgtgtggggtggagcctccgggtcctggagataccgttgtgcagggcgacctgcaagaaacaacagtggtcactgggcttggaccagatactcaggacttagaggggcagagcccaccccagtccttgccgagcacccccaaggctgcatggatacgtgaggaggggcggtgctcaagcagcgacgacgatactgatgtggatatggaaggactacggcggcggcgtgggagagaggctgggccaccacaacccatggtccctcttgccgttgagaatcaggccggaggcgaaggagccggcggcgagctgggaattagcctgaacatgtgcctcctgggagctcttgttctattaggcttaggtgtgctgctcttcagcggtggactctctgaatctgagaccggccccatggaggaagtggagcgccaggtgctgccggatcccgaggtattggaggctgttggcgaccggcaggacggcttgcgggagcagctccaggctccagtccccccagattccgttccatctctccagaatatgggactcctactcgataagctggctaaggagaaccaggatatccggcttctccaggcgcaactacaggcccagaaggaggaactacagtccctgatgcatcagcccaaagggctagaggaggagaacgcccaacttcggggggcactgcaacaaggagaggcgttccaaagggcgctggagtccgaactgcagcagctgcgggcacgtttgcagggcttagaggcagattgtgtaaggggccctgatggagtgtgcctgagtggtggcaggggaccacagggggacaaggccatcagagaacaggggccccgggagcaggaacccgagttgagtttcctcaagcagaaggagcagctagaggcagaagctcaggctctcaggcaggaattagaacgccaacgtaggctcctgggctcagtgcaacaagacctcgagcgtagcctgcaagacgccagccgcggagatccggcccatgctggattggccgaactcggccatagactcgcccagaagctccaaggccttgagaattggggccaagacccgggggtgtcagctaacgccagtaaggcatggcatcagaagagccatttccagaactcgagggaatggagtggtaaggaaaagtggtgggacggccagagggaccgaaaggcagaacattggaagcacaaaaaagaggaatccggtagagagagaaagaagaattggggcgggcaggaggatcgcgaacccgctggtcggtggaaggaaggacggccccgggtggaagagagcggctcgaagaaagagggaaagagacagggtcccaaggagccaccacgcaaatccggatccttccattccagcggggagaagcagaagcagccccggtggagagagggcaccaaggagttgccgctaagccccgctttttttggcgaggacggtattttcagacacgaccgtctgcgcttccgcgattttgtcgatgcactggaggacagtctggaagaggtggcagtacagcagaccggcgatgatgacgaggtggacgacttcgaggactttatcttctcgcacttttttggagataaggcactgaagaagcggagtggaaagaaggacaaacactcacagtcacctcgggctgcaggcccccgagagggacactctcactcgcaccatcaccatcatcggggctag

SEQ ID NO: 23892 - DNA, 2403 bp, synthetic construct
  source 1..2403: mol_type = other DNA; note = Synthetic coding sequence
atggtggcccccgtgctggagaccagccacgtgttctgctgccccaatagggtgcgcggcgtcctgaactggagttcaggacctagggggctgctggcttttggcacttcatgcagtgtagtactctatgatccacttaagcgtgtggtcgtgacaaatttgaatggccacacagcgagagttaactgcatacaatggatctgcaaacaggacggttccccttccacagaactggtgagcggcggatccgacaatcaagtgatccattgggagatcgaagacaatcagctgctgaaggccgtgcatcttcagggacacgagggaccagtgtacgccgtgcacgcagtgtaccaacgcaggacatctgaccccgcgctttgtacgctgatcgtatcagccgctgccgatagtgccgttcgactgtggagtaaaaaggggccggaagtcccgatcctagcttgcggtaacgacgattgccgaatccacatattcgcacagcagaatgatcagtttcagaaagtgcttagcttgtgcggtcacgaagattggatacgcggcgtggagtgggctgcattcggccgcgacctcttcctggccagctgctcacaggactgtctcatcagaatctggaagctgtatataaagtccactagcttggaaacccaagacgacgataatatccggctgaaggaaaacacctttacaatcgagaacgaatctgtgaagatagccttcgcagttactttggagactgtgctggcgggccacgaaaactgggtgaacgcagttcactggcagcccgtcttctataaggatggcgtgctacaacagcctgtgcgtctcctatccgccagcatggacaaaacaatgattctatgggcacctgatgaggagtccggtgtatggttggagcaagtccgcgtcggcgaggtggggggtaacacactcggattctatgattgtcagttcaacgaggacggctcgatgattattgcccacgcttttcatggcgcacttcacctttggaaacagaacacagtgaacccacgcgagtggacccccgagatcgtgattagtgggcattttgatggtgttcaggaccttgtctgggaccccgagggcgaattcatcattactgtcgggaccgaccagacgacaagactgttcgcaccctggaaacgtaaggatcagtcccaagtgacctggcatgagatcgcccgtcctcaaattcatggctacgacttgaagtgcctcgccatgatcaaccgatttcaatttgttagcggggcggatgagaaagtgctgagggtgttttccgccccacgtaacttcgtcgagaacttttgtgccatcacgggtcaatccctgaaccacgtcctgtgcaaccaggatagcgacctgcccgagggagctactgtcccggcactcggacttagtaacaaagccgtgttccaaggcgatatcgccagtcagccatccgacgaggaggagctacttacctctaccggttttgaataccagcaagtggccttccagcccagcatccttaccgaaccaccgaccgaggatcacctgctgcagaacactctgtggcctgaggtgcaaaagctgtatgggcacggctatgagatcttttgtgtgacgtgcaatagttctaagacattgctagcgtctgcctgtaaggccgccaaaaaggagcatgccgctataatcctatggaacactacttcatggaagcaggtccaaaacctggtcttccatagcctcaccgtgactcagatggccttttcgcctaacgagaagttcctgctggcagtttctcgggaccgcacctggtcactgtggaagaagcaggatacaatctctcccgaattcgaaccagtgttctcattatttgctttcaccaacaaaatcaccagcgtccactcaagaataatttggtcgtgcgactggagtcccgattccaaatactttttcactggctcccgggacaaaaaagtggtcgtttggggagagtgtgattccacagacgactgtattgagcataatattggcccttgttcatccgtgctggacgtgggcggcgccgtcaccgctgtatcagtgtgcccggtgctccacccgtcccagagatacgtcgtggccgtgggcttagaatgtgggaagatttgcctgtacacttggaaaaagactgatcaggtgccggagatcaatgactggacccactgcgtggagacctcccagtcccaaagccacacactggccatcagaaagctttgctggaagaattgtagcggaaaaactgaacagaaggaggcagaaggggccgagtggcttcactttgcgtcctgcggggaagaccacaccgtgaaaattcaccgcgtgaataagtgcgccctctag

SEQ ID NO: 23893 - DNA, 561 bp, synthetic construct
  source 1..561: mol_type = other DNA; note = Synthetic coding sequence
atggccggcgagaacttcgccacccccttccacggccacgtgggccggggtgccttttcagatgtgtacgagcctgcagaagacaccttcttgttgttaaacgccctcgaagccgccgctgctgagcttgccggggtggagatctgtcttgaggtcggaagcgggagtggagttgtttccgctttccttgcatccatgatcgggccgcaggctctttatatgtgcaccgacatcaatccagaggcggcagcctgcactttggaaacagcacgttgcaacaaggtgcatatccagcccgtgatcacagacctggtggggtcccatggcattgaagccgcttgggccggtggtaagaacggtagagaggtcatggaccggttttttcctttggtccctgacctcctttcgccgaagggtcttttctacttagtgacaatcaaagagaataatccggaagagatcttgaagatcatgaaaacaaaaggtctccagggtaccacggctctgagccgtcaagccggccaagagacgctctcagtgctgaagttcaccaaatcatag

SEQ ID NO: 23894 - DNA, 2352 bp, synthetic construct
  source 1..2352: mol_type = other DNA; note = Synthetic coding sequence
atggccaagtacaacaccggcggcaaccccaccgaggacgtgagcgtcaatagccgtcctttcagagttactggacccaacagctcttctggaattcaggccaggaagaatttattcaacaaccagggaaatgcttcaccacctgcaggtcctagcaatgtaccaaagtttggtagtcctaagccccccgtcgccgttaagccgtctagtgaggagaaacccgacaaagagcctaagccaccttttttgaagcccacaggagctggccagcgttttgggacacccgcttccctgaccacccgggacccggaagctaaagtaggatttttaaagcctgtgggaccaaagcctattaacctccctaaagaggattctaagccaaccttcccttggccccctggaaacaagccatcattacatagcgtcaatcaagatcacgaccttaagcctctggggcccaaatctggacctacgcctcctacgagtgagaacgagcagaaacaggcattcccgaaactgactggcgtgaaaggcaagttcatgagtgcttcccaagatctggagccgaaacccctcttccccaaacccgccttcgggcagaagcctccactgagcactgagaacagtcacgaggatgagtcccctatgaagaacgtgagcagtagcaaaggctccccagcccctctgggagttcgatcaaaatccggtccactgaaacccgccagagaagatagtgagaataaggatcacgcgggagaaatcagttcccttcctttccccggagtcgtgctgaaaccagcggcctccagagggggcccaggactgtccaagaacggagaagagaaaaaagaagatcggaagattgacgccgctaaaaatacgttccagtctaagatcaaccaagaggaactagcctcagggacaccccccgctcggtttcctaaagctccatctaagctcaccgtaggaggcccatggggacaatcccaggaaaaggagaaaggcgataagaattccgccaccccaaaacagaagcctctccctccgctgtttacccttggaccccccccgccaaagcccaatcgccctccaaatgtcgatctgacaaaatttcataagaccagctctggtaactctactagcaaaggtcaaacatcatactctactacgagtttgcccccacccccaccaagccatccggcatcccaacctcctctccctgccagtcatccgtcccagccaccagtgccttccctgccaccgcggaatattaagccccccttcgatctgaaatcacctgtgaatgaagataaccaagatggtgttacacatagtgatggcgccggaaatctggatgaagagcaggactctgaaggtgaaacctacgaggatatagaggcgagcaaggagcgtgaaaagaagcgcgagaaagaagagaaaaagcgccttgaactggagaagaaggaacagaaggagaaggagaagaaggaacaggagattaagaagaagttcaagttaaccggccccatccaggtgatacacctagccaaggcctgctgtgatgtcaagggaggcaagaacgagctctcctttaagcagggcgagcagatcgagatcattcgcatcactgacaaccccgagggcaagtggctgggaagaacagcgagaggaagctatggttacatcaagaccacagccgtggagatagactatgactcattaaagctgaagaaggatagcttgggggccccttcccggcccattgaggacgatcaagaggtgtatgacgatgtggctgagcaggacgacatctcctcacatagtcagagcggtagcgggggcatcttcccacccccccctgatgatgatatctatgacgggattgaggaggaggatgccgacgatggtttccctgccccacctaagcagctggacatgggggatgaggtatatgacgatgtggatacctccgacttccctgtcagttcggcagagatgtcccagggaacaaacgtgggtaaggccaagactgaggagaaagacttgaaaaagttgaagaaacaggaaaaggaagaaaaagattttaggaagaagtttaagtacgacggagagatcagagtactgtacagcacgaaggtgaccacttccatcacctccaagaaatggggaacccgagatctgcaagtcaagcccggcgagtccctggaggttattcagactactgatgacacaaaggtgctctgccgaaacgaggagggaaagtatgggtacgtgcttagatcctatcttgccgacaatgatggcgaaatttatgacgatatcgcggacggatgtatctatgacaatgattag

SEQ ID NO: 23895 - DNA, 1722 bp, synthetic construct
  source 1..1722: mol_type = other DNA; note = Synthetic coding sequence
atgatccccccccaggaggccagcgcccggcggcgggagatcgaggacaagctgaagcaggaggaggagaccctgtcctttatccgggattcactggaaaaatccgaccagctgactaaaaacatggtgtccatcctctccagctttgagtctagactgatgaaactggaaaatagcattatccctgtgcataagcagacggagaatctgcaaaggctccaggagaatgtcgagaaaacactgagttgtctcgaccacgtcatttcatactatcatgtgatctctggagacgacgatttggaggcccaagaagacgtcaccctggagcatctccccgagagcgtacttcaagacgtgatccggatcagtcgatggttagtggagtacggacgaaaccaggacttcatgaacgtgtattaccagattcgttcttcacagttagatagatccattaagggcttgaaagagcattttcacaagagctcctccagcagtggcgtgccgtattcacctgccataccaaacaagaggaaagacacaccgaccaagaagcccgtcaaaagacccggcagagatgacatgctggacgttgagacagatgcttatatccactgcgtctcggcgttcgtgaaattggcacagtccgaataccagctcctggccgatatcattccagaacaccaccagaagaagacttttgattcgctgatccaggatgcgctggatggtctcatgctggagggggaaaatatagtctccgccgctcgcaaagccatagtgcggcacgatttttcgaccgtgctgacagttttccccatcctgagacacctcaaacagactaagcctgagttcgaccaggtgctacaggggaccgccgcctctacaaagaacaagctccctggtcttatcaccagtatggagactattggcgccaaggccctagaggatttcgcagacaacattaaaaacgatcccgacaaagagtacaacatgcctaaggacggcactgtgcacgagcttacaagtaacgccatactctttctgcagcagctcttggactttcaagagacagccggcgccatgttagcgtctcaggaaacttcttcgtccgctacttcctactcatcggaatttagtaaaagacttctttcgacatacatctgtaaagtgttaggaaacctccagctgaacctgctgagcaagagcaaagtctacgaggaccccgcactttccgctatctttcttcataacaactataattatatattgaaaagtttggagaaaagtgaactgatccagctggtcgctgtcacacagaaaacggcggagagaagttacagggaacacatcgagcagcagattcagacatatcagagaagttggttgaaagtcaccgactacatcgctgaaaaaaacctacctgtgttccaacccggtgtaaaactgcgggataaagaaagacaaattatcaaggagagattcaaaggattcaatgatggattagaagagctctgcaagatacagaaggcctgggcaattcctgacaccgaacagagggataggattaggcaagcacagaagactattgtgaaggagacttatggcgcattcttgcagaagttcgggagtgtgcctttcaccaaaaacccagaaaagtacatcaagtatggggtggagcaggtcggggatatgatcgaccgactgttcgataccagcgcctag

SEQ ID NO: 23896 - DNA, 2475 bp, synthetic construct
  source 1..2475: mol_type = other DNA; note = Synthetic coding sequence
atgatgcagaacgtgcacctggcccccgagaccgacgaggacgacctttactccggctacaacgactacaatcccatttatgacatcgaggagctggagaatgacgccgccttccagcaggccgtgagaacttcccacggcaggagaccccccatcacggctaaaattagctctacggcagtgacgaggccgattgcaacggggtacggcagcaagacctccttagcatctagcattggtcggcccatgacgggggccattcaagatggcgtgacgcggcctatgaccgccgtccgagccgccggcttcacaaaagcagctctgcgaggaagtgcatttgaccccctttcccagtccaggggcccagcgtctccactggaggcgaagaagaaagactccccggaagagaagataaagcagctggagaaggaggtgaacgagttggttgaggagtcttgcatcgccaattcttgtggggatcttaagctcgcactggagaaggcaaaagacgccggtagaaaggagagagtactcgtcagacagagggagcaggtcactacacctgagaatataaacctggacttgacgtacagtgtgctctttaaccttgcctcgcaatacagtgtgaacgagatgtatgccgaggcccttaacacttaccaggtgattgttaagaacaaaatgttcagtaatgcaggcatcctgaaaatgaatatgggtaatatctacctgaagcaacggaattattctaaggcgatcaagttttaccgcatggcgctggaccaggtgccctccgtcaacaagcagatgcgtatcaaaatcatgcagaatatcggtgtaacattcatccaggccgggcagtactcggatgccatcaattcatacgagcacattatgtccatggctccaaatctgaaagccggttacaaccttaccatttgttatttcgccatcggggatcgagagaaaatgaagaaggccttccagaagcttatcaccgtgcctcttgagatcgacgaagacaagtacatctccccatcagacgatcctcacacaaacctagttactgaggccatcaagaatgaccatctcagacagatggagcgagagagaaaggccatggccgaaaagtacatcatgactagcgcgaaattgattgctcctgtaatcgaaaccagctttgccgccggatacgattggtgtgttgaggtagttaaagcatcccagtacgtagaactcgctaacgatttagaaatcaataaggccgtgacatacctgcggcaaaaggactataatcaggcagtcgaaattctgaaagtgttggagaaaaaagatagccgggtgaagtccgcagccgcaacaaacctgtccgctctgtactacatgggtaaggattttgctcaagcgtcctcctatgcagacatcgctgtgaattcggaccgatataatccagccgccctcacaaataagggcaataccgtgtttgctaatggtgattacgaaaaagcagctgagttctataaggaggcactccggaacgattctagctgtacagaggcgttgtataacattggacttacctacgaaaagctgaacagactggatgaagctctggactgtttcctgaagctccacgcgattcttcgcaactcagccgaagtgctgtatcagattgctaacatttacgaactgatggagaaccctagtcaggcaattgaatggctcatgcaggtggtctctgtcattccaacagacccacaggtgctgagtaagttgggggaactgtatgacagagaaggggacaaatcccaggccttccagtattattatgagtcatatagatatttcccatgcaatatcgaggtaattgaatggttgggtgcatactacattgatacccaattctgggagaaggccattcagtattttgagcgagcaagtcttatccagcccacccaagttaaatggcaactgatggtcgcatcatgctttcgcagatcaggaaactaccagaaagcacttgatacatacaaggatactcaccgtaagtttcccgaaaacgtcgaatgtctgcggttcctagtacggctctgcactgacctaggactcaaggatgcccaggagtatgcccggaagctcaaaaggctggagaagatgaaagaaatcagagaacagcgcataaagtccggaagggatggatccggaggctcacgagggaagcgggaaggatctgcatctggcgattctggtcagaattatagtgcgtcatccaagggcgaacgcttgtccgcaaggctgcgagcccttcccggcacaaacgagccttacgagtcatcgagcaataaagagattgacgcctcttatgttgaccctcttgggccccaaatcgagagacccaagaccgcagcgaagaaacggatcgacgaagatgacttcgctgatgaggaattgggggacgacctgctccccgagtag

SEQ ID NO: 23897 - DNA, 2850 bp, synthetic construct
  source 1..2850: mol_type = other DNA; note = Synthetic coding sequence
atgctgcggaccgccggccgggacggcctgtgccggctgagcacctacctggaagaattggaggcagttgagctgaaaaaatttaagctgtacctgggcaccgccactgaattgggtgaggggaagataccttgggggagtatggagaaagccggccccctggagatggcccagctccttatcactcacttcgggccggaggaggcttggaggttggctctgagcaccttcgagagaattaatcgcaaggacctgtgggaaaggggtcagagagaagatctcgtcagagataccccgccgggcggaccctctagcttggggaaccagtcaacatgcctgctcgaagttagcttagtgacaccaaggaaggatccgcaggagacttatcgcgattacgtgcgccgaaagtttagactcatggaggacaggaatgcccgtttgggcgaatgcgtgaatctgagccaccgctacacaaggctcctcctagtgaaggaacactcaaaccctatgcaggtccagcagcagctgctcgacaccggacgggggcacgcacgcaccgtgggacaccaagccagtcccataaaaattgagaccctgttcgagccagacgaagaaagaccagagcctccaagaacagtggtcatgcagggcgctgcaggcattggcaagagcatgcttgcacacaaagtcatgctggactgggccgacggcaaactcttccagggccggtttgattatttattctacattaactgtcgggaaatgaaccagtcagcaacagagtgctcgatgcaggacctcatcttctcctgctggccagagccttccgcacctttacaggagctgatacgcgtgccagagagattgctttttatcattgatggcttcgacgaattgaagccgtcatttcacgatccccaaggcccctggtgtctgtgctgggaggagaaaaggccaacagaattgctgctgaatagcttaatcagaaagaaactcctgccagagctttcactcctcattaccactcgccccaccgcccttgagaagttacacaggttgcttgagcacccaagacacgtagaaattctgggtttcagtgaagctgagcggaaagagtatttttacaaatattttcataatgctgagcaggccggccaggtattcaattacgtgcgcgacaacgaacctctgtttacaatgtgtttcgtgcctcttgtgtgctgggtagtctgcacatgcctgcagcagcagcttgaaggcggcggattgttacgtcagacaagcagaactactacagccgtttatatgctgtatctgctatctctcatgcagccaaaacccggtgcaccccgcctgcagcctcctccgaaccaacggggcctctgcagccttgctgcagatggcctatggaatcagaagatactgtttgaagaacaggatctaaggaaacatggactggatggcgaggatgtatccgctttcttaaatatgaatatcttccaaaaggacataaattgtgagcgatactactcatttatacatctcagctttcaagagtttttcgccgcaatgtactatatccttgacgagggagagggcggcgctgggccagatcaagacgtgacaaggctgctgaccgagtatgccttcagtgagcgttcttttctcgccctcacctcgcggttcctgtttgggttgctaaatgaggagaccaggtcgcaccttgaaaagtcactttgctggaaggtgtcacctcatataaaaatggatctgctccagtggatacaatctaaagctcagagtgatggaagcactcttcaacaaggttccctggagttcttttcatgcttatacgagatccaggaagaggagttcatccagcaggctctgtcacattttcaggtgatcgtggtttccaacattgcatctaaaatggaacacatggtgtcgagcttctgcctgaagcggtgtcgatctgcgcaagtgctgcatttgtacggagctacatattcggctgacggagaagaccgcgcccgctgcagcgcaggcgcccacacactactggtgcagttgcccgaacgcaccgtcttactcgacgcatactcagagcatctggctgcggcgctttgcacaaatccgaatctgatcgaacttagtctctaccgcaatgctttgggtagccgcggcgtgaaactgctttgtcagggcttgcgccaccccaactgtaagctgcagaacttacggctgaagcggtgtaggatatccagtagcgcttgcgaggacctaagcgctgcactgatcgctaacaagaatctaacacggatggacctctccggcaatggtgtcggtttccctgggatgatgctcctgtgtgaaggcttgcgccatccccagtgtcgcctccagatgattcagttgagaaaatgccaactggaaagtggtgcgtgtcaggagatggcatcagtgctaggcaccaacccccacctggtcgaacttgatctgacagggaatgccttagaagatctgggcctccgtctgttatgccaggggctgagacatcctgtatgccgactgagaacattatggttacaattagatagttgtgggcttactgccaaggcttgtgagaacttgtactttaccctggggatcaatcagactctgactgatttgtacctcacaaataatgctcttggagatacgggcgtaaggctgctgtgtaaacggctgtcacacccaggttgtaagctccgtgtcttgtggctgtttggcatggatctgaacaaaatgacccattccagattggcggcgctgcgggtgacaaagccttaccttgacattggatgttag

SEQ ID NO: 23898 - DNA, 5796 bp, synthetic construct
  source 1..5796: mol_type = other DNA; note = Synthetic coding sequence
atggccgcccggagcgcccccagctgccacctgcggctggagtgggtctatggatacagggggcaccagtgccggaataatctgtattacactgctgccaaagagattgtttattttgtcgccggagtgggagtggtgtatagccccagagagcatagacaaaaattttatcgaggtcacagcgatgacattatttctcttgcgctacatcccgagagagtgctggtcgccacagggcaggtgggaaaagagccctatatatgcatttgggattcctacaccgtacagaccatctctgtcttaaaagacgtgcacacccacggcatagcctgtctggcgtttgatctcgacgggcagcggctcgtctctgtgggcctggattccaagaatgctgtgtgcgtttgggattggaagcgcgggaaaatgctgtctatggcccccgggcatactgacagaatcttcgacatctcctgggatctgtaccaacctaacaaactggttagttgcggcgtgaaacacatcaagttctggtcactgtgtggaaatgcactgaccccaaagcgaggggtgttcggcaagacaggggatctgcagaccatactatgtctggcctgcgctagagacgagctgacttactctggagctctcaatggcgacatttacgtctggaaaggcattaatttgattaggaccattcaaggagcacacgcagctgggatcttctctatgaatgcttgcgaggaaggctttgctacaggtggacgcgacggatgtattcggttatgggatctgacattcaaacccatcacagttatcgatctccgggagaccgaccaggggtacaaaggactgtctgttcggtcagtgtgttggagaggcgatcacatacttgtagggacgcaggatagcgaaattttcgagatagttgtgcaggagcggaacaaaccttttttaattatgcagggacactgcgaaggagaactttgggcactggccgtgcaccctacaaagcctctcgcagtcactggctccgatgatcgcagtgtacgcatatggtccctggtagatcatgccctgattgccaggtgcaatatggaggagcctataaggtgtgctgctgtgaacgccgacgggatacacttagcgctcggcatgaaagatggtagcttcaccgtgctcagggttcgcgacatgacagaagtggtgcatataaaagaccggaaagaggccatccacgaacttaagtattcccctgacggaacctacctggcagtgggctgtaacgactcttccgttgacatctacggtgtcgcccaacgatataagaaggttggtgaatgccttggatctttgtcattcataactcatttggattggagctctgattctcgctacctgcagacgaacgatggcaatggaaagagattgttctaccggatgcccgggggaaaggaggttacatccacagaagagatcaagggcgtccattgggcgagctggacctgtgtgtctggcctcgaagtgaacggcatatggccaaagtatagcgatattaacgacattaacagtgtggacgggaattatattggtcaggtcctcgtcaccgcagatgattatggcattataaagctgtttcgatatccatgtctaaggaaaggggcaaagttcagaaagtacattgggcactccgcccacgttaccaatgtaagatggtcccacgactatcaatgggtcattagcattgggggcgctgatcactctgtctttcagtggaagttcattccagaaagaaagttgaaggatgctgtccacatagccccccaagagtcactggccgattctcacagtgatgagtctgatagtgacctaagtgacgtccctgaactggactccgaaatcgaacaggagacacagctgacatatcgacggcaggtctataaggaggatctgccgcagctcaaagaacaatgcaaggagaaacagaagagcgctacaagcaaaaggcgcgaacgggccccggggaattcaatacggctgcattttgttcatggctaccgaggatacgactgccgcagcaatctgttttacacccaaatcggggagatcgtatatcatgtagccgcagtgggagtgatctacaatcgccagcagaacacacaacggttctacctgggtcatgatgacgacattctttgcttgactatccacccactcaaagactatgtggctacggggcaggtgggtcgagacccatccatccacatttgggataccgagaccattaagcctctctccatactgaaggggcatcatcagtacggcgtatccgccgtggacttcagtgccgacgggaagcgcctggccagcgtagggattgacgatagccataccgtcgttctatgggactggaaaaaaggcgagaagttgtcaatcgcgaggggtagcaaggacaagatatttgtcgtcaagatgaatccctatgtaccagataagctgattactgcaggtatcaaacacatgaaattctggcgaaaggctggcgacgtgtgtatttggcgtgacatattcttggtcaagactgttaaagcccacgacggccccgtgttcagcatgcacgctctcgagaaggggttcgtgaccggaggcaaggacgggatcgtagctctctgggatgacagttttgaacgctgcctgaaaacctacgcaatcaaaagagctgccttagcaccaggaagcaaaggattactgttggaagacaatccatcgatccgcgccatcagcctgggccacgggcatattttggtgggcacaaagaatggcgaaattctcgaagtggataaatctgggcctattactctgctcgtccagggccacatggagggggaagtctggggccttgcgacgcacccctaccttcccatttgcgcaactgtgagcgacgataaaactctcagaatttgggacctgagtcccagtcattgcatgttagctgtgcgcaagctgaaaaaaggtggtagatgttgttgctttagcccagatggcaaggcactggctgttggcctgaacgacggaagcttcctcatggcgaacgccgatacgttggaggatctggttagctttcaccatagaaaggatatgatcagtgacattagattcagtcctggctcagggaagtacctggccgtggcctctcacgactctttcattgacatctataacgttatgtcctcaaagcgcgtgggtatctgcaaaggcgccacaagttatattacacatatcgactgggatataagggggaaactcctccaagtcaatacgggcgcgaaggaacaactgttctttgaagctccacgcgggaagaaacagactattccttccgtggaggtggagaaaattgcctgggcatcctggactagtgtattgggactgtgctgcgaaggcatctggccggtgattggggaggtgaccgatgtgaccgcttcgtgtctcaccagcgacaagatggtcctggccactggagatgatctgggcttcgtcaagctgttccgctaccccactaagggcaaatttggaaagttcaaaagatacgtggctcacagcacgcacgtgacaaatgtgaggtggacttacgacgattccatgctagttacattggggggcacagacatgagtttaatggtgtggactaacgaaatggagggatacagggaaaagcgcccatgcgactcagaggagagcgatattgattccgaagaagacggcggttacgattccgatgtgactagggagaatgaaatctcctacactataagagccctttctaccaatattcggccgatgctgggaattaaacctcatctccagcagaaagagccctcaatcgacgagcgacctcctgtctctcgggcccctcctcaacccgaaaaactgcagaccaacaacgtcggtaagaaaaagaggcccatcgaagatctggtgcttgaactgatttttggctatagagggcgcgactgccggaacaatgtacattatctgaatgatggagatgacatcatttatcatacggctagcgtcggtattctccataacgtggccaccgggtctcaaagcttctatcaggagcacaatgacgatatcctctgcctcaccgtgaatcagcatccgaaatttatcaacatcgtcgcaactgggcaggttgtgctgagctgctccctgctgacgactgcgccaagcatccacatttgggacgcaatgaataaacagacgctctccattctccggtgctatcactccaagggagtttgttcagtgagctttagcgcaaccgggaaacttcttttaagcgtgggtcttgaccctgagcacacaattacgatctggcgctggcaggagggggcaaagatcgcctcaagggctgggcataaccagcggatctttgtggcggaattccgccctgactctgatacacaattcgttagtgtaggcgtgaaacatgtgaaattctggaccttggctgggcgggctctcttgagtaaaaaagggctgctctcaacactcgaggacgccagaatgcagactatgctggcaatcgccttcggcgccaataacttaacctttactgggaccatttcaggtgacgtttgcgtatggaaggatcatatcctgtgtcgcattgtggcccgcgcccataacggtcccgtattcgctatgtatactactttacgagatggactgatcgtgactggaggaaaggagcggccaagcaaagaagggggagctgtcaagttgtgggaccaagaactccggcgttgccgcgccttccgtctggagaccggtcaggctactgattgcgtcaggtctgtctgtcgggggaagggcaagattcttgtggggacccgcaatgccgagataattgaagtgggcgaaaaaaatgcagcttgtaatatcctcgtaaatggacacgttgatggccctatctggggcctcgctacccatccctctcgtgacttttttctcagcgctgctgaagacggcactgtgagattatgggatatcgccgacaaaaaaatgctgaacaaagtgaacttggggcacgccgctcgaaccgtgtgttatagtcccgagggcgatatggtcgccataggcatgaagaatggagaatttataatactattggtttcctctctcaagatttggggaaaaaagagagatagacgctgcgcaatccacgacatccggtttagtcccgattccagatatctcgcagtaggtagcagcgagaacagcgtggatttttacgaccttaccctgggccccactctcaatagaatctcatactgtaaggatatcccgagcttcgtgatccagatggacttcagcgccgactctagttatctgcaggttagttcaggatgctacaagagacacgtttacgaagtgccgagtggaaaacacttgatggatcatgcagcaatagatcgaatcacttgggccacctggactagtatcctcggcgacgaggttcttggaatttggtctcgccacgccgagaaggcggatgtgaactgtgcatgcgtcagtcatagtgggatctccctcgtcaccggggacgacttcggtatggtcaaactctttgacttcccctgcccagagaagttcgctaagcataagagatttctgggccacagccctcatgtgacaaatatcaggttcacttccggagatcgccatgtagtttcagcgggcggagacgattgctcgctcttcgtgtggaaatgtgtgcacacaccacactag

SEQ ID NO: 23899 - DNA, 429 bp, synthetic construct
  source 1..429: mol_type = other DNA; note = Synthetic coding sequence
atgagcatcagcagcgacgaggtgaacttcctggtgtaccggtacttgcaggagtctggcttctcgcattccgccttcacttttggtattgagtctcacatcagtcagagtaacatcaatggcgccttagtcccaccagcagctcttatctcaattatccagaaaggcctgcagtacgtggaagccgaggtgtcgatcaacgaagatgggacactgtttgacggcagacctatcgaatccctgtccctgatcgatgccgtgatgcccgatgtggtgcagactaggcagcaggcatatcgggataaattggcgcagcaacaggcagccgctgcagccgctgccgcagcagccgctagccagcagggctcagcgaagaacggggaaaacaccgccaatggagaagaaaacggtgcacatacgatcgcctag

SEQ ID NO: 23900 - DNA, 1704 bp, synthetic construct
  source 1..1704: mol_type = other DNA; note = Synthetic coding sequence
atggagttcttcaccatgcccccccggacctggttcatgcggcagctacagcgcatgtggttccttaggccgagcatggctatcatggtgtttcgtatgatagaggagcgccccactcacgctattaccgtcagagtgtcataccttgaaatttacaacgagagcctgttcgacttactgtccactttaccctacgtggggccttctgtcacacccatgactatcgtcgagaaccctcagggagtcttcattaaggggctaagtgtgcatttgacgtctcaggaggaagacgccttttcattactgttcgagggtgaaaccaatcggatcatcgcctctcataccatgaataaaaactcaagccggtcacattgtattttcactatatatcttgaggcccactcacgtactctatccgaggagaaatacatcacgtccaagataaacctggtggatctcgctggatctgagaggctcggcaaatctggaagcgagggacaggttcttaaagaagcgacgtatatcaacaagtccctgtcctttctggagcaggccattattgcactgggagaccagaaacgggaccatatacccttccggcagtgcaagctcacccacgcccttaaggacagccttggcgggaactgtaatatggtcctggttactaatatctacggcgaggcagcgcagctggaggagactctgtcctccctgaggttcgcctcccgaatgaaattagtcacgactgagcccgccatcaatgaaaagtatgatgcggagcgaatggtcaagaacctcgagaaagagctggccctgctgaaacaagagttagcaatacacgatagccttacgaaccgaacattcgtcacgtatgaccccatggatgaaattcagattgctgaaatcaacagtcaggtccggcggtacctcgaggggaccctggacgagatcgatatcattagcttacgccaaataaaggaggtatttaaccagtttcgggtggtgctctcacaacaagagcaggaagtcgagtctaccctgagacggaagtatacattaatcgatagaaacgactttgcagctattagtgccatccaaaaggctggactcgtggacgtcgacggacacttggtaggcgagcctgaggggcagaattttggtttaggagtggcgccctttagtaccaaacccggcaaaaaggctaagtcgaaaaaaaccttcaaggagcccctgaggcccgacaccccgccgtccaaacccgtggcttttgaggagttcaagaacgagcaaggttccgagatcaatcggatattcaaagagaacaagtctattctgaacgaaaggcggaaacgcgctagtgaaacaacccagcatatcaatgcaattaagcgggagatagacgttaccaaggaggcattaaacttccaaaagagtctgagagagaaacagggcaagtatgagaacaaaggactcatgattattgacgaggaggaattcctgttgatacttaagttgaaagacctgaagaagcaatatcgatccgagtatcaggatctgagggacctgcgcgcagagattcagtattgtcagcaccttgtggaccagtgcaggcaccggctgctgatgggtgcaaccgttggtaagaatcttacgtcaggtacaatgtctccactttcttccctccgaacatgcaggtggcactag

SEQ ID NO: 23901 - DNA, 1428 bp, synthetic construct
  source 1..1428: mol_type = other DNA; note = Synthetic coding sequence
atggccgagggcagcgtgatgttcagcgacgtgagcatcgacttctcacaggaagagtgggactgtcttgaccctgtccagagggatctgtatcgagatgtgatgcttgagaattacggcaatttagtctcgatgggactatatacccccaagccacaagttataagcttgcttgaacaggggaaagagccctggatggtcggacgcgaactaacgcggggactgtgcagcgatctcgagtctatgtgcgagaccaagctcctatccctgaaaaaggaggtatacgaaatagaactttgtcagcgtgaaattatgggtctcacgaagcatgggctggagtactcctccttcggggatgtccttgagtataggagtcacctggccaagcagctgggttacccaaatggccacttctcccaagagatcttcaccccagaatatatgccaactttcatacagcagacattcctcaccctgcaccagattataaacaacgaagatcgaccgtacgaatgcaagaagtgcgggaaagctttctcccagaactctcaattcattcagcaccagagaatacacattggtgaaaaatcttatgaatgcaaagagtgcggtaagtttttctcctgtggctcccacgtaaccagacacctcaagatacatacaggcgaaaagccgtttgagtgtaaggaatgcggcaaagccttctcgtgcagttcctatctttcacagcatcagaggattcatactggaaaaaagccttatgaatgtaaagagtgcggtaaagccttctcctactgctccaatctgatcgatcaccaaaggatacacacaggcgaaaaaccctacgagtgtaaagtgtgcggcaaggcattcaccaagagctcacagttgttccagcacgctagaatccatacgggggagaaaccatatgagtgcaaggagtgtggtaaggctttcacccaatcctccaagctggtacagcaccagcggatccacacaggggagaagccgtatgaatgcaaagaatgcggtaaagctttctcttcaggaagcgccctcacgaatcaccagcgcattcatacaggggaaaagccatacgattgtaaggagtgcggcaaagccttcacccagagttctcaactccggcagcaccaacgcatccacgccggcgaaaagccattcgaatgtcttgagtgtggcaaagcatttacccaaaatagccagctattccagcatcagcgaatacacacagacgagaaaccatacgagtgtaatgagtgcgggaaagcgttcaataagtgctcgaatctgacgcgtcacctgcggatacacacaggcgaaaaaccttacaattgcaaagagtgcggcaaagcattctccagcggctcagacctcatccggcatcaggggatccatacaaacaaatag

SEQ ID NO: 23902 - DNA, 462 bp, synthetic construct
  source 1..462: mol_type = other DNA; note = Synthetic coding sequence
atggcccggaacaccctgagcagccggttccggcgggtggacatcgatgaattcgatgaaaataaattcgtggatgagcaggaggaagctgctgcagcagctgcagagccaggcccagatccgtccgaggtggatggcctgctgaggcaaggggatatgcttagagcattccacgccgccctgcgtaatagccccgttaacaccaagaaccaggcagtgaaggaaagagctcagggggtcgtgctgaaggtgttgaccaatttcaaatcatccgagatagagcaagccgtccagagcctcgacaggaacggcgttgacctgctgatgaagtacatatacaaaggatttgaaaagcccactgagaacagctccgctgtgttgcttcagtggcatgagaaggcacttgcagtgggggggctaggatccattatacgagtcctgaccgctagaaagacagtttag

SEQ ID NO: 23903 - DNA, 2616 bp, synthetic construct
  source 1..2616: mol_type = other DNA; note = Synthetic coding sequence
atgggcgagggcggcctgccccccgccttccagctgctgctgcgggcctgcgatcagggggacaccgaaaccgcccgccggcttctcgagcctggtgccgcagaacctgctgaaagaggcgccgaacctgaggcgggggccgagcccgctggggctgaagtggccggacctggcgccgcagccgctggggcggtcggagcaccagttcctgttgattgctccgatgaggccggcaatactgcactccaatttgcggcagctggtgggcatgaaccgctggttagattcctgctgcgacgaggcgccagtgtcaattcgcgcaatcattatggttggagtgccttgatgcaagcggctaggtttggacatgtctctgtagcgcatctgctcctggatcatggtgctgatgtcaatgcccaaaaccgtcttggagctagcgtgttgaccgtggcgtcccgcggtggccatctgggggttgtgaaactgctgctggaagcaggggccttcgtggaccaccaccatccctcgggcgaacagctgggtctgggaggctcacgcgatgaacctctcgacattaccgccctgatggctgcaattcaacatggacatgaggccgtagtgcggctactgatggagtggggagccgatccgaatcatgctgcccgcacagtgggctggtcccctctcatgctggccgcattgactggtagactcggggtggctcagcagctggtggagaagggtgccaaccccgaccatctgtcagtgctggagaagactgcctttgaggtggcccttgactgcaagcaccgtgacttggtggattacctagatcccttgaccaccgtgcgtcccaagaccgacgaggaaaaacgacggccagacatctttcacgcactcaagatgggtaacttccaactcgtgaaggagattgccgacgaagacccttcccacgtgaacctcgttaacggtgatggggcgacacccctcatgctggccgcggtcaccggccagttggctttagtgcagctgctggtagaacgacacgccgacgtcgacaagcaggactcagtgcacgggtggacagccctcatgcaagcaacttatcatggtaacaaagaaattgtcaaatacctactgaatcaaggagctgatgtgaccctccgagccaagaacggatatactgcctttgacctagtgatgctgctgaatgaccctgatacagaactcgtgcggttgttggcatcagtatgcatgcaggtgaacaaggacaaaggtcgtccttcccatcaaccacctctgccccacagcaaggtgcgacaaccgtggtccatcccggtcctacctgatgacaagggtgggttgaagagctggtggaaccgcatgtctaatcggtttcgtaaactcaaactgatgcagacacttcctcggggactctcttctaatcagcccttaccctttagtgacgagccagaacccgccttagactctacaatgcgggccgcaccacaggataaaacctcacggagcgctctgccagacgcagcccccgtgaccaaggacaatggcccaggcagtaccaggggggaaaaggaggacaccctactgacaacgatgctgagaaacggcgctccgctcacacgtctcccgagtgacaagctcaaggcggtgatccctcctttcttgcctccaagctcctttgagctgtggagctccgaccgctcccgaaccagacacaacggtaaggctgatcctatgaagaccgctcttcctcagcgagctagccggggacacccagtcggaggcggcggaaccgacaccacgcccgtgaggcctgtgaagtttccttcccttccgagatcccctgccagctctgccaactcaggcaatttcaaccactcgcctcactcatctgggggctcttcaggggtcggcgtgtctcgacacggcggggaactacttaacaggtctgggggttccattgataatgtcctgtcccagatcgcagcccaacggaaaaaagctgccggcctgctggaacaaaagcctagtcataggtccagccccgtcgggcctgcacccggcagctccccctccgagctcccagcttctcccgctggcgggtcagccccggttggcaagaagttagagaccagtaagcgcccccccagcggcaccagcacaacttcaaaatcaacaagcccaactctcactccatcaccgtcaccgaagggccacactgccgaatcttcagtgtcttctagcagcagtcatagacagtccaagtcttcaggaggttcatcaagcgggactattactgatgaggatgaactgaccggaatcttgaagaagctctcccttgagaagtatcagcccatcttcgaggagcaggaagtagatatggaagcctttcttaccctgacagacggggatctgaaggaacttggaatcaaaaccgatggaagccgccagcagattttagccgctatcagcgaactcaatgccggaaagggcagggaacggcaaatcctgcaagagacaatacacaactttcacagtagctttgagagctccgcgagtaacaccagggcgcccggaaacagcccatgcgcctag

SEQ ID NO: 23904 - DNA, 1359 bp, synthetic construct
  source 1..1359: mol_type = other DNA; note = Synthetic coding sequence
atgagcgccagcctgaactacaagagcttcagcaaggagcagcagaccatggacaacctcgagaaacagctgatctgtccaatctgcctggagatgttcacaaaacctgtcgtgattcttccgtgccagcacaacctctgtcgcaaatgcgcctcagatatctttcaggcctccaatccatacctgcctactaggggcggcacgacaatggcctcaggaggccgcttccggtgtcccagctgcaggcatgaggtcgttctggaccggcatggcgtctatggactccagcgaaacttactggttgagaatataattgatatctacaagcaggaaagtactagacccgaaaagaagagtgatcagccaatgtgtgaggaacacgaggaggagcggattaacatatattgcctcaactgtgaggtgcctacctgtagcttgtgtaaagtcttcggcgcacataaggactgccaggtggcccctttgactcacgtttttcagcgccaaaagagtgagctatccgatgggattgcaatattagtgggctccaatgaccgcgttcaaggcgtgatttcccagctggaggacacatgcaaaacaatcgaagagtgctgtcgcaagcagaaacaggagctgtgtgagaaattcgactacttatacgggatattagaggaacgaaaaaatgaaatgactcaggtgatcacacgcacccaggaagagaagctggagcacgtacgggctctgattaagaagtatagcgaccatttggagaatgttagcaagcttgtggaatccggtatccagttcatggacgaacccgagatggctgtctttttgcagaacgccaaaacattactgaagaagatcagcgaagcttctaaggcctttcagatggaaaagattgagcatggatacgaaaacatgaatcatttcacagttaacctcaacagagaagagaaaattattcgggagattgacttttaccgcgaggatgaggacgaagaggaagaagaggggggggagggcgagaaggagggggagggagaagtcggcggagaggctgtggaggtggaagaggtcgagaacgtccagactgaatttccaggcgaggatgagaatccagagaaagcttcggagctgtcacaagtggaactccaggcagcaccgggcgctctccctgtgtcctctcccgagcccccccctgcactccctcctgccgccgatgccccagtgactcaaatcggctttgaggcacctcctttgcaggggcaggccgcagcgccagctagcggaagtggtgccgactctgagcctgccagacatatcttttccttttcttggctgaattctctcaacgaatag

SEQ ID NO: 23905 - DNA, 492 bp, synthetic construct
  source 1..492: mol_type = other DNA; note = Synthetic coding sequence
atgcccagcatcaagctgcagagcagcgacggcgagatcttcgaggttgatgtagagattgccaaacaatctgtgacaatcaaaaccatgttagaggacctgggaatggacgacgagggcgatgatgatccggtgccattacccaacgtcaacgccgcaatcctcaagaaggtcattcaatggtgtactcaccacaaggatgatccgcccccacctgaggatgacgaaaacaaggagaagcgtactgatgatattcctgtctgggatcaagagttcctgaaggttgatcagggcacgttgttcgagctgattctggcggcaaattatttggatatcaagggcctgcttgacgtgacatgcaaaacagtagcgaatatgataaaagggaaaacccccgaagaaatacgaaagacatttaacatcaaaaacgactttacggaagaggaggaggctcaagtgagaaaagaaaaccagtggtgcgaggaaaaatag

SEQ ID NO: 23906 - DNA, 1200 bp, synthetic construct
  source 1..1200: mol_type = other DNA; note = Synthetic coding sequence
atggccgcccccagccccagcggcggcggcggcagcggcggcggctctgggtcgggaactccagggcccgtgggttcacccgccccagggcaccccgctgtgtcaagcatgcagggaaagaggaaagctctaaaactcaattttgctaacccaccattcaagagtactgctcgtttcacccttaaccccaatcccacgggagtgcaaaatccgcacattgagagactacgcacccacagcatcgagagcagcggcaagctgaagatcagccccgaacagcattgggactttaccgccgaagacctgaaggatcttggcgaaattgggaggggggcgtacggttcagtcaacaagatggtacacaagccgagcggacagattatggccgtgaagaggatccgctccacagtggacgaaaaagagcaaaagcaactcctgatggatttagatgtggtgatgaggtccagcgactgcccttacatcgttcagttctatggagcactcttccgcgaaggggattgctggatctgcatggagcttatgagcacaagcttcgacaaattttacaaatacgtctattccgtgctggacgatgttatccctgaagagattctcggcaaaatcacacttgccacagtcaaggcactgaaccatcttaaggagaacctgaagatcattcacagagacatcaagccaagcaatatcctgcttgatagatctggaaacatcaaactctgcgatttcggaattagcggccaactggtcgattcgatcgctaaaactcgcgatgcagggtgtcgaccctacatggccccagagaggatcgacccctccgcctcgcggcaggggtatgatgtgcgcagtgacgtctggagtttggggatcaccctgtatgagttggccacaggcagattcccgtatccaaagtggaacagcgtttttgaccagctcacccaggttgtaaagggggatccaccccagctctccaattctgaggagagagaatttagcccgtctttcattaattttgttaatttgtgtctgaccaaggatgaaagcaaaagaccgaaatacaaggagctgctgaaacaccccttcatccttatgtatgaagagcgcgcagtggaggtcgcctgttatgtttgcaagatactagatcagatgccagccaccccctcttctcccatgtacgtggactag

SEQ ID NO: 23907 - DNA, 1122 bp, synthetic construct
  source 1..1122: mol_type = other DNA; note = Synthetic coding sequence
atggcccaggagagccccaagaacagcgccgccgagatccccgtgacaagtaacggggaggtggacgactctagggaacacagttttaaccgggaccttaagcattcacttccttcaggcctcggactgagtgagacacaaattaccagtcatggatttgataacactaaagagggggtcatcgaggctggtgcttttcagggtagtccggctccgccgctaccatctgtgatgagtccttcccgagtagctgcttcccgactggcacaacagggtagtgatctgatcgtcccagctggaggccagagaacacagacaaaatccgggcccgtgattctggcagacgagataaaaaaccccgcaatggagaagctagagttagtgcggaagtggtctctgaatacttacaagtgtaccaggcagattatcagtgagaagctgggcaggggatccagaactgttgatttggaactcgaagcccaaatcgatatccttagggataataagaagaagtatgaaaacatcttaaaactggcccagacgctgagcacacaactgttccagatggtgcacacccagcggcagttgggagatgccttcgccgacctgtcactgaaaagtttggagctgcatgaagaattcgggtacaacgctgatactcagaagctccttgctaaaaacggcgaaacccttctcggagccattaatttcttcattgcatcagtgaacacgctggtgaataagacaatagaagacacccttatgactgttaaacaatacgaatccgccagaattgagtatgatgcttatcgcactgacctggaagagcttaacttggggccacgtgacgccaatactcttccgaaaattgagcagtcacagcacctatttcaggcacataaggagaagtatgacaagatgcggaatgacgtgtctgtcaagctgaagtttcttgaggagaacaaagtaaaagtgctgcataatcagctcgtgctgtttcacaacgccatcgccgcctattttgccggcaatcagaaacagcttgaacagacattaaagcagttccatatcaagctcaaaacaccaggtgtggacgccccatcatggctggaggaacagtag

SEQ ID NO: 23908 - DNA, 654 bp, synthetic construct
  source 1..654: mol_type = other DNA; note = Synthetic coding sequence
atgtacagcctgaaccaggagatcaaggccttcagccggaacaaccttcgcaagcagtgcactagggtcactacactaacaggtaagaaaatcatcgaaacgtggaaagatgccaggattcatgtcgtcgaggaagtggaaccttcctctggcggggggtgtggctatgtgcaggatttgagcagcgatttgcaggttggcgtgattaaaccatggctgctgcttggctcacaggatgctgcccacgatctcgacacactaaagaagaacaaggtgactcacattctgaacgtggcgtatggggtcgagaacgcctttctaagcgattttacatacaagagtattagtatcctggatcttcccgagactaacatattgagctactttccggagtgctttgagttcattgaagaggctaagagaaaagacggagtcgtgctggtgcactgcaacgctggcgtttccagagcagccgcaatcgtcatcggctttctgatgaactctgagcaaacctcatttaccagtgccttttctctcgtgaagaacgctcggccgagtatctgccccaattctggttttatggaacagctccgcacttatcaggaaggcaaggagtccaataaatgtgaccgtatccaggaaaactcttcatag

SEQ ID NO: 23909 - DNA, 2679 bp, synthetic construct
  source 1..2679: mol_type = other DNA; note = Synthetic coding sequence
atgctgcggaccgccggccgggacggcctgtgccggctgagcacctatcttgaggagctggaggcggttgaactcaagaagtttaagctctacctcgggaccgctacagagctgggcgagggcaaaatcccatggggtagcatggagaaggcaggaccgctggagatggcacaattgcttattacacattttggaccggaagaggcctggcgactcgcccttagcacattcgagcgcatcaaccggaaagacctgtgggaacgcggacaacgggaagacttggtgagagatacgccccccggcggcccgagcagcctggggaatcaatctacatgtttgctcgaggtgtctctagtgacccctcgaaaggaccctcaggagacgtaccgggactatgtgagaaggaaattcagactgatggaagaccgtaacgcaaggttgggggagtgcgtcaatctgtcccaccgatataccaggttactgcttgtcaaggagcattccaatcctatgcaggtgcagcaacagttacttgatactggcaggggccacgcgcggaccgttggccatcaggcgagtccgattaagatagagacactattcgagcctgacgaagagcggccggagcccccccgcacagtcgtgatgcagggcgctgctggtatcggaaagtccatgctggcgcataaagttatgttggactgggcagatggcaagcttttccagggccgattcgactacttgttttatattaattgcagagagatgaatcagtctgccacagagtgctctatgcaggacctgatttttagctgctggcctgagccatctgcacccctgcaggaactgatccgcgtcccagagcgcctcttgtttataatcgacggattcgacgaactgaagccatctttccacgatccacaggggccgtggtgtctgtgttgggaggagaagaggccaacagagctcctcctcaattcactaatacgcaagaaacttctgcctgagctgagcctgctcattaccacccgccccaccgctttggaaaagttgcaccgtctgctggagcaccctaggcacgtcgagatcctcggattctccgaagccgagagaaaagagtacttttacaaatatttccataacgccgagcaggcgggacaggtgttcaactacgtcagggacaacgagccactgttcacaatgtgttttgttcccctcgtctgttgggttgtgtgtacatgtctgcagcaacagctggaaggaggcgggctgctccgacagacgagtaggaccacgacggccgtctatatgctgtatctactgagcctgatgcagccaaaacccggggcgccacgccttcagcctccacccaatcagcgggggctgtgctccctcgccgccgatggactgtggaatcagaagattctctttgaggaacaggacctgcgcaaacacgggcttgatggagaagacgtgtccgcctttcttaatatgaacatattccagaaagacatcaactgcgagcgatattactctttcatccatctgtcttttcaggagttctttgcagcaatgtactatatcctagatgaaggggaaggcggtgctgggccagaccaagacgtcacgaggttattgactgaatatgccttcagcgaaagatcttttctagcgttgactagtagatttctctttggattattgaacgaagaaactcgaagccacctggaaaaaagcttgtgttggaaggtttctccacacataaaaatggatttgttgcagtggatacagtcaaaggcccagtctgacgggtctacactgcagcaaggttcactcgagttcttttcttgcctctatgagatccaggaagaggagtttatacagcaggccctcagtcacttccaggtcattgtcgtaagcaacatcgcttcaaaaatggagcacatggttagctccttctgcctcaaacgctgtcgctcagctcaggtgttacatctctacggggcaacatacagcgccgacggggaggacagggcacgttgttctgccggagctcacactctccttgtgcagttgcccgaaagaaccgtccttctggacgcgtacagcgaacaccttgccgccgctctctgcactaacccaaatctcatcgagctgagcctttatagaaatgctctggggagcagaggagtcaaactcctttgtcaggggctgcgccatcccaattgcaagctacagaatcttaggcttaagagatgccgtatttctagctcagcatgtgaagatctttccgccgccctcatcgccaacaaaaacttaacccgtatggacctgtccgggaatggagtgggtttcccaggcatgatgctcctatgcgaaggattgcgccacccacagtgtagacttcagatgatccagcttcgcaagtgccagttggagtccggagcatgtcaggagatggcaagtgttctcggcactaatcctcatcttgtcgaactggacctaaccgggaatgcacttgaagatcttggactgagattactatgccagggcctcagacaccctgtgtgcagactacgcaccctctgctggatgctgtttgggatggatctgaacaagatgacacactccaggctcgccgctctcagggttaccaagccatacctggacatcggttgctag

SEQ ID NO: 23910 - DNA, 945 bp, synthetic construct
  source 1..945: mol_type = other DNA; note = Synthetic coding sequence
atgcagaccttcctgaagggcaagcgggtgggctactggctgagcgaaaaaaagattaagaagctcaacttccaagcgtttgccgaactctgccgaaaacggggtatggaagtagttcagcttaacctaagtaggccgattgaggagcagggccccctggatgtgattatacataaattgacggacgtgattctagaggccgatcaaaatgacagtcagagcctggaactggttcaccgcttccaggagtatattgatgcccaccccgagacgattgtgttggacccgcttcccgcgatacgcacactgcttgacagaagcaaaagctacgaattaatcaggaagattgaggcgtatatggaggacgacagaatttgcagtcccccttttatggaacttacttcgctctgtggtgatgatacgatgagactcctggagaagaacggcctgacttttccctttatttgcaagacacgcgttgcccacggtaccaatagccacgagatggccatcgtattcaaccaggaggggcttaatgctatacaacccccatgtgtggtccagaattttataaaccataatgctgtgctctacaaggtcttcgtggtcggggaatcgtacacagtggtgcagcgcccttccctcaagaacttcagcgcaggaactagcgatcgcgagtcaatcttttttaattcacataatgtttctaaacccgaatctagctcagttctcaccgagcttgacaagattgaaggcgtgttcgagagacccagcgatgaggtgatccgcgaactctctcgtgccctaagacaggctctgggagttagccttttcggcattgatataattattaataaccagacaggacaacatgctgtcattgacattaatgctttcccaggggactgccaagtgtgttttattgaggggtggaagaccgactag

SEQ ID NO: 23911 - DNA, 630 bp, synthetic construct
  source 1..630: mol_type = other DNA; note = Synthetic coding sequence
atgcccgtggccgtgatggccgagagcgccttcagcttcaagaagctgctggaccagtgcgagaaccaagagctcgaagcgcccggcggcatagccaccccgcctgtttacggccagctgcttgcgctttacctgttacacaacgatatgaataatgcccggtatctctggaagcgaataccccccgctatcaagagtgcaaatagcgagctggggggtatatggagcgtaggccagaggatctggcaacgggactttccaggtatttatacgactatcaatgcacaccagtggtcagaaaccgtgcagcccatcatggaagcattacgggacgccacacgacgcagggctttcgccctggtcagccaggcctacacaagtataattgccgacgacttcgccgcgtttgtagggctcccggtggaggaggctgtgaaaggcatactggagcagggctggcaagctgattccactacccgcatggtgctaccacgaaaacctgttgctggcgccctcgacgttagtttcaataaatttattccactgagcgagccagctcccgtcccccccatacccaatgagcaacagcttgctagattaactgattatgtggctttcctggagaactag

SEQ ID NO: 23912 - DNA, 4935 bp, synthetic construct
  source 1..4935: mol_type = other DNA; note = Synthetic coding sequence
atgttctggtgcggcacctgcttcgtgaccaacaacatgaagggctccgaagtgtccctggaaaaaaagaaaaagattaagatgcccgtgaaaagactccgagaagtggtctcccagaatcatggtgatcacttggttctgctcaaggacgagctgccttgcgtgcctccggcactcagtgcaaacaagaggctgcccgttggcacagggacttccctgaacggcacttcaagagggagctccgacctgacgtccgcacgaaattgttaccagccactattggagaacccaatggtgtccgagtccgatttttctaaggacgtggctgttcaagtgctgccacttgacaagatcgaagagaataacaaacagaaggcgaacgacatcttcattagtcagtacacgatgggtcagaaggatgcactgcggaccgtgcttaagcagaatgtgtcactctgcctcacagggtggtctgaccactctggggtgattaccacacactgctccctatatttactcaggctgatgcgcagcagccacttgtcactgccctcatcttgggactacagagcccagagcatgccggttttcaaagaagtgaaagtgcatctcttggaagacgccggcattgagaaagacgctgtcacccaggaaacccggatcagtccatccggcatagactcggccaccactgtggctgccgccacagccgctgcgatcgctacagctgcacctttgattaaggtgcagtcagacctagaggcaaaagtgaacagcgttacagaactgttgagtaagctgcaagaaacagacaaacacctccaaagagtgaccgagcaacaaacttctatacaaagaaaacaggaaaagttacactgccacgatcacgaaaaacagatgaacgtttttatggagcagcacatccgccacctggaaaagctgcagcaacagcaaatcgatattcagacacacttcatctctgccgctctgaagacgtcgtcgttccagcctgtctctatgcccagcagccgcgccgtggaaaaatactcagtgaaacccgagcaccctaatctgggatcatgtaaccccagcctgtataacacgtttgcttctaaacaggccccactcaaagaagttgaagacactagctttgataagcagaaatctcctctcgagactccggcccccagacgcttcgccccggttcccgtgtctcgggatgatgagctgtctaagcgggaaaatctgttggaggagaaagagaatatggaggtaagctgtcaccggggaaatgtgcgcctcctagagcagattctgaacaacaacgatagtctgactaggaaatcggaatcaagcaataccactagtctgaccaggagcaagattggctggaccccggaaaaaacaaatcggttcccctcgtgtgaagagttggaaacaaccaaggttacgatgcagaagtccgatgacgtgcttcatgatttgggacagaaggagaaggagacaaactcaatggtccagcctaaggaatccctttccatgctcaaactcccagatctccctcagaactcagtgaagctgcagaccacaaataccaccaggtccgtgctcaaagacgccgaaaaaatcctcaggggcgtccaaaacaacaagaaggttctcgaagagaacctggaggctatcattcgcgccaaagacggggcagcaatgtattctctgataaatgccctgtccacgaaccgcgagatgtctgagaagatacgaataagaaagactgtcgacgaatggatcaagactatctccgcagaaattcaagatgaattgtcacggactgactacgagcagaaacgatttgaccagaagaatcaaagaacaaagaaagggcagaacatgactaaagatatacggacaaacactcaggacaaaacagttaacaagagcgttattccgcggaaacacagtcagaagcagatagaagagcacttccggaacctccctatgcgagggatgcccgcgagctcattgcaaaaggaacgcaaagaaggactcctgaaggccaccaccgtgattcaggacgaagattatatgctgcaagtgtacggtaaacccgtctatcagggacaccgatccactctcaaaaaagggccatatctcaggtttaactctccctctcccaagagcagaccgcagcgaccaaaggttatcgagcgcgttaaaggaacaaaagtgaagtctatccgcacacagactgatttctatgctaccaagcctaagaagatggattccaagatgaaacacagcgttccagtccttccccacggggaccaacagtacctgttctctccatcaagggagatgccaacattctccggcacgctggaaggccacctgattcccatggcaatcctgttgggtcagactcagtcaaactcagatacaatgcctcccgcaggtgtgatcgtgagcaagccgcaccctgtcacagttacaacatcgatcccccccagcagcaggaaggtggaaactggagtcaagaagcccaacattgctattgtggaaatgaagtccgaaaaaaaggatcccccccagctcaccgttcaagttctcccttctgtggatatcgacagcatctctaactcctccgccgatgtgctgtctccgctgtcatctcccaaagaggctagtctgccccccgtacagacttggatcaagacccccgaaattatgaaggtggatgaggaggaggtaaagttccctgggacaaatttcgatgaaataatagatgtcattcaggaggaggagaagtgtgatgagatcccggattccgaacccattctcgagttcaacaggtccgtcaaagccgactccacaaagtataacggcccaccctttcccccggtggcatctactttccagcctaccgcagatatcctggacaaggtcatcgagcgtaaagaaaccctggaaaattcattaattcaatgggtggagcaagagatcatgtccagaatcatctcgggactgtttccagtgcagcagcaaatcgctccctctattagcgtaagcgtgtcagaaacctctgagcccctgactagtgacatagtggaaggtacctcctctggcgcgttgcagctgttcgtggacgctggtgtacctgtgaattccaacgttattaaacatttcgtgaacgaagccttagccgaaactatcgcggtgatgttaggagacagggaggctaagaaacaaggcccagttgcaacaggcgtgtctggggatgctagcaccaatgagacctatctgcccgctagagtgtgtacccccctcccgacgccccagcccacaccaccatgtagtccgtcttcccctgctaaggaatgcgtgctcgtcaagactccagattcttccccttgcgatagtgatcacgatatggccttcccagtgaaggagatctgtgccgaaaagggggacgatatgccagctattatgctggtaaatacacctacggtcacccccacaaccacaccacccccagccgctgccgtgttcaccccgacattgagcgacatcagcatagacaaactgaaagtttccagcccggaactgcccaaaccatggggtgacggagacctgccactcgaggaagaaaatcccaacagtcctcaggaggagctgcacccaagagcaattgtgatgtccgtggctaaggatgaagagccagagagtatggacttcccagcacagccccccccgcccgagcctgtcccattcatgcccttccctgccggtaccaaagctccttccccttcccaaatgcccgggtccgattctagtactttagagagtactttgagtgtgaccgtgaccgagaccgaaaccctcgataagcctatttcagaaggcgagatcctgttttcttgcgggcagaagctggcccccaaaattctggaggacattggactgtacctcacgaatctgaatgatagtctatctagtaccctccacgacgccgttgaaatggaggacgatcctccttccgagggtcaggtcattcggatgtctcataagaagttccacgccgacgctattctctcttttgctaaacagaaccaggagagcgccgtgagtcagcaagccgtctaccacagtgaagatctggaaaacagcgttggcgaattatctgaaggtcaacgcccccagctcactgctgcggctgagaatatactcatgggacacagcctctatatgcaaccccccgtcacaaacactcagtccctggaccaacaatgcgatccaaaacccttgagccgacaattcgacaccgtgtcaggctcaatctacgaggattcttgcgcttctcatggacccatgtctctgggagaattagagttggaaccaaactctaaactggtcttgcctaccacattactgaccgctcaggaaaacgacgttaacctgcccgttgcggcagaagacttttctcaatatcaactgaagcagaaccaggatgttaaacaggtggaacacaagccctctcagagttatcttcgagttcgcaacaagtctgacattgcgcccagccaacagcaggtctctcctggagatatggacaggactcagatcgagctaaacccgtaccttacctgtgtgttttccggacttggcgtacatgtgaagaaagtcagctgcataggaaagctggggctctggaggttcgtaatacagattatcagcagtcccagatgggagagctccgccaccctgcggtttacagatgctccgtgccaagacgtttcggatgcagctgtctccgagccccgcggactgctgagtgtgagcgaaagccagcacaacgccggaggtcacggggtttttgggggaaggtatcttctgaacggcaagcgtcaacccgcgcagtgtttgtgtcattggttttag

SEQ ID NO: 23913 - DNA, 3138 bp, synthetic construct
  source 1..3138: mol_type = other DNA; note = Synthetic coding sequence
atgctgaccgtgcaggtgaagaccagcagcgccatcgagctgcccgactcactggcgttcttatggataatcccaatgtggtactgcgaggggaaggaacttgagaattctccagatattcatattgtccaggccggcaatctgcacagtctcactatcgcggaagcgtttgaggaagatactgggagatatagttgcttcgcttccaacatttacgggaccgatagtaccagcgcagagatctacatcgagggcgtctcaagttccgacagtgagggcgaccccaataaagaggaaatgaatcgaatacaaaagcccaacgaagtgtcaagcccacccaccacctcagctgtcattcctcctgcggtgccccaggcgcagcacctagttgctcagcctcgcgttgctacaatccagcagtgtcagtcccccacaaactatttacaaggtctcgacggaaagccaattatagccgctccagtttttactaagatgttacaaaacctttctgcctctgaagggcagctggtggtgttcgagtgccgagttaagggcgcacccagccctaaagtcgaatggtatagagagggcactctgatcgaggactcccccgattttcggatcctgcagaaaaaaccaaggagcatggccgaaccagaggaaatttgcactctggtgattgccgaggtgttcgcagaagatagtggctgcttcacctgtaccgcttccaacaagtatgggaccgttagctccatcgcccagctgcatgtgcgaggcaacgaggatctgtctaacaacggctccctccattcagcgaattccaccacaaatctggccgccattgagccgcagccaagcccaccgcactccgaacccccatccgtggagcaacctcccaaacccaaacttgagggagttctggtcaaccacaacgagccccgctcctcctcccgaatcggcctgcgcgtccacttcaatctccctgaggacgacaaaggatcggaggcctcatccgaggccggggtggtgacaacccgccagactaggccagatagcttccaggagcggtttaacgggcaggctactaagactcccgaacctagctcccccgtaaaagagccgccgcctgtactggctaaaccaaagctagattctacgcagctgcagcagctgcacaatcaggtgctgttagagcagcaccagttacaaaaccccccaccttcaagtcctaaggagtttcccttctcgatgacggtgttgaactctaatgcgcccccagctgtaacaacctcttcaaagcaggtgaaagcgccttcttctcagacattcagcttggcccggcccaaatatttttttccctcaacaaatacaaccgctgcaaccgtcgcgccatccagctccccggtcttcaccctgagctcaactcctcagactatccagaggaccgtgtccaaggagtcactgctggttagccaccctagtgtccagactaaatctcccggcggcctgagcattcaaaatgaacccctcccaccgggccctactgagcccactccgcctccttttactttcagtatcccatctggtaaccagttccagccccggtgtgtcagccccatccctgtctcacccacctcacgaatccagaacccggtggcatttctctctagcgtgctcccttcactgcctgcaatcccccccaccaatgcgatgggactcccacggtctgccccttccatgccttcacagggcttagctaagaaaaacaccaagagtccacagcctgtgaatgatgacaacatacgggagacaaagaacgctgtaattcgcgatctgggaaagaagataactttctccgatgtccggcccaatcagcaagaatataagatctcgagttttgagcagcgcctgatgaacgaaatcgagtttcggcttgaacggactccagtagatgaaagcgacgatgagatccagcacgatgaaatacctactgggaagtgcattgctcccatctttgataaacgcctgaagcatttccgcgtcacggagggcagcccagtaaccttcacgtgcaagatcgttggcatcccagtgcctaaggtgtactggtttaaggacgggaagcagatctcaaagaggaacgagcactgtaaaatgcggagagagggcgacggcacatgttcactacatattgagtctactacttccgacgatgatggcaattacaccattatggctgccaacccgcagggacgcatttcctgctctggccatttaatggttcagtccttgcccattagatcacggcttacgagcgccggccagtcccatcgcggaaggagccgagtccaggaacgggacaaagagcccttgcaggagcgctttttccgccctcattttttgcaggccccgggtgacatggtggcccacgaagggcggttatgccgcctggactgtaaggtttccgggctgccacctcctgagcttacctggttgcttaacggacagccggtcttgccagatgcctcccataaaatgctcgtgcgtgaaactggagtccactccttactaatcgaccccctgacccagcgggacgctggcacctacaaatgcattgcgacaaacaaaacgggacagaatagcttttcactggagctctctgtggtcgcaaaggaggttaaaaaggccccagtgattctggaaaaactccaaaattgcggcgttccggaaggtcacccggtgcggttagaatgcagggttattggcatgccaccacctgtgttttattggaaaaaggacaatgagaccatcccctgtaccagggagaggatatctatgcaccaggacacaactggttacgcttgcctcctgattcagccagccaagaaaagcgatgccggttggtacacactctcagctaagaacgaggccggcattgtgtcttgcactgcgagacttgacatctacgctcagtggcaccaccagatcccgcctcccatgagtgtcaggccatctggctcgaggtacggcagtctcaccagcaagggcctggacatattttctgcttttagcagtatggagagtacaatggtatattcctgctcctcccggagtgtagtggaatctgatgagctttag

SEQ ID NO: 23914 - DNA, 951 bp, synthetic construct
  source 1..951: mol_type = other DNA; note = Synthetic coding sequence
atgacccccagcgagggcgcccgggccggcaccggccgggagctggagatgctggactccctgctagccctcggcgggctagtgctgttacgcgacagcgtcgagtgggaggggcggagtctgctgaaggctctggtcaagaagtcggcgctttgtggggagcaggtgcatattcttggttgtgaggttagtgaggaagaattcagagaaggattcgactctgatatcaataacaggctggtatatcacgacttttttcgagatccattaaactggagcaagaccgaggaggcttttcccggcggacccctgggcgcattgagagcgatgtgtaagcggacggaccccgttcccgtgaccattgctctggacagtctgtcgtggctgttgctgcggcttccttgcaccaccctttgtcaagtacttcacgccgtgtcacaccaagactcctgccccggtgacagttcaagcgtcggtaaggtgagcgtgctgggactgctccatgaagaactccacggccctgggcccgtgggggccctctcctccctggctcagacagaagtgaccctgggggggacgatggggcaggcctctgcacacatactctgccgcaggcctcggcagcggcccaccgaccagactcagtggtttagtattctacctgacttctcattggatcttcaagagggccccagcgtggaaagtcaaccctatagcgatccccatatcccacctgtagatcctacaacccatctgactttcaatttgcacctgagcaagaaagaaagagaggctagggatagccttatattgccatttcagttctcatcagagaaacagcaggccctgctcagacctcgccccgggcaggccacaagccacattttttacgagcctgatgcgtatgatgacctggaccaggaagatccagacgacgatcttgatatttag

SEQ ID NO: 23915 - DNA, 1473 bp, synthetic construct
  source 1..1473: mol_type = other DNA; note = Synthetic coding sequence
atgaacggcgccctggaccacagcgaccagcccgaccccgacgccattaagatgtttgtcggtcagataccacgtagttggagtgaaaaagaacttaaggaactgtttgagccctacggagcagtctatcaaataaatgtactgagagaccgctcgcaaaaccctccacagtctaaaggttgctgtttcgtcacattttacactaggaaggcagcgctcgaagcccagaacgcccttcataacatcaagaccctgcctgggatgcaccacccgatccaaatgaaaccagcagactccgagaagtcaaacgcggttgaagatcggaaactattcattggcatggtgagcaagaaatgcaatgaaaacgatattcgggtcatgttctctcccttcggacagattgaggagtgtcgaatattaagaggccccgacggtctctcacgggggtgcgccttcgtaacattttctactagagcgatggcacagaacgccatcaaggctatgcatcagtctcaaactatggagggctgttcctctccaatcgttgtcaagttcgccgatactcagaaagacaaagagcaaaggcggctacagcaacaacttgcacaacaaatgcaacaactgaataccgctacctggggtaatctgacagggctggggggcctgaccccccaatacctcgcactactgcagcaggcaacgtcttcaagcaacctgggggccttctcaggcatccaacagatggctggaatgaatgctttgcaacttcagaatctagctaccctcgccgcagctgccgccgcggcccaaacatctgccacctctaccaacgcaaaccccctgtcgaccactagcagcgccctgggagccctgaccagccctgtggctgctagtacccctaactctacggccggcgccgccatgaacagccttacttcactcgggactctgcagggcctggctggagccaccgtggggcttaataacattaatgccttggccgtggcacagatgttgagcgggatggcagccctaaacgggggactgggcgccaccggcttgacgaatggtacagcaggaacaatggatgcgctgacacaggcatacagcggaatacaacagtacgccgcagccgccctgccaacattgtactctcagagccttctccagcagcaatccgcggccggttctcaaaaggagggccccgagggcgcgaatctattcatctaccatctcccacaagagttcggcgaccaggacattctgcagatgttcatgccctttgggaacgtgattagcgccaaagttttcatcgataagcagactaacctctccaaatgttttggattcgtctcgtatgacaatcccgtcagcgctcaggcggctattcaggccatgaacggtttccagatcggaatgaagcggctgaaggttcagcttaaaaggagcaagaatgacagtaaaccatattag

SEQ ID NO: 23916 - DNA, 1428 bp, synthetic construct
  source 1..1428: mol_type = other DNA; note = Synthetic coding sequence
atggaggccctgctggagggcatccagaaccggggccacggcggcggcttccttacctcttgcgaggctgaactacaggagctgatgaaacagatcgatattatggtagcacataagaagtctgaatgggaaggtagaactcacgccctagagacctgcttgaagatcagggaacaggaattaaagtccttgaggagtcaattggacgtcacgcataaagaggtggggatgttgcaccagcaggtagaggaacacgaaaaaatcaagcaagagatgacaatggaatataagcaagaactgaagaagctgcacgaagagctgtgtatcctaaagcgctcttatgagaagctgcagaaaaaacagatgagggaatttagagggaataccaagaaccaccgcgaggacagatccgaaatcgaacgtctaaccgccaaaatcgaggagttccggcagaagtccctcgactgggaaaagcaaaggctgatctaccaacaacaagtgagttccctggaagctcaacgaaaagcactggccgagcagtccgagataattcaggcgcagctggtgaatcggaaacagaaactggagagtgtggagttatcctcccaatctgagatacagcatctgtcctccaaattggagcgtgctaacgatacaatttgcgcaaatgagttagagatcgaaagattaaccatgagggtcaacgatctggttggcacctcaatgactgtactgcaggaacagcagcagaaggaggaaaagctgcgagagtctgagaagctgcttgaggctctgcaagaggagaagagagaattgaaggcagccctccagtcacaggaaaatctgattcacgaagctaggatccagaaagagaagttacaggagaaagtaaaagctaccaatacacagcacgccgtggaggcaatctccttggaaagtgtgagcgcaacctgcaagcagctgtcccaggaacttatggaaaaatatgaggagctcaaacgcatggaagcccataacaatgagtacaaagctgagatcaagaagttgaaagagcaaatcctacagggagagcaaagctactctagtgcccttgaaggaatgaagatggaaatcagccatttgacccaggagttgcaccagcgggatattaccatcgctagcaccaaagggtcatcctctgatatggagaaacgattgcgcgcagagatgcaaaaggccgaagacaaagccgtagagcacaaggagatcctggaccagctcgagtctctgaagctggaaaatcgccatctatcggaaatggtcatgaaactcgaactaggtctccatgagcggtggggtttcaccatgctgtctagcttggtcctgaatttcggaatccaggccattcggcagccacagcgccccaaggtgctggagttgcaggtttag

SEQ ID NO: 23917 - DNA, 2340 bp, synthetic construct
  source 1..2340: mol_type = other DNA; note = Synthetic coding sequence
atgcggatcgaggagcggaagagccagcacctgaccggcctgaccgatgagaaggtcaaggcgtatttatctctgcacccccaggtgctggacgagtttgtatccgaatccgtgtctgccgagaccgtggaaaagtggttgaaacggaagaataacaagtctgaggatgagtccgcccccaaagaagtctctcgctatcaggacactaatatgcaaggggtcgtgtacgagcttaattcatatatcgaacagaggcttgacaccggcggcgataaccagctgcttctgtacgagctttccagcatcatcaagatcgcgacaaaagcagatggctttgctttatactttttaggggagtgcaataactcattgtgcatttttacaccccccggtataaaggagggcaaacctaggctgattccagcaggaccgattacccaggggaccacagtgtctgcatacgtcgcgaaatccagaaaaacgctgctcgtcgaggatattctcggcgacgaaagattcccccgcggcacagggttagagtctggcacgagaattcagtctgtgctgtgcctccccatagtgacggccattggagacctcatcggaatcctggagctataccgccattggggcaaagaagccttttgtctatctcaccaggaggtggccaccgctaaccttgcctgggcgagtgtggccatccaccaggttcaggtttgtaggggactggctaagcagaccgagttgaacgacttcttgttggacgtttcaaaaacttacttcgacaacatcgtggctatagactcattgctggagcatatcatgatttacgccaaaaacctggttaatgcagacagatgcgccctctttcaggtagaccataagaataaagagctctattccgatctgttcgatatcggtgaagaaaaggagggcaagcccgtcttcaagaaaacaaaggaaatccggttcagcattgaaaagggcattgccggccaggttgctcggaccggcgaagtgctcaacattcccgacgcatacgcagatcctcgctttaaccgagaggtggatttgtatactggctacaccacgaggaacatcctgtgcatgcctatcgtttcccggggatcagtgatcggagtcgttcaaatggttaataaaatatcaggatctgctttctcgaaaacagatgagaataactttaaaatgttcgccgttttttgtgctttagccttgcattgcgctaacatgtaccacaggattcgccactccgagtgcatctatagagtaacaatggaaaaactttcttaccacagcatctgtacctccgaagaatggcagggcctgatgcagtttactttgcccgtgcggttgtgtaaggaaatcgaactgttccatttcgatatcggtcccttcgaaaacatgtggcctggaatcttcgtttacatggtacatcggtcttgcggcacaagctgtttcgagcttgagaaactgtgtaggttcattatgagcgtgaaaaagaactacaggcgggtaccctaccataattggaagcacgcagtcaccgtagcccactgtatgtatgctattttacagaacaatcacactctttttaccgacctcgaacgcaaggggctgctcatcgcatgtctttgccatgacttggaccataggggattcagtaattcgtatctacagaagttcgatcacccactggccgctctgtacagtacttccactatggagcagcaccacttttctcaaactgtgtccatactgcaactggaaggccataacatattcagcacactatcatcaagcgaatatgagcaggtgttggaaatcatccggaaggctattatcgcaacggatttggcactgtactttggcaatagaaaacagctggaggagatgtatcagacaggatctctaaacctaaacaatcaaagccacagagatagggttattggcctgatgatgacagcttgtgatttgtgcagcgtgactaaactctggccggtcactaagttgaccgcaaacgacatttatgccgaattctgggcagagggcgatgagatgaagaaattaggcatccagcccatacctatgatggatcgggataagaaagatgaggtgccgcaaggccagttgggcttttacaatgcagttgctataccttgttatacgacgctgactcaaatcctacctcctacagagccactattgaaggcctgcagagataacctgagccagtgggagaaagtcatccgaggggaggagacagccacctggatctcctcaccttctgttgctcagaaggccgcagccagcgaggactag

SEQ ID NO: 23918 - DNA, 2112 bp, synthetic construct
  source 1..2112: mol_type = other DNA; note = Synthetic coding sequence
atggccgccgccaccggcgaccccggcctgagcaagctgcagttcgccccattcagctccgccctggatgtgggattttggcatgaacttacgcagaagaaactaaacgaatatcggttggatgaggcccccaaggacatcaaggggtattattacaatggagattccgcgggattacccgcacgactgacactggaattttccgcttttgacatgtctgcccctacacccgcgcggtgttgccccgctatcggcacactgtacaacactaacaccctggagtcctttaagacagccgacaaaaagctgttactcgagcaggcagccaatgagatttgggagtcaatcaagagtggaactgccctggagaaccccgtgctactgaacaagttcctgctgttgacctttgcagatctaaagaaataccacttttattattggttttgttaccccgcgctctgccttccagagagcctgccactgatccagggcccagttggcttggatcagcgcttctccttgaaacaaattgaagcccttgagtgcgcttatgataatctgtgtcagacagaaggggttaccgccttgccgtattttcttattaagtacgatgagaacatggtgctagtgtccctactgaaacactactcagactttttccaggggcagaggaccaagattaccatcggggtttatgacccatgcaatctggctcagtacccagggtggccactaaggaatttcctagtgctggcggcgcataggtggtcctcctcatttcagtcagttgaagtggtgtgttttagggatagaaccatgcagggggcccgagacgtggcacacagcattatctttgaagtcaagctgcctgaaatggctttttcacccgattgccctaaggccgttggatgggaaaagaaccagaagggcggcatgggcccacggatggtaaacctgagtgagtgtatggaccctaaaagattagccgagagttccgtagacctaaatctgaaactgatgtgttggcgtctggttcccactctggacctggataaggtggtgtccgtcaagtgtctcctcctgggagccggcacgttagggtgcaacgtggcccgcaccctcatgggatggggagtgagacacataacctttgtcgacaatgcgaaaatcagttacagcaacccagtaagacagccactttacgaattcgaagactgcctgggagggggcaagcctaaagctctcgctgcggcagaccggctgcagaagattttccccggcgttaacgccagaggattcaacatgagtataccgatgccaggtcatccggtgaatttcagcagcgtcacgctcgaacaggccaggagagacgtggagcagctggagcagcttattgagtcccacgacgtcgtatttctcttgatggatacccgggaatcaaggtggctgccagccgtgatcgctgccagcaagcgcaaacttgttattaatgctgccctgggtttcgacacctttgtggtgatgcgccacgggctcaagaaacccaaacagcagggggccggagacctctgccctaaccaccccgtcgcctccgcagacctacttggcagttccttgtttgccaatataccaggatacaaacttggatgctacttttgtaacgatgtggtagctccgggggactccacaagggacagaaccttagatcagcaatgtacagtgtcaagacccggccttgcagtgatcgccggtgcactggcagtcgagctaatggtgtctgtgcttcagcacccagaaggagggtacgccatagcttcctcctccgatgatcgaatgaatgaaccccctacttcactgggactcgtgcctcaccagattaggggcttcctctcccggtttgataacgtgctgccggtcagtttggccttcgacaagtgtacggcttgtagttctaaggtgctcgaccagtatgaaagggaagggtttaatttccttgcaaaggttttcaattcttctcacagctttctggaggacttaactggcttgacattgctccatcaggaaacgcaggctgctgaaatttgggacatgagcgatgacgagaccatctag

SEQ ID NO: 23919 - DNA, 3246 bp, synthetic construct
  source 1..3246: mol_type = other DNA; note = Synthetic coding sequence
atggagagcgccggcctggagcagctgctgcgggagctgctgctgcctgataccgaaagaattaggcgggccacagaacagcttcagatcgtgcttagagcccccgctgctctgcctgcactgtgcgacctgctcgcttccgccgccgacccacagatacggcaatttgcggcggtgcttactcgtcgccgcctaaataccaggtggcgtcggctagccgccgagcaacgggaaagtctcaaatctttaatcttgacagcgcttcagcgagagaccgaacactgcgtgagcctgagcctggcacagttgagcgccacgatttttaggaaagagggcctcgaagcatggccccagctgctgcaactcctgcagcattccactcatagtccccattccccggagagggaaatgggccttttattgctatccgttgtcgtgacaagtagaccggaggctttccagccccatcatagagaactgctgcgcctgttgaacgaaactctcggtgaggtgggctcccccgggttactgttctattcgcttaggacgctcaccactatggccccctacctgtcaaccgaggatgtaccgttagcaagaatgctggtacctaaactgattatggcaatgcagacgttgattcctattgacgaagcgaaagcctgcgaggcactggaggctctggacgagctgctggaaagcgaagtgcctgttattacaccctacctgagcgaggtgctgactttctgtctggaagttgctcggaacgtcgcgcttggcaacgctattcgtataaggattctctgctgtctgacattcctcgtgaaagtaaagagcaaggccctgttgaagaatcgcctgctgccacctctgctacacactttatttcccattgttgcagcggagcccccaccaggccaactggatccagaggatcaggactctgaggaggaggaactggaaatagagcttatgggcgagacacctaagcactttgccgtgcaggtagtggacatgctagctctacatttgccacccgaaaagctgtgtcctcaactaatgccaatgctcgaggaagcgctgagatctgagtctccataccagcgcaaggcagggctcctcgtactggctgtgctgagcgatggcgctggagatcatatccgccagagattacttccccccttattacagattgtgtgtaagggactcgaagatccttcgcaggtggttagaaacgccgccctttttgctctagggcagttttctgagaatttgcagccacatatatcctcttatagtcgagaagtcatgcctctgctgcttgcctacctcaaaagtgtgccattaggccatacacaccacttggccaaagcttgctacgctctggagaactttgtagagaaccttggccctaaggtacagccctacctgcccgagctgatggagtgtatgctgcagttgctgcggaatccttctagtccgcgcgctaaagaactcgcggtgtcagcgctcggcgccatcgccaccgcggcccaagcatctctgctgccttactttccagccatcatggagcatctccgcgaattcttactgacggggcgtgaagacctgcagccggtccagatccagtctctggaaacacttggggtgttggcccgagccgtgggagaacccatgcgtcccctggcagaggagtgctgccagctggggctcgggctgtgcgatcaggtggacgatccggatctccggcgctgcacctactcactgttcgcagctctgagtgggcttatgggggagggattagccccccatctggagcaaatcacaaccttgatgctgttgtccctgcgctccaccgaggggattgtgcctcagtatgatgggagcagctcatttctcctgttcgacgacgaaagcgacggcgaagaagaagaggagctgatggacgaggatgtggaagaagaggacgatagcgagatctctggatattctgtagagaacgccttcttcgatgaaaaggaggatacctgcgcagcggtaggagagatttccgttaacacatcagtggcattcctgccttatatggagagcgtcttcgaggaggtatttaaactgttggaatgcccccatctcaacgtcagaaaggctgcgcacgaggccttggggcaattctgttgtgctctccacaaggcatgccagtcgtgtccttcagagccaaataccgctgcgctacaggccgctctggcgagagtcgtgccctcctacatgcaggccgtgaacagagagagggagcgacaggtagttatggcagttctcgaagccttaactggcgtgctgcgctcttgcggaactctcactttgaagccacctggaagactggccgagctatgcggcgtactgaaagctgttctgcagcgaaagacagcttgtcaggatacagacgaagaagaggaggaagaagacgacgaccaggccgaatatgacgctatgctgctggaacatgccggagaagcaatcccagccctcgctgctgccgccgggggagacagctttgctcccttcttcgcgggtttcctccctctgttagtatgcaagactaagcagggatgcactgttgccgaaaagagcttcgccgtgggcacactggccgagaccattcagggattgggggcggcctccgctcagtttgttagcagattgttgcccgtgctgctgagtacagcccaggaggccgaccccgaagtgcggagcaatgccatcttcgggatgggagtcttggcagagcacggtggtcatcctgcccaagagcacttcccgaaactgctgggcctgttattccctctgctggcccgggaacgccatgatcgggtcagagacaatatctgcggcgcccttgctaggctgctgatggcctctccaacaagaaagcctgagcctcaggtcctggccgctttgctacatgccctgcctctgaaagaagacctggaggagtgggttaccatcggacgcctgttttcctttctttaccagtccagtccagaccaggtgatagacgtagctccagaactgctccgcatttgctctctgatactggccgacaacaagatcccccctgacacaaaagcagcactgctgctgctattaaccttcctggccaagcagcacactgattcattccaagctgctcttgggtctctgcctgtagataaggcacaggaactacaggctgtccttggtttgagctag

SEQ ID NO: 23920 - DNA, 7224 bp, synthetic construct
  source 1..7224: mol_type = other DNA; note = Synthetic coding sequence
atggtgggcgagcggcacgccggcgacctgatggtgcccctgggcccaagactccaggcctaccccgaggaactgatcaggcaaaggcccgggcacgatggtcaccccgagtacctgatcagatggtccgtcctcaaatgcggagaggttggcaaagtgggggtggaggagggaaaggccgagcacatacttatgtggctaagcgcaccagaggtttacgcaaactgccccgggctcttgggagaacgggccctgagcaaaggactgcagcacgagcccgcaggtgtgtctgggtcgtttccacgtgatccgggtggcctagatgaggtggcgatgggcgagatggaggcagatgtccaggctctcgttcggagagccgcgaggcagctggcagagagcggaaccccttcactcaccgcagcagtcctccacacaatacatgtcttatcagcatacgcgagcattgggccactgacaggggtgtttagagaaactggcgccctggatctgctaatgcacatgctttgtaaccctgaaccccagatccggaggtctgcagggaaaatgctgcaggcccttgcagctcatgacgctggctctagagctcatgtgcttctctctctcagtcaacaagacggcatcgagcagcatatggatttcgattcaagatacaccctcctggagctgtttgcggagacaacctcctccgaagaacactgtatggccttcgaggggatccatctgccccagattccaggtaagctccttttctcactggtgaagcgctacctctgtgtgacatccttgttggatcaattgaacagttctcctgaacttggagcaggcgaccagtcttccccatgtgccacccgcgagaagtctagagggcagcgcgaactcgagttttccatggccgttggtaacctgatcagcgaactggttcgcagcatgggctgggctcgaaatctgagtgagcagggaatgagtccgccgaggccaacacggtctatcttccagccatatatttctggtcccagcctgctgttgcccactatcgtaaccacgccaagacggcagggatgggtattcagacagcggagtgagttctcttcaagaagcgggtacggggagtatgtgcaacagacactgcagccagggatgcgggtgaggatgctggacgattatgaggaaattagtgccggggacgagggcgagttccggcagtctaataacgggatcccccctgtccagacattaggagaaaaagccctgggggagatctccgtgtcagtggagatggcagagtcactgctgcaggtgttaagctcccgcttcgaggggtcgaccctgaatgatttgctaaattcccagatctataccaagtacggactcctatcaaacgaaccttcttccagtagtacttcacgcaaccatagctgtacccccgatccagaggaggagtccaagtcggaggccagctttagcgaggaggagacagaaagtcttaaagccaaggccgaagcaccaaagaccgaggccgagcccaccaagactcgaaccgagacaccgatggcccagagcgatagccagctatttaaccaattgctcgtaactgagggaatgacattacccactgagatgaaagaagccgccagcgagatggcaagagccctccgaggccctggtccgagatcatctttggaccaacacgtggccgccgtggtagctacggttcagatcagttctctcgacacaaaccttcaactgtccggcctatccgctttaagtcaagccgtagaggaggttactgaacgggatcatcctctcgtgaggccagaccggtcactgcgcgagaagctcgtaaagatgctggtggaattactcactaatcaggtaggcgaaaagatggtggtggtgcaggcgctccgcctgttatacctcctgatgaccaaacatgagtggaggccgctgttcgcccgagaaggcggaatttatgccgtccttgtgtgcatgcaggagtacaaaacctccgtgctcgtgcagcaggccggacttgctgccctcaaaatgctcgccgtggcgagttccagcgagatcccgacctttgtgaccggccgagatagcatccactctctgttcgacgctcagatgactagggagatattcgcaagcattgactccgccactaggccaggctctgagtctctgttattgaccgtgcccgccgcggtgattctgatgctcaacaccgaaggctgcagctcagccgctcggaacggccttctgctcctgaatttgctgctgtgtaatcaccacacactgggcgaccagattatcactcaggagctcagggatactctgttcagacattcaggcattgctccccgtaccgaacctatgcctacaactagaacaatcctcatgatgctgcttaatcggtattccgagcctcctggtagtcccgagagagccgctcttgagactccaataattcaaggacaggacgggagcccagagctactgattcgctccctcgtgggcggacctagcgctgaactgcttctggaccttgagcgggttttgtgtcgggaggggtcacccggcggcgccgtacgacctctgctaaagcggctccagcaggaaacccaaccgttcctgctgctgctgagaacacttgacgccccaggccccaacaaaactctgctgctctctgtcttgcgggtgatcacccgtcttctcgattttcccgaagcaatggtacttccttggcacgaagtccttgagccctgcctgaattgtttgtctggcccaagttccgactcagaaattgtgcaagagctcacttgttttctgcaccgtctggcctctatgcacaaagattacgctgtagtgctgtgctgcctaggtgcaaaggaaatcctgtccaaagttcttgataagcacagcgcccaactgctgttggggtgtgaactgagggatttggtgaccgagtgtgaaaagtatgctcagttatactccaacctgacgagctctatcctggcagggtgcattcagatggtgctcggtcagatagaggaccatagacgaactcatcagccaataaatattccattcttcgatgtcttcctgcgccatttgtgtcagggaagcagcgtagaagtcaaagaagataaatgctgggagaaagtggaggtctcaagtaacccccaccgcgccagtaagcttaccgatcacaacccaaagacatattgggaaagcaatggttccacaggctcccactatatcacactgcacatgcacagaggggtgctggttaggcaattaaccctcctcgtggcatcagaagactctagctacatgcctgcaagggtggtggtcttcggaggagacagcactagttgcatcggaacggagcttaataccgtaaatgtgatgccatcagcctctcgggtaattctgttagagaacctgaaccgattctggcctattattcagattaggatcaagcggtgtcagcagggaggaattgataccagagttcgcggcgtggaggtactgggccctaaaccaaccttctggcccctcttccgggaacagttgtgcagacgcacctgtctcttttatacaattagggctcaggcctggtccagggatatagccgaggaccaccgtcgtttgttgcagttgtgccccagacttaacagggtactgcggcacgaacaaaatttcgccgaccggtttctgcccgatgatgaggccgcccaagccttgggaaagacctgttgggaggccctcgtcagccctttagtgcagaatataaccagccccgacgcggagggcgttagtgctctgggttggctgctggaccaatatcttgagcaaagggaaacaagtcgaaacccactgtcccgcgccgcctccttcgcttcacgagttcgccggctttgtcacctgctcgttcacgtggaaccgcctccaggacccagccctgaacccagtaccagacctttttcaaagaactccaagggtcgggacaggagccccgccccatcacctgtactgccatccagtagccttcggaacatcacacagtgctggctatccgtggttcaggagcaggtctcccgtttcctggccgctgcctggcgggcgcctgatttcgttccccgctactgtaagctatacgagcatctgcagagggcagggagcgagctctttgggccaagagctgcattcatgctggctcttcggagtgggtttagcggagcattgttacagcaatcctttctgactgccgcccacatgtcagaacagtttgcccgctacattgatcagcagattcaaggcggtcttatcggtggtgcaccaggggttgagatgcttggacagctgcagcggcatctggaacccatcatggtattaagcggtctggagttggccacaaccttcgaacatttctatcagcattatatggcggaccgactgttgagcttcggctcctcgtggcttgaaggtgccgtcttggaacagatcggcttgtgcttccccaatagactgccccagctgatgctccaatccctgtcaactagcgaagaattgcaaagacagtttcacctttttcagctgcagagattggataaactgttccttgagcaggaagacgaggaggagaagcgcctagaagaggaagaggaggaagaggaggaggaggaggcagaaaaggaactgtttattgaagaccctagccccgcaatctcgatcctggtcctctctccaagatgttggccagtctctcctctctgttacctgtaccatccccgtaaatgcttgccaaccgaattttgtgacgccttagaccggttctcatctttttactcccagtcccagaatcaccctgtgctggatatgggaccccatcgaaggctgcagtggacctggctggggagagccgaattgcagtttgggaaacagatcttgcacgtttccacagtccagatgtggctcctcctaaagtttaatcagaccgaagaagtgtccgtagaaacgctcctgaaggactccgacctctcccctgaattgcttctccaggcgttggtaccgttgactagtggcaacgggccactcaccctgcacgagggccaggatttccctcacgggggtgtactgaggttgcacgagcctgggccacagcgaagcggcgaggccctgtggttgatcccgccccaggcttacctgaacgtggaaaaggacgaaggaagaaccctggagcagaaaaggaatctgctctcttgcctcctcgtgcggatccttaaggctcacggggaaaaagggttgcacattgatcaactggtctgtctcgttttagaagcgtggcaaaaaggacctaaccctcctggaacactcggacatactgttgcaggcggtgtcgcctgtactagcactgatgttctttcctgtattctgcatcttctggggcagggatatgttaaacgcagggatgatcgacctcagatcctgatgtacgctgcaccggagcccatgggtccctgcaggggacaagccgacgtgcctttctgcggatctcaaagcgaaacatcaaagccttcaccagaagcggtggctaccctagctagcctgcagttgcccgctggcaggacaatgtcccctcaggaagttgagggccttatgaagcaaaccgtaagacaggtgcaggagactctcaacctggagcctgacgtagcccagcacctgctggctcacagtcattggggagccgaacaactgttgcaaagctatagcgaggaccccgaacctcttctgctcgctgcagggttatgcgtccaccaggctcaggcagttcctgttaggcctgatcattgccctgtatgcgtgtccccgctgggttgcgacgacgatctgccctctctatgctgcatgcattattgttgtaaaagttgctggaacgaatatctgactacccgcatcgagcagaatctggttctcaattgtacctgccccattgccgactgccctgcccagccaaccggagcctttatccgcgcaattgtatcctcacctgaagtcatcagcaaatatgaaaaagctctgctacgcggttacgtggagtcctgctccaacctcacctggtgcaccaatccccaggggtgcgataggatcctttgccgacaggggcttggatgtggcacaacctgtagcaaatgcggctgggctagctgcttcaattgctcattcccggaggctcactatccagcctcttgcggtcacatgtcacagtgggtcgacgacggtggctactatgacggtatgagcgttgaggcacagagtaagcatctcgccaagttgatctcaaagagatgtccctcgtgccaagcccccatcgagaaaaatgaaggctgcttgcacatgacctgtgccaagtgcaaccatggattctgttggagatgcctcaagagctggaaaccgaatcataaggactactataactgcagtgccatggtgtctaaggctgcaaggcaagaaaaaagatttcaagattataacgagcggtgtacattccaccaccaagcaagagagtttgccgtgaatctgcgcaaccgagtttccgcaatacatgaggtcccgcccccgcgttctttcacctttctcaatgacgcctgtcaggggctggaacaagcccgaaaagtactggcatacgcgtgtgtgtactccttttactctcaggacgcagagtatatggacgtggtagaacagcagacagaaaacctggaattacacacaaacgctctccagatcttgctggaggagaccctcctacgttgccgggatctcgcatcttctctgcgacttctcagagccgattgcctgagcaccggcatggaactcctgcggagaatccaggaaagactgttagctatcctgcagcactccgcacaggatttcagggtcggtttgcagtccccttctgtcgaagcctgggaagccaaaggccccaacatgcccggtagtcagcctcaggctagctcaggtccggaagccgaggaagaggaggaagacgacgaggatgacgtgccagagtggcagcaggacgaattcgacgaggaactagacaacgactctttttcctatgatgaaagcgaaaatttggatcaggaaaccttctttttcggggatgaagaagaagatgaagacgaagcctacgactag

SEQ ID NO: 23921 - DNA, 672 bp, synthetic construct
  source 1..672: mol_type = other DNA; note = Synthetic coding sequence
atggaggacgtgaagctggagttccccagcctgccccagtgcaaggaggacgccgaggagtggacttatcccatgagaagggaaatgcaggagatcctgccaggcttgtttctgggcccctatagttcagccatgaagagtaagttaccagtactgcagaagcacgggataacacatattatttgcatccgacagaacatcgaggccaattttattaagccgaactttcagcaactgttcaggtacctggtactcgacattgctgataatcccgtcgagaatataatccggttcttccctatgactaaggaattcatcgacgggtccctccagatgggcgggaaggtcctcgtgcacgggaacgcgggaatttcacgtagtgctgcctttgtgatcgcctacattatggagacatttggcatgaagtatcgcgatgcattcgcctatgtgcaggagcggagattctgtatcaaccctaatgctggatttgtccatcagctgcaggaatatgaggccatttacctggctaaacttacaatccaaatgatgtcccctttgcagattgagaggtccctcagcgtccacagtggaaccaccggtagcctcaagcgtacgcacgaggaagaagacgacttcggtaccatgcaggtggcgacagcccaaaatgggtag

SEQ ID NO: 23922 - DNA, 1689 bp, synthetic construct
  source 1..1689: mol_type = other DNA; note = Synthetic coding sequence
atggacgacaagggcgaccccagcaacgaggaggcccccaaggccatcaaaccgacatctaaggaattcaggaagacgtggggctttcggcgcaccactatcgccaagagagagggcgccggagatgccgaggcagacccgctggaacctccaccacctcagcagcaattgggactaagcctgcgccggtcgggccggcagccaaagcgtacggaacgcgtggagcagtttcttaccatcgcaagacgtcgcgggaggcgatctatgcccgtgtcacttgaagatagcggggagcccacttcatgccccgccacggacgccgagacagcctccgagggctccgttgaatcagcttctgagactagatcaggtcctcagtcggctagcactgctgtgaaagagagacctgcttcttcagagaaggttaaaggaggcgacgaccacgacgatacatcagacagtgactcagatggcctaaccctgaaggaactgcagaatcgccttagacgaaagcgggagcaggaaccaactgagcgccctctcaaaggcattcagagcaggctgcgtaaaaagcggagagaagaagggcccgccgagacggtggggtcagaggccagtgatacagtagagggggttctcccttctaagcaggagcctgaaaacgatcagggcgtcgtttcccaggcaggcaaggacgacagggaaagtaagctggagggtaaggcggcacaagacatcaaggatgaggagccgggtgacctgggcagacccaagcctgagtgcgagggctacgatccaaatgccctgtactgcatttgcagacagccgcacaacaaccgcttcatgatttgctgcgacaggtgtgaggaatggtttcacggcgactgcgtgggcatctcagaggcgcgggggaggttactggagcggaatggggaggactacatctgtccaaattgcactattttgcaggtccaagacgagacacatagtgaaaccgccgaccagcaggaagccaaatggaggcccggcgacgctgacggaacagattgtactagcatcggaaccatcgagcagaaatcctcagaggatcagggcatcaagggccggattgaaaaagcggccaacccctctggtaaaaaaaaactaaagatctttcagccagtcatcgaggctcctggtgcatctaaatgtatcggccctggttgttgtcatgtcgcacagcctgacagtgtctactgcagcaatgattgtatccttaaacatgcggcggcaacgatgaagttcctctcaagcggcaaggagcagaagcctaaacccaaggagaagatgaaaatgaaacctgagaagccgtcgctgccgaaatgtggtgcacaggccggcataaagatcagttccgtgcacaaacgaccagcccctgagaagaaagaaaccaccgttaagaaagctgtcgtggttcccgccagatctgaagcactcggtaaggaggcagcctgtgagagttctacgccttcatgggcatccgatcacaattacaacgcggtaaagccggagaaaacagctgccccttcaccgtccctactgtacaaatgtatgtaccacctgggtgtgggattactggaccctagtagaagcttttggatcgccataccatgggcatgccccggactaggtgtagcagccttgtgctag

SEQ ID NO: 23923 - DNA, 360 bp, synthetic construct
  source 1..360: mol_type = other DNA; note = Synthetic coding sequence
atgatcctgcagcagcccctgcagcggggcccccagggcggcgcccagagactgccgcgggctgctttgggtgtgacctggggactggatgcacgtgaacctctgcgtaagcagtttctctccgaggaaaacatggccacacacttctcacaactgtcactacataacgaccatccgtattgcagtcctcccatgacgttttcccccgctcttcctcctcttcgatccccgtgtagtgagttgctcctctggaggtaccccggcagcctgatccctgaggcactgcggctgctgagattgggagacacccccagtccaccgtaccctgccacacccgctggtgacatcatggaactgtag

SEQ ID NO: 23924 - DNA, 1794 bp, synthetic construct
  source 1..1794: mol_type = other DNA; note = Synthetic coding sequence
atggtgcccgaggagcggcgggtgggcctgagcagcgacgagacctcgagtgactcgctgaagtcctggcactctatttgcgtgcttgatagtaaagagcagcctctcgcttgtcaacagaagcaacgccagttcgttaaacctgtgacagaaagcgagcaaccaaccgttctcgagttgctcctggcagagctgagaacacttttctccgcagtgcttcaggactccagtccggctgcttggcgatacctgcacgcggtgctggggttgctgccaccctatagagagctattagtgggccacctagacctgttgccttttctagagcagctttattgctgggcaccgtgggttcagactcatctccaccttgacttgctgggagccatagtgcaagcttttccgcctgatagcagtctgctggacagcgctagtcacgcagactgctgtccccagaagcgacgactgcatcacagacccccctgccccgcttgcccctttgtgcaagcccagtggtccagacagcaggtaaaagaggagctggccacatggttacggcccctgactctgcccgaactgcagcgttgcttgggcatagtgggagctcaagtggctctggaggaggccgtgtggttagacggactctctcttctgccacttgccttagctgccgacattcctgtgagatacgagagtagtgacacggacaacgcagaggtcgagcccgtcggccgcaaggagacaaggagccagctagattatgaggtccctagagagaaggcttttcagaaatctagcacagggttctccccggagacctcttttttagatagccaggtgatgaccgctcttaaaatggaaaggtatctcaaaaagatccacttcctgtacttgaatgtggccccttctagatattttcggccgtacagccttatggtagtgcctcctgacaaggtcaatcccgagcactatattttttctcccttcgggatcttgcacgtgcaccctgtggaaggctctgaaactatgactctcggaacctggcatcaccactgcgtgttgtggcagcagcttcagtttataccgttctttaaatactgcctgctgaggaaatcattcacatgctggaaaaagaacgtgcgactgcaagggctccaccgtcttcagaaatttttagagaatcaccttctgctcgctgtcccccattttggtgccggactcctgcacatttcgcgcctcctgcaggaattacacagcgtctcatggctgccccaagagctggataggtgctacgagctgttggaccttcaaaccgccctggccgaggaaaagcacaaggcactgcggctgcttcaccggtgtctcaatctctgcacttcgatacttcgcctggtgcatgaggacacatatcacatgcagcagtgtctgcaggagagggtccagaactgtgatcggatccgcactggccaggggtctatctatctgcaaagagtgcagcacaagcaattagagcagaagctgaaacaagccgaagcttggtggcttcagctcggcaagttcgctcgcctggttgattacatgatctgccagtcgctgatcagcgttctcgaagagcaaattacaagctttgtggccaatattctgcaggcaccccgtcaaaaacctttcctgtctagccagctagtttttgatgatcacggccagcttagccatgttccctgcgtggagaacatgatacagacacttactgggggcctgcaatctgtgaaaacgtctgctcttcaagtcttctag

SEQ ID NO: 23925 - DNA, 591 bp, synthetic construct
  source 1..591: mol_type = other DNA; note = Synthetic coding sequence
atggaggacctgttcgagaccttccaggacgagatgggcttcagcaacatggaagatgacggcccagaagaggaggaacgagtcgcagaacctcaggctaactttaacacacctcaggccctccgttttgaggaattacttgcgaatctgttaaatgaacaacaccagatcgctaaagagttgttcgagcagctgaagatgaagaagccttcagccaagcagcaaaaggaggtggagaaagtaaagccacagtgcaaagaggtacaccagacgttgatccttgaccccgcacaacgcaaacggctgcagcagcagatgcagcagcacgtgcagcttcttacccagattcacctacttgccacgtgcaaccctaacctaaatcccgaggcttctagcacgaggatttgcttgaaggagcttggtacttttgcccagagctccatagctcttcatcaccaatataaccctaaattccaaacactatttcagccctgcaacctgatgggagcaatgcagctgatcgaggacttcagcacacacgtgagcattgattgttccccacataaaactgtcaagaaaactgtgtgctag

SEQ ID NO: 23926 - DNA, 888 bp, synthetic construct
  source 1..888: mol_type = other DNA; note = Synthetic coding sequence
atggagctgatccaggacaccagccggccccccctggagtacgtgaagggggtgcccctaatcaaatacttcgccgaggccttgggcccattacaatcattccaagcgaggccggacgacttactgatcaacacttaccccaaatccggtaccacttgggtgtcacagatattggacatgatctaccaaggcggcgaccttgaaaaatgtaatcgagcgcccatctatgttagggtcccttttcttgaagtaaacgacccgggagagccatccggactcgaaacccttaaggacacaccaccaccaaggttaatcaaatcacatctacctttggccctccttcctcagacacttctggatcagaaggttaaggtcgtttacgtagcacgtaacccgaaagatgtggccgtatcatattaccatttccataggatggaaaaagctcatcccgaaccgggaacatgggactcctttctggaaaagttcatggctggagaagtgagctatgggtcttggtaccagcacgtccaggaatggtgggaactttcgaggacgcatccagttctgtaccttttctacgaagacatgaaagaaaatccaaaaagagagatccagaagatcctagagttcgttggcaggagtctccctgaagagacgatggactttatggtgcagcacacttcgtttaaagagatgaagaagaaccctatgaccaattatacgacggttccgcaggagctcatggaccattctatctccccatttatgagaaaaggcatggcgggcgattggaaaaccaccttcacagttgcccagaacgagcgcttcgatgcagactatgctgagaagatggccgggtgttcactgagttttcgcagcgaactgtag

SEQ ID NO: 23927 - DNA, 915 bp, synthetic construct
  source 1..915: mol_type = other DNA; note = Synthetic coding sequence
atgaagcgggcccaccccgagtacagcagcagcgacagcgagctggatgaaacaatcgaagttgagaaggaatcagctgatgagaatgggaatctcagttctgcgcttgggtccatgagccccacaacctcttcccagatcctcgcaaggaagaggagacgaggaatcatcgaaaagaggcgcagggaccggatcaacaacagcctctcagaacttcgcagactcgtcccttcagcattcgaaaaacagggctccgccaaactggagaaggctgagatacttcagatgacagttgaccatctgaagatgttgcataccgccggcgggaaaggatatttcgatgcccatgcgctggcaatggattaccggagtttgggcttcagggagtgtctggctgaagttgctcgctacctgtctatcatcgaaggcctcgatgcatctgatcccttgagagtccggttagtttcccacctcaacaattacgcttctcagagggaagccgcttccggggctcacgcagggctgggacatattccttggggaaccgtgttcggccaccacccacatattgcccatccgctgttactgccccagaacggccatggcaatgccgggaccacggcatcccctacggaacctcaccaccagggccgcctgggctctgcccacccagaagcccccgcactcagagctccaccatcagggtcattaggaccagtccttccagtcgttacctcagctagcaagttaagccccccccttctctcaagtgtggcatctctaagtgctttccctttttcgtttggatcattccacttactgagccctaacgccttgtcaccaagcgctcctacacaggcagcaaacctcggaaaaccctaccgcccatggggcacagagattggagcattttag

SEQ ID NO: 23928 - DNA, 2529 bp, synthetic construct
  source 1..2529: mol_type = other DNA; note = Synthetic coding sequence
atgtgcggcagcgagcggatcctgcaggccggcaacatcctggagatccgtgtcggccaggcaggcgcccggcgggtcgccaccatgactagccccgtcttagtggatatccgggaggaggtcacctgccctatttgtttggagctgttaactgagcctctttccattgattgtgggcacagcttttgccaggcctgcattacccccaacggaagggaaagtgtcattggtcaggaaggggagagatcctgtcccgtgtgtcaaacttcttaccaaccgggcaacctgcgacctaaccggcacctggccaatatcgttcggagattacgcgaagtggtgttaggccctgggaaacagctgaaggccgtgctgtgcgccgaccatggggaaaagctgcagcttttttgtcaggaggatgggaaagttatctgctggctgtgtgaaaggtcacaggagcaccgggggcatcacacatttttagtggaggaggtggctcaggaataccaagagaaattccaggagtctctgaaaaaactgaagaatgaggagcaggaggccgaaaaactgacagctttcatacgcgaaaagaaaaccagctggaagaaccagatggaacctgagcggtgccgcattcaaactgagttcaaccagctccgaaatatcttagaccgcgtcgaacagagagaattgaagaaactggagcaggaggagaaaaagggacttcgaatcatagaggaggccgaaaacgatctggtacaccagacacagtccctacgggaattgatttccgatctggagcgcagatgtcaaggctccaccatggaattgctgcaggatgtttccgacgttaccgagcgttccgagttctggacacttcgaaagccagaggccctccctacaaagttaagaagcatgtttcgtgcccctgacctaaaacggatgcttagagtatgtcgggagcttaccgacgttcaatcctactgggcaatccaggggagcctcactagacgggaacgtcgagcttccggtgtgcgcacaagacgctctcagggtagctcagccatggcctctaagattctgctgaatgtccaagaagaggtgacttgccccatttgcctcgagttgctgaccgaaccattatccctggattgtggccattccctttgcagggcatgcatcactgttagtaacaaagaggctgtcacaagtatgggcgggaagagttcttgcccagtctgcggaatcagctattctttcgaacacttgcaggccaatcagcacctggcaaacatagtggaaagattgaaggaagtgaagctttcacccgacaacggaaagaaacgagacctgtgtgaccaccatggtgagaaactcctcctcttttgcaaggaggaccggaaagttatttgttggttatgtgaacggtcgcaagagcacagaggccatcacacagtgctaaccgaagaggtgtttaaggaatgtcaagaaaaactgcaggccgtccttaagcgtttaaaaaaggaagaggaagaggcagagaagctggaagccgatattagagaggagaaaacctcctggaaatatcaagtgcaaacagagcgtcagcgcatacagaccgaattcgaccaactgcgtagcatcctcaataacgaggagcagcgtgagctgcagcgcctggaggaagaagagaagaagaccttggacaaatttgcggaggcggaggacgaactggtccagcagaaacaactggtcagggagctcattagcgatgtggaatgccgaagccagtggtcgaccatggaactgctgcaagacatgtccggaataatgaagtggagcgaaatttggaggttgaagaaacccaaaatggtgagtaagaagcttaagaccgtattccacgctcctgacctgagtcgcatgctccagatgttccgggagttgactgcggtacgctgttactgggtcgacgtgacgctgaacagcgttaacttaaatttaaacctcgtgctatcagaggaccaacgacaggtcatttccgtgccaatctggccatttcaatgttataactatggagtcttaggttcacagtacttctccagcggaaagcattactgggaagtcgatgtcagcaagaaaactgcatggattctcggagtttattgccgcacttattcccgccacatgaaatatgtcgtcagacgttgcgcaaaccgacagaacttgtacacgaaatacaggccgttattcggctactgggtgattgggctgcagaataagtgcaagtacggtgtgtttgaggagagtctgtcatctgatccggaggtcctcacgctgtcgatggccgtgccgccctgtcgggtcggcgttttcctcgattacgaagctggtatagtgtcattctttaatgtgacatctcacgggtctcttatttataagttttccaaatgttgcttttcacagccagtctatccttactttaatccctggaactgtcccgctccaatgaccctctgccccccctcctcctag

SEQ ID NO: 23929 - DNA, 1497 bp, synthetic construct
  source 1..1497: mol_type = other DNA; note = Synthetic coding sequence
atgaacggcgccctggaccacagcgaccagcccgaccccgacgccatcaagatgttcgtgggccaaattcctcgcagctggtccgagaaagagctgaaagaactgttcgaaccttatggtgccgtataccagatcaatgtcctacgggatcggagccagaatcccccccagagcaagggatgctgttttgtgacgttttacacccgcaaagctgccctcgaggcacagaacgcgctgcacaatattaaaaccctgcctggcatgcaccaccctatccagatgaagccagcggactcagagaaatctaatgctgtggaagatagaaagctgttcatcggcatggtgagtaagaaatgcaacgaaaacgatataagggtgatgttctctcccttcggacagatcgaggagtgccggattctccgtgggcctgacggattgtcacggggatgtgcctttgtaacattctcaaccagagccatggctcagaacgctattaaagcaatgcatcagtctcaaacaatggagggctgcagcagccccatcgtagtaaaattcgcagatactcagaaagacaaagaacagagaaggctacagcagcagctcgcacagcaaatgcaacagttgaacacggcaacctggggcaacctgacggggcttggtgggctgaccccacaatacctcgcactcctccagcaggctacatctagctccaatctgggagcattctccggaattcaacagatggccgggatgaacgctcttcagctacagaacctagcgacactcgcggccgccgctgccgctgcacagacgagtgcgacctcgacgaatgctaacccactgtctaccacctcgagcgcactcggggcactcactagcccagtggccgccagtacccctaattccaccgccggcgcggccatgaactccttgacatcgttaggaacattgcaaggcctggccggcgccacagtcggtctcaacaacattaatgctctggccgctccgaggagcaagagactgctgctgccaaaagacaataatggtatggccgcattgaatggaggtctaggtgctacaggcctcacgaatgggacggccgggacaatggatgccctgacccaagcctactccggcatccagcagtacgccgcagctgcgcttcccactctctattcacaaagcctgctccaacagcaatccgcggccggaagccagaaggaaggccccgagggcgcgaacttattcatatatcatctgccacaagagtttggagatcaggatattctgcagatgttcatgcccttcggaaatgtcatttcagccaaagtctttattgataaacaaacaaacctcagcaaatgcttcgggtttgtttcctatgataatccagtgtcagcgcaggcagcgatacaggctatgaacggatttcaaatagggatgaagcggttaaaggtgcagctcaagcgctcaaagaacgactctaagccttattag

SEQ ID NO: 23930 - DNA, 2580 bp, synthetic construct
  source 1..2580: mol_type = other DNA; note = Synthetic coding sequence
atgctggaggtgctggaggagatctggagcgtgcgggcccggcgggctcatcgaccatgccccggaccaagtctcgcagatgacacagacgccaatagcaacggatcctcagggaacgagtctaacggtcatgagtcgcggggcgccagtcagaggtcttcccattcttcaagttctggcaacgggaaagactctgccttattagaaactaccgagtcctccaaatcaacaaacagccagtcgccctctcccccgtcctcatctatcgcctacagcctgctttccgcctcttcagaacaggacaatccctctacaagcgggtgctccagcgagcagtctgctagagcgcggacacagaaagagctgatgaccgcccttagagaactgaagctgcgtctgcccccagaaagacgtggcaaaggcagatccggcacactggccaccctacaatacgctctggcctgcgtaaagcaagtccaagctaatcaagagtattatcagcagtggtctcttgaagaaggggagccatgttcaatggacatgtccacctatactctcgaagaactggagcatataacatccgagtacacactccagaaccaggacacatttagtgttgctgtctcattcttgactgggcggattgtgtacattagtgagcaggccgccgtcttgctcagatgcaaacgggatgtgttcagaggcactagatttagcgaactactcgcacctcaagatgtcggagtgttctatggtagtaccgctccctctcgtctgcctacttgggggactggagcctccgcaggcagtgggttgcgcgatttcactcaggaaaagagcgtgttttgtcgaattcgggggggccctgacagagatccagggccacgttatcagccattccgcctgacaccctacgtcactaagattagggtttccgatggagcgccagcacagccctgttgcctgcttattgccgaacgcatacactccggctacgaggcaccccgcattcccccagataagagaattttcactacgaggcatactcctagctgtctcttccaggacgtggacgaaagagctgctccacttctcggttacctgccacaggacttacttggtgctcctgtccttttatttctgcatcctgaagacaggcccctgatgttagcaatacataagaaaatcctgcagcttgcaggccaaccattcgaccactctcctatcagattctgcgcgagaaatggagagtacgtcacaatggataccagctgggccggatttgtccatccatggagcaggaaagtggcttttgtgctagggaggcataaggtacgaactgcccccctcaatgaggatgtgttcacaccccctgctccctctccagcaccaagccttgacactgacatccaggaactctccgaacagatacaccgccttttgctgcaacccgtgcactccccatcccccacaggtttgtgcggagtgggcgcggtaacaagcccaggtccactgcattcccctggttcatcctccgactctaacggaggagatgcggaggggcccgggcccccggcccccgtgactttccagcaaatttgcaaggacgtccatttggtcaagcaccaaggacagcaactgttcatcgagtccagagctcgcccacagagtagacctcgcctcccagctaccggcactttcaaagctaaagcgctgccgtgtcagtcccctgaccctgaactcgaagcgggcagcgcaccggtgcaggccccactggccctggtgccagaagaagctgaaagaaaggaagcctcttcctgttcatatcagcagatcaactgcctcgactccatcctcaggtaccttgagagttgtaaccttccaagcactactaaacgaaagtgcgcctcctcctctagttacactacttcttcagcctcggacgatgatcgccagcgcacaggccctgtaagcgtaggtaccaagaaggatccaccaagcgccgccctttcaggggagggagctaccccccgcaaggagcctgtggtcggcgggaccctgagtcccctcgccttggcaaataaagcagagagcgtggtgagtgtgacctctcaatgttcattcagctcaacgattgttcatgttggagacaagaagccccccgaaagcgacattataatgatggaggatctgcccggcttggccccggggcccgcaccatcaccagcccccagccccaccgtggcccccgacccagcaccagacgcctataggccagtgggcctcaccaaagcagtgctttcgctccacactcagaaagaggagcaggcgttcctgagccggtttcgtgacctgggtcgccttagagggctggatagctccagcaccgccccaagcgccctgggagaaaggggctcacatctgggaccgcctggcgcctgcccactcccctccttaggcctcgactgctggggagttggtcttaaaggcggggtttccgctccaggcacgcaggccggagtggcttccaccacaaggccctgtcttggtaccggtcccagtttagcctccccacattag

SEQ ID NO: 23931 - DNA, 1266 bp, synthetic construct
  source 1..1266: mol_type = other DNA; note = Synthetic coding sequence
atggccagcagcagcgtgccccccgccaccgtgagcgccgccaccgcaggaccaggacctgggtttggtttcgcgtccaaaaccaaaaagaaacactttgtccagcagaaggttaaggtattcagggcggcggatccacttgtaggggtttttctttggggcgtggctcatagcatcaatgagctctctcaggtgccaccaccggtgatgctgcttcccgatgattttaaggctagttcaaagataaaggtgaataatcatttgtttcaccgggagaatttaccttcccatttcaagtttaaggagtattgccctcaggtctttcgtaatctgagggacagatttgggatcgatgatcaggattatctagtttctctgacccgaaatcctcccagcgaatccgagggatcggacggacgctttctgattagctacgacaggactctggtcatcaaggaagtgagcagtgaggatatagctgacatgcacagtaacctctccaattaccaccagtatattgttaaatgtcatggaaacacactcctcccccaattcctggggatgtaccgcgtgtcagtggacaatgaggatagttacatgctggttatgcggaacatgttctcccaccggctgccagtgcacagaaaatatgacttgaagggatcgctggtctcgcgcgaagctagcgacaaagagaaggtcaaggagctcccaaccttgaaggacatggactttcttaacaaaaaccaaaaggtctacattggcgaagaggagaaaaaaatctttctagagaagctgaagcgggatgtcgaattcctcgtgcaacttaagatcatggattactcattgcttctggggatccacgacattataaggggatccgagcctgaagaggaggcgcctgtgagagaagatgaatctgaggtggacggcgattgctccttgacaggcccccccgccctcgtgggcagttacggaacatctcctgagggtattgggggctacatccactcccataggcctctcgggcccggggagtttgagagcttcatcgacgtctatgcaataaggtctgcagaaggagctcctcagaaggaggtgtattttatgggtctcatcgacatcctgacccagtacgacgccaaaaagaaggctgcccacgcggccaagactgtgaaacacggagcgggcgccgagatttcaaccgtccaccccgaacagtacgcaaagcggttcctcgattttatcacaaacatatttgcctag

SEQ ID NO: 23932 - DNA, 2031 bp, synthetic construct
  source 1..2031: mol_type = other DNA; note = Synthetic coding sequence
atggccgccgccaccggcgaccccggcctgagcaagctgcagttcgctccctttagctccgccctcgacgtgggtttctggcacgagttgacccagaagaagctcaatgagtacaggctggacgaagcacctaaggacattaagggttactactataacggggatagcgccggcctgcctgcccgcctgactttggagttcagcgccttcgacatgagcgctcctacccctgctcgctgctgccctgccataggaactctctacaacaccaataccctggagagctttaagactgcagacaaaaagctgctgctggaacaggccgctaatgagatctgggaatctataaagagcggcacagcgctcgaaaatcccgttctactgaataagtttcttctcctgacctttgccgatttgaagaagtatcacttctactactggttctgttacccagccctgtgccttcccgaatcactgcccctgattcaggggcccgtagggctggatcagcgcttttcgcttaaacagattgaggccctggaatgtgcctacgacaacctgtgccagacagagggcgttactgcgcttccttatttcctgatcaaatacgacgagaacatggtattagttagtctgctgaaacactactctgacttctttcagggccagcgaactaagattaccatcggcgtgtatgacccctgcaacttagcccagtaccctggctggccactaagaaattttctggtgctagccgcccacaggtggtccagctcattccagagtgtggaggtggtgtgttttcgcgaccgaactatgcagggtgcacgagatgtggcccacagcatcatctttgaagtgaaactacccgagatggcattttctcctgactgccctaaggcagtcggatgggagaagaaccagaaggggggcatgggtccacgcatggttaaccttagcgaatgtatggacccaaagcgcctcgccgagtcctctgtagatttgaacctcaagctcatgtgctggagactggttcccacgcttgacctggacaaagttgtgagcgtgaagtgccttctcctcggcgcaggaaccctgggatgtaacgttgcccgcaccctcatgggctggggagtacggcacatcactttcgtggacaacgcgaagatcagttacagtaaccccgtcaggcagccactctatgagttcgaggattgcctgggaggagggaagcctaaagccctagcggctgcagacagacttcagaaaatattcccaggagtgaacgcaaggggatttaacatgtcgataccaatgcctgggcatcccgtgaatttttcctctgtcactttagagcaggcaagaagggatgtcgaacagctggaacagctcatcgaatcgcacgacgtcgtgttcttgctcatggacacgagagagtctcgctggcttcctgcggtaatagccgcaagcaagcggaagctcgtgatcaacgccgctcttggcttcgatacttttgtggtcatgcgtcatggcctgaagaaacccaaacagcagggggcgggtgacctgtgtcctaaccatccagtggcatctgctgatctgctgggctccagcctctttgcaaacattccaggatataaattgggctgttacttttgtaatgacgttgtggcacctggcgattctacccgcgacaggaccctcgatcaacagtgcacagtgagtcgacctggccttgcggtgattgccggtgctttagcagtggaactaatggtcagcgttttgcagcatcctgagggaggttacgccattgctagtagcagcgatgatagaatgaatgaaccaccaaccagcctcggattggtgccccatcaggtcctcgatcagtatgaacgcgaggggttcaatttccttgcaaaagtttttaactcctctcactcctttcttgaggatctcaccggactgaccctgctccaccaggaaactcaggccgctgaaatttgggacatgtctgacgacgaaacaatttag

SEQ ID NO: 23933 - DNA, 1329 bp, synthetic construct
  source 1..1329: mol_type = other DNA; note = Synthetic coding sequence
atggccagcgacggcgccagcgccctgcccggccccgacatgagcatgaagccatcagctgcaccaagccctagcccggcgctgccattcctgccccctacttcagacccgcctgaccatcctcctcgcgagccccccccgcaacccatcatgccttccgtgttctccccagacaatcccctgatgctgtccgcttttccctcctccctgctggttaccggggatggtggtccctgtttgtcaggtgctggcgccgggaaagtaattgtgaaagttaaaaccgagggagggtccgctgagccatctcaaacgcagaactttattctcacccagactgccttgaactccactgctccgggtaccccgtgtggggggctagaaggtcccgccccgccctttgtgacagcttccaatgtgaaaacaatccttccatcaaaagccgtgggcgtaagtcaggaaggcccaccaggtttgccaccccaacctccccctcctgtggcccagcttgtgccaatcgtacctctggagaaagcctggcctggccctcacggcactacaggtgagggaggtcccgttgccaccctcagcaagccaagtcttggggacaggtcaaaaatatctaaagacgtgtacgagaacttcagacagtggcaacgctacaaggcgctggcgaggagacatctttcacagtccccagataccgaggcagtgaaggagtatgtggacattatggagtggctggtgggcacgcacctggccacgggcgagagcgatggaaaacaggaagaggaggggcagcagcaagaagaggagggaatgtatcctgatcccggactcctttcatacattaatgagctctgcagccagaaggtgttcgtcagtaaggtggaggctgtcatacatcctcagtttttggccgaccttttgtcccccgagaaacagcgcgaccccttagcactgatcgaagaacttgaacaggaggaagggttgactctggcccaactcgtgcaaaaaaggctcatggccttagaagaagaggaggatgctgaggccccaccttccttctctggagctcaactagattcttccccttcgggcagtgtggaagatgaggacggcgatggccgcctgcgcccatcccccggccttcagggggcaggcggggccgcctgtctaggcaaagtgagtagtagtggcaagcgtgcaagggaggtccatggggggcaggagcaggcgttggatagtcctcggggcatgcacagagatggaaataccctgccctctcctagttcttgggatctgccgaccaacggagagtctcaatgttag

SEQ ID NO: 23934 - DNA, 666 bp, synthetic construct
  source 1..666: mol_type = other DNA; note = Synthetic coding sequence
atgcaggtgcaggacgacggcgtgaacctgatccccttcgccaagtgttctagagttgtatccaggtcaccaccccctagactaccctcgcagagtttaaggccaatgccccaacgctatggggacgtgttctggaagaacttaaatcagcgacctacacctacttggctagaggaacagcatatcccaccaatgctgctccctcctccagagatgttgtggaggaggaagaagagacgcccgtgtcttgaggggatgcagcagcaggggttgggcggcgtcccagcccgggtgagggcggtaacataccaccttgaggatctgcgccgccgacagagtattataaacgagctgaagaaggctcaatggggttcaagtggcgcggcctcagaacctgtcgtccttggagaagaggggtgcggatttccgtctacaaacgaatatcccgaccttgaggaagagcgggccacgtacccccaagaggaggacagatttctgactcctggacgggctcagttgttatggtctccatggtcccccctcgatcaggaggaggcttgtgcctccaggcagctgcattccttggcctcattttccaccgtcaccgccaggaggaatccactccacaatccttgggggatggaactggccgcaagtgaggagtag

SEQ ID NO: 23935 - DNA, 480 bp, synthetic construct
  source 1..480: mol_type = other DNA; note = Synthetic coding sequence
atgcagcgggtgggcaacaccttcagcaacgagagccgggtggcctcgcggtgtccatccgtcggcctagctgagcgcaacagagtggcaactatgcccgtccggctgctcagggactcccccgctgcccaggaggataacgatcacgcccgcgatggattccaaatgaagctggacgcgcatggctttgcacccgaggaattggtcgtccaggtcgatggacaatggctgatggttactgggcagcagcaactcgacgtccgggaccctgagagggtgtcctaccgcatgagccagaaagtgcataggaaaatgctgccttccaatctatcgcctactgctatgacttgctgcctgacaccctctgggcagttatgggtgaggggccagtgcgtggccctggctctgcccgaagcccagactggaccgtctcctagattgggctccctcggcagcaaggcaagtaacctgacaagatag

SEQ ID NO: 23936 - DNA, 1782 bp, synthetic construct
  source 1..1782: mol_type = other DNA; note = Synthetic coding sequence
atggagaagctgagcgccctgcaggagcagaagggcgagctgcggaaacggctgtcctataccacccataagctagaaaagctggagactgaattcgacagcaccaggcactatctggagattgagcttcggcgggctcaggaagagctcgaaaaggtgacggagaagttacgacggatccagtcaaactacatggcccttcaaaggattaaccaggaacttgaggataaactgtacaggatgggacaacactacgaagaagagaaacgggcactgagccacgaaattgtagcccttaactcccacctcctggaggcaaaagtgacaatcgacaaactgtctgaggataatgagctgtaccgaaaagattgcaacttagctgctcagctcctgcaatgtagtcagacgtacggtagagtgcataaggtgtccgagctacctagcgactttcaggaacgggtttctctgcacatggaaaagcacgggtgttctctccccagccctctctgtcatcccgcctatgctgattccgtgccaacatgcgtgatcgccaaggtgttggaaaagccggaccccgcttctctgtcctcaagactctctgatgcctcagccagggacctggccttttgtgacggcgtcgagaagcctggacctcgacccccctacaaaggggatatctactgtagcgataccgccttatactgtcccgaggagcgcagacgggatcgtagaccatccgtcgatgctccagtcacagacgtggggtttctccgcgctcagaattctacagacagtgcggctgaggaagaagaggaggcagaggcagccgcattccccgccggtttccagcacgaagccttcccttcttatgccgggtctctaccaacaagctcttcctactcatccttttccgcaacttctgaggagaaggaacatgcccaggctagcacattgacagcttcacagcaagccatttatctgaacagccgcgacgagctgtttgaccgcaaacccccggccacaacgtacgaggggtcaccaagatttgccaaagccaccgccgcagtcgcggcccctctcgaggcggaagtggcgcccggctttggcaggaccatgtccccctatccagccgaaactttccgcttccccgctagccccggaccacagcaggcacttatgcctccaaacctatggtctctgcgagccaagccgggcactgcacggcttccaggagaggatatgcgggggcagtggagacccctgtctgtggaggacattggggcctatagctaccctgtcagtgccgctggcagagcaagcccatgttccttcagcgagagatattatggcggcgcgggcgggtcaccaggtaagaaggctgacgggagagctagccccctttatgcaagctacaaggcggacagtttctctgaaggggatgatctgtcccaaggtcaccttgccgaaccgtgctttctccgagccggcggagatctgtcactctctcccgggaggagcgcagatcccttacccggctatgctcccagtgaaggcggtgatggtgatagattgggcgtccagttatgcggcaccgccagttctcccgaacccgaacagggcagccgcgacagtttagagccatccagtatggaagcctctcccgaaatgcacccagcagcccgactctccccccagcaagcctttccacggaccgggggaagcgggctgtccagaaaggatagtcttaccaaagcccagctctatggcaccctgctcaactag

SEQ ID NO: 23937 - DNA, 2610 bp, synthetic construct
  source 1..2610: mol_type = other DNA; note = Synthetic coding sequence
atgggcaaccgggagatggaggagctgatccccctggtgaaccggctgcaggatgccttcagcgccctcggacaaagctgtctcctggaattaccccaaatcgccgtcgtgggcggccaatccgcggggaagtcttccgttctggaaaattttgtcggccgcgattttttgccacgtggttctggaatcgtcacacgtaggcccctggtgctgcaactggtaacttctaaggcggaatacgccgagtttctgcattgcaagggtaagaagtttacggatttcgacgaagtgcggctggagattgaggcggagactgatcgagtgacaggcatgaataaaggaatctcctccattcccattaacttgagggtgtacagccctcatgtgctgaacctaactctgattgaccttccaggaatcacaaaggtccctgtgggcgaccagccgcccgatattgaatatcaaatcagggaaatgattatgcagtttatcacaagggagaattgccttatcttggcagttactcccgccaacactgatctggcaaatagcgatgcccttaagttggccaaggaggtggacccccaaggactaaggacaataggcgtgattactaagttggatttaatggatgagggcaccgatgcacgggacgtgctggagaacaaactcctgccactgagaagggggtatgtgggagtagtgaataggtctcagaaagacatcgacggcaagaaggatatcaaggctgcgatgctggctgagagaaagttcttcctgtcccaccccgcatataggcatatcgccgatcgcatgggcacgccccacctccagaaggtgcttaaccagcagctcacaaatcatatccgtgacacgcttcccaatttcagaaataaacttcagggccagctgctttccatcgaacatgaagtagaagcatacaaaaattttaagccagaggatccaactagaaagacaaaggctctcctgcaaatggtgcagcagttcgcagtagacttcgagaagaggattgagggatccggagaccaagtggatacactggaactgagcggaggcgctaaaatcaatcgtattttccacgaaaggttcccttttgaaatcgtgaagatggagttcaatgagaaggagctgagacgcgagattagctacgccattaaaaacatacacgggattcgaactggcctcttcaccccagatatggcctttgaagctatcgtcaagaagcagatcgtaaagcttaaaggcccttctctgaaaagtgtcgatctggtgatccaggagctgatcaacacggtcaaaaagtgtactaagaaattggcgaatttcccaaggttgtgcgaggagactgagaggattgtcgctaatcatattcgcgagcgcgaaggcaagaccaaggatcaggtactgttgctgatcgatatccaagtttcctatattaacacgaatcacgaggacttcatcggatttgcgaatgctcagcaaagatcctcccaggttcacaaaaagacgactgtggggaatcagggtaccaacctgcctccttcacgccagattgtaatacggaagggctggctaacgattagcaacattggcatcatgaaaggtggctcgaagggctattggttcgtcctgacagccgagagtttatcgtggtacaaggacgatgaagagaaggaaaagaagtacatgctacctcttgataacctgaaagtcagggacgtcgagaagtcctttatgtcaagtaagcacatctttgctctctttaatacagagcagcgcaacgtgtacaaagattatcgattcctggaactcgcatgcgatagtcaggaagacgtggacagctggaaggcaagccttctccgggccggagtataccctgacaaaagcgttgccgagaacgacgagaacgggcaggctgaaaacttcagcatggaccctcagctggagcgacaggtggagaccatacgcaacctggtcgacagttatatgtctattataaataagtgcattcgggacctgattccaaaaaccatcatgcatctcatgattaacaatgtgaaggacttcatcaacagcgagctgctggctcagctatactccagcgaggaccaaaatacccttatggaggaaagcgctgagcaggcccagagacgtgacgagatgctgaggatgtatcaggcactgaaagaagcacttgggattataggagacatatcaaccgcaaccgtaagtacccccgcccctccccccgttgacgactcttggatacagcactcaagacggtcaccacccccaagcccaacaacacagcgcagaccgacgctctcggccccactggccagacccaccagcggtaggggacccgcccccgccataccttctccgggaccccacagtggcgcccctccagtgcctttcagacctgggcctttgccgccatttccatcatccagtgatagcttcggcgcaccaccacaggtacctagtcgtcctacaagagccccaccttccgtgcctagcaggaggcctccacctagtcccacccggcccactatcattaggccacttgagagctccctcctggattag

SEQ ID NO: 23938 - DNA, 1896 bp, synthetic construct
  source 1..1896: mol_type = other DNA; note = Synthetic coding sequence
atgaacagcagcgacgaggagaagcagctgcagctgatcaccagcctcaaagaacaggctattggcgagtatgaggatttacgcgcagagaatcagaagaccaaagaaaaatgcgataagatcagacaagaacgcgatgaggccgttaagaagttggaggagttccagaagataagtcacatggtcattgaggaagtcaattttatgcagaaccatttagaaatcgaaaagacctgtcgagagtcagccgaggccctggctactaagctgaataaggagaacaagaccttaaagagaataagcatgctatatatggcaaaactcggaccagatgttataaccgaggaaattaatattgacgacgaggatagtaccaccgacaccgatggcgctgcggagacttgtgtatctgtgcaatgtcagaaacagatcaaggagctgagagatcagatcgtttccgtgcaggaggagaagaagatcctagctatcgagctggaaaatcttaaaagtaagctggtggaagtcatcgaagaagtgaacaaggtgaagcaggagaagacagtactgaattcagaggtgctcgaacagagaaaagtccttgagaaatgtaatagggtgtccatgctggcggtcgaagagtacgaagaaatgcaggttaacttagaactcgaaaaggacctcaggaaaaaggccgagtcattcgcccaggaaatgtttatcgaacaaaacaagctcaagaggcaatcccacctcctgctgcaatcctcgattcctgatcagcaactcctgaaagccctcgacgaaaacgcaaaactgactcagcagctggaagaagaaagaatccaacatcaacagaaggtcaaagagctagaagagcaactcgaaaacgaaactttgcataaagaaatccacaatttaaagcaacagttggagttactggaggaggacaaaaaggaactggaactcaagtaccagaactctgaagaaaaggcccggaaccttaagcactcagttgacgagctacagaaacgcgtaaatcagtctgagaactctgtaccaccgccgcccccacctccacctcccttgcccccccctccccctaacccgatcagatcgcttatgtctatgattagaaagcgctctcatccatctggatcaggcgcaaagaaagaaaaggctacacaacctgagacaacagaagaggtgaccgatcttaaaaggcaggcggtcgaggagatgatggaccggataaagaagggagtccatctgcgtcctgtcaaccagacagcacgcccgaaaacgaagccggaaagttcaaaggggtgtgaatctgcggttgatgagctcaagggcattctaggtacacttaataaatctacatcttccagatccttgaagagtttggatccggaaaattccgaaacagagttggaacgcatcctgcggagaaggaaggtcacagccgaggcagattcctcttctcccacggggatcctagcgacgtcggaatctaagtccatgcccgttctcggctccgtatcttctgttacaaagacagccctgaacaagaagacactagaggccgagttcaattcaccgtcccctccaaccccagagcccggagagggcccaaggaagctcgagggctgcacctcgagcaaggttactttccaacctccctcctccataggatgccggaagaagtacatcgatggggagaagcaagccgagcccgtcgtggtgctggatcctgtcagtacacacgaacctcagacgaaggaccaggttgccgagaaagatccaacccagcacaaggaagatgaaggcgaaatacaacctgaaaataaggaagactccatcgagaacgtccgcgaaacagatagttctaactgctag

SEQ ID NO: 23939 - DNA, 1701 bp, synthetic construct
  source 1..1701: mol_type = other DNA; note = Synthetic coding sequence
atggacctgcaccgggccgccttcaagatggagaacagcagctacctccctaatcccctcgcatcacctgccttgatggtgcttgcaagtactgccgaagccagccgtgacgcctccattccttgtcagcagcccaggcctttcggcgtgcccgtttctgtggacaaagatgtgcacattccctttaccaacgggtcgtacacctttgcatccatgtaccatcgccagggaggagtgcccgggacattcgccaatcgcgattttccgccatccctgttgcacctacacccccagtttgcaccccccaacctagattgtacaccaatttctatgctgaaccattccggcgtgggcgctttccgtccatttgcctctactgaagatagagagagctaccagtcggccttcacgcccgccaagaggcttaaaaattgccacgacaccgagtcgccccacctgcgcttttccgatgcagatggaaaagagtatgatttcggaactcagctccccagttcctcccctggcagcttgaaagttgatgataccggtaaaaagatcttcgcagtcagcggtcttatctctgaccgagaagcatccagttccccagaagatcgtaacgacagatgtaaaaagaaggctgcagccctgttcgattcgcaggcccccatatgtccaatttgccaggttttattacgcccctcagaactgcaggaacacatggagcaagagctcgaacagctggctcagctcccatcgtccaaaaactcgctgctgaaggacgcaatggctccagggacaccaaaaagcttgctcctcagcgcgtccatcaaaagagaaggtgagagcccaaccgccagtcctcactctagtgcgaccgacgacctgcatcatagtgaccggtatcagaccttcctcagagttagagccaatcgacagactcggctaaacgctagaattgggaaaatgaagagaagaaagcaggatgagggtcagagggagggcagttgcatggccgaagacgacgctgtggacatcgagcatgaaaataataatagattcgaggagtatgaatggtgtgggcagaagcggatccgtgctacaacgttgctggaaggtgggttcagaggcagtggtttcatcatgtgcagcgggaaggagaatcccgacagcgacgctgaccttgacgtggacggcgacgacactctggagtacggaaaaccccagtataccgaagccgacgtcattccctgcaccggagaagagcccggcgaggctaaggagagggaggcacttcgtggagccgtattgaacggcgggcctccaagcactcgtatcacgcccgagttttccaagtgggcttcagacgagatgccatcaaccagtaatggcgagtcatcgaagcaggaagctatgcagaagacttgtaaaaatagcgatatcgagaaaattaccgaggactcagccgtgaccactttcgaggccctgaaggcccgcgtgcgcgagttggagagacaactgtcaaggggagacaggtacaagtgcttaatatgtatggactcatactccatgccgctcacctcaattcagtgctggcacgtgcactgcgaagagtgttggctcaggacactgggggcgaagaagctttgccctcagtgtaacaccattacagctcccggtgacctcaggcggatttatttgtag

SEQ ID NO: 23940 - DNA, 1071 bp, synthetic construct
  source 1..1071: mol_type = other DNA; note = Synthetic coding sequence
atgctgagcgccatcaccaacgtggtgcagaacaccggcaagagcgtgttgaccggcggactggacgcgctggagtttattggaaaaaaaacaatgaatgttctggcagaatccgatccaggtttcaaaagaaccaagacgcttatggagaggactgttagtttatcccagatgctgcgagaagctaaggaaaaggagaaacagcggttggcccagcagctgacaatggagaggaccgcccattacggcatgctgttcgatgagtaccaggggctttcccatctggaggctctcgagatccttagtaatgagtccgagtcgaaggtgcaatcattcctcgccagtttggatggggaaaaacttgagctcctgaaaaacgatttgatttctattaaggatattttcgcggctaaagagctggaaaacgaggagaatcaggaggaacagggcctagaagagaaaggcgaggaatttgcccggatgttaaccgaattactgttcgaacttcacgttgccgcgacacccgacaagctgaataaagccatgaagcgcgcccatgactgggtggaagaggaccagacggtcgtgtctgtggatgttgccaaagtttcagaggaggaaactaagaaggaggagaaggaggaaaagagccaggatccgcaagaagataagaaggaggagaaaaaaactaaaaccattgaagaggtttacatgtcaagcattgaatctttagcggaggtcactgccaggtgcatagaacagttacacaaggtggccgaactcattctgcacggacaggaggaggagaagccggcccaggatcaggccaaagttttgattaaacttaccacagctatgtgcaatgaagtagcgagcctgagcaagaagttcaccaactcactcaccacagtgggctcgaacaagaaagctgaagttcttaatcccatgatcagtagcgtgttgttagaaggatgtaattctaccacgtacatacaggacgccttccaattactgctgcctgtcttgcaggtatcacatattcaaacaagctgcttgaaggcccagccctag

SEQ ID NO: 23941 - DNA, 519 bp, synthetic construct
  source 1..519: mol_type = other DNA; note = Synthetic coding sequence
atgagctacaactgctgcagcggcaacttcagcagccggagctgcggtggctacctgcattaccctgcatcgagttgcggtttctcttaccccagcaatcaggtctactcaacggacttgtgctccccttctacatgtcagctgggcagtagcctgtacaggggttgccagcagacatgctgggaaccaaccagctgtcagaccagctacgtggagagcagtccatgtcagacctcttgttatcgccctcggacatctcttctctgcagcccctgccaaaccacatattccggctctctgggctttggaagcagtagctgtcgcagtctcggctatgggagcagatcgtgctatagcgttggatgtggctcttccgggttccgatcgttgggctacggtgggtgcggttttcctagcttggggtacggagtcggattctgccgccccacctatctggcctcacgcagctgccagtcaagctgctaccgacccacatgcgggagtggcttttactactag

SEQ ID NO: 23942 - DNA, 2253 bp, synthetic construct
  source 1..2253: mol_type = other DNA; note = Synthetic coding sequence
atggaggacctgttcgagaccttccaggacgagatgggcttcagcaacatggaagacgacggcccagaggaagaagagagggtagctgagccacaggctaattttaacaccccgcaggccctcaggtttgaggagttactggcaaaccttttaaatgagcagcaccaaattgctaaggagttatttgaacagctgaagatgaagaagccctccgccaaacagcaaaaagaagtcgagaaggtgaaaccacaatgtaaggaggtccaccagacactcatccttgaccccgcacagcggaaacgcctgcagcagcagatgcaacagcacgtccagttgcttacccagatccacttgctagctacctgtaatcctaacctgaatcctgaggcctcctctactcgcatctgtctgaaagagttagggactttcgctcaaagctccatcgcattacaccaccagtataatcctaagtttcagaccctgtttcaaccttgtaatctgatgggcgcgatgcagctaatcgaggactttagcactcacgtgtctatcgactgcagtcctcacaaaacagtcaagaagactgccaatgaatttccttgtctgcccaaacaggttgcgtggattttggcaacatcaaaagtgtttatgtaccctgagctcttgcctgtgtgctcattgaaagcaaagaatccccaagacaagatcctcttcacaaaggccgaagacaatctgctggccttaggtttgaagcatttcgaaggcacagaatttcttaatcccctgatcagcaagtacctgctcacgtgtaagacagccaggcagctgacagttcgaatcaagaatctaaatatgaatcgggcccccgacaacatcattaagttttacaagaaaactaagcagttaccggtgctgggaaagtgttgtgaagaaattcagccgcaccaatggaagcctccaattgagcgggaggaacatcggttgcccttttggctaaaggcctcccttccttccattcaagaagaactgagacatatggccgatggcgcgcgggaagttgggaatatgactgggactacagagatcaactccgaccagggcctggaaaaggataatagtgagctgggcagtgaaacccgttatcccttattgttgcccaagggagtcgtgctcaaactgaagccggtcgcagatcgattcccgaaaaaggcatggcggcagaaacgaagcagtgttctcaagcccttactcatccagccaagcccctccttgcaacccagctttaatcccgggaagactcccgctcagtccacgcatagtgaagcccccccgagcaagatggtgcttcgtattccgcaccctattcagcccgccaccgtcctacagacagtgccaggcgtgccccctctaggcgtttcggggggggagagctttgagtccccagctgctctccccgccatgccccccgaggcccgtacaagctttcctctaagcgagtctcagacccttctttcttcagctcctgtccccaaggttatgatgccttctcctgccagcagtatgttcaggaagccctatgttaggcgccgacccagcaagagaagaggggctcgtgcgttcaggtgtattaagcctgcccccgtcattcacccagcctctgtcatatttaccgtgccagctactactgtgaagattgtatcccttgggggtggatgtaacatgatccaacctgtcaacgccgccgtagcacaaagccctcaaacaatccctatcgccacactgttagtgaaccctacgtcatttccctgcccattgaaccaaccgctcgttgcaagttcagtgtcccctttaatagtgagcggaaactctgtgaacctgcctatcccttccacaccagaagacaaagctcatatgaatgttgacattgcatgcgccgtggccgatggggaaaatgccttccagggcctggagccgaagttggagcctcaggaactgtcaccgctttctgctaccgtgttcccaaaggtcgagcatagcccaggaccccccccagtcgacaagcagtgccaggagggactcagcgaaaacagcgcttaccgatggacggtcgttaagacagaagagggaaggcaggccctggagcctctgcctcaaggcattcaggagagcctcaacaactcgagccctggtgaccttgaggaggtcgtaaaaatggaacctgaggatgccactgaagagattagcggcttcctatag

SEQ ID NO: 23943 - DNA, 888 bp, synthetic construct
  source 1..888: mol_type = other DNA; note = Synthetic coding sequence
atggagctgatccaggacaccagccggccccccctggagtacgtgaaaggagttccccttattaagtatttcgccgaagcccttggacctctccagtcctttcaagcacgaccagacgaccttctgatcaatacttacccgaagagcggcactacctgggtttcccagattttggatatgatttatcagggcggtgatctggagaaatgtaaccgcgccccgatttatgtaagggtgcctttcctcgaggtgaacgaccccggcgagccttctgggctcgaaacactcaaggataccccaccaccccgattgataaaatcccatttgccacttgctctacttccgcaaactcttcttgatcagaaagtcaaggtggtgtatgtggctcgcaatcctaaagacgtggctgtcagctattaccactttcaccgcatggagaaggcacaccctgagcccgggacatgggatagttttctggaaaaatttatggcgggtgaggtgagctatggtagttggtatcagcacgtccaggagtggtgggaactaagtcgaacccatcctgttctttatctcttttacgaggacatgaaagagaaccccaagcgagagatccagaaaattctcgagtttgtggggcgcagtctgcctgaagaaactatggattttatggtccaacacacctccttcaaagaaatgaagaagaatccaatgacaaactatacaacagtcccccaagagctaatggaccactcaatcagccccttcatgagaaagggaatggccggtgactggaaaacgaccttcaccgtggcacaaaacgagcggtttgatgcagactacgcagagaaaatggcgggctgctctctgtcttttaggtcagaactgtag

SEQ ID NO: 23944 - DNA, 1476 bp, synthetic construct
  source 1..1476: mol_type = other DNA; note = Synthetic coding sequence
atggacaccaagggctgcaccaccaccaacagccccagcaccccctgccagaattgcagtagaatcacgaacgtgtctacaatttccagcaacaatggttgccaccctgggggactcactgtcaacaactgccaacctgccggacacgttctgcgcatcccctgggaccagggttgccagcctactccgaggttttgtcgaaaacccatttaccttatgaataactttaatgccaggttcagcctagatgactgtagttggtacggggaggggatcaactccaacgaaaaggagactatgcaaattctaaacgagagactggctaattatcttcagaaggtgcggatgttggagcgcgaaaacgctgagctggagtccaaaattcaggaggagtccaataaagaacttcccgtgttatgcccagactatttgtcctactacactacaatcgaggaactccagcagaaaatcctatgtaccaaggccgagaattcgcgacttgtgtctcagatcgacaacacaaaacttaccgccgacgatctgcgggccaagtatgaggctgaggtaagcctgcgccagctggtcgaaagtgatgccaatggattgaaacagatcctgaacgtgctgaccctggggaaggccgaccttgaggcacaggtccagtccctgaaggaggaactgctgtgtctaaaaaataatcataaagaagagattaattctctccaatgtcagctgggggagcgtctggatatcgaggttacagcagctccttctgctgatctcaatcaagtgctgcaagagatgaggtgtcaatacgaacccattatggagacaaacaggaaggacgtggagcagtggttcaatacacagattgaagagttgaaccagcaagtggtcacctcgagtcagcaacagcagtgttgtcagaaagagatcattgagctgcgaagatccgtaaacaccctcgaagtagagctgcaggcccagcatcgtatgcgtgactcgcaagaatgcatcctcacagaaaccgaagctcggtacacagccctgctgacccagatccagtctctgattgataacttagaggcgcagctagctgaaatccgctgtgcgctggagcgccagaaccaagagtatgagatccttctggacgttaagagccgcctggagtgcgaaatcaccacgtaccgatcactacttgagtctagtgatggcaagaggccttgctatcctagggcaactaaatgtgagccttcaccatggacatcttgtaaatccggggccatcgaaagtacagcccccgcttgtacctctagttccccctgtagcctcaaagagcattgcagtgcatgcggacccttgtcccgtatcctcgtcaagatctgcacgatcacgaaggagatcaaggacggcaaggtaatttcatcctacgagcatgtccagccatgctttattattcggcccgcaaaggtctag

SEQ ID NO: 23945 - DNA, 1287 bp, synthetic construct
  source 1..1287: mol_type = other DNA; note = Synthetic coding sequence
atgaagcggggcggccgggacagcgaccggaacagcagcgaggaggggacagctgagaaatccaagaagttgcgaacaacaaatgagcactcacagacctgtgactgggggaacttgcttcaagatattattctccaggtgtttaagtatttgccactactggaccgggcccatgcttcgcaagtgtgccggaactggaatcaggtctttcatatgccagatctgtggcgatgctttgagtttgagcttaaccagcctgcaacttcttatctgaaagcgacccacccagagctgattaagcagatcatcaagcggcactccaatcacctgcagtacgtttcctttaaggtggacagctctaaggagtccgctgaggcggcttgcgacatcttatcacagctggtcaattgtagtcttaagaccctgggcctgatcagcactgctagacccagtttcatggaccttccgaagtcacattttatctccgctctgactgtagtcttcgtcaattctaaaagcctgtcgagcctcaaaattgatgacacccctgtggatgatccatcccttaaggttctcgttgctaacaatagcgacactcttaagctgctgaaaatgagctcatgccctcatgtgagtccagcgggaatcctgtgcgtggccgaccagtgccacggactgagggagctcgctctgaactaccacctcttgtccgatgaactcctcctggccctttcctccgaaaagcacgtgagactcgaacacctgagaatagatgtcgtctccgagaatcccggccaaacacattttcacacgattcagaaatcctcctgggatgcctttattcggcattcacctaaggtcaacctggtgatgtattttttcctctacgaagaggagtttgaccctttttttcgttatgaaatcccagctacacatctgtactttggccggtctgtttccaaagacgttctgggccgggtaggaatgacgtgtcctcggttagtagaactcgtcgtgtgcgccaacggacttcgcccgctggacgaggaactgatcaggatagcagagagatgtaaaaacctgtcagcaatcggactcggggaatgcgaggtgagctgttccgcctttgtggagtttgtaaaaatgtgcggagggaggctctcccagctgtctatcatggaagaagtgcttataccagatcagaagtattccctcgaacagattcattgggaggtgagcaagcatctgggtagagtttggtttcccgacatgatgcccacgtggtag

SEQ ID NO: 23946 - DNA, 3603 bp, synthetic construct
  source 1..3603: mol_type = other DNA; note = Synthetic coding sequence
atgaacaccgacagcggcggctgcgcccggaagcgggccgccatgtcggttacccttacttcggttaaaagagtgcagtcctcccctaacctgctcgcggctggtcgtgacagtcagagtcctgacagcgcttggcggtcctataatgacggtaaccaggagaccctgaatggcgatgcgacatattccagtttagctgcaaaagggtttcggagcgtgcggcccaatttacaggacaagagatcccccactcagagtcagattacagtgaatggcaactccggcggtgctgtgtctcctatgagctactatcagcggcccttctcacccagcgcctacagcctacctgcttctcttaacagctccattgtcatgcagcatgggacctctcttgattccactgacacgtatccacaacatgctcaatctctagacgggactacttccagttctattccactttaccggtcctctgaagaagaaaagcgcgtgacagtgatcaaagccccacactaccccggcatcggccccgtggacgagtctggtattcccaccgcaattcgcacaacggtcgaccgccctaaagactggtataagaccatgttcaaacagatccacatggtacataaacccgatgacgataccgatatgtataacacgccctacacttataacgccggcctatataaccccccgtactcagctcagtcccaccctgcagcaaagacacagacatatcggccgctgtccaagtcccatagtgataacagcccaaacgcttttaaggacgcttccagtccagttcctcccccccacgtcccccctcccgtgcccccgttgaggcctcgcgacaggagcagtactgaaaagcatgactgggatcctcccgatagaaaggtggacaccaggaaatttcggtccgagccaagatctatcttcgaatacgagcccggcaagtcctctatactacagcacgagagacctgcgagcctctatcagagctctattgacaggagtctggaacggccgatgtcttcagccagtatggccagcgactttagaaaacgcaggaagagcgagcctgccgtcggccctcctcgaggtctaggcgatcagtctgcctctcggacctcacccgggcgcgtcgacctacccggaagcagtacaacactcaccaagtcattcacctcctcctcacctagtagtccctctagggccaaagggggggacgattcaaagatttgccccagcctttgtagctacagtggcctgaatggcaatccctccagcgagttggattactgcagtacttatcgacaacatcttgacgtgccccgggatagccctcgcgcaatatccttcaaaaacggctggcagatggcgaggcagaacgccgagatttggtcttccacagaggaaacagtttcccccaagattaagtcccgctcatgtgacgatttgctgaacgacgattgcgatagttttcctgatccaaaggtgaagagcgagtccatgggctctcttctctgcgaagaagatagcaaagaatcatgccccatggcatggggaagcccctacgtcccagaggtgcgatcgaatggcaggtcacggatccggcataggtcagcaagaaacgctccgggatttctgaagatgtataaaaagatgcataggattaataggaaagacctgatgaattctgaggtcatatgtagtgtgaagagcagaattctacagtacgagtctgagcaacagcacaaagatctcttaagggcctggtcgcagtgttcaacagaagaggttccacgagatatggtgccaacccggatcagcgagtttgaaaaactgattcagaagagcaaatccatgccgaatctgggagacgacatgctctcccccgtgacccttgaacctccccagaatggtctctgcccgaagcgtcggttttcaatcgaatatctgctggaagaagaaaatcagtctggacctcccgctcgcgggcgccgaggttgccaaagtaatgccctggtgcccattcacatcgaggtcaccagtgatgagcagccgcgcgcacacgttgagttctcagactctgatcaagacggggttgtgtccgatcactccgactatatacatctagagggttctagcttctgttctgagtctgactttgaccatttttcttttacgtcatctgagtcattctacggttcgtcgcatcaccaccaccaccaccaccaccatcaccaccggcacctgatatcctcgtgtaagggccgctgtccagccagttacactcgatttacaactatgctgaagcacgaacgcgcccggcacgagaatactgaggaacccaggcgccaggaaatggatccagggctcagcaagctggcatttctggtatctcccgtaccatttcgcaggaaaaagaactcagcaccaaagaagcagacagagaaagcgaagtgtaaggctagtgtctttgaggcgcttgattcagctctcaaagatatttgtgaccagatcaaggccgagaaaaagagaggctccttgcccgataacagtattctgcaccgcctcatctcggagctgcttcccgatgtgccagaaagaaattcaagtttaagggcgctgagacgatcacctctccaccagcccctgcacccccttccgcctgacggtgccatacactgcccgccctatcagaatgactgcgggaggatgccaaggtctgccagttttcaagatgtggataccgcaaattccagttgtcaccatcaggataggggaggtgctctgcaagacagagagtcccctaggtcttactcgtcaaccctgacggacatgggcagaagcgccccccgtgagcgaagaggcacccccgaaaaggaaaagctgcctgctaaggctgtgtatgatttcaaagcccagacatcgaaggagctaagctttaaaaagggagacacagtgtacatcctgcgcaagatagatcaaaattggtatgaaggcgaacatcacggccgggtcggcattttcccaatttcctatgtggagaagcttacgccccccgagaaggcccagccagctaggccaccgcccccggcgcaaccgggagagattggggaggcaatagccaagtacaattttaacgctgacaccaatgtggaattatctctgcgcaagggcgacagggtgatcttgttaaagcgtgtcgatcaaaattggtacgagggcaaaattccgggcaccaacaggcagggcatctttcctgtaagttacgtggaggtcgttaaaaagaatacaaaaggagctgaagattacccagacccccctattccacacagttattcctcagataggattcattcattgtcctccaataagccccagcgcccggttttcactcacgagaatatacaaggcggaggagaaccattccaagctttgtacaactatacacccagaaacgaggacgagctggagttgcgcgagtcagacgtcatcgacgtaatggaaaaatgcgacgacggttggtttgtgggcacttctcgcagaacaaaattcttcggaactttccccggaaactacgtcaaaagactgtag

SEQ ID NO: 23947 - DNA, 1470 bp, synthetic construct
  source 1..1470: mol_type = other DNA; note = Synthetic coding sequence
atggaggacagcgccagcgccagcctgagcagcgccgccgccaccggtactagtacttcgaccccagctgccccaactgctaggaagcagctggataaagaacaggtgagaaaggccgttgatgctctccttactcattgtaaatcccgcaaaaacaattacggacttctgctgaatgaaaatgaatcactgttcctcatggtagtactatggaagattccaagcaaagaattgcgcgtgcgcctgactcttccgcactcaattagaagtgattcagaggatatatgcctgtttaccaaagacgaacctaattcaacacccgagaagactgaacagttctaccgcaagctcctcaacaagcacgggatcaagaccgtgtcacagattatttctctgcaaaccctaaaaaaggaatataaaagctacgaggcgaagctgaggctactctcctcttttgacttctttctgacagacgcccgaatccgaagactgttgccatcactcataggtcgccatttttaccagaggaagaaggtgcccgtcagtgtcaatctgctgtcgaagaacctgtcacgagagattaatgactgcattggcgggaccgttctgaacatcagcaaaagcggcagctgctccgcaattaggatcgggcacgttggaatgcaaattgagcatattattgaaaatatcgtggccgtgactaaaggtctcagcgagaagcttccagaatgggaatccgtcaaattgctattcgttaagaccgagaagagtgcagcactgccaattttctcttcttttgtatcgaattgggacgaagccactaaacgttccctgctcaacaagaaaaagaaagaagcaagaagaaaaagacgcgagcggaacttcgagaaacaaaaggagcggaagaaaaaacggcaacaggccaggaaaaccgcttctgtgctctctaaggatgacgtggctccagaatcgggcgacacaacagtgaaaaaaccagagagcaagaaggagcagacacccgaacatggaaaaaaaaagagaggtagaggcaaagctcaggtgaaagctaccaacgagtcagaggacgaaattccccaactggtgcccattgggaagaagacccctgcaaatgaaaaagtggagatccagaagcacgccacgggaaagaagtcaccagccaaaagtcccaaccctagtaccccaaggggcaaaaagcgaaaggcactgcccgccagtgagacccctaaggccgcagaatcagagacgcctggaaagtcccctgaaaaaaagccgaaaatcaaggaagaggctgtgaaggagaaatcaccaagcctgggaaaaaaagatgcccggcaaactcctaaaaaaccagaagccaagttcttcactacgccttcaaagtctgtgaggaaagctagtcacacaccaaaaaaatggcccaagaagccaaaagttcctcagagcacgtag

SEQ ID NO: 23948 - DNA, 3171 bp, synthetic construct
  source 1..3171: mol_type = other DNA; note = Synthetic coding sequence
atggccggcgccctgcggcggggccgggccctgggcagccggccctccggcccgacagtgtcgtcacgccggagcccacaatgccctgtcgcacaggagggactgggggcacgttccaggccacgagttgccccccgaagcctggcccgctgtggcccttcctcacgcctgatggggtggaaaccttccgaagcccggggccaatcccagagctttcaggcctcaggtctccaaccgcggagcctgaaggccgcacggagagctaccggcagacctgatcgatcacgtgcagccccccctaacatggaccccgacccccaggctggggtccaggttggaatgcgagttgtgcgaggcgtggattggaaatggggtcagcaggatggtggtgagggaggagtggggaccgtcgtggagcttgggagacacggatccccatctacacctgaccgcacggtcgtagtgcagtgggatcagggcacccggaccaactaccgtgcaggctaccagggagcccacgatcttctgctgtatgacaacgctcagattggggtgagacaccctaatatcatctgtgattgctgcaagaaacatggcctgcgcggcatgaggtggaaatgtcgggtgtgcctggattacgacttgtgcactcagtgctacatgcacaacaagcacgagctggcccacgcatttgatcgttacgaaactgcccactctagaccagtgaccttgagtcctcgacagggcctgccacgcattccactacgggggatctttcagggggctaaggtcgtccgcgggcctgactgggaatggggcagccaggatggcggcgaaggaaaaccaggccgggttgtcgacattcgtggctgggacgtcgagacgggtcgatctgtggcatctgtgacatgggcagacggaactacaaatgtgtatagagttggtcacaaaggtaaggttgacttgaaatgtgtgggtgaggccgccggcggcttttactacaaagaccacctgcctcgcctggggaagcccgccgagctacagcggcgcgtgtcagccgactcccagccatttcaacacggagataaggtaaaatgtctgttggataccgacgtccttcgggagatgcaagaggggcacggcggatggaatccccgtatggcagaatttattggtcagacgggcacagtacatcggatcaccgacagaggggacgtcagggtccagttcaatcatgagaccaggtggacatttcaccccggagcccttacaaaacaccacagtttctgggtgggggatgtggtgcgagtaatcggagacctcgacaccgtgaagaggctccaagctggacacggcgaatggacagatgacatggccccagccctgggccgtgttggaaaagtggtgaaggtcttcggtgatggtaatttacgggtagcagtggctggccagaggtggactttttcacctagctgccttgtcgcctaccggccggaagaggatgccaaccttgacgtcgctgaaagggccagagagaacaaaagctccctcagcgtcgctttggacaaattaagagcacagaagtctgatccagagcacccaggtcgcctcgtcgtcgaggtggcactcggaaacgcagcccgcgcactggatttgctccgcagaagaccggagcaggtcgataccaagaatcaaggtcgaaccgcactccaggtcgctgcttatcttggccaggtcgagctaatcagactcctcctccaggcccgcgccggagtggaccttcccgacgatgagggaaataccgccctgcactacgcagctctggggaaccagccagaagctactagagtactgctgtcagccggctgtcgtgccgacgctatcaactcaactcaatcgaccgctttacacgtggctgtgcagcggggttttctcgaggtggtgagagccctctgcgaacgcggctgtgatgtgaacctcccagatgctcactccgacacccctttgcactctgctatatcagctggcaccggcgcctcgggcatcgtggaggtgcttaccgaagtcccaaatatcgacgtgacggccaccaacagccaggggttcactctgctccatcacgcgagtttgaaaggccatgcactggccgtcagaaaaattctggcaagagcgaggcagctagtcgatgccaagaaggaggacggatttacagccctccacctggctgctctcaataaccacagagaagtagcacagattctgatcagagaaggacgatgtgatgtgaatgtgcgaaaccggaagctgcagtcccctctccatctcgccgtccagcaggctcatgttgggctggttcctcttcttgtcgacgccgggtgcagcgtgaacgcagaggatgaggagggagatacggctctgcatgttgcccttcagagacatcagctgctccctctggttgcagatggagctggcggggacccagggccgctgcaactgctttcgcgtctccaggccagcggtctgccggggtctgcagaacttactgtgggagctgctgtagcttgttttttagctcttgagggagccgacgtgtcctacaccaatcaccgggggcgttcccccttggatctggcagctgaaggacgcgttctgaaggcgttacaaggctgcgcccagagattccgagagaggcaggcaggggggggcgccgcaccagggccccgacaaacccttggtaccccgaataccgtgacaaatctccacgttggtgccgcccccggccctgaagcggccgagtgtttggtgtgtagcgagctggctctcttggtcctcttttccccttgtcagcaccgcactgtgtgcgaggagtgcgcgcgtcgcatgaagaagtgcattagatgccaagtcgttgtgagtaagaagctgcgaccagacggctccgaagtggcgtctgctgcgcctgcacctggaccaccgcggcagttggtggaagaactccagagccggtaccggcagatggaggagcgcataacctgtccgatttgtatagattcgcatatcaggttggtatttcagtgtgggcacggcgcctgcgcaccctgtggctccgcactgtctgcatgccctatctgtaggcagccgatccgagatagaatacagatatttgtgtag

SEQ ID NO: 23949 - DNA, 858 bp, synthetic construct
  source 1..858: mol_type = other DNA; note = Synthetic coding sequence
atgagcgaggccggcgaggagcagcccatggagaccaccggcgccaccgaaaatggccacgaagccgtaccagagggcgaaagccccgcgggagctggaaccggtgctgccgcaggagctgggggcgccacagctgctcctccctcggggaaccaaaacggcgcagagggggatcagataaacgcctcaaaaaacgaggaagacgctggcaaaatgttcgtcgggggtctgagctgggacacatccaaaaaagacctaaaggactatttcacgaagtttggcgaagtggtggactgtacgatcaagatggacccaaatacgggacgcagccgcgggttcggatttattctgtttaaggatgcagcatccgtcgagaaagtgttagaccagaaggagcatcgcctggacggccgggtcatcgacccaaagaaagccatggcaatgaagaaggatcctgtgaaaaagatctttgtgggcggactcaacccagaggctactgaagagaagatcagagaatatttcggcgaattcggagagatagaggcgattgagttgcccatggatcctaagctcaacaaacgaagaggtttcgtgtttattacatttaaggaagaggagcctgtaaagaaagtgctcgagaagaagttccacactgtgtcaggatctaagtgcgaaatcaaagtcgctcagcccaaggaggtctaccagcagcaacaatacggctccggtgggaggggaaatcggaataggggtaatcggggatccggcgggggtggaggaggtggtggccaggggtcaacaaattacggcaaatcgcagcgcagaggcggccaccagaacaattataaaccctactag

SEQ ID NO: 23950 - DNA, 1212 bp, synthetic construct
  source 1..1212: mol_type = other DNA; note = Synthetic coding sequence
atgagcggcagcgacggcggcctggaggaggagcccgagctgagcatcaccctgacactgcggatgcttatgcatgggaaagaggtagggagtatcattggcaaaaaaggggaaaccgttaagcgaattcgagaacagtccagcgctcggataactattagcgaggggagctgtccagagcgaattactactatcaccggatccactgccgccgtcttccacgctgtgtccatgatcgcctttaaattagatgaagacttgtgtgctgctcctgcaaatgggggaaatgtgtctaggccccctgtgactctccggctagtgattccagcctcccaatgtggatctttgatcggcaaagccggaaccaagataaaagaaatacgtgaaacgacgggcgcccaggtccaagtggctggcgacctgctgccgaacagcacggagcgggcggtcaccgtatctggcgtgcctgacgctattatcttgtgtgtcaggcaaatttgcgcagttatcctcgagtcgcctcctaagggcgccacaatcccgtaccatccgtcgttaagcttaggtaccgttctgttatccgcgaatcagggcttttcagtacaaggccaatatggcgcagttacccccgccgaagtaacgaagctccaacagctgagttctcatgcagtcccctttgccaccccttctgtggtgcctggcctcgatcccggcacccagacatcctctcaggagttcctcgtacctaacgacttgataggatgtgtcattggacgccaaggttcaaaaattagcgaaataaggcagatgagtggtgcccatattaagatcgggaatcaggcagaaggggctggagagagacatgtcacgatcactgggtcccctgtgagcatcgccctcgctcagtatcttataactgcttgtctggagacagccaagtctacctctgggggaacaccttcctccgctcctgcagacctccccgctccgttcagtccaccactaacagccctcccgacagcgccacccggactgcttggcactccatatgccatcagtctgagtaactttatcggcctcaagccgatgccttttctagccctcccccccgcttcccctggacctccacctggactggctgcctataccgccaaaatggccgcagctaatggaagcaaaaaggcggaacggcagaagtttagtccctattag

SEQ ID NO: 23951 - DNA, 1347 bp, synthetic construct
  source 1..1347: mol_type = other DNA; note = Synthetic coding sequence
atggccaccgacagctgggccctggccgtggacgagcaggaggccgccgcagagtcactgtcaaacctgcatcttaaagaggagaaaatcaagcccgacaccaatggagcggttgtcaagacaaatgccaacgcagagaaaactgatgaggaggaaaaagaggatcgcgccgcccagtcactcctgaataagttgattcgtagtaatctcgtggacaacactaatcaggtggaagtactccaacgcgaccctaatagcccactgtatagcgtgaaatcgtttgaggagctgcggctgccacagaacctgatcgcgcagagccagagcggcacaggcaagaccgctgctttcgtgctggccatgctgagccaggtggagcccgcgaacaagtacccacagtgcctgtgtctttcccccacttatgagttagccctgcagaccggcaaggttattgagcagatgggcaagttttacccggagctgaagctggcgtatgctgtcaggggaaacaaacttgagcgcggccagaaaatctcggaacaaatcgtaattggcacacctggaaccgtgcttgactggtgctcaaagcttaagtttattgatcctaagaaaataaaggtatttgtgctggacgaagccgatgttatgatcgctacccaggggcaccaggaccagagtatccggattcagcgaatgctaccacggaattgccagatgctactgttctctgccacattcgaagattctgtctggaaattcgcacaaaaggtggtgcctgaccccaacgtgatcaagctgaaaagggaggaggagactctggatactatcaaacaatactatgtcttatgctcttctagggatgaaaaatttcaggccctctgcaatctgtacggtgccatcactattgcccaggcaatgattttctgtcataccaggaaaaccgcctcctggctggcagcagaactgtccaaagaaggacatcaagtagctctgttgtccggagagatgatggtggaacagagggccgcagttattgaacgatttagagagggcaaggagaaagtgctggtaacaactaatgtctgtgcaaggggcatagatgttgaacaggtctcggtagtcatcaatttcgaccttcccgtcgacaaggacggtaaccccgataatgagacctacctgcaccggatcggcagaaccggacggtttgggaagcgggggctggccgtaaatatggtggattccaagcactcaatgaatattctgaaccgcattcaagagcattttaacaagaagattgagaggctagatactgacgatctcgatgaaatcgaaaaaattgccaactag

SEQ ID NO: 23952 - DNA, 1248 bp, synthetic construct
  source 1..1248: mol_type = other DNA; note = Synthetic coding sequence
atgatgctgggccccgagggcggcgagggcttcgtggtgaagctgagggggttaccatggtcgtgcagtgttgaggacgtacagaacttcttgtctgactgtacaatccatgatggggcagcaggcgtccactttatttatactcgcgaaggacgccagtccggagaagcctttgtggaactcggatccgaggatgatgtgaagatggcacttaagaaggatcgcgaatcgatgggccataggtatatcgaggtcttcaagagtcaccggactgagatggactgggtactgaaacatagcggccctaatagcgccgattcagcaaatgatgggtttgtgcgattgagaggcctgccttttggctgtacgaaggaggaaattgtgcagttttttagtggtcttgagatcgtgccaaacggcatcacactgcccgtggacccagaagggaaaatcacaggcgaggctttcgtacagttcgccagccaggagctggcagaaaaagcacttggcaaacacaaggagcggatagggcataggtatattgaagttttcaagtcctctcaggaggaggtccgcagctatagcgatcctccattaaagtttatgagcgtacagaggcctgggccatatgaccgccccggtaccgcgagaagatatattggtattgtgaagcaggctggcttagaacgcatgagacccggggcgtactccactggctacggagggtacgaagagtatagcggcctcagcgatggttatgggttcaccaccgacctctttggaagggacttgtcatattgcctctcagggatgtacgatcacaggtatggggacagtgagttcaccgtgcagtcaaccacaggccactgtgtgcatatgcgcggcctcccctacaaggcaactgaaaatgatatttacaatttttttagccctctcaaccctgtgcgcgtccacatcgagattggacctgacgggcgagtgacaggcgaggcagacgtagaattcgcaacacacgaggaagccgtggccgctatgagcaaagatcgagctaatatgcaacaccgctacatagagctgtttttgaatagcactacaggagcgtctaatggagcttactcctctcaggtgatgcagggaatgggtgtgtctgcagcccaggcgacttactctgggttggaatcccagagcgtgagtggatgctacggagccggatattccggtcaaaattccatgggcggctacgattag

SEQ ID NO: 23953 - DNA, 1026 bp, synthetic construct
  source 1..1026: mol_type = other DNA; note = Synthetic coding sequence
atggcccaggagagccccaagaacagcgccgccgagatccccgtgacaagcaatggagaggttgatgattcaagggaacattcttttaaccgcgatctcaaacatagtctcccgtccgggctgggattatctgagactcaaataacttcccatggattcgataatacaaaggagggggtcatcgaggccggagcctttcagggcgggcagaggacccagacgaaatccggtcccgtgattcttgcggacgagattaaaaatccggccatggagaaactggagctggttagaaaatggtctcttaacacctataaatgcacgagacagataatttcggagaaattaggcaggggatccagaaccgtagatcttgaactggaagcccagatcgatatcctgcgcgacaataagaaaaagtacgaaaatatcctgaaattggcccagacgctatccacacaactgtttcagatggtacatacccaaaggcaactgggagacgctttcgccgatcttagtttaaaatccctagaactccacgaggaatttggatataacgccgacacgcagaaactgctcgccaaaaatggcgaaactctcttaggtgcaatcaatttcttcattgccagcgttaatacacttgtaaacaaaaccatagaagatacactgatgaccgttaaacagtacgagtcagctcgcattgagtacgacgcctatcgcactgatctcgaggaactcaacctcggtcccagagacgcaaatacgttgccaaaaatagagcagagccagcatctgttccaagcacacaaggaaaagtacgataaaatgcgaaacgatgtgagcgtcaaactcaaattcctcgaggagaacaaagtgaaggtccttcacaaccagctggtcttatttcacaatgccatcgccgcctattttgctggcaaccagaagcagctggagcagactctgaagcagttccatattaaactcaagactccaggagtggatgctccatcctggctcgaagagcagtag

SEQ ID NO: 23954 - DNA, 1572 bp, synthetic construct
  source 1..1572: mol_type = other DNA; note = Synthetic coding sequence
atggccaacgtgggcctgcagttccaggccagcgccggcgacagcgatccccagtctcggcccctgctgctgctcggtcagttacaccacctacatcgtgtgccttggtctcatgtccgcggtaagctccagccacgagtcacagaagagctgtggcaggctgctttgagcactttgaaccctaaccccaccgacagctgccctctctacctcaattacgcgaccgtggccgccctgccctgtagggtctctagacataacagccctagtgccgcacactttattacccgcctcgtcagaacctgcctaccaccaggcgcacatcgctgtatagtaatggtgtgtgagcagcccgaggtgttcgcaagtgcctgcgctctggcccgggcctttccattattcacacacaggtctggggccagtaggcgactggagaaaaagactgtgactgtggagttctttctggttgggcaagataatggaccagtggaagtgtcgacgcttcagtgcctggctaacgctaccgacggagtcagattagccgccaggatcgtcgatacgccctgcaacgaaatgaacactgacaccttcctggaagagataaataaagtgggcaaggaacttgggattattcctactatcattcgcgatgaggagctgaagactcgcggattcggcggaatctatggagtcgggaaggctgctctccatccccccgctctggctgtgctgtcacacacacccgatggcgccacacagactatcgcctgggtgggaaagggaatcgtctacgatacaggcggtctatcaatcaaaggtaaaaccaccatgcccggaatgaaacgggactgcggaggcgccgccgcagtgctgggcgcttttcgtgccgcgataaaacaggggtttaaggacaatttgcatgctgtcttctgcctagcagaaaactccgtcggaccgaacgcaacgcgtccggatgacattcacctgctctattcaggaaaaaccgtggagattaataacacagacgctgaggggcggttggttctcgcagacggtgtgtcatatgcgtgcaaggacctgggcgcggatatcattctcgacatggcaactctgacaggtgcgcagggaatcgccaccggaaagtatcacgctgcagtgttaaccaacagcgccgagtgggaagcagcctgcgtcaaggcggggagaaagtgcggggatcttgttcaccccctggtttattgcccagagctacatttctccgagtttacttcggcagtcgccgatatgaaaaattccgtggccgaccgcgacaatagtccctcctcatgcgccggcctttttatcgccagccacatcggctttgactggccaggggtatgggttcacctggatatcgccgcgcctgtacatgctggagagcgggcaacgggttttggagtagctctgttgctcgctctgtttggtagggccagcgaggacccgttgctgaacctcgtgtctccccttgggtgtgaagtggatgttgaagagggggatctaggaagagattctaagcggcggaggttagtgtag

SEQ ID NO: 23955 - DNA, 1371 bp, synthetic construct
  source 1..1371: mol_type = other DNA; note = Synthetic coding sequence
atggccgacggcggcagcgagcgggccgacggccggatcgtgaagatggaggtggactacagtgcaaccgtggatcagcgtctgccagaatgcgcaaagctggccaaggaaggcaggcttcaggaggttatcgaaaccctgctatcccttgagaagcagacaagaacagcgtcagacatggtgtcaacaagcagaattctagttgccgtggttaaaatgtgctacgaggctaaggaatgggatctgcttaacgaaaacatcatgctactgagcaagagacggagtcagcttaagcaggctgtggctaaaatggtgcagcaatgctgcacttatgtagaggaaattaccgacctgccaattaagttaaggctgattgacactctgcgcatggtgacagaaggcaagatctatgttgagattgagagggcaagactgacaaaaacacttgcgactataaaggaacagaacggtgatgtcaaagaggcagcatccattcttcaggagctccaggtcgagacatacggcagcatggaaaagaaggaacgggttgagtttatcctggagcagatgcgtttatgcttggccgtgaaggactatatccgcacacagattattagcaaaaaaatcaacacaaaattctttcaagaggagaatacagaaaagcttaagcttaagtactataacctgatgatccagctggaccagcatgaggggagctatctctccatctgcaagcattacagggccatctacgataccccatgtatccaggcggagagcgagaagtggcagcaggcgctgaagagcgtggtcctttatgttatcctggctccatttgacaatgagcagagcgatctcgttcatcggatttccggcgacaaaaagttagaagagattcccaaatataaggatttgctgaaactattcaccacaatggaactgatgcggtggtccactttggtggaggactacggaatggaactgagaaaaggatccctggaatcccccgcaaccgacgtgtttggtagcacagaggaaggggaaaaaagatggaaggatctgaagaaccgcgtcgtggaacataatattagaattatggctaagtactacacgaggatcaccatgaaacggatggctcagctactcgacttgtcagtggatgaatctgaggcctttctcagtaacttagtggtgaacaagacaatcttcgccaaggtagataggttagctggtatcatcaattttcaacggcccaaagacccgaacaacctactcaatgactggtctcaaaagttaaattccctgatgagcctggtcaataagactacacacctgatcgccaaagaggagatgatccataacctgcagtag

SEQ ID NO: 23956 - DNA, 1011 bp, synthetic construct
  source 1..1011: mol_type = other DNA; note = Synthetic coding sequence
atgaagatcgacatccacagccacatcctgcccaaggagtggcccgaccttaagaaaaggttcggctacggaggatgggtgcagctgcaacaccacagtaaaggcgaggccaagctcctcaaggacgggaaggtgttccgggtggtcagggagaactgttgggatcccgaagtgcgcatacgcgaaatggaccaaaagggcgtgacagtgcaggctctcagtaccgttcccgtgatgtttagctactgggccaagccagaggacactcttaatttgtgccagctgcttaataacgatctagcttctacagtcgtatcctaccctaggaggtttgttggcctcggcactttgcctatgcaagcccctgaactcgcggtcaaggagatggagcggtgcgtgaaggaactcgggttccctggcgtccaaattggtacccacgtgaacgaatgggacctgaacgcgcaagaactgtttcctgtgtacgctgctgctgagagactgaagtgctccttgttcgttcatccttgggatatgcagatggatgggcgcatggcaaaatattggctcccttggttagtaggcatgcccgcggaaaccacaatagccatctgttctatgatcatgggaggggtgttcgagaagtttcccaaactgaaggtctgtttcgcacatggcgggggggccttcccattcacagtcgggaggattagccatggattcagtatgcggccagacttatgcgctcaggataaccccatgaaccctaaaaaatatctagggagcttctacacggacgccttggtccacgaccccttgagccttaagctgctgacagacgtgattggcaaagacaaggtcattctcggaacggattaccccttccccctgggagaactggagcccgggaaacttatcgaaagcatggaggagtttgacgaagagactaaaaacaagctcaaggcgggaaacgctctcgcctttcttggcctcgaacgcaaacagtttgagtag

SEQ ID NO: 23957 - DNA, 1617 bp, synthetic construct
  source 1..1617: mol_type = other DNA; note = Synthetic coding sequence
atggagctgagctaccagaccctgaagttcacccaccaggcccgggaggcatgcgagatgcgcaccgaagcacgccgtaagaatctacttatcctaattagtcattatctgacccaggagggatacattgacactgccaatgcccttgagcaagagaccaaactcggtctcagacggttcgaggtctgcgacaacattgatctcgagaccattctgatggaatacgagagctactatttcgtaaagtttcagaagtacccaaagatagttaagaagtcctctgacaccgctgagaacaacttgccgcagcggagccgggggaaaacccgcaggatgatgaatgattcctgtcagaacctccctaagataaaccaacaacgacctcgaagtaaaacgactgccggcaaaacgggcgataccaagagcctcaataaagagcacccaaatcaggaggtagtagataacacgaggctggaaagcgctaacttcggcctccatataagtagaatcagaaaggacagtggcgaggaaaacgcccaccccagacgcggccagatcattgattttcaggggctgttaaccgacgcaatcaagggcgctacttcagagctcgctctgaacacctttgaccacaatccagacccctcggagagacttttgaagccgctgagcgcctttataggaatgaactccgaaatgcgagagctggccgctgttgtgtcgcgggatatataccttcataaccctaatatcaagtggaatgatattattggattggacgcagccaagcaactggtcaaagaagccgtcgtgtacccaatcagataccctcagctgtttacaggaattctttctccctggaaaggactcttgctgtatgggcctcccggaactggaaagaccctcctggctaaggctgttgcgactgagtgcaagacgacgtttttcaacatctcggcatccaccattgttagcaaatggagaggagattccgagaagctggtgagggttctcttcgagctcgccagataccacgcacctagcacgatctttttagacgaacttgaatccgtcatgagccagagagggactgcttcgggaggagaacacgagggcagcctgaggatgaaaaccgaactattggtgcagatggatggccttgcacgttcagaggacctggtctttgtcctggccgcctcaaatcttccctgggaactagactgcgccatgctgaggcggctggaaaagcgcattctcgtggacctgcctagccgggaggcgaggcaggcaatgatatatcactggcttccccccgtttccaagtccagggccctcgagctgcacaccgagctggaatattccgtgctctctcaggagactgaggggtattctgggagcgacatcaaactcgtatgcagagaggcagccatgcgacccgtccgaaagatcttcgatgccctagaaaaccaccagagtgagtctagtgacctgcccagaatacaactagacatcgttaccactgcggatttcctagacgtgttgacacatactaagccctccgctaaaaacctggcacagcgttactccgattggcaacgagaatttgaatccgtctag

SEQ ID NO: 23958 - DNA, 507 bp, synthetic construct
  source 1..507: mol_type = other DNA; note = Synthetic coding sequence
atggccgagggcagccggatcccccaggcccgggccctgctgcagcaatgcttgcacgccaggctacagatccgccctgccgacggagacgtggccgcccagtgggtggaggtacagcgtgggctggtcatatatgtgtgcttcttcaagggtgcagacaaggaattgcttcctaaaatggtcaacacactgttgaatgtgaaactgagcgaaacggagaatggcaagcacgtcagtatcctagacctgccaggcaatattttaatcatcccacaggcaacattgggtggccgactcaaggggagaaatatgcagtaccactccaatagtggcaaagaggaagggttcgaactgtattctcaattcgtgactctgtgcgagaaagaggtggctgccaattctaagtgcgcggaagcccgcgtcgtcgtagaacacggcacttatggaaataggcaggtgctgaaattggacactaatggccccttcactcatcttatcgaattctag

SEQ ID NO: 23959 - DNA, 1764 bp, synthetic construct
  source 1..1764: mol_type = other DNA; note = Synthetic coding sequence
atggccagcgaggacatcgccaagctggccgagaccctggccaagacccaggtggccggcggtcagttgagctttaaaggaaaatctttgaagctcaataccgcagaggatgccaaggatgtgatcaaagaaatcgaggattttgacagcctggaggccttgcgtttggagggcaacaccgtgggggtcgaagcagcgcgagtgatagcgaaggcgctcgagaagaaatctgagttgaagagatgtcattggtccgacatgtttactggcagactgcgaactgagattccccccgcactgatttcactgggggaaggacttattactgccggcgcccagctcgttgaactggatctgagcgataatgcattcggtcccgacggcgtccagggatttgaagccctgttgaagagctccgcatgtttcaccctccaggagctgaagcttaacaattgtgggatgggcatcgggggcgggaaaatcctggccgcagccctcacagagtgccaccgaaaaagttctgctcaagggaagccattagctctgaaagtctttgtcgcaggcaggaaccggttggagaacgacggcgccacagccctggctgaggcattccgagttattgggacacttgaggaggtacacatgccgcagaacggtatcaaccatcccgggatcaccgccctggcccaggcattcgcagttaatcccctactgcgcgtcattaacctgaacgacaatacgttcacagagaagggcgccgtggccatggctgaaaccttgaagacactgcggcaagtagaagtcatcaacttcggcgactgtctagtgcgatccaagggagcagttgcaatcgcagacgctatccggggcggcctgccgaagctgaaggagttgaatctttctttctgtgagatcaagcgcgacgctgctttggccgtggctgaagccatggcagacaaggcagagttggagaaactggatttaaacggaaatactctgggcgaggaaggatgcgaacagctacaggaggtcctggagggattcaatatggcaaaggtgctcgctagtctatctgacgatgaagatgaggaagaagaagaggaaggagaggaagaggaggaagaagcggaggaggaagaagaggaggatgaggaagaagaggaggaggaggaggaggaagaggaagaagagccacagcagcgaggacaaggtgagaaaagcgctacaccgtcgcggaaaattctcgatccaaacaccggtgaacccgctccagtcctcagttcccctccaccagccgatgttagcacattcctggcctttcctagtcctgagaagttgctccggttgggtcctaaatcatcagtcctgattgcccagcagacagatacatctgatccagaaaaagttgtgtccgcgtttctcaaggttagctccgttttcaaggatgaggctacagtgcgaatggcagtccaagacgcggtagatgccctgatgcagaaggccttcaattcatctagctttaacagcaacacgttcctgacccgcctgctagtgcatatgggacttttgaaaagtgaggataaggttaaggccattgctaacctgtatggccctttaatggctttaaaccacatggtgcaacaggactattttccaaaggctctggcaccccttctgctggcttttgtgaccaagcccaactctgcactcgaatcctgttctttcgctagacatagtcttctgcagactctttataaggtgtag

SEQ ID NO: 23960 - DNA, 2529 bp, synthetic construct
  source 1..2529: mol_type = other DNA; note = Synthetic coding sequence
atggacatcagcaagggcctgcccggcatgcagggcggcctgcacatctggatatcagagaatcgcaagatggttcctgtaccagaaggtgcatacgggaacttcttcgaagagcattgctacgtcattctacacgtgccccagtcacctaaagcgacccagggggcctcaagcgatttgcactactgggtcggaaaacaggcgggggcagaagcacagggcgctgccgaagcctttcagcaacgattacaggacgaactgggcggacagacggtgctgcaccgggaagcccagggacacgaaagtgattgtttctgctcatatttccgtccagggattatatacaggaagggggggctggcatcggatctgaagcacgttgagactaatttattcaacatccagcggttgctgcatattaaaggccgcaagcacgtcagtgctacggaggttgagctctcatggaactcctttaataagggagacatttttttacttgatctggggaagatgatgattcagtggaacggacccaagacttcaatcagtgaaaaagccagagggctagccttaacttattctctccgagaccgcgaaagaggcggcggacgggcccagatcggcgtggttgacgacgaggccaaggcacccgatctgatgcagatcatggaggcagtactcggccgtcgggtcggctcgctccgcgcagctactcccagtaaggatattaatcagctgcaaaaagccaatgtacgcctctatcacgtctacgagaaggggaaggatctgctgcaggaggaggacttttacattctcgatcagggaggattcaagatttacgtatggcagggacgtatgtcttccctacaggagcggaaggcagcttttagccgcgcagtagggtttattcaggccaaaggatatccaacttacactaatgtggaagttgtcaatgacggcgcggagtcagccgcttttaagcagctctttcggacctggagcgagaaacgccgccgaaaccagaagcttggaggcagggacaaatccatacatgtgaagttggacgtcggcaagttacatacccaacctaaactcgccgctcaactccgaatggtggacgacggatccggcaaagtagaagtttggtgcatccaggatctccatcgccagcccgtggacccaaaacgtcatgggcaactgtgcgctgggaactgctatctcgtgctgtacacctatcagcggctggggcgggttcagtatattctgtacctctggcagggacaccaggccactgccgatgagatagaagcactaaattcaaatgcggaagagcttgacgtaatgtacggcggggttcttgtgcaggagcacgtcactatgggtagtgaaccaccacacttcctcgccatcttccagggccagctggtgatctttcaggaaagggccggacatcatggtaagggccagagcgccagcaccacaaggctcttccaggtgcaaggtactgactcacacaatactaggaccatggaggtcccagcacgcgccagcagtcttaattcttcagacatcttcctcctcgtcacagcttctgtgtgttacctgtggtttggaaaggggtgtaacggggatcaacgagaaatggcacgcgtggtggtaaccgtaatatcaagaaaaaatgaggaaaccgttcttgagggacaggaacccccacatttctgggaagctttgggaggccgggccccttatccatccaacaagcgcctgccggaagaggtcccctcatttcagccacgactcttcgagtgcagctcccatatgggttgtctcgtgctcgccgaggtcggctttttctctcaggaggatctggacaaatatgacatcatgctgctggatacctggcaggagattttcttatggttgggggaagcagcctccgagtggaaggaggcagttgcatggggtcaggagtacttgaagacacaccctgctgggcgtagccccgccacacctatcgtcctggtcaaacagggacatgaaccaccaacgtttataggctggttcttcacctgggacccatataagtggacttcccacccatcccataaagaagtcgtcgacggctccccagcagctgccagcaccatttccgaaataaccgccgaagttaacaatttgagactaagcaggtggcctggaaacggaagagcaggggccgtcgcccttcaggctttaaaaggatctcaggattcgagcgagaatgatctggtgagatcacctaaaagcgcaggcagccgtacctcttcgtctgtaagcagtacttccgcaaccatcaatggcggattgcggagagaacagctaatgcatcaggccgtcgaagacctgcccgagggagttgatcccgctaggcgcgagttctacctctctgactccgatttccaggatatatttgggaagtctaaggaagaattttactcaatggccacatggcggcagagacaggaaaagaaacagttgggatttttctag

SEQ ID NO: 23961 - DNA, 1620 bp, synthetic construct
  source 1..1620: mol_type = other DNA; note = Synthetic coding sequence
atggacgccatggccagccccggcaaggacaactaccggatgaagtcttataagaataaagcattaaatccacaggaaatgcgaaggagacgcgaggaggaagggatccagctgcggaaacagaagagagaagagcagttgtttaagcggaggaacgtttacctgccaaggaatgacgaatcaatgctggaatcccccatccaggacccggatattagttcaactgtacctatccccgaggaagaggtggtgaccactgatatggtacaaatgatcttttcaaacaacgctgatcagcaactgactgcaacccaaaagtttagaaaattgctgtcaaaagaaccaaatcctcctatcgatcaggtgatacaaaagcccggcgtcgtacagcggttcgtgaagtttctggaacggaacgaaaattgcaccctgcagttcgaagctgcttgggctctgaccaatatagcctccggtactttcctgcacacaaaagtcgttatcgagaccggagcggttcctattttcatcaagttgctaaattcagaacacgaagacgtccaggagcaggccgtttgggccttgggaaacatcgccggggacaacgccgagtgtagggacttcgtgttaaattgcgagattcttcctcctctgctggagctactgactaactccaatcgcctaactacgaccagaaacgctgtgtgggccctctccaacctatgtcgcgggaaaaatcccccgccgaacttctcaaaagtctccccatgtctgaatgtactcagccgcctgctgtttagttccgaccctgatgtgcttgcagatgtctgttgggccctgtcctacctatcggacggtcccaacgacaagattcaagccgtgattgacagcggcgtgtgtaggcggcttgtggagctcttgatgcataatgattacaaagtcgtaagccctgccctgcgggccgttggcaatatcgtgacaggagatgacattcagacgcaggtcatactaaactgcagcgcactgccctgccttctgcacctgctctcctctcccaaggagtctatacggaaggaggcctgttggacggtgtctaatatcactgccggcaacagagcccaaattcaagctgtgattgacgctaacatctttcccgtgttgattgagattctgcaaaaggctgaatttcggacgcgaaaagaagctgcctgggctataaccaatgctacatcagggggcacccctgagcagatcaggtacctggtagctcttgggtgcataaaacccttgtgcgacctgctgacagtcatggatagcaaaatcgtgcaggtagctttgaatggcctcgagaacattttaagactcggagagcaggaatctaagcagaatggcattggcataaatccatattgcgccctcatcgaagaagcttacggattggacaaaatcgagtttctccagtcccacgaaaatcaggaaatataccagaaagcctttgatctgatcgagcattactttggcgttgaagaagatgacccaagcatcgtgccccaggtggacgagaatcagcagcagtttatctttcagcaacaggaagccccaatggacggattccagttgtag

SEQ ID NO: 23962 - DNA, 3735 bp, synthetic construct
  source 1..3735: mol_type = other DNA; note = Synthetic coding sequence
atgctgatcaaggagtaccacatcctgctgcccatgagcctggacgaataccaggtggcccagctatacatgattcaaaaaaagtcaagagaggagagtagcggcgagggatctggcgtggaaattctggcaaacaggccttacaccgatggccctggcggaagcggccagtacacccataaagtgtatcacgtgggaagtcatatccccggttggttccgagccctactgcctaaggcggcactgcaggtagaagaagagagctggaatgcctacccctacacacggaccagatatacatgccccttcgtggaaaagttttccattgaaattgagacctactacctccccgacggaggccagcagccaaacgtgtttaacctgagcggagctgaacgccgacagcggatccttgataccatcgacattgtacgtgacgctgtggctccgggagagtataaagccgaagaggacccccggctttaccattccgtcaagaccggaaggggaccactgagcgacgactgggctcgcaccgccgcccaaaccgggccactcatgtgcgcctacaaactatgcaaagtggagtttcgttactggggcatgcaggccaagatcgaacagtttatacacgacgtgggcttaagaagagtaatgctgagggcacatcggcaggcctggtgttggcaggacgaatggacggagctttcaatggccgacatcagagctctcgaagaagaaaccgcgcgaatgcttgcacagcgaatggcaaaatgcaacacaggctcggaaggatctgaggcacagccacctggcaagcccagtacagaggctcggtctgccgcaagcaatacaggtacccccgacggccccgaagctccccctggtcctgatgcctcccccgatgccagctttggaaagcagtggtcatcctcctcgcggtcttcctacagttctcagcacggaggagcagtaagccctcagtcactttcagaatggcggatgcagaatattgcccgggactccgagaattccagcgaagaggagttctttgatgcccatgaaggcttctccgacagcgaagaggtctttcccaaggagatgaccaagtggaacagcaacgatttcatagacgcattcgcatctcccgtcgaggccgaaggcacacctgagccgggggccgaggccgccaaagggatcgaagatggagctcaagcccctcgcgattcagagggcctggacggtgccggagaactcggggccgaagcatgcgctgtccatgcccttttcctgatcctgcattcagggaacattctcgatagtggacctggcgatgctaactcgaagcaggctgatgtgcagaccttaagttctgccttcgaagcggtcacaaggatccacttcccagaggcactgggccacgtggcattaaggctcgtgccttgcccaccaatctgtgccgccgcctacgccctggtgtccaacctaagtccctactcccacgacggagactctctcagccgatctcaggaccacattccactggccgcgctgcctctgctcgcaaccagcagctcgcgttaccagggcgcagtggcaactgtgatcgcacgaaccaatcaggcttatagcgctttcctgagatcccccgaaggtgccgggttttgtggccaggtcgccttaatcggagacggcgtaggcggaatcctgggatttgacgccctctgccatagtgccaacgctggtaccggctcgcggggctcctccaggcggggctcgatgaacaatgagctcttgagccctgaattcggacccgttcgcgacccgctggccgatggggttgaagggctggggcgcgggtctcccgagccctctgccttgccaccccagagaatcccatcggacatggctagtccggaacccgagggatctcagaatagtctacaggcggcacccgctactacatcctcatgggaacctcggcgggcgagtaccgccttttgtccccccgccgcgagcagtgaggccccagatgggccctcctccactgccaggctagactttaaggtaagcggtttttttcttttcggtagcccgctaggtctggtgctcgcactgcgtaagactgtgatgcctgctctcgaagccgcacagatgcggcccgcatgtgagcaaatttacaatttatttcatgcagctgatccatgtgcatcacgcctcgagcccctgttggcccccaaatttcaggccattgcaccattgacggttcctcgataccagaaattcccacttggagacggctcatccctcctcctcgctgatacactgcagacccactccagcctgtttttggaggaactagaaatgctcgttccgagcacccccacaagtacctccggagctttttggaaggggagtgaactggctaccgacccacctgcacagccagcggcccccagtactacctcagaggttgtgaaaattctcgaacgatggtggggaacgaagcggattgactattctttatattgccctgaggcactgacggccttccctacggtgactctgcctcaccttttccacgcctcctactgggagtctgcggatgtggtggccttcattctgcggcaagtgatcgaaaaagagcggcctcaactggccgaatgtgaagaaccctccatctactctcccgcctttccccgggaaaagtggcagcgaaagagaacacaggtgaaaattcgtaacgtgacctccaaccatagagcatccgacaccgttgtctgcgaagggcgcccacaagtgctgtccggtcggttcatgtatgggcccttagatgtagtcaccctgacaggcgagaaagttgatgtgtacattatgactcagcctctgtctggcaagtggattcacttcggaacagaagtcaccaactcatcaggtaggctgacctttcccgtcccacctgaaagggcacttgggattggggtgtaccctgtgcgaatggttgtccggggcgatcatacctacgctgagtgttgtctcaccgtggtggctcgcgggaccgaggcagtagtcttttcaattgacggtagcttcacggcctctgttagtataatgggaagcgatccaaaagtgcgtgctggcgcagttgatgttgtgagacactggcaggattcagggtatttaatcgtgtacgttactggacgccccgacatgcaaaagcatagggttgtagcctggctttcacaacataattttccgcacggagtggtgagcttctgtgatggcctcacgcacgatccgctccggcagaaggcaatgtttctccagtcgctcgttcaggaggtggaacttaatatagtggcgggatatggctcaccaaaggatgtggccgtttatgccgctctcggactcagtccttcacagacgtacattgtgggacgcgctgtgcgcaaactgcaggcgcagtgtcaattcctgtccgacggctatgttgctcacctggggcagctggaagcggggtctcattcacacgctagctctggaccaccacgggcagcgttgggtaaaagcagctatggcgtggcagctcctgttgatttcttgcgtaagcagtcccaattattgaggtccaggggcccttctcaggccgagcgcgagggtcccggaactcctcccaccactctggcgcgggggaaagcccgttcgattagtcttaagctggatagtgaggaatag

SEQ ID NO: 23963 - DNA, 882 bp, synthetic construct
  source 1..882: mol_type = other DNA; note = Synthetic coding sequence
atgaccgaggacagccagcggaacttccggagcgtgtactacgagaaggtgggattcagaggagtcgaagagaagaaatctcttgaaatcctcctgaaggacgatcgcttagataccgaaaagctgtgtacttttagccagcgctttcctctgccttcaatgtaccgggctctggtttggaaggttctgctcgggatcctacctccacaccacgaatcacacgctaaggtcatgatgtacagaaaagagcagtacttagatgtgctgcacgcactcaaagtggtccggttcgttagtgacgcaacacctcaagccgaggtctacctcaggatgtatcagttggagagcggaaaattgccacgctctccttcctttcctttggagcctgacgacgaagtgtttctggctattgccaaagccatggaagagatggtggaggactctgtcgactgctactggataactcggcgatttgtcaaccaactgaatacgaagtaccgggatagtctcccccaactgcctaaagcatttgagcagtatctgaatctggaagatggcaggctcctgacacacctgcggatgtgctctgccgcccctaagctaccttatgatctgtggttcaagcgttgctttgccggatgcctgcccgagtcaagcttgcagagagtgtgggataaggtggtttccgggagctgcaagatattggtatttgttgcggtggagatactattaacatttaagataaaggtcatggctctaaattcggccgagaaaattaccaagtttctcgagaatattccccaggactcgtctgatgcaatagtgagcaaggccatcgacctgtggcacaagcactgtgggaccccagtccacagctcgtag

SEQ ID NO: 23964 - DNA, 249 bp, synthetic construct
  source 1..249: mol_type = other DNA; note = Synthetic coding sequence
atgagcgagggcgagagccagaccgtgctgagcagcggcagcgaccccaaggttgagtcaagctcatcagcacctgggctgacatctgtaagccctcccgtgacctcaaccacaagcgctgcctcccctgaggaggaggaggaaagtgaggatgagtccgagattctggaggagtcaccctgtggcagatggcagaagcggcgggaagaggtgaatcagcgcaacgtaccaggaatcgacagtgcctag

SEQ ID NO: 23965 - DNA, 5058 bp, synthetic construct
  source 1..5058: mol_type = other DNA; note = Synthetic coding sequence
atgagcctgcccttctaccagcggtgccaccagcactacgacctgtcctaccggaataaggatgtgcgctccaccgtgagtcactatcagcgagaaaaaaaacgatctgccgtctacactcagggaagcactgcttactcgtcacgctcttcagctgctcataggcgagagtctgaggcctttcggcgcgccagtgcgtcaagtagccagcagcaggcttctcagcacgctctgtcgtcagaggtgtcaaggaaggccgcctcagcttatgactacggttccagccacggactgactgacagctcactcttactcgatgactacagcagtaagctctccccgaaacccaagcgcgcaaagcacagcctcttgtccggcgaagaaaaggagaacctaccctctgactatatggtgcctattttctcgggacggcagaagcacgtcagtgggatcaccgacacagaagaagagcgcatcaaagaagctgcggcctatatcgctcagcggaatctcctggccagcgaggaggggattaccacctctaagcagtcaacagcttcaaagcagactacggcttcaaaacagtcgactgctagtaaacagtctaccgccagcaaacagagcaccgccagtcggcagtcaactgcttcccgacagtccgtcgtttcaaaacaagctactagcgccctccaacaggaagagacttctgagaagaagagcaggaaagtagttatcagagaaaaagcagagcggctctcccttagaaagactttggaggaaacagaaacgtatcatgccaagctcaatgaagatcacctcttacacgcaccggagtttattatcaaacctagaagtcacaccgtgtgggagaaagagaatgtgaagttgcactgttcaattgctggatggcctgaaccgcgcgtcacttggtataaaaaccaggtgccaattaatgtacatgccaaccccgggaagtatataattgagtctagatacgggatgcacactctcgaaatcaatggctgtgacttcgaagacaccgcacagtaccgagcctcagctatgaacgtcaagggagaactctctgcctatgccagcgtggtggtaaaaagatataaaggtgaatttgacgagacccgcttccatgccggggcgtctaccatgccactgtcattcggagtgactccttacggctacgcaagtaggtttgagatacacttcgacgataaatttgacgtgtcttttggcagggagggtgaaacaatgagtctggggtgtagggttgtcattacgcccgagatcaaacatttccagcctgaaatccagtggtacagaaatggagtaccgctcagccctagtaaatgggttcagacactgtggtctggtgagcgagctaccctgaccttctcccatctaaataaagaagacgaggggctgtacaccatccgtgtacgcatgggtgagtattatgaacagtattcggcatacgtttttgtgcgggacgctgacgccgaaatcgagggcgctcctgccgcacctcttgatgtgaagtgcttagaagctaataaagattacataatcatatcttggaaacagcctgccgttgatggggggagccccatacttgggtacttcattgacaagtgcgaagttgggaccgacagttggagtcagtgcaacgatacaccagtaaaatttgcacggtttcctgtgactggccttatcgaaggacggtcctacatcttccgagtccgggcagtgaacaaaatggggatcggttttccatctcgtgtgagtgagccagtggctgccttggaccctgccgagaaagcccgcttgaaatccagaccgtccgccccatggactgggcagattatagtcactgaggaagaacccagcgagggaatagtcccaggacctccgaccgatctgtctgtcacagaggccacacgatcttacgtcgtactaagctggaagcctccaggacagcggggccacgaggggataatgtattttgtagaaaagtgtgaagccgggaccgagaactggcaacgggtgaatacagaattgccggtgaaaagtccccgattcgccctttttgatcttgctgagggtaaatcctattgctttagggttaggtgctccaatagcgcgggagtcggtgaaccaagcgaagcgaccgaggtaacggtggtcggggataaactggacattcccaaggctccgggaaaaatcatcccttctagaaataccgacacgtcagtggtcgtgtcctgggaagagtccaaggacgccaaggagctcgtcgggtattacattgaagccagtgtggctggttcaggtaaatgggagccctgcaataacaatcctgtgaaaggctcccgcttcacctgccacgggcttgtgacggggcagtcatacatattccgcgtccgcgccgtgaatgcagccggtctgagcgagtactcgcaagactctgaggccatcgaggtcaaggccgctatagggggcggagtctcacctgatgtgtgcccagctctgagcgatgagccaggaggcctcaccgcatcccgcgggcgagtacacgaagcatcacctccaacttttcagaaggatgccctgctgggatccaagcctaataagccctccctgcctagttcatcccagaatcttggccagacggaagtgagcaaggtctcagaaactgtgcaggaagagctcacccctcccccccaaaaagctgccccgcaaggaaagtccaaaagtgatccacttaagaagaaaaccgaccgggcccctccctcccccccttgcgatattacatgccttgagtccttcagagactctatggtgcttggatggaaacagccggataaaattggaggcgctgaaatcactggttactatgtgaattaccgggaggtgatcgatggagttcctggtaaatggagggaggccaacgttaaggccgtgagcgaggaggcctataagatctcgaatctgaaagagaatatggtgtatcagttccaggttgccgctatgaatatggctggcctgggagcccccagcgcggtcagcgagtgctttaagtgcgaggagtggaccattgccgttccaggtccaccgcatagtttaaaatgttctgaggtgcgcaaagattcactagtcttacagtggaagcctccagtgcatagcggtagaacgccggtcaccggctattttgtggacctaaaggaggccaaagcgaaggaggaccaatggagggggctgaatgaggctgccatcaagaatgtatacctcaaggtaagagggttaaaggagggcgtgtcctatgttttccgggtacgggcaatcaaccaagctggcgtgggcaagccctctgacctggccggtcctgtggtggctgagaccaggccaggaacgaaagaggtggtggtgaatgttgacgacgacggcgtgatctctcttaattttgaatgtgacaaaatgacccctaagtcagaattcagctggtccaaggattatgtctctaccgaagatagcccgaggctggaggtggagagcaaagggaacaagacaaaaatgacgttcaaggacctggggatggacgacctcggcatctactcctgtgacgtgacagataccgacggaatcgcatccagttaccttattgacgaagaagagttgaaaagactcctggccctgtcccatgagcacaagtttcctacagtacctgtcaagagcgaactggctgttgaaatactcgagaaagggcaggtgcggttctggatgcaggcagaaaaactgagcgggaatgccaaagttaactatatttttaatgagaaggagatatttgaaggacctaaatacaagatgcacattgaccggaataccggcataattgaaatgtttatggaaaagcttcaggatgaagacgaagggacttacacctttcagctccaggatggcaaggctacaaaccattcgaccgtagtacttgtgggggacgtgtttaaaaagttacagaaagaggccgagttccagagacaggagtggatccgaaaacaggggcctcactttgtggagtatctgagttgggaggtcaccggagagtgcaacgtcctgttaaaatgcaaggttgccaatattaaaaaggaaactcacatcgtatggtataaggacgagcgcgaaatcagcgtggatgagaagcacgactttaaagacggaatctgtacgctcctcatcaccgagttctctaagaaggatgcgggcatttacgaggtgatactcaaggatgatcggggaaaggataaatctcggcttaaactggtggacgaagcattcaaggaacttatgatggaagtctgtaagaagattgccctgagcgctactgatctcaagattcaatcaaccgccgagggcattcagctctactcatttgtgacctattatgttgaagacttgaaggtgaactggagtcataatggctctgccatacggtactccgaccgcgtcaagaccggggtgacaggagagcagatatggctccagattaacgagcccacccctaacgataagggcaaatacgtcatggagctgtttgacggcaaaactggccaccaaaaaaccgttgatctgtcaggacaggcctatgatgaggcgtacgccgagttccagagactgaagcaagctgctatcgcagaaaaaaatcgggcccgggtcctgggtgggctccctgacgtggtcaccattcaggaagggaaggctttaaacttgacatgtaatgtctggggcgaccccccccccgaagtgagctggctgaaaaacgagaaagctttggcttcagacgaccactgtaatctgaaattcgaagccggcaggacagcatactttaccattaacggtgtgtcaactgcagattccgggaaatatggtctggtcgtgaaaaataaatatggtagcgagaccagcgatttcaccgtgtctgtctttatcccagaagaagaggccagaatggccgcactggagagtcttaagggggggaaaaaggccaagtag

SEQ ID NO: 23966 - DNA, 5877 bp, synthetic construct
  source 1..5877: mol_type = other DNA; note = Synthetic coding sequence
atggccgaccggaccgccccccggtgccagctgcggctggagtgggtttatggctacagaggacaccagtgccgaaacaatctgtactacaccgccggtaaggaggtcgtgtacttcgtagccggcgtcggcgtagtgtacaacacaagagagcatagtcaaaagttttttttaggccataatgatgacataatctctctcgccctccatccagataagacgctcgtggccacgggacaggtcgggaaagagccgtatatttgcatctgggacagttacaacgtacagacagtctccttgcttaaagatgtccatacgcatggggtcgcctgtctagctttcgactccgatgggcagaggttggcttcggtaggactggatgcaaaaaacaccgtgtgtatctgggattggcggaagggcaaacttttagcctcagctaccgggcatagcgacaggattttcgatattagctgggacccctatcagcccaaccgtgtggtgtcctgcggggttaaacacataaagttttggactttgtgtgggaacgctctaaccgcgaagcgcggaattttcggtaagactggcgacctacaaactatactatgcttggcctgcgctaaagaggatataacatactcgggcgctcttaatggcgacatttatgtttggaaaggcctcaatttagtgcgcaccatccagggagcccactcagccggcatcttttcgatgtacgcctgtgaggaaggctttgctaccggcgggagggatggatgcatccggctgtgggatacagatttcaagcctattaccaagattgatttgcgggagacagaacagggttataagggcctgtccatccgatcggtgtgctggaaggccgatagactcctagctggtacacaggactctgagatcttcgaagtcatagtgagagagcgggataagcctatgcttatcctccaggggcattgtgaaggtgaactctgggcacttgccctccatcccaagaaaccactggcagtgaccgggtccgacgacaggtcagtgcgcttgtggtctctagctgatcacgcactgatagccagatgtaacatggaagaggctgttaggagcgtggcattctcacctgacggaagtcagctggccctggggatgaaggacgggtcttttatagtactcagagtgcgggacatgactgaggtagtacacattaaggatcgcaaggaggtcatccatgagatgaagttctcaccagatggtagctacctcgcagttgggtcaaacgatggacccgtggacgtttatgcagtcgcccagaggtacaaaaagatcggagagtgttccaaatccctttctttcataactcatatcgactggtcccttgacagtaaatatctgcagaccaacgacggggccggggagaggctgttttataggatgccttcagggaagcccctaacatccaaggaggagatcaaggggataccgtgggccagctggacatgcgtgaaaggtcctgaagtcagcgggatctggcctaagtacaccgaggtgactgacatcaacagcgtggacgccaactacaattcgtctgtcctggtttctggggacgattttggactagtgaagctgttcaagttcccctgccttaagcgcggagctaagttccggaaatacgtgggtcacagtgctcacgtgacgaatgtgcgctggtctcatgactttcagtgggttctatctactggaggtgctgaccacagtgtcttccaatggcgattcatccccgagggcgtctctaacggaatgttggaaaccgcgccccaagaaggaggcgccgattcctacagcgaggagtcagactccgacttgtccgacgtgcccgagttggattctgacattgagcaggaagcacagattaattatgaccgccaggtgtataaggaggatctaccccagctgaagcagcagtcaaaggagaaaaatcacgcagtcccctttctcaaaagggagaaggcccccgaagatagcctgaagctccagttcattcacgggtatagaggctatgactgcagaaataatctgttttacacacaggcaggagaggttgtgtaccacatcgccgcagtggccgtggtctacaaccggcagcagcatagccagcgactgtacctggggcacgatgacgatatcctttccctgacaattcaccctgtgaaggactatgttgccacaggtcaggtgggaagagatgccgcaatccatgtgtgggacactcagaccctaaaatgcctgtcccttctgaaagggcagcaccaaagaggcgtttgcgcactggacttttccgcagacggaaaatgcctggttagcgtgggacttgacgactttcacagtatagtcttttgggactggaagaagggtgaaaaaatcgccactaccagaggccataaggataaaatctttgtggtgaagtgcaatcctcatcacgtggacaaactggtaacagtgggtatcaagcatatcaaattctggcagcaggccggaggaggctttacctccaaaagaggcacttttggctctgttggaaagctggaaacgatgatgtgcgtgagttacgggaggatggaggatttggtgttctctggggcagccacgggggacatatttatctggaaagacatcttactgctgaagacagtcaaagctcacgacgggcccgtattcgccatgtacgcactggacaagggctttgtaaccggaggtaaagatggcatcgtagagctctgggatgacatgtttgagagatgccttaagacttatgcgatcaagaggagtgccttgagcacttccagcaaagggctgctgctagaagataatccttctatccgagcgattacgctgggccacggccacattctggttgggacaaagaatggagaaatcctcgagatagacaagtccggcccaatgaccttgctggtgcaaggacacatggagggggaagtttggggcctggcggctcacccactcctcccaatatgcgcaacagttagtgacgataaaacactccgcatctgggagttaagtgctcagcatagaatgctagctgttcggaagctgaagaaagggggtcggtgttgcgcctttagtcctgacgggaaagcattggctgtgggcctcaacgacggttcctttctcgtcgtgaacgcagacacagtggaggatatggtgagttttcaccatcgcaaagaaatgatctcagatatcaagttttcgaaggataccggaaagtatcttgcagtggcatctcatgacaatttcgttgatatatataacgttctgacaagcaagagagtgggcatttgcaaaggagccagcagctatatcacacacatcgactgggactcaagaggtaagctgttacaagtgaattcgggggctcgcgagcagcttttctttgaggcgcctcgtggcaaacgccacattataaggccgagtgagatcgagaagattgagtgggacacctggacctgcgtccttggcccgacatgtgaaggtatctggcctgcacactccgacattaccgacgttaatgccgcctccctgacaaaggattgctccctacttgcgacaggcgatgacttcgggttcgtgaagctcttcagttaccctgttaaaggacaacatgcgaggttcaagaagtacgtggggcattcagctcacgtgactaatgtgcgctggctccataatgacagcgtgctgctaaccgtggggggggccgacaccgccctgatgatttggaccagggagttcgtcggaacacaggaaagtaaattggtagacagtgaggaatcagacactgacgtggaggaggacggaggatacgactccgatgttgccagggagaaagcgatcgactatactaccaagatttacgccgtgagtatccgggagatggaaggtactaaacctcaccagcagctgaaagaggttagtgtggaggagaggccaccagtctctagagcggctccacaaccagagaagcttcagaagaacaatatcacaaagaaaaaaaaactggtggaggagctggctttagaccatgtcttcggctatagaggatttgactgcaggaataacttgcattatttgaacgatggagccgatatcatcttccacactgctgccgctggcatcgtgcaaaatctttcaacaggatctcagtccttctatctcgaacacacagatgatattttatgcctaactgtgaaccagcatccaaagtatcggaacgtggttgccacatcacaaatcggcacaacgccgtctattcatatttgggatgctatgacaaaacacacgctgtctatgctgaggtgtttccattccaagggtgtgaattacattaatttctccgcgaccgggaaattattagtgtcagtgggagttgatcccgagcacactataactgtgtggagatggcaggagggggccaaagtggcaagccggggaggacatctcgagcgcatcttcgtggtcgagttcaggcctgatagcgacacacagtttgttagcgttggagtgaaacatatgaaattttggacgctcgccgggagcgcactactgtacaagaaaggcgtgatcgggtcactcggggctgcgaagatgcagacaatgctgagcgtagctttcggagctaacaacctgacctttactggcgccataaatggcgatgtgtacgtctggaaggatcacttcttaatccggcttgttgctaaggcacataccggtcctgtgttcactatgtacacaacattaagggacggcctcatagtaacaggtggaaaggagcgcccaaccaaggagggaggagccgtcaagctgtgggatcaggaaatgaagcgatgtcgggcctttcagttagagaccggccagctcgtggagtgtgttagaagtgtatgccgaggcaaagggaaaatactggtaggtaccaaggatggagaaataatcgaggtgggagaaaaaaatgctgcctcaaatatcctcatagatggccacatggaaggcgagatctggggcttggccactcatcccagtaaagacctgttcattagtgcttccaacgatggtaccgcccgcatttgggatctggctgacaaaaagctgcttaataaggtgtctctcgggcacgccgcccggtgtgccgcctatagccccgacggtgaaatggtcgccatcggaatgaagaacggagaatttgtgattttactggtgaactctcttaaagtgtggggtaaaaagcgggaccgcaaatcagccatacaagacattagaatatctcccgataatcggttcctggcagttgggtccagtgaacatacagtggacttctatgacctgactcaggggaccaatttgaatcgcattggctattgcaaggacatcccaagtttcgtcatccaaatggacttttctgccgacggcaaatatattcaggtttcaacaggcgcgtataagcgccaggtacacgaagtccctctggggaaacaggtaaccgaggccgtcgtcattgagaagattacctgggcatcatggacctcggtgctcggtgacgaggtaattggcatctggcctcgaaatgccgacaaggctgatgtgaactgtgcgtgtgtgacacatgccgggctcaacatagtaaccggtgacgatttcggccttgtaaagctgttcgattttccttgtactgagaaatttgcaaagcataagcggtacttcgggcactccgcgcacgtgaccaatatccggttttcctacgatgataaatatgtcgtgtcaactggcggagatgattgtagtgtgttcgtctggagatgcctgtag

SEQ ID NO: 23967 - DNA, 630 bp, synthetic construct
  source 1..630: mol_type = other DNA; note = Synthetic coding sequence
atgaaccccagcatgaagcagaagcaggaggagatcaaggagaacataaagaacagcagcgtgcctagaaggacacttaaaatgattcaacctagcgcctcaggttcactcgtggggcgtgagaatgagttgtcagcaggcctttccaaacggaaacatcgcaatgatcatcttaccagcactacttcgtcccccggtgtgatagtaccagagtcaagcgaaaacaaaaacctagggggagtcacccaagaatcattcgaccttatgattaaagaaaacccttcttcccaatattggaaagaagtggcggagaagcgccggaaggcactgtatgaggctcttaaagaaaacgaaaaacttcacaaggaaatcgaacagaaggacaacgagatcgcacgtctgaaaaaggaaaataaggagctggccgaggtcgcggaacatgtccagtacatggcggaactcattgaaaggctgaatggcgagcccctggataatttcgagtcacttgacaatcaagaattcgactccgaggaagagacagtcgaggatagtttagtcgaagattctgaaattggtacctgcgcggaggggacagtatccagctccacggacgctaagccctgtatttag

SEQ ID NO: 23968 - DNA, 1635 bp, synthetic construct
  source 1..1635: mol_type = other DNA; note = Synthetic coding sequence
atgaacaccagcatcccctaccagcagaacccctacaacccccgggggagttctaacgttatacagtgttaccggtgtggagacacttgtaagggagaagttgtccgcgtgcataacaatcattttcacattcgctgtttcacttgtcaagtctgtggctgcggactggctcagtcagggtttttctttaaaaaccaggaatacatctgcacccaggactatcaacagctgtatggaactagatgtgacagttgtcgtgattttataaccggagaggttatcagcgctctcggtcgtacatatcacccgaagtgttttgtgtgtagcctgtgccgaaaaccatttcccataggagacaaggtgacattttctggcaaagagtgcgtttgtcaaacctgttcccagtcaatggccagcagtaaaccaattaagatcagaggcccctcacattgcgcaggttgcaaagaggaaatcaaacacggtcagtcattactcgcactggacaaacaatggcatgtctcttgttttaagtgccaaacctgttctgtgatcttaactggagaatacatcagtaaggatggagtgccatattgtgagagcgattatcatgcacagtttgggattaagtgtgagacctgcgataggtacatttcaggccgcgtcctggaagccggtgggaaacattatcaccccacatgtgcccggtgtgtcaggtgccaccagatgttcaccgaaggggaagagatgtatctcacaggctccgaagtttggcacccaatctgcaaacaagctgcccgcgcagaaaaaaagctgaaacaccgtagaacctctgaaacatccatcagtcctcccggctcatccatcggtagcccaaatagggtgatttgtgacatttacgaaaacctggacctgcgacagaggagggcctcgagtccgggatacatcgattccccaacctattcccgtcaaggtatgtcacccacatttagccggagtccccatcactactataggtccggagacctcagtaccgcaacaaagagtaaaactagtgaagatatttcccagacctctaagtattcgccaatttacagccctgacccctactacgccagcgagtcagaatactggacctatcatggcagtcccaaagttcccagagctcggcgattctcctccggcggtgaggaggatgattttgatcggagtatgcacaaactgcagtccggcataggccggctaattctgaaagaggagatgaaggctagaagttctagctacgccgatccatggaccccacctagatcttcaactagctcaagggaagcactccacaccgccggctatgagatgtcactgaacggctcaccaaggtcacactatcttgcggattcagacccactgatctctaaaagcgcttctctacctgcttataggcggaacggactgcatcggactccctcggccgatctgttccattacgactctatgaacgcagtcaactggggaatgagggagtataaaatatacccctacgaacttctactcgtgacgactcgaggaaggaatcgacttccaaaggatgtggataggactaggctcgagggaaacttttggaagagcgggtgtctctag

SEQ ID NO: 23969 - DNA, 840 bp, synthetic construct
  source 1..840: mol_type = other DNA; note = Synthetic coding sequence
atgacccccagcgagggcgcccgggccggcaccggccgggagctggaaatgttagattctctgttagctttaggcggcctcgtgttattgcgcgacagcgtggagtgggaggggcggtctcttctcaaggccctggtgaaaaagtctgccctgtgtggcgagcaggtccacatcctggggtgtgaagttagcgaggaagagtttagggaaggcttcgatagcgacatcaataacagactggtgtaccacgacttctttagggatcctctgaattggtcaaagaccgaagaagctttccccggcgggcccctaggcgccttacgggccatgtgtaagagaacagatccagttccagtaaccatcgccctggatagcctgtcgtggctgctccttcggctgccatgcacaaccctgtgccaggtactacacgcagtgtctcaccaggactcttgcccaggcgactcttcgtcagtgggcaaggtgagtgtgctcgggctcctgcacgaagagctccacgggcctgggcccgtgggcgctttaagttcgctcgctcaaacggaggtgaccctggggggcaccatgggccaggcttccgctcatatattgtgcaggaggccccgccaaagaccgacagaccagacccaatggttcagcatactgcctgattttagccttgacctgcaggagggcccttcagtcgagtcccagccctattcggacccacatattccccccgtttcaaagaacgcaaaggcccggacgaggaaatgtagtctggtgtccggacatggccgggaaaataaaagctgtcgggggtgggggtgggggcagggtttttag

SEQ ID NO: 23970 - DNA, 405 bp, synthetic construct
  source 1..405: mol_type = other DNA; note = Synthetic coding sequence
atgagcgagaacgccgcccccggcctgtgcggcgagctgctgctgcaacgcggcacaaccaaagtggccaccggcctcgttctgaaccgcgatcaacggctcgcctgggctgagaattctatcgacttcatctctcgcgaactctgcgcccactcgatcaggaagctccaggcccatgttttacttataaaggctgtgcacgggtactttgacagccggcaaaactatagtgaaaaagagagcctcagtttcatgatcgataccatgaagtcgaccttgaaagagcaattccagttcgtggaagttcccggaaaccattgcgtgcatatgtctgaacctcagcacgtggctagcatcatcagctcctttcttcagtgtactcacatgctgcctgcccagctgtag

SEQ ID NO: 23971 - DNA, 1350 bp, synthetic construct
  source 1..1350: mol_type = other DNA; note = Synthetic coding sequence
atgatgctgggcaccgagggcggcgagggcttcgtggtgaaggtgcggggcctcccctggtcttgtagtgctgacgaagtccagagattcttctccgattgcaagatccagaatggggctcagggcatcaggttcatctatacccgggaaggccggccctccggcgaagccttcgtggagctggagtcagaggacgaggtgaagctggcgttgaagaaggaccgggagaccatgggacaccgctatgtagaggtgttcaagtcgaataatgtcgagatggactgggttctgaaacacacggggcctaactcccccgacacggctaacgatggatttgtgcgccttcggggccttcctttcggatgtagcaaagaagaaattgtccagttcttttcaggcttagaaatcgtacccaacggcattaccctgcccgtggattttcaaggccggtccacaggagaggcgttcgttcagtttgcctcgcaagaaatcgctgaaaaagcccttaagaaacataaggagaggatcggtcatcggtacatcgagatctttaagtctagtagagctgaggtccggacccactacgatccccccagaaagctgatggctatgcaacggcccggcccttatgatcgacctggagccgggcgcgggtataacagcattggtcggggcgcgggattcgagcgcatgcggaggggggcctacggtggggggtatggcggatacgacgactataatggatataatgatgggtacggattcgggagcgaccgattcggtagagacctgaattactgtttcagcggcatgagtgaccacagatatggcgatggcggctcgacttttcaatcaaccaccgggcactgcgtgcacatgcgtggcctcccatacagggcaaccgaaaacgatatctataatttcttcagtccattgaatcccgtgagagtccacatcgagatcggccccgatgggagagtcacaggcgaagccgacgtagagttcgcaacgcatgaggacgccgttgctgctatgagtaaggataaggctaatatgcagcacagatacgtcgagctattcctcaactcgaccgcaggcgcatccggcggtgcctacgagcataggtacgtggaactgttcctgaattccacagcaggggcttcaggaggagcttatggctcacagatgatgggggggatgggacttagcaaccagtcgtcatacggcgggcccgcaagtcagcaacttagtggggggtacgggggaggttatggtggccagagctcaatgagcggctatgatcaggtgttgcaggaaaattccagcgacttccagtcaaacatcgcatag

SEQ ID NO: 23972 - DNA, 4077 bp, synthetic construct
  source 1..4077: mol_type = other DNA; note = Synthetic coding sequence
atgggcaaccagctggccggcatcgcccccagccagatcctgagcgtagagagctacttcagcgacattcacgactttgagtacgacaaatcccttggttctaccagattcttcaaagtcgcccgcgcaaaacatcgagagggcttggtcgtggtgaaagtctttgctatacaggaccctacattgcccttgacctcgtataaacaagaactcgaagagctgaagattcgcctcaactccgcccagaactgtctcccttttcagaaggcaagtgagaaagcttctgagaaagcggcaatgttgttccggcaatacgttcgagacaacctctatgataggatcagcactagacctttcttgaataatattgagaaacgttggatcgcgttccagatattgacagccgttgatcaagcacataaatctggcgtgcggcacggcgatatcaaaactgagaatgtgatggttacttcctggaactgggtgctcctcaccgacttcgccagtttcaagccgacttatctccccgaagacaaccctgctgactttaattactttttcgacacttcaagaaggcgcacatgttacattgccccagagaggttcgttgatggaggcatgttcgcgactgagctggaatatatgagggatccaagcacgccattggtggacctcaactctaatcaacggacaaggggggagcttaagagagccatggacatcttctctgcgggctgcgtgattgctgaattgttcaccgagggggtaccactctttgatctctcacagctgctggcgtatcgtaacggccatttcttccctgagcaggtcctcaacaagattgaggaccacagcataagagagctcgtaacacagatgattcatagagagcccgacaagagactggaggcagaagactacctgaaacagcaaagaggaaacgcctttcctgaaattttttacacttttctacaaccctatatggcacaatttgcaaaggaaacattcctgtctgctgatgagagaatcctcgtgatcaggaaagacctgggaaacattattcacaatctgtgtggacatgatcttcccgaaaaagcggaaggagagcccaaagagaacggcctagtgatactggtgagcgtcataactagctgcctccaaaccctgaaatattgcgattcaaagctggcagctctcgagctcatcctccatctagccccgagactatccgtggaaattcttctggatagaatcaccccttatctgcttcacttcagcaacgatagtgttcctcgtgtgcgggcagaggctttgcgaaccctgacaaaggtgctggccctggtgaaagaagtgccacgcaatgatatcaacatctatcctgagtacatccttcccggcatcgcacacctggcacaggacgacgctaccatagtacgcttagcctatgcggagaacattgctttgctagctgagaccgccctgcgctttctggaattggtccagcttaaaaatttaaacatggagaatgatcccaacaatgaggaaattgacgaagtgacccatccaaacggtaactacgataccgagctgcaagctctccatgaaatggtacagcagaaggtcgtgactctgctgagcgatccagaaaacatcgttaagcagacattgatggagaacggaatcacgagattgtgcgtgttttttggcagacaaaaggccaatgatgtgttattgagtcatatgatcaccttcctgaatgacaagaatgattggcacctgcggggagctttttttgatagtattgtgggggtcgcagcttacgtcggctggcagtcgagctcaatcctgaaaccattactgcagcaaggcctctccgatgctgaggaattcgtgatcgtgaaggccctttacgctttaacttgcatgtgtcagctcggactgcttcagaagccacacgtttatgaattcgcctcggacatcgccccgttcctttgccaccccaatttgtggattcgatatggagctgttggcttcattactgtagtcgcccggcaaattagcaccgcggatgtctattgtaagctcatgccttatcttgatccttatatcacgcagccaattatccagattgagcgaaagcttgtgctcttatcagtattaaaggagccggttagtcgctcaatattcgattatgcccttcggagcaaagatattacctctttgttccgacacctccacatgcgccagaaaaaacgaaatggaagtctgcctgattgcccccctccagaggaccccgctatcgctcagttgctcaaaaaactgttgagtcaaggcatgaccgaagaggaagaggataagctcctagccctgaaagacttcatgatgaagagcaacaaggccaaggccaatattgtggaccagtcccatttacatgactcgtcgcagaagggcgtcatcgacctggcagcacttgggattactgggcggcaggtggatctggtcaagaccaaacaagaacccgacgataaaagagcgaggaagcacgtaaaacaggattcgaacgtcaatgaggagtggaagagcatgttcgggagtctggatccacctaacatgccccaagcactgcctaaaggatcagaccaggaagtcattcagaccggaaagcccccaaggtctgaaagctccgcggggatttgtgtgcccctgagcacttctagtcaggtgcctgaggtgaccactgtacaaaataaaaaaccggtcattccagtcctgtcttctacaatcctcccttccacgtatcagatccgaattactacgtgcaagacagaactgcagcagctgatacaacagaagcgcgagcagtgtaacgcagaaagaatcgccaaacaaatgatggaaaatgccgaatgggagtctaaaccccccccaccaggttggaggccaaagggactccttgtggctcacttgcacgaacacaagtccgctgtgaatagaattcgagttagcgatgagcactcactgttcgcaacctgctccaatgacgggacagtgaaaatctggaactctcagaagatggagggcaagaccaccactactcgatcaatcctgacatacagtcgcatcgggggtagggtcaagacactgacattttgccaaggctcacactaccttgcaattgcctcagataacggagcagtgcaactcctcggcattgaagcaagtaagctaccaaagagcccaaagatccatccactgcaatcacgcatactagaccagaaggaagacggatgtgttgtcgatatgcaccatttcaattccggcgcccagagcgtgcttgcttatgcaactgtgaacggcagcctggttggatgggatttgcgctcctcctccaatgcctggacactcaagcatgatctcaaatccggtctgatcactagttttgccgtggacatccaccagtgttggctctgtatcggtacttcaagcggtacaatggcctgttgggacatgaggtttcagctgcccatatcatcacattgccacccgagcagagcccgaatacggaggctgagcatgcatcccctgtatcagagttgggttatagcagctgttcaggggaacaacgaggtgagcatgtgggacatggaaaccggtgaccgtcgttttaccctctgggcctcctcggccccccccttgtcggagctgcagccctcccctcactctgtgcatggtatttattgttcgccagctgatggcaatccaattctcctgacagcaggtagtgatatgaagattcgattttgggatcttgcatatcccgagcggagctatgtcgtcgccggctcgaccagctcgccatctgtgagttactaccggaagatcatcgaggggacggaggtggtgcaggaaattcaaaacaagcaaaaggtgggccccagcgacgacacaccgaggagggggcctgagtctctgcctgtggggcatcacgatatcattaccgacgtcgctacttttcaaactacccagggatttattgtgaccgcatctagagatgggatcgttaaagtctggaaatag

SEQ ID NO: 23973 - DNA, 993 bp, synthetic construct
  source 1..993: mol_type = other DNA; note = Synthetic coding sequence
atgcccgtggtgaccaccgacgccgagagcgagaccggcatccccaaatccctgtcgaatgagcctccctcggagactatggaagagattgagcacacttgcccacagcctcggctgactctcacagcccctgctccattcgccgacgagaccaattgtcagtgccaggcccctcacgagaagctcacaattgcacaggcccgcttaggaacccccgctgaccggcccgttcgcgtgtatgcagatggaatatttgatcttttccatagcgggcatgccagggctttaatgcaggccaaaacactatttcccaactcctatttgctagtgggggtatgctctgacgatctcacacataagttcaagggtttcacggttatgaatgaagccgaacgctacgaagccctgagacactgccgctacgtggacgaggtgatcagagatgctccttggaccctcactccggagttcttggaaaagcacaaaattgactttgttgcacatgatgacattccttattcttctgccgggtctgacgatgtgtataagcacataaaagaggcaggaatgtttgttcccactcagcgaacggagggcatcagcacaagtgatatcatcactagaattgtgagagactatgatgtgtacgcaagacgaaaccttcagcgcggatataccgcaaaagagctcaacgtgagctttattaacgaaaagagatacagatttcaaaaccaagttgataaaatgaaagagaaggtgaaaaatgtggaggaaaggtccaaggaattcgttaaccgggtcgaggaaaagagccacgacctgattcagaaatgggaggaaaagtcaagagaattcataggaaactttctggaactatttggcccggacggcgcatggaagcagatgtttcaggagaggtcgtctcggatgctgcaggcgctgtcccccaaacagtcaccactcaagtcctgggcaagatgtcgcgatttttag

SEQ ID NO: 23974 - DNA, 2025 bp, synthetic construct
  source 1..2025: mol_type = other DNA; note = Synthetic coding sequence
atgcagaccagcagcagccggagcgtgcacctgagcgagtggcagaaaaactacttcgctatcacctccgggatctgtactggccctaaagccgacgcataccgggcgcagatactgagaattcagtacgcttgggcgaattcagagatatctcaggtctgcgccactaagctgtttaaaaagtatgccgagaaatacagcgcaataattgatagcgataacgtggagtcaggattaaacaactacgctgaaaacattctgactttagccgggagtcagcagacagactctgacaaatggcagtcgggcctgtctatcaacaatgttttcaagatgagtagtgtgcagaagatgatgcaggcggggaaaaagtttaaggattcactcctggagcctgctctggcatcggtagtcattcacaaggaggcaaccgtgtttgacctgccaaaattctcagtttgcggcagcagccaagagtcggatagcctccccaattccgcccacgaccgcgatagaacccaagatttcccggaaagtaacagactgaaattgctgcagaatgctcagccacctatggtgacgaatactgcgcgtacttgtccaacattctcagccccggtgggtgagagcgccactgctaaatttcatgtaacaccactcttcggcaacgtgaagaaagagaaccattcatccgcgaaggaaaacattggcctgaacgtgttcttgagtaatcagtcttgctttcctgccgcctgtgagaatccccagcgcaaatcattctatggatccggtacaatcgatgctctgagcaaccctatcctcaataaagcctgcagcaagactgaagataatggaccaaaagaagactcctctttgcccactttcaagacagccaaggagcagctttgggttgaccaacaaaaaaaataccaccagcctcagagagcgtccggttcctcctatgggggtgtgaagaagtccctgggagcatctcggtctcgaggaatactgggaaagttcgtaccaccaatcccgaagcaggacggtggcgagcagaatggaggaatgcagtgtaaaccgtacggtgctggcccgaccgagcctgcacacccagtggacgaaagactcaaaaatctggaacccaaaatgatagagctgatcatgaatgagataatggatcatggcccccccgttaactgggaagatattgcaggggtcgagttcgccaaagcaactattaaggaaattgtggtctggcctatgcttcggcccgacatattcacaggattacgtggccctcccaagggaattcttctattcggtcccccgggtacaggaaaaaccttgatcggcaaatgcattgccagtcagtccggggcaaccttcttttccatatctgccagctctctaacgtctaaatgggttggcgaaggggaaaaaatggtcagggcgctttttgccgtagctcgctgtcaacaacccgccgtcattttcattgacgagatagactctctgcttagccaacgcggcgatggcgaacatgagtccagccgcagaatcaagacagagtttttggtgcagctagacggagcaaccacttcgagtgaagaccggatactggtagtgggagcaacgaacaggccgcaggagattgatgaagcggctcgacggagactggtgaagcgcctttatatccctctgccagaagcctctgcccggaagcagatcgttattaaccttatgagcaaagaacagtgctgtctcagtgaagaggagatcgaacagatagtccaacagtccgacgcctttagcggggccgacatgactcagctttgtcgggaagcatctctcgggccaatccgaagcctgcagaccgcggatatcgctacaattacacctgaccaggtgagaccgatagcatacatagatttcgaaaatgcctttaggactgttaggccttccgtcagccctaaggacctggagctgtatgagaactggaataaaacctttgggtgcgggaagtag

SEQ ID NO: 23975 - DNA, 1143 bp, synthetic construct
  source 1..1143: mol_type = other DNA; note = Synthetic coding sequence
atgctgcggcggaagcccagcaacgccagcgagaaggagcccacccaaaaaaaaaaactctcccttcaacgatcaagctcgttcaaggattttgcgaaatccaaaccctcaagtcctgtggtttctgaaaaggagtttaaccttgacgacaatattccagaggatgattcaggcgtacctacccccgaagacgccggcaaatcggggaagaagctgggcaagaaatggcgggccgtgatttcaaggaccatgaataggaaaatgggtaaaatgatggtgaaagcattatctgaggagatggcagataccctggaagaggggtcagcgagtccaacaagtcccgactactctctcgacagtcctgggcccgagaaaatggccttagccttctccgagcaggaggaacacgaactgcccgtgctgagtaggcaggccagcaccggctccgaactttgcagcccatcccccggtagcggttcctttggagaggaaccccctgctcctcagtataccgggccattttgtggcagggccagagttcacactgattttacgcccagcccgtacgatcatgactctctgaaattgcagaaaggggacgtaatacagatcatagaaaagccgcccgttggcacctggctcgggctgctgaacggcaaagttgggagctttaagttcatttatgtcgacgtgctccccgaagaggcggtggggcatgctcgcccctcccggaggcaatcaaaggggaagcgcccaaagcccaagactctgcacgaattgctggaacgtatcgggctggaggaacatacttccactttactgctcaatggctaccagactctggaagatttcaaagagctgcgggagactcacctgaatgaattaaatatcatggatcctcagcacagggcgaaactactgactgctgctgagctgctgctggactacgatacaggctcagaggaagcggaagagggggccgaatcctctcaggaacccgtcgcccacacagtgtccgagccaaaggtcgacatccctcgggatagtggatgttttgagggcagcgagtctggccgcgatgacgccgagctggccggtaccgaggagcagcttcagggtttaagcctggcaggcgccccctag

SEQ ID NO: 23976 - DNA, 1692 bp, synthetic construct
  source 1..1692: mol_type = other DNA; note = Synthetic coding sequence
atgaaccccctgttcggccccaacctgttcctgctgcagcaggagcagcaaggccttgctggtccccttggcgactccctggggggtgaccatttcgccggaggaggtgacctcccacctgctcctctctcccctgccgggcccgccgcttactcaccacctgggccaggacccgcgccacctgccgccatggcattacgcaacgatctcggcagcaacatcaacgtgctgaagacactgaatctgcgttttcggtgtttcctcgcgaaagtgcacgagctcgaacggcggaacagattactcgaaaagcaacttcaacaagctctcgaggagggcaagcagggcagacgaggacttggccgaagggaccaggccgtgcaaaccggtttcgtgtctcccatccggcctttgggtttacagctcggggccagacctgccgctgtatgctccccgagtgcccgagtcctcggaagtccggcaagatcgccagccgggccgcttgcccctagcgccgcttccctatcctcaagtagtacttccacttccacgacttattccagctctgcacggtttatgcccggcactatctggagctttagtcatgcacgccggcttgggcccggactcgaacctaccctcgtacagggccccgggctttcctgggtgcaccctgatggtgtgggcgttcagatagacacgattactcctgaaattcgtgcattatacaacgtgttggctaaagtgaagcgggaaagggatgaatataagcgaagatgggaggaagaatacacagtgcgcatccagctgcaggatagagtgaatgaactgcaggaagaagctcaggaggcagacgcctgccaagaggagctggccctgaaagttgagcaacttaaggccgagctggtcgtctttaaagggctcatgagtaacaacctgagcgaactcgataccaagatccaggaaaaagcaatgaaggtcgatatggacatctgtaggcggatcgacatcaccgctaagctgtgcgatgtcgcccaacagcgaaactgcgaagacatgattcagatgtttcagaaaaagcttgtcccgagtatgggaggccggaagagggaacggaaggctgccgtcgaagaggacacgagcctgtccgaatccgagggccctaggcaacccgatggggacgaggaggagagcactgccctttccattaacgaagagatgcagaggatgctgaatcagctcagagaatatgattttgaagacgactgtgacagcctgacttgggaggagactgaagaaacactgcttctttgggaggacttctctggctatgcgatggccgccgccgaggctcagggtgagcagcaagaagactcattagagaaggtcattaaagatactgagagtctctttaagacaagagaaaaggaatatcaggagacaattgaccaaattgagctcgagctagcaaccgccaaaaatgatatgaaccgacatctgcacgaatatatggaaatgtgctcaatgaagaggggacttgatgtccagatggaaacctgtcggagactcattacacaatctggagataggaaatcccccgctttcacagcagttccactctcagacccacctccccccccatctgaagccgaggattcggacagggatgtgagcagcgacagctcgatgaggtag

SEQ ID NO: 23977 - DNA, 1893 bp, synthetic construct
  source 1..1893: mol_type = other DNA; note = Synthetic coding sequence
atgctgttcctggccatcccccagagcatcgacgaggagaccgaggtgtggtcagaccacattatttttccgcgtattcccaggggtcccgttcagcagcctctggaagatcggatcttcactccagcagtgtctgccgtttattcaacagtgacccaggttgctcgacagcctggaacccccaccccctctccttattctgctcacgaaatcaacaaaggacaccctaatttggccgccaccccacctggccatgctagttcccctggactttctcagaccccttaccccagcggtcaaaacgccggacctaccacactagtttacccccagactccgcagacaatgaactcacagccccagacgagaagcccctttgctgcggggccccgccctccccaccatcagtttttccaacgcccccaaatacaacctcctcgagctaccatccccaactcctccccaagcattaggcctggggctcagacccctacagctgtctatcaggcaaaccagcacatcatgatggtgaaccacctgcccatgccatatccagtaccccagggaccccaatattgcatcccccagtatcgacactctggacctccctatgtggggccccctcagcagtatcccgttcagccacccgggccgggtcctttttatccgggaccaggcccaggcgacttccctaacgcgtatggaactcccttttaccctagccagcctgtctatcagtctgctccgatcattgtccccacacagcagcagccgccacccgcgaagcgggaaaagaagaccatccgcatacgtgatcctaaccagggagggaaagacatcactgaagagataatgagtgggggaggtagtcgtaaccccacacctccaatcgggcgtcctacatctacccctacccctcctcaacaattaccctcccaggtacccgaacacagccctgtcgtgtatggtacggttgaaagcgcccacctggctgcgagtacccccgtgacagcggcctcagaccaaaaacaggaggaaaagccaaaacctgatccagtgctgaagagtccctcgccggttcttaggctggtgctctctggggagaagaaagaacaggaaggccagactagcgaaacaaccgctatcgtgagcatcgccgagcttccactgccaccaagccccacgactgtctcctctgtcgctaggagcacaatcgcagcaccgacaagctccgctctgtcttctcagcccatctttacgacggccattgatgacaggtgtgagctgtctagcccccgagaggataccatccccatccctagtctaacgtcatgcactgagacctccgacccgttgccaaccaatgagaatgacgatgacatctgcaaaaagccatgcagtgtcgcccctaacgatattcccctggtctcatctaccaatcttatcaatgaaataaacggcgtgtccgaaaagctgtcagcgacagagtctatcgtagaaattgtgaagcaagaggtgttacctttaacgcttgaactggaaatactggaaaatccgcccgaggagatgaagctcgagtgtattcccgccccaatcactcccagcaccgtgccaagttttcctcctacgcctccgaccccacccgcatctccgccacacacgccagtgatcgttcccgcagccgcaaccactgtctcctctcccagtgcagctataaccgtccagagggtcttggaggaagatgagagcattaggacatgcctttcggaggatgcaaaggagattcagaacaaaattgaggtggaagccgatggccagaccgaggagattctagactcccagaacctgaactcacgtcgaagcccggttccggagacaagcaatgagtgctag

SEQ ID NO: 23978 - DNA, 414 bp, synthetic construct
  source 1..414: mol_type = other DNA; note = Synthetic coding sequence
atgatcctgcccaccaaggccatggccacccaggagctgaccgtgaagcgcaaactcagtggcaatactctgcaggtccaggcatcaagccctgtagccttaggagtcagaatccctaccgtcgctctccacatgatggagctgtttgataccacggtcgagcagctttactcaattttcaccgtgaaagagctgacaaataaaaagatcatcatgaaatggcgttgcggaaactggccggaagaacattacgctatggtggccctcaatttcgtacctacactcggccagaccgaactgcaactcaaggagttcctgtccatctgtaaagaggagaacatgaaattctgctggcagaagcagcactttgaagagatcaaggggagcctgcagttaacaccattgaatggttag

SEQ ID NO: 23979 - DNA, 1248 bp, synthetic construct
  source 1..1248: mol_type = other DNA; note = Synthetic coding sequence
atgatgctgggccccgagggcggcgagggcttcgtggtgaagctgagggggctgccatggtcgtgcagcgtggaggatgtgcaaaattttctcagcgactgtacaatccatgatggcgctgcaggcgtgcacttcatctacacgcgtgagggtagacaaagtggagaagctttcgtcgagttagggtccgaagatgacgtgaaaatggccttaaagaaggatagagaaagcatgggccataggtacatcgaagtttttaagagccaccgaacagaaatggactgggtcctcaaacatagtggaccaaactctgcagactcggctaatgacgggttcgtccggctgcgcgggttgccattcggctgcaccaaggaagaaatcgtccagttcttttctggcctggagattgtaccgaatggcatcacccttcctgtcgatccagaagggaaaattacgggtgaggcctttgtccaattcgccagccaggagttagccgaaaaggccctcggcaagcacaaagagcggattgggcatagatacatcgaagtgttcaaatcgtcccaggaggaagtccgttcctatagtgaccctcccttgaagtttatgtccgtacagcggccgggaccatacgacaggcctggcacggcccggagatatattgggattgtcaaacaagccggtctggagaggatgagacctggggcctactcaacaggctacggtggctatgaggagtacagcgggctatccgatggatacgggttcaccacagacttgtttgggcgcgacttaagctattgcctcagcggcatgtatgatcaccggtacggcgattcggaatttactgtacaatcgactacaggacactgtgtacatatgcgcggactcccgtacaaggcaacagaaaatgatatctacaattttttctctcccctcaatccagtgcgcgtgcatatagaaattgggccagacggccgtgttaccggggaagcggacgttgaatttgccacgcatgaggaagccgtggctgcgatgagtaaagaccgcgcaaatatgcagcacaggtacattgagctttttctgaattccaccactggtgcctctaacggggcctacagctcccaagttatgcaagggatgggtgtttctgctgcacaagcaacctactcaggcctggagtcacagagcgtgtcaggttgctacggggccgggtacagcgggcagaactccatggggggctatgattag

SEQ ID NO: 23980 - DNA, 1464 bp, synthetic construct
  source 1..1464: mol_type = other DNA; note = Synthetic coding sequence
atgagcagccccctggccagcctgagcaagacccggaaggtgcccctgccctccgagccaatgaaccccggccggcgcggaattagaatctacggagacgtacccgcctctcacgactctgaactgatggcttttatgactaggaagctctgggatttagagcagcaggttaaagcccaaaccgacgaaatcttgtcgaaagatcagaaaatcgccgccttagaggacctggtccagacactacgcccacatcctgccgaggctacactccagcgccaggaggagctcgaaactatgtgtgtacagctccaaagacaggtccgcgagatggagcgtttcctgtcagattacgggttacagtgggtcggagagcccatggaccaggaagattccgagtctaaaaccgtctctgaacatggcgagagagactggatgactgctaagaaattctggaaacccggagattctctagctccacccgaggtggatttcgatagactactcgcctctcttcaggatctgagcgaactggtggttgaaggcgacacccaggttactccagtgcccgggggagctagacttagaacacttgagcccattcctctgaaactgtatcggaacggcattatgatgtttgatggaccttttcaacctttctacgatccatctacacagcgctgcttgcgggatatcctagacggattctttccaagtgagctgcagcggctgtatcctaacggcgtgccgtttaaggtctcagatctcagaaaccaggtatacctggaagatggacttgacccattccccggcgaagggcgcgttgtgggccgacaactgatgcataaagcccttgacagagtcgaggaacatcctggaagtcggatgacagctgagaaattcctgaaccgcctgcccaagttcgtgatcagacagggggaggtaatagatattagaggcccaatacgagatacactgcagaactgctgcccactgcctgcccgcatccaggagatcgttgtggagacaccaaccctggccgccgaaagggaacgtagtcaggagagtcctaacactcccgccccccctctctcaatgttacgcatcaagtcggaaaacggggagcaggcgtttctcctgatgatgcaaccagacaatactattggggacgttcgcgccctgctcgctcaggccagagtgatggacgcatccgcttttgagattttttccacctttcctccaacactctaccaggacgacacactgactctccaggcagccgggctcgtaccaaaggctgcgctgttgctccgcgcccgccgagcacctaagagttcactcaaattctcaccagggccttgtccaggcccggggccagggccctccccaggcccaggccccggaccttcgccaggcccaggacccggcccttcaccttgtcctgggccttctccatccccgcaatag

SEQ ID NO: 23981 - DNA, 1467 bp, synthetic construct
  source 1..1467: mol_type = other DNA; note = Synthetic coding sequence
atgagcgccttctgcctgggcctggtgggccgggccagcgcccccgccgaaccagatagcgcctgctgtatggagctgcccgccgcagctggagacgctgtaaggtctcccgcggctgccgcagctttgatcttccctgggggatcaggcgaactggagttggcacttgaagaggagctggctcttctggctgctggtgagcggccttcggaccccggagaacacccccaagccgaattactttcggtgatccgacagaaggagaaggaccttgtgttagcagcccggctcggcaaggcgttgttggaacgaaatcaggacatgtcccgacagtacgagcagatgcataaggaattaaccgacaagcttgaacacttggagcaggagaagcacgagctgcgccgtaggtttgagaacagagaaggggaatgggagggcagggtgtctgagcttgaatccgacgtcaagcagctgcaagacgaattagagcggcagcagattcacctgcgagaggcagatcgtgaaaagtccagggccgttcaggaactttcagaacagaatcagcgcctgctggaccagttatccagggccagtgaggtggagagacaattgagtatgcaggtgcatgccctcagagaagactttagagaaaagaactcatccacaaatcagcacattatccgacttgaaagcctccaagcagaaattaaaatgctatcagataggaagcgcgagctggagcatcgactgtcggccactttagaagaaaacgatctcctccagggaacagtggaggagctgcaagaccgcgtgctgattctggagcggcaagggcatgataaagatctgcagctccaccagtctcagctggagctccaggaggtgcgcctgtcctgcagacagctgcaggtgaaggtggaagaactgaccgaggagaggagtctgcagtcttctgcagcgactagcacttctctgctttcggagattgagcagtctatggaagcagaggagttggagcaggaacgggagcagctgagactgcagctttgggaggcttattgccaggtgagatatttgtgttcccacctaagaggcaatgattcagccgactcggccgtgtcgaccgatagctccatggacgagtcctccgaaaccagctctgctaaggatgtgcctgcagggagcctgagaacggccttaaatgaactgaaaaggctgatccagagcatcgtagacgggatggaaccaaccggctcacgtcgcctcgatgatgactcgctggaggaacagattcgacagacatcggaagattctagagccctgagggaactcatggagggagaacgaggtcgtctaccagaggcctcccgctgctgcctccccgcttgtagccagccaatccaatctcccagtctgccacacgtcggcaaggcacagcagggttgcgcagccaggatgtacctctag

SEQ ID NO: 23982 - DNA, 1428 bp, synthetic construct
  source 1..1428: mol_type = other DNA; note = Synthetic coding sequence
atgacccggggcaccggcggcaccgcccagcggggccggagcggccccgactcccagggactgctggattcttccctcatggcctccgggacggcatcccggtccgaggacgaagagtctttggctggacagaaacgcgcatcatcccaggcactaggcactatccctaagaggagatcctcaagccgatttattaagcgaaagaagtttgacgatgaactggtggagagctctctggcaaagagtagcacaagagctaagggagccagtggggtggagccggggagatgcagcggaagcgagccaagctcgagcgagaagaagaaggtctccaaagccccttccacccctgtcccccccagtcccgcaccggcgccaggattaaccaaaagggttaagaagtcgaaacagcccctgcaggtcaccaaggacctaggaagatggaagcccgccgatgacctactgctcattaatgcagtcctgcagacgaacgacctcaccagcgtgcacttgggggtcaagttctcttgtcggtttacgctgcgtgaggtgcaggagaggtggtacgcactgctgtatgatcccgtgatcagcaaacttgcttgccaggccatgcgtcagctccaccccgaggccattgctgctattcagtccaaggcccttttttccaaggccgaagaacaactgctgagtaaagtcggctcaacgagtcagccaacactggagacattccaggacctgttgcatcgccaccctgatgcattctatctggcccgcacagcgaaggctctccaggctcactggcaactgatgaaacagtactacctgctggaggaccaaactgtccagcctttacctaaaggagaccaggtactcaactttagcgacgcggaggatctgatcgacgatagcaagctgaaggatatgagggatgaagttttggagcatgaactcatggttgctgatcggcgtcagaagcgcgaaattcgccaactggagcaagagctgcataagtggcaggtactcgttgattctatcacaggcatgagcagccccgactttgacaaccagactttggccgtactccgtgggaggatggtaaggtatctgatgcgaagtagggagataacattaggccgagccactaaggacaatcagattgatgtggatctttctctagaggggcccgcgtggaaaatctctaggaaacagggggtgataaagctgaagaataacggcgattttttcatcgccaacgaaggccgaagacccatttacatcgatggtcgacctgttttgtgcggttctaagtggcggctgagcaataacagcgtggtcgaaattgctagtctcagatttgtgttccttattaaccaagatttaatcgccttgataagggccgaggccgcaaagatcaccccccagtag

SEQ ID NO: 23983 - DNA, 1311 bp, synthetic construct
  source 1..1311: mol_type = other DNA; note = Synthetic coding sequence
atggccgacggcggcagcgagcgggccgacggccggatcgtgaagatggaagtggattattctgcaacagtggatcagaggctgcccgagtgtgctaagctagctaaagcttcggacatggtgtccacgtcccgcattttggtggctgtcgttaagatgtgttacgaggcgaaggagtgggacctgctcaacgaaaacatcatgctgctttccaagagacggtctcaacttaagcaggcggtggctaagatggtgcagcaatgctgcacttacgtggaagagatcacggatctacctataaagttgagactgatagatacccttcgcatggtgaccgagggaaaaatttacgtagagatagaacgagcacggctgaccaagaccttggctacgatcaaagagcaaaacggcgatgtcaaggaagccgcctccattcttcaggaactgcaggtcgagacatacggctccatggaaaaaaaggagcgcgtggaatttattctcgagcaaatgcggctgtgtcttgccgttaaagattacatcaggacgcagattatctcaaagaagattaatacaaaattttttcaggaggaaaacacagaaaagctaaagctcaaatactacaacctgatgatccaactggaccagcacgagggctcctacctgagcatctgcaagcactatagagctatctatgatacaccatgtatccaggccgagtctgagaaatggcagcaagccctcaagtcggtcgtgctctatgtgatactagcaccttttgataatgaacagtccgacctcgtgcacagaatcagcggggataagaaactagaagagattccaaaatacaaggatctcctgaagctctttactacgatggagcttatgcggtggagtacacttgtggaggactacggaatggagctgcgtaaagggagcttggaaagtcctgcaaccgacgtttttgggagcacagaggaaggagagaagcgctggaaggacttgaagaatcgagtggtggagcacaatattcggattatggcaaagtactatacccgcattactatgaagcgaatggcccagttactggacttatcggttgacgagtctgaggcctttctgagcaacttggtggtgaacaagacaatatttgcaaaagtggatcgcttggctggaatcataaacttccagcggcccaaggatccaaacaatctgctgaacgactggtcgcaaaaattaaatagccttatgagcctcgtgaataaaactacacaccttattgccaaagaagaaatgatccataacctccagtag

SEQ ID NO: 23984 - DNA, 1974 bp, synthetic construct
  source 1..1974: mol_type = other DNA; note = Synthetic coding sequence
atggacgaccccgactgcgacagcacctgggaggaggacgaggaggatgctgaagatgccgaagacgaggactgtgaagatggtgaagctgctggcgccagagacgctgatgccggcgatgaagacgaggaatcagaggaacctcgcgctgctaggccaagcagctttcagtccagaatgaccggtagccgtaattggagggctaccagggacatgtgcagataccgccataattatcccgatctggttgagagagattgtaatggagatacccccaatctgtccttttatcggaatgagatccgttttttgcccaacggatgtttcatcgaagatattttgcagaactggaccgacaactatgatctgttggaagacaatcactcctacatccagtggttgtttcccttgagggagcctggcgtgaattggcatgccaagccgcttacgcttcgcgaggttgaagtgttcaagagctctcaggagatccaagaacgcctcgtgcgagcctatgaactcatgcttgggttctatggcattcgactcgaagatcgtgggactgggactgttgggcgtgcccagaattaccagaaacgctttcagaacttgaattggagatcacataataatctgcggataacacgaatcctaaagagcctgggtgagctggggctggaacacttccaggccccactggtaaggtttttcctggaagaaacactggtccgaagggaactaccaggggtgaggcagagcgcactggattacttcatgttcgctgtacgctgccgacaccagcggcggcaattggtccattttgcgtgggaacacttccggccccgatgcaagtttgtatggggtccccaggataagctgagaaggtttaaaccttcctccttgccccaccccttggaaggttcccggaaggttgaggaggaaggctcccctggggaccccgatcacgaagcaagtacacaaggccgaacctgtgggccggagcattccaaggggggggggagagtggacgaaggcccccagccgaggtcagtcgagcctcaagatgctggacctctcgaacgaagccagggcgatgaggccggaggccacggtgaggatcggcctgaaccactctcaccaaaagagtcaaaaaaacggaagttagagctgagtcgcagggagcagccgcctactgagcctgggccacagtccgcctcagaggtggaaaaaatcgccctgaacctagaaggatgtgcattgtcccaagggagcctgaggacgggcacccaggaggtagggggtcaggatcccggagaagctgtgcaaccctgtaggcagcctctgggcgcgcgggtcgcagacaaagtgcggaaacgtaggaaagtcgacgagggtgctggcgactctgccgcagtggcttccggcggcgcccagaccctcgccctggctggcagccccgctccctcaggccaccctaaggctggccactccgaaaatggggtggaagaggataccgaaggcagaacgggccccaaagagggcaccccagggtcaccttccgagacacccgggcccagcccagcggggcctgcaggggatgagcctgctgagagtcctagcgagactcccggaccaaggccagccgggcctgccggcgatgaaccggccgaatcgccaagtgagacaccaggaccttctcccgcaggcccgactcgggacgaacccgctgaatctcctagtgagacaccaggccctcgaccagccggtcccgcaggggacgagccggctgagtcaccctctgagacgcccggaccccgcccagctggaccagcgggagacgaaccagccgagtcgcctagtgagactccgggtccgagcccagccggccctactagggacgaacccgcaaaggctggcgaagctgcagaactccaggacgccgaggtcgaaagctcagccaagagcggcaagccatag

SEQ ID NO: 23985 - DNA, 615 bp, synthetic construct
  source 1..615: mol_type = other DNA; note = Synthetic coding sequence
atggaccccaaggaccggaagaagatccagttcagcgtgcccgcccctccgtcgcaattagaccccagacaggtcgagatgattcgcaggagaagaccgacgcccgcaatgctgtttaggctctccgagcactctagcccagaagaagaagcatcaccacaccagagggcgtcgggtgagggccatcatctgaaatccaaacggcccaatccttgtgcttatacccctccgagcctgaaggctgtccagcgcatagcagagagccacttacagagtatctctaacctgaatgagaaccaggccagtgaggaagaggatgagctaggagaactgcgcgaactcggctaccctcgagaagaagacgaggaagaggaggaagatgatgaagaggaagaggaagaagaagacagccaggccgaggtgctgaaagttataaggcagtcagcaggtcaaaagaccacttgcgggcaaggcctcgagggaccttgggagaggccaccaccactcgatgaatccgagagggacggggggagcgaggatcaggtagaggacccggctctgtccgaacccggtgaggagccccagaggccttctccctctgaacccggcacatag

SEQ ID NO: 23986 - DNA, 3042 bp, synthetic construct
  source 1..3042: mol_type = other DNA; note = Synthetic coding sequence
atgggctggaagcccagcgaggcccggggccagagccagagcttccaggccagcggattgcagccccgcagtctgaaagctgcccgccgcgccactgggaggccagataggtcacgagcagcccgacctactatggacccatcagctcacagaagcagggcagctcctccaaatatggatcccgatcctcaagctggcgtccaggtgggaatgagagtcgtgaggggtgtggactggaaatggggacagcaggacggcggggaaggaggagtgggaacagtagtcgagctgggacgccacggcagccctagtactcctgaccgtacagttgtggtgcagtgggaccaaggcaccagaaccaactacagagctggataccagggggcccatgacttactgctctatgacaatgcccagatcggagtgcgccatccgaatatcatctgcgactgctgcaaaaaacacggcttgagaggaatgcggtggaagtgtcgtgtgtgcttggactacgatttatgtacgcaatgctacatgcacaataagcacgagttggcacatgcttttgatagatatgaaacagctcactccagacctgtgacccttagtccgcggcagggactgccacgaatcccgctgagaggaattttccagggagcgaaagtcgtgcgcggtcctgattgggagtggggtagccaggacggtggagagggaaaaccaggtagggtggtggacatcagaggttgggatgtggagaccggaagatccgtggcttcggttacatgggcagatggcacaactaatgtgtaccgcgtgggccacaaaggcaaagttgacctgaaatgcgtaggcgaggcggctggtggcttttactacaaagaccatctgcctaggttaggcaaaccagccgagctgcagcgccgggtcagcgccgactcgcaaccctttcagcacggagacaaggtgaagtgtttactcgacacagatgttctcagagaaatgcaggagggtcacggagggtggaacccccgcatggccgaatttattggccagaccggaactgtccatagaatcactgacagaggtgacgtacgcgtgcagtttaatcatgagaccagatggacgtttcaccccggcgcacttacgaaacaccacagtttctgggtgggcgacgtggtgcgggtgattggcgatcttgataccgtgaaacggttacaggcaggtcatggcgagtggaccgacgatatggcaccagctcttggaagggtgggaaaagtagtcaaagtgttcggcgacggcaacctgcgcgtggcagttgcagggcagcgctggaccttctcacccagctgtcttgtcgcatataggcccgaggaagatgccaatctggacgtggccgagcgcgctcgggagaacaagagctctttaagcgtggccttggacaaattacgggcacaaaagtccgaccctgagcatcccggcaggctagtggtcgaagtggcccttgggaatgccgctagagcccttgacttgctgcggcgccgtccagagcaggtggacacaaagaatcaggggcggacggctctgcaggttgcggcatatctcggccaggtagagcttataagactgctgttacaggcccgggcaggggttgatctgcccgacgacgaaggaaacacggccctgcactatgctgctttgggcaatcagccagaggccacaagagtccttctgtctgccggctgtagggccgatgctataaactcaacacagtccacggctctccatgtggctgttcagcgtggtttcctggaggtcgtgcgcgccctatgcgaaagaggctgtgacgtgaaccttcccgatgcccacagtgacactccccttcacagtgctatttccgccggtaccggcgcatctggaatcgtggaagtgttgacagaagtccccaacatcgacgttaccgccacaaattcacaggggttcacactcctgcatcacgcaagtttgaaagggcacgcactggccgtgaggaagatactggcccgggcgagacaactggtggatgctaagaaagaggacggctttacagcccttcatctggccgcactcaacaaccaccgggaggtggcacaaatcctgatacgtgaaggaagatgtgatgttaatgtgaggaaccgcaagctacaatcaccgctccatctagcagtccagcaggcgcatgttgggctcgttccactgctggtggacgctggctgtagcgtgaacgctgaagatgaagagggcgatactgctctgcacgtagctctgcaaagacatcagctgcttcctctggtggctgacggagcaggcggcgaccctggaccgctgcagctgctcagtaggctgcaagccagtggcctgccagggtcagcagagctcacggtgggcgcagccgtggcctgttttctggcgctcgagggagccgacgtcagctacaccaaccataggggccgcagccctttggacctggcagctgaaggaagagtgctgaaagccctgcaagggtgcgcacaaagatttcgcgagcggcaggccgggggcggagctgccccaggaccacggcagaccctcggaactcctaacacggtgactaatttgcatgtgggcgccgcacctggccctgaagcagcagagtgtctggtctgctccgagttagcattgctggtgctgtttagcccgtgccagcaccggactgtttgtgaagaatgcgctcgacgaatgaagaagtgcatacggtgccaggtggtcgtgagcaagaaattacggcctgatggctccgaggtggcctctgctgcgcctgctcctggccctccgcgacagctggtcgaggagcttcagagccgctaccgccagatggaggagaggatcacctgtcctatatgcatcgatagtcatatccgtttggtgtttcaatgtggccatggagcctgtgctccctgtggctccgccctgtcagcttgcccaatatgccggcagccgattcgggatagaatccagatcttcgtttag

SEQ ID NO: 23987 - DNA, 2055 bp, synthetic construct
  source 1..2055: mol_type = other DNA; note = Synthetic coding sequence
atgatccccccccaggaggccagcgcccggcggcgggagatcgaggacaaattgaaacaagaggaggagaccttatcctttatccgcgatagcctagagaagtctgaccagctgaccaaaaacatggtgtcaattctgagtagcttcgagtcacgtctgatgaaactggaaaacagcattattcccgtgcacaaacagaccgaaaatttacaacgcctgcaagaaaatgtcgaaaagacccttagttgccttgaccatgtgatttcatattaccatgtcgcatccgacacggagaaaattatacgggaaggcccaactgggcggttggaagagtacttgggctcgatggccaagatccagaaggccgtagaatatttccaggataactctccggattcccctgagctaaataaggtgaagctactctttgagcgggggaaagaggcactggagagcgagttccgctcattgatgacccgccattctaaggtggtttcacctgtgctcatactggacctcatctctggggatgacgatcttgaggctcaggaggatgtcaccctcgaacatttaccagagtctgtgttacaggacgttattcggattagccgctggctggtagagtatggccgaaatcaagactttatgaatgtctactatcagattagaagcagccaactggacagatcaatcaaaggccttaaggagcatttccataaaagttccagcagcagcggcgtgccatatagccctgctattcccaacaaaagaaaagacacgcccacaaagaagccagtcaaaaggccaggcactattagaaaggcacaaaacttgcttaagcagtacagccagcacggcttagacggcaaaaaagggggctctaatctgattcccctagagggcagagatgatatgttagacgtggaaaccgacgcctacatccactgcgtgtcagcctttgttaagctcgctcagtccgagtatcagctcctcgccgatatcattcccgagcatcaccagaagaaaaccttcgacagcctgattcaggacgcgctggatggcctaatgctggagggagagaacatcgtgtcggcggcccgtaaagcgatcgttaggcacgatttctccacagtgctgacagtattccctatccttcggcatctgaagcagaccaagcccgagtttgatcaagtactgcaggggacagctgcttccacgaaaaataagctcccaggactgattacaagtatggagaccattggagccaaggcccttgaagacttcgcagacaatatcaaaaatgatcccgacaaggagtacaatatgcctaaggacggaacagtccacgagcttactagcaatgctatcctgttcttgcagcaacttttggattttcaggaaaccgccggggcaatgttagcatctcaggagacgtcgagttctgctacctcttactccagcgaattttccaaaagactcctttcaacgtatatttgtaaggtcctgggcaacctacagctcaacctgttatccaagtcaaaggtatacgaggatccagctctttccgcaatctttctgcacaataactataattacatactcaagtccttagagaaatccgaattaattcagctcgtggcagtcacacagaagacagccgaacggtcctaccgcgagcatatcgaacaacagattcagacttatcagcggtcatggttaaaggtcacggactatattgctgaaaagaatctgccagtgtttcaacccggagtgaagttacgagataaggaacgtcagattattaaggagagattcaaaggatttaacgacgggctcgaggagctgtgtaaaatccagaaagcgtgggccattccagacactgaacagcgtgataggattagacaggctcagaagaccattgtaaaagaaacgtatggagcctttctgcaaaaatttggctctgtgccctttactaagaatccagagaaatatatcaagtacggcgttgaacaggtgggcgatatgatcgaccggctgttcgatacaagtgcttag

SEQ ID NO: 23988 - DNA, 3576 bp, synthetic construct
  source 1..3576: mol_type = other DNA; note = Synthetic coding sequence
atgcccgtgcaggccgcccagtggaccgagttcctgagctgccccatctgctacaatgagtttgacgaaaacgtgcataaaccgatctcactcgggtgcagccacacagtgtgcaagacatgccttaataaattacaccgaaaggcttgtcccttcgatcagacggccattaataccgatattgacgtcctcccagtaaacttcgctctgctacagctggtgggggcacaagtgcccgaccaccagagtatcaaactgtcaaacctgggggaaaacaaacactatgaggtggccaagaagtgcgttgaggacctggccctctatctgaagccgctgagtggcgggaagggcgtcgcctcactcaaccagtcagccctgtcaaggcctatgcagaggaagttggtcactctggtaaactgtcagttggtcgaagaggagggcagggttagagcgatgagagcagcacgaagtctcggggaaagaacagtcacagagttgattctgcagcaccagaacccacaacagttgagcgccaatctttgggcagcggtgcgagctcgcgggtgtcaattcctggggccggccatgcaggaggaagcactcaaattggtcctgttggctctggaggatggttcagctttatccagaaaagttctcgtgttatttgttgtgcaacggttagaacctcggtttcctcaggcttctaaaacatccatcggccatgtggtgcagttgctctaccgtgcctcatgttttaaggtgaccaagagggatgaggactcctctctgatgcagctgaaggaggaattccgatcctacgaagcacttcggcgggaacatgacgcgcagatcgtccatattgcaatggaagcaggactgagaatctctcccgaacagtggtcgtctctgctttatggtgacctggcccacaagagccatatgcaaagcattattgacaagcttcaaagcccggagtcttttgcaaagagtgtgcaagaactcacaatcgtgctgcagcggactggcgacccagcaaacctgaaccggttacggccacacttagaactattggccaacatagatccaaatcccgatgctgtgagcccaacttgggagcagcttgaaaacgccatggtggccgtgaaaacagttgttcatggcctggtcgatttcatccagaattacagtcgcaaaggacacgaaacaccacaaccacagcctaatagcaaatataagaccagcatgtgccgcgatctacggcaacaagggggctgcccaagagggaccaactgcacattcgcccattctcaagaggaactggagaaatatcgcctaaggaataagaaaataaacgcaaccgtcaggactttcccgctgctcaacaaggttggggtcaataacaccgtgacgaccaccgctgggaacgtgataagcgttattggaagcacagagactacagggaagattgtccccagtaccaatggtatctctaatgctgagaattcagttagccaactgatttcccggagtaccgattccacacttcgggcacttgaaaccgtcaagaaagtaggcaaggtcggggctaatggccagaacgctgctggaccatctgcggattctgtcaccgagaataaaatcggctctccccccaagacccctgtatccaacgtggctgcaacctccgctggtccatcaaatgtgggcaccgaactgaattctgtgcctcagaagagtagtccatttctgacaagagtgccagtgtaccctcctcactccgagaatatccaatatttccaggacccacgtacacagatcccatttgaagtgccacagtacccgcagaccggctactacccccccccgccaacagtgcctgcaggagtcgcaccgtgcgtaccgcgttttgttcgaagcaataatgtgccggagtcttcactgcccccagctagtatgccctacgctgaccactattctacgttttctccaagagatagaatgaacagcagcccctaccaaccaccccctcctcagccatacggacctgtgcctccagtcccaagcggcatgtacgcacctgtgtacgactcacgccgcatttggagaccccccatgtaccaacgggacgacataatacggtcaaactcgctgccccccatggatgtcatgcatagctctgtctatcaaacctccctgcgagaaaggtataactcgttagatggctactattcagtcgcctgccaacctccgtccgagccaagaactacggttccgctgccgcgcgaaccatgcgggcacctcaaaacatcatgcgaggaacaaatcaggagaaagcccgatcaatgggcccagtatcacactcagaaggctcctctcgtctctagcaccctgcctgtagcgacccagtctcctacacctccctctcccctgttctctgttgactttcgggccgacttttctgaatccgtgagtggtacaaagttcgaggaggatcacctgagccattactccccatggtcttgcggtacgatcggaagctgcatcaacgctatagactcagaaccaaaagatgtgatagccaactcaaatgccgtacttatggatctcgactcaggggatgttaagcgacgcgttcacttgtttgaaacccagcgccggacaaaggaagaggacccgatcattccgttctccgacgggccaattatcagcaagtggggagccatatctcgaagttctcgcacaggataccacaccaccgacccagtgcaggctacagcctctcaggggtctgccaccaagcctatcagcgtaagcgactacgttccatacgtaaacgccgtggactcccgctggtcctcctacggcaacgaggccacatcctctgcccactacgtggagagggacaggtttatagtgactgacctcagtggacacagaaagcactctagtactggggatcttctctcgctcgagctccagcaggccaagtctaacagcctgttgttgcagagagaagctaatgccctggcaatgcagcaaaaatggaacagtctcgacgagggccgacacctgacgctgaacctgctgtcgaaggaaatcgagttaaggaatggtgagttacagtcggattacacggaagatgcaacagacacaaagcctgaccgagatatcgagctggagttgagcgcacttgatacggatgaacctgacggccaaagcgagcctatagaggagatcctcgacatccagttgggaatctcttctcaaaacgatcagctgctgaacgggatggccgtggagaacggtcacccagtccagcaacaccaaaaggagcctccgaagcaaaagaagcagtctctgggagaggaccatgtgatattggaagaacagaaaactatcctgcccgtgacttcttgtttctctcagccactacctgtgtccatctccaatgcctcatgcctccccatcaccacttccgtgtccgctggcaatttgatccttaagactcatgttatgtccgaggacaaaaatgatttcttgaagccagtagcaaacggtaagatggttaactcttag

SEQ ID NO: 23989 - DNA, 2100 bp, synthetic construct
  source 1..2100: mol_type = other DNA; note = Synthetic coding sequence
atgtgcggcatcttcgcctacctgaactaccacgtgccccggaccagaagggagattttggaaacattgattaaaggtctgcagaggctggaatataggggatacgatagcgctggtgtggggtttgatggcggcaacgacaaggactgggaagccaacgcttgtaaaattcagcttattaagaagaaggggaaggtgaaagctctggacgaagaggtgcacaagcagcaggatatggacctggatatcgaatttgatgtgcacctcggcatcgcccacactcggtgggctacacatggcgagcctagccctgtgaactcacatccgcaacggagcgataaaaacaacgagtttatcgtgatccacaatgggataattacaaattacaaagacttgaaaaaatttctcgagtctaagggctacgactttgaaagtgagaccgatacagagaccatcgcaaaactagtgaagtatatgtatgacaacagggagagccaggatacctcctttactactctggtagagagagtcatccagcagctggaaggagccttcgcattggtcttcaagtctgtgcactttcctggacaggccgtcggcaccaggcggggatcacccctcttaattggcgtacgcagtgaacataaactatctactgatcatattcccattctctataggaccgcacgtacgcagatagggtctaagtttacacgctgggggtctcagggggagcgtgggaaagataagaaaggaagttgcaacttgtcgcgtgttgattcaaccacatgccttttccctgtggaagagaaggcagtggagtattacttcgcttctgatgcgtccgccgtgatcgaacacaccaatagggtcatattcctcgaagatgacgatgtagctgctgtggtcgatggtaggctctcgatccatagaatcaagagaaccgccggtgaccaccctggccgagcagtccagacattacagatggaactccaacagattatgaaaggtaatttttcatcctttatgcaaaaggaaatatttgaacagcctgaaagcgtggttaatactatgcgtgggagggtcaactttgacgactatactgttaacctcggtgggctaaaagatcatatcaaagagattcagcgttgtagaagattgatactaatcgcttgtggtacctcttaccacgcaggcgttgcaaccagacaggtactagaagagctcactgaattgcctgttatggtcgaacttgcttcagatttccttgacaggaacacacctgtgttcagagacgacgtgtgtttcttcctgtcacagtcaggcgagactgccgatacattgatgggcttgcgctattgtaaagaaagaggagccctgactgtgggaattacgaatacggtcggatctagcatttctagagaaacggattgtggtgtacacattaacgcaggccccgaaattggagtggcgagcaccaaggcatacacctcccagtttgttagtttggttatgtttgcgctgatgatgtgtgacgaccgtatttccatgcaggagcgtagaaaggagattatgcttgggctgaaacgtctgcccgaccttattaaagaggtattgagcatggatgacgagatacagaaactggcaacagagctctaccatcaaaagagtgtcctcatcatgggtcgagggtaccattacgctacatgcttagagggtgctctgaaaataaaggaaatcacttatatgcactcagaaggtatcctggccggtgagctgaaacatggacccctggctctggtcgataaactcatgcctgtaatcatgatcatcatgagggatcatacgtacgctaaatgccagaacgccctccagcaggttgtcgcaaggcagggtaggcctgtagtcatctgcgacaaggaagacaccgagaccatcaaaaacactaaaaggactatcaaagtcccccattcagtggattgcctgcagggcatcctctccgtgatccctctgcagctcttagcctttcatctggcggtgctgcggggatatgacgtagatttcccaaggaacctcgccaagagtgtgacagtggagtag

SEQ ID NO: 23990 - DNA, 2067 bp, synthetic construct
  source 1..2067: mol_type = other DNA; note = Synthetic coding sequence
atgagcgtgaacagcgagaagagcagcagcagcgagcggcccgagccccagcagaaagccccgctggtccctcctcctccgccgccccctcctcccccgcccccccctcttccagacccaacacccccagagcccgaggaagagattctggggagcgatgatgaggaacaggaggaccctgcggactactgcaaaggaggttatcaccccgtcaagatcggggaccttttcaatggccgctatcatgtgataagaaagctgggttggggccattttagcacagtttggttatgctgggatatgcaggggaagcgcttcgtggccatgaaagtcgtcaagtccgctcagcactacaccgaaacagcattggatgagatcaagctgctgaaatgtgtgagagagagtgatccaagtgatcctaataaggatatggtggtgcagctgattgatgattttaagattagtggaatgaatggaattcacgtctgtatggttttcgaagtcctcgggcaccacctgctgaaatggatcatcaaatccaactatcaaggcctgcccgtccgatgcgtaaagagtatcatacggcaggtactccagggtctcgattacctccatagtaaatgtaaaattattcacactgatattaagcccgagaacatcttaatgtgcgtcgatgacgcctacgtccgacgtatggccgctgaggcgacagagtggcaaaaagcaggggcacctcctccctcgggcagcgctgtgagcacagcaccacaacagaagcctatcgggaaaatttcaaaaaacaaaaagaagaagctgaagaagaaacagaagcgccaggcggagttattagagaaacggttacaggaaattgaggagctggagcgagaggccgaacgcaaaatcatcgaggaaaacatcaccagcgccgccccatctaatgaccaggacggggaatactgcccggaagtgaagcttaagacaacgggcctcgaggaagccgcagaggcagagactgcaaaagacaacggggaagcggaggatcaagaggagaaagaagatgctgagaaagaaaacattgagaaggacgaggacgacgtcgaccaggaactcgctaacatagacccaacttggatagaaagcccaaaaacaaatgggcatatcgagaatggcccgttttccctggagcagcagctcgatgacgaggatgatgatgaggaggactgtccaaatcccgaggagtataatctagatgaaccaaacgccgagtctgactacacttacagttcatcttatgaacaatttaacggtgaactccccaatggccgacacaagatccccgagtcccagttcccagagttttcaaccagcctgttctcgggctcactggagcccgtcgcttgtggctcagtgctctctgaaggatcccctctgacagagcaagaggaatcttcgccctctcatgatcgcagccgcaccgtgagtgccagctccaccggcgaccttcctaaagccaagaccagagctgcagatctgctcgtaaaccctctcgatccacggaacgcggataagatccgtgtgaaaatagccgatctgggtaacgcttgttgggtgcacaagcacttcactgaagatatacagacgcgccagtacaggtctatcgaggtcttgattggcgccggctacagcacacccgccgatatttggtctacggcctgtatggccttcgaactggcaactggggactatctttttgaaccccattctggcgaagactattcgcgagatgaggaccacatagcacatatcatcgagcttctggggtcaatacccaggcactttgcactgagtggcaaatattcaagagagttctttaatcgccgcggagagctccgtcatattaccaaactgaagccatggtctctctttgatgttctcgtggagaagtatggatggccacacgaagacgccgcccagtttacagacttcctgattccgatgctcgagatggtgcccgagaagcgggcgagcgccggagaatgtcttaggcatccttggctcaacagttag

SEQ ID NO: 23991 - DNA, 1308 bp, synthetic construct
  source 1..1308: mol_type = other DNA; note = Synthetic coding sequence
atgagcggctaccagcggcggcccggcgccacccccctgagccgggcccgatctctcgctattcccgacgcaccggcgttttacgagagacggagctgtttacctcagttgaattgcgaacggccccacgggcgtgacctggacagtcctttcttcggcattcggccggctttcatgtgctacgtgccatctccggtgctcgcaagtgtgggagacacagattttggatacggcaaaggcaaatgtagtaaacagtcaccctcgggtgcccacggtacacactttggggacgacaggtttgaagatttggaagaggcgaatcctttctcattccgggagtttttaaaaaccaaaaacctgggcctgagcaaagaggatcctgcctccaggatctacgcaaaggaggcaagtcggcatagcctgggtctggaccacaatagtcccccaagccagactggcggatacggtcttgaatatcaacagccttttttcgaggaccccacgggggctggggacctgctcgatgaggaagaggacgaggacaccggatggagcggggcctatcttccttctgctatcgaacaaacccacccggagagggtccccgccggcacatctccatgttctacatatctgtctttctttagcaccccatccgaactggctggcccagaaagcctcccctcatgggctctgagtgataccgacagccgagtcagtcctgcgtcccccgccggcagtccaagcgctgatttcgctgttcatggcgagtctctgggagatcggcatttgcgcactttgcagattagctatgacgcactgaaggacgaaaacagtaagttgcggagaaagctgaacgaggttcagtccttcagtgaggcccagacggagatggttagaactttggaaaggaagttggaggctaaaatgatcaaagaggagagtgattaccatgacctggagtcagtggtgcagcaggttgaacagaacctggagctgatgaccaaacgcgcggtgaaagccgagaatcacgttgttaagttaaagcaagagatttccctgttgcaagcacaagtatccaatttccagagagaaaacgaagccctgaggtgcgggcagggtgcaagcctcactgtagtcaagcagaatgctgacgttgcacttcagaatcttagagtggtgatgaattccgcacaggcaagtataaaacagctagtcagcggcgcagagacgctgaatttggtagccgagattctcaagtccatcgatcggatttcagaagtgaaggatgaagaagaagacagttag

SEQ ID NO: 23992 - DNA, 591 bp, synthetic construct
  source 1..591: mol_type = other DNA; note = Synthetic coding sequence
atgaaggtgaagatcaagtgctggaacggcgtggccacctggctgtgggtggccaatgatgaaaactgtggaatctgtcgaatggctttcaatgggtgttgcccagactgcccgcttcatggagaaagcatctcacgttgtctggggtggtgtccccaacccgtgcccgttctcgggggccgtgctcatccgcaggtccccataaatactgcgtcacctactcctggccagcacactggtagcctgatgtctagggaggagagctccagatcgcccgacccgactccccctgccctggatcaggaaacttcttcattgctgagatgcacatccccttggtgcctggaccattcttgtgacctttttggcattaccgaccaagtcagtgctgacggcccgcgggcttgcaggcagggtgcccggcgccgtctgcctgccggggtcgggccggttctcccgctcctaccacatgctctgcatccacaggtagccgccaggaccgcaggtgccgcggccctaccacacgtgcctcccggcatggaagtgcagggagttaggccagacttggctttggccggaggcgcaagttag

SEQ ID NO: 23993 - DNA, 5127 bp, synthetic construct
  source 1..5127: mol_type = other DNA; note = Synthetic coding sequence
atggccgccatcggccggggccggagcctgaagaacctgcgggtgcgcggccggaacgactcaggtgaagagaatgtaccactcgaccttacaagagaacctagtgataatttacgggagatcctgcaaaacgtggctaggttgcagggggttagtaacatgaggaaattaggacatctcaacaattttacaaaattgctttgtgacatcggccattccgaagagaagctgggttttcattacgaggatatcatcatctgcctccgccttgctctgctgaatgaagccaaggaagtgcgcgctgcgggtctgcgcgccctccgctacctgatccaggattcatctattctccagaaggttctcaaactgaaggtagactaccttatcgcacgctgcatcgatatccagcaatctaacgaagtggaaagaacacaagctctgagacttgtgcgcaagatgattactgtgaacgctagtttgtttccctcttctgttacaaacagtttaatcgcagtcgggaatgatggcctgcaggaacgggatcgcatggtgcgggcgtgcatcgccatcatctgcgaacttgccctgcagaacccagaagttgtggcactgagaggcggtctgaacactatactgaagaatgtgattgactgtcagttatctcggatcaacgaggcgctgatcactaccatcttgcatctcctgaatcatccaaagacgagacagtacgtgagggccgatgtcgaactggagcgaattcttgccccctacaccgattttcattatcggcatagtcctgacactgcagaaggacagcttaaggaggaccgggaggccaggttcctcgcgagtaaaatggggattatcgctacctttaggtcatgggcgggcataatcaatctgtgtaagccgggtaacagcggaatccagagcctgatcggagtgctgtgtatccccaatatggagatccgccgggggttgctggaagtcttatacgatatcttccggctacccctgcctgtggtgaccgaggaatttatcgaagcactgctgtcagtcgatcccggaagattccaagactcatggcgattgtcagacggattcgtagctgcggaagctaagactatcctgccacacagagctagatcaagacctgatcttatggacaattacctggcattgatcctgagtgccttcatcagaaacggactgctcgagggcctggtcgaagtgattaccaatagtgacgaccacatatctgtgcgggcaactatcctgcttggggagctccttcacatggcaaatactattctgcctcattcacatagccatcacttgcactgcctcccaaccttgatgaatatggccgcatcctttgatatacccaaagagaaacggctgagggcatccgccgctttgaactgccttaagcgctttcacgaaatgaaaaagcgcggccccaaaccatacagccttcatctcgatcacattattcagaaggctatcgccacgcaccagaaacgcgaccagtacttacgcgttcagaaggatatatttatattgaaggatactgaggaagcattgttaattaacttacgggacagccaagtgttgcaacataaggaaaatctcgagtggaattggaaccttataggcaccatcctgaagtggcccaacgtcaatctgcggaattacaaggatgagcaactccacaggttcgttagacggctactgtatttctacaaaccttcctccaagctgtatgcaaacttggacctcgactttgccaaagccaaacagctcacagtagtggggtgccagtttaccgagtttctactggaaagcgaggaagacggccagggctacttggaggacttggtcaaggacatcgttcaatggctgaacgccagctccggcatgaagcctgagagaagcctacagaacaatggactgcttaccacgctgtcacaacattactttctgtttattggtaccctgtcatgccatcctcacggtgtgaaaatgttggagaagtgctctgtattccagtgtctgcttaatctgtgcagcctgaagaaccaagatcatctcctgaagctgacagtttcgagtctggattatagtcgggatgggttggccagggttattctctctaaaatactgactgccgccaccgatgcttgcagactatacgccaccaaacacctacgggtcctgctgagggctaatgtcgaattcttcaataattgggggattgagctcctcgttacccaactccacgacaagaacaaaactatctcgtcggaggcccttgatatcctcgacgaggcttgcgaagacaaagcaaacctccatgccttaatccagatgaaaccagccctgtcacaccttggcgacaaaggtcttctgctgctgctgcgcttcttgtccatcccgaagggcttctcttatttgaacgagcgtggctacgtggccaagcagctggaaaagtggcatcgagagtacaactctaagtacgtggacctcatcgaggagcagctcaatgaggccctgactacctaccgaaagccagtggatggcgacaactacgttagaagatcaaatcagcgacttcagcggccacacgtgtatctgccaatacatttgtacggccagctggtgcatcacaaaactgggtgccatctgctggaagtccagaacattatcaccgagctctgcaggaatgtccggacgccagacctggacaagtgggaagaaatcaagaaactcaaagcatctctgtgggccctcggtaatattgggagctcgaattggggacttaaccttctgcaggaagagaatgtaatcccggacatccttaagctggcaaagcagtgtgaagttcttagtattcgggggacctgcgtctatgttcttgggctaatcgctaaaacaaaacaagggtgcgacattctcaaatgtcataactgggatgctgtacggcacagtaggaagcatctctggcccgttgttcctgacgatgtcgaacagctctgcaacgaactgtcctccattccttccactctaagtttgaactccgagtcaacatcttcccggcacaacagcgaatccgagtccgttccatcaagcatgtttattcttgaggacgataggtttggcagctcgtcaacgtcaacctttttcctggatatcaacgaagatacagagccgacattttacgataggagtgggccaatcaaggacaagaacagttttccattttttgctagcagcaaattggtaaaaaatagaatcctaaattctctaactctgcccaataaaaaacaccggagttcaagtgaccccaagggaggtaagctgtccagcgagtccaaaacctccaatcggagaatccggacactaactgagcccagcgtggacttcaaccacagcgatgattttacccctatctctaccgtccaaaaaactctgcagctcgagacaagctttatgggaaataaacacatcgaggacaccggtagtaccccaagcataggagagaacgacctgaaattcacaaagaatttcggaaccgagaaccatcgggagaatacttctcgcgaacggctcgttgtcgagtcatccacgagctcccacatgaaaatccgcagtcagagtttcaacacagacacgactacatctggtatttccagcatgtcttccagcccctcaagggagacagttggggtggacgctacaaccatggataccgactgcggatctatgtctacggtcgtgagcacgaagactataaaaacatcccattacttaacccctcagtcgaaccacctctcactgtccaagagcaatagcgttagtctagtcccccctggctcttctcatacactacccaggcgcgcacagagtctgaaagctccgtctattgccaccatcaaaagcctcgctgattgtaacttctcttacaccagcagcagggacgcctttggatatgcaactctgaagaggttgcagcagcagagaatgcacccatctctctcacactcggaggccctggccagcccggccaaggatgtgctgttcaccgatacgattaccatgaaggcaaattcttttgagtccaggctgacaccgtcccgatttatgaaggccctctcatatgcctcactcgataaggaagacctgctctcacctatcaatcagaacacactgcaaagatccagtagcgtccgaagcatggtgtcttctgcaacttacggtggaagcgacgactacatcgggctggccctgcccgtagatatcaacgacatcttccaggtcaaggatattccttacttccaaaccaagaacatccctccgcacgacgaccgaggcgctagagccttcgcccacgacgccggtggcctgcccagtgggacaggagggctggtaaagaattcttttcacctgctgcggcagcagatgtctctgaccgagattatgaacagtatacattccgatgcatccctatttctcgaaagcactgaggacaccggactccaggaacatacggatgataactgcctgtactgtgtgtgcatcgagattttaggcttccagccttctaatcaactgtcagccatatgttcacattctgacttccaggatatcccatactcagattggtgtgagcaaacgatccacaacccactggaagtggtgccctcgaagtttagcggaattagtggatgctcagatggggtttcccaagaggggagcgcgtcaagtaccaagtccactgagctcctgctgggagtaaaaactataccggacgacactcccatgtgccgtattctcttaaggaaagaggtgctacgcttagtcatcaatctgagctccagcgtttctaccaagtgccacgagacaggactactgacaataaaggagaaatacccccaaacatttgacgacatatgtctgtatagcgaggtctctcacctgctcagccactgtacttttaggcttccatgcaggcggtttattcaagagctgttccaggatgttcagttcctgcaaatgcatgaggaagccgaggccgtgctcgcgacaccgccaaagcagccaatcgtcgataccagtgctgagtcctag

SEQ ID NO: 23994 - DNA, 3867 bp, synthetic construct
  source 1..3867: mol_type = other DNA; note = Synthetic coding sequence
atgccccggaagggcacccagcccagcaccgcccggcggcgggaggaaggacctccaccaccaagtcctgacggggctagctccgacgcagagccagagccgcccagcggcagaacagaatctcccgctacagccgctgaaaccgcttcagaagaactggataatcgcagtcttgaggagatcctgaacagcatacctcctcccccaccacctgctatgaccaacgaagccggagctccacggttaatgattacacatatcgtcaaccagaattttaagtcatacgcaggtgagaaaatcttaggaccttttcacaaaagattttcctgcattattggaccgaacggaagcgggaaatctaacgtgatagactcaatgctttttgtgttcgggtaccgtgcgcagaagatcagaagcaaaaaactcagtgtcctgatacacaacagtgacgagcataaggatatacaatcctgtaccgtggaggtccactttcagaaaatcattgacaaggagggtgatgattacgaggtgattcccaactccaacttttacgttagccggacagcctgcagggataatacttctgtttatcatattagcggcaagaagaaaaccttcaaggacgtcggtaacctgctccgttctcacggtattgatctcgaccacaaccgctttcttattttacagggggaggtcgagcagattgcgatgatgaaaccaaagggacagactgagcacgacgagggaatgctggaatacctcgaggatatcattggatgcggtcgccttaacgagcccatcaaggtactctgtaggcgcgtggaaatcctgaacgagcatcggggcgaaaagcttaatcgcgttaagatggtggagaaggagaaggatgccttggagggcgagaaaaacattgctatcgagtttcttacccttgaaaacgaaattttccggaagaaaaaccacgtctgtcagtactacatctacgagctacagaaaagaatagctgagatggagacgcagaaagagaaaattcatgaggacacaaaggaaattaatgagaaatctaacatcctgagcaacgagatgaaggcgaaaaataaagatgttaaggacacggaaaaaaagcttaataagatcaccaagtttatcgaggagaataaggagaaattcactcagcttgacttggaggatgttcaagtgcgcgagaagctgaagcacgcgacatctaaagcaaagaagcttgaaaaacagctccagaaggataaggaaaaagtggaagagttcaagtctatccccgccaaaagcaataatattattaatgagacgacgacccgcaataatgcgctggagaaggagaaagagaaggaggagaagaaattaaaggaagtaatggatagcctcaagcaggagactcagggactgcagaaggagaaagagtcccgggagaaagaactgatggggttttccaaatctgtgaatgaagcacgatccaagatggacgtggctcagtccgaactcgacatttaccttagccggcacaacaccgctgtctctcaactcacgaaggcaaaagaagctcttattgcagccagtgagacccttaaggagcgaaaggctgctatccgggacattgaaggtaaactgccacagaccgagcaggaacttaaggagaaggagaaagaattgcagaagcttacgcaggaggagacaaatttcaagtcgttagtgcatgacttgttccaaaaggtcgaagaggcaaaaagctctctcgccatgaatagaagccgtggcaaagttctagatgcaattatacaagagaagaagtccggccggattccagggatttatgggcggcttggcgaccttggcgcaatagacgaaaaatatgatgtggcgatctcttcgtgttgccacgcccttgattatatcgtggtggattccattgacatagctcaagaatgtgtgaactttctcaaacgtcagaacatcggtgtggccacttttatcggcctggataagatggcagtctgggccaagaaaatgaccgagattcagacccctgagaacacacccaggttattcgatctggtgaaagtcaaggacgagaagatccggcaagccttttacttcgcactccgcgacacgctggttgctgacaacttggaccaggctacaagagtcgcttaccaaaaagacaggcgttggcgggtcgtaacattgcagggtcaaataattgaacagtctggaacaatgaccggcggcggcagtaaagtgatgaaggggcgaatgggatcctcgctggttatagaaatctccgaggaggaagttaataagatggaaagccaactccaaaatgacagtaaaaaagcaatgcagatccaggaacagaaggtgcagctggaggagcgggttgtgaagctgcggcattcagaaagagagatgcgaaacactctggagaaattcaccgcaagcattcagagactcattgagcaagaggagtatctcaatgtgcaggtaaaggaactggaagcgaacgtactcgctacagcacctgacaagaaaaagcagaagctgctagaggaaaatgtgtccgccttcaaaactgagtacgacgcagttgcagagaaggccggcaaggtggaagctgaagtcaagagacttcacaacaccattgttgaaatcaataaccataagttaaaggcccagcaggacaagctcgataagataaataaacagttggacgagtgcgcctctgcaatcacaaaggcccaggtcgctatcaaaaccgctgataggaatctgcaaaaggctcaggattccgtgcttaggacagaaaaagaaatcaaagacactgagaaggaggttgatgatctaaccgctgagctcaagtcgctggaggataaagccgccgaagtggtcaagaacactaacgcagctgaggagagccttccagagatccagaaggaacatcgcaatctcttacaagaactgaaagtgattcaggagaacgaacacgccttgcagaaggacgccttgagtattaaactcaagctagaacagatcgacggacacattgctgaacataattccaaaatcaagtactggcacaaagagataagcaagatcagcctgcatccgattgaagataatcctatagaggagatttccgttctgtcgccggaggacctggaggcgataaaaaatcctgattccattaccaatcagattgcgctgctcgaagccaggtgccacgagatgaagcccaacctgggggctatcgcagaatacaagaaaaaggaggaactgtatttacaacgcgtggccgaacttgataaaatcacatatgaacgcgactccttcagacaagcctatgaggatctccggaagcagcggctgaacgaatttatggctggcttttacatcataactaataaactgaaggagaactaccagatgttaacgctcggaggggatgccgagcttgaactggtcgattctctggatccattctccgaaggaataatgttttctgttagacctccaaagaaatcatggaagaaaatctttaacctgagtggaggcgagaagactctctccagcctagccctggtgtttgcactccaccattacaagcctacgcctctttactttatggacgaaatcgacgccgcccttgatttcaagaacgttagcatcgtggccttttacatatatgagcagactaagaatgctcaattcattataatatccctgcgaaacaacatgttcgagatctccgacaggctcataggtatttataaaacatacaatattacaaaatccgtcgccgtcaaccccaaagaaatcgcctccaagggcttgtgttag

SEQ ID NO: 23995 - DNA, 2829 bp, synthetic construct
  source 1..2829: mol_type = other DNA; note = Synthetic coding sequence
atgaccggcagcaacagccacatcaccatcctgaccctgaaggtgctgccccatttcgagagccttggcaagcaagaaaagatcccaaacaagatgagcgccttccgcaaccactgccctcacttggatagtgtgggtgaaataacaaaagaagatctgatacagaagagcctgggtacctgtcaagactgtaaggtccaggggcctaacttatgggcatgcctggaaaatcggtgctcatatgtgggctgcggggaaagccaagttgaccattccaccattcattctcaggagacaaaacattacttgacagtgaacctgacaactctgagagtgtggtgctacgcttgcagtaaggaggtgttcctagataggaagctgggaacgcaaccaagtcttcctcacgtgcgccagccccaccaaattcaggaaaatagcgtccaagatttcaagatcccatccaacactaccctaaagactccactggtggcagtattcgacgatttagacatagaagctgacgaagaagacgaactgagagcgaggggccttacaggcctgaagaacattggcaatacctgctacatgaacgccgcattgcaggccctatctaactgtccccccttaacccagttcttcctggactgtgggggtcttgcccggaccgataagaagccagccatttgcaaatcttacctaaaactcatgacagagttgtggcataaaagccgccccggtagcgtagtgccaacgacactgttccaaggaatcaagaccgtgaatccaactttccggggctacagccagcaagacgcccaggagttcctgaggtgccttatggacctgctccatgaggaactgaaggagcaggtgatggaagtggaagaggatccccaaacgataacaaccgaagagaccatggaagaggacaagtcccagtcagatgttgattttcaatcctgtgaaagttgtagtaatagtgacagagccgagaacgaaaacggttctaggtgctttagtgaagataataacgaaactacaatgctcattcaggacgacgagaacaattcggaaatgtccaaggactggcaaaaggaaaaaatgtgcaataagattaataaagtcaactctgagggcgaattcgacaaggatagagacagcattagtgaaaccgtggatctgaataaccaggaaacagtgaaggtgcagatccattctcgagccagcgagtacatcaccgatgtccacagcaatgatctgtcgacaccgcaaatcctacccagcaacgagggagtgaaccccaggttatcagcatccccccccaagtcaggcaacctctggcctgggctggcccccccgcacaagaaggcccagtcagcaagccccaagcgcaagaagcagcataaaaagtaccgcagtgtgataagcgatatcttcgatgggacaatcattagcagcgtgcagtgcctaacttgtgatcgtgtttccgttactctggaaacctttcaggatctaagcctccccatccccggaaaggaggacctggcaaagctccattcgtcttctcaccccacctccatcgtgaaagctggttcatgtggagaggcttacgctccacaaggctggattgcgttttttatggagtacgtaaaacgtttcgtggtgagctgcgtgcctagttggttctggggcccagtcgtcacactgcaggattgcttagccgctttcttcgcaagggacgaattaaaaggtgacaacatgtacagttgtgagaagtgcaagaagctgcgcaatggggtcaagttttgtaaggtgcagaattttccggaaattctttgtatccaccttaagcggttcaggcacgagttgatgttttccacaaagatttccactcacgtcagcttccctctggaggggctcgacctgcaacctttccttgcgaaggatagtcctgcacagattgttacttacgatctgttatctgtgatttgtcatcacggtactgcgtcttccggtcactacatagcgtactgtcgtaacaatttaaataacctgtggtatgagttcgatgatcaaagtgtgaccgaggtgagtgaatctacagtacagaacgccgaggcctacgtgctgttttatcgcaagagcagcgaagaggcccagaaggagcggcgccggatcagcaatttactgaacattatggaacctagcctgctccagttttacatctccaggcaatggctgaacaaatttaaaacctttgccgagcctgggcccatctcaaacaatgattttttatgtattcacggaggcgtcccaccacggaaagctggatatatcgaagacctggtcctgatgcttccccaaaacatttgggataacctctactcaaggtacggggggggaccggccgttaaccacttgtatatatgtcacacatgccagatagaggctgaaaagattgaaaagaggcgcaagactgaactggaaatcttcattcggctgaaccgagccttccagaaagaggacagccctgccacattctactgtattagcatgcaatggttcagagagtgggaatccttcgttaaggggaaagatggcgatcctccaggacccatcgacaatactaagattgctgttacgaagtgcggaaacgtgatgcttcgacagggtgccgactcaggacagatttccgaagaaacatggaatttccttcagtcaatctacggggggggaccagaggtgatactgcggcctccagtggtgcatgtcgaccccgacattttgcaggcagaggagaagattgaagtggaaacgaggagtctctag

SEQ ID NO: 23996 - DNA, 2106 bp, synthetic construct
  source 1..2106: mol_type = other DNA; note = Synthetic coding sequence
atgatgaagcggcagctgcaccggatgcggcagctggcccagaccgggtcccttggtcgtacccctgagactgcagagtttctgggagaggatctgttacaagtcgagcagcggttggagccagccaagcgggccgctcacaacattcacaagcgcctccaggcttgcttgcaggggcagtctggagctgacatggacaagagagtgaagaaactgcccctaatggcactcagtaccacaatggcagagagtttcaaggaactggatcctgacagttcaatgggcaaggccctggagatgagttgtgcaatccagaatcagctcgcacgtattcttgccgagttcgagatgactctggaacgagacgtcctccaacctcttagccggctcagcgaggaagagctgccggcgatcctcaaacataagaagagcctacagaaactcgtttctgattggaacaccctgaaatccagattgtcccaggccaccaagaacagcggaagctcgcagggactgggcgggagcccaggcagtcattcacacacgactatggcaaacaaagttgagacgttgaaagaggaagaggaggaactcaagagaaaagtcgagcagtgtcgagatgagtacctagcagatctgtaccattttgtgacaaaagaagatagttacgccaactatttcattaggttgctagagattcaggcagactaccaccgacggagtctgtcatcccttgatacagcgttagctgaacttcgggagaaccatggtcaggccgaccactccccaagcatgaccgcaacccacttcccccgtgtgtatggcgtcagcctggccacacatctgcaggaactaggaagggagatcgccttacccatagaggcctgtgtgatgatgctgctgagcgaagggatgaaggaagagggacttttccgcctggccgcaggggcatcagtgctcaaacgcttgaaacaaaccatggcttcagatccacacagccttgaagagttctgctctgatccccacgccgttgctggcgcactgaagagctacttacgcgaacttcctgagcctctgatgacctttgatttatatgacgattggatgcgtgccgcctccctcaaggaacccggggcacgactgcaggcgctacaagaagtctgcagcaggttacccccggagaacctcagtaatttgaggtatctaatgaagttcttggccaggcttgcggaagaacaagaagttaataagatgactcccagcaacatcgccattgttctcgggcccaatctgctatggcctcccgaaaaagagggagatcaggcccagttagacgccgcgtccgtctcaagtatacaggtagtgggcgtggttgaagccctgattcaaagtgcagatacactttttcctggtgatattaacttcaatgtgtcaggactgtttagcgccgtcacactacaagatactgttagcgaccgtctggcttccgaggaattgccctccactgccgtgcccacacccgcgaccactcccgccccagcgccagctcccgcccctgcccccgccccagctctggcttctgcagccaccaaagaaagaaccgaaagcgaggtgcctcccaggccagcgagcccgaaggtaactagatcacctccagagacagctgccccggtagaggacatggcaaggagaaccaagaggccagctcctgccagaccaacaatgcccccaccgcaagtgagcggatctcggtcctcaccacccgctccaccgctacctcccggcagtggaagccccggaacccctcaggctctgccaaggcggctcgtgggctcctctttgagagcccctacggtgcctcctcctttaccaccaacacccccacagcccgctcgcaggcagagccgccgcagccccgcctctcctagtccagcctcacccgggcctgcttctcctagtccagtcagcctgtctaatcccgcacaggtggacctgggagccgccaccgccgaagggggggctcctgaggccatttccggcgtgcctacccctcctgccattccacctcaacctcggcctcgaagcctggctagtgaaaccaactag

SEQ ID NO: 23997 - DNA, 1818 bp, synthetic construct
  source 1..1818: mol_type = other DNA; note = Synthetic coding sequence
atggaggtgcgggccagcctgcagaagatcgtgagcaacggcgacgaacagctggagaaggccatggaagaaatcttaagggactcagaaaagcgcccgtcatccctgctggtggattgtcagtcttctagcgaaatttcagatcattccttcggagatataccagcttctcagactaataagcctagccttcagctgattctcgatcctagtaatacagaaatttccaccccacggcctagctcacctggaggactgccggaagaagattccgtgcttttcaacaaactgacttatcttggatgcatgaaggtctcctctccgcgcaacgaagtggaagccctccgtgccatggctactatgaaatcatcatcccagtacccctttccggtaactctgtacgtccccaacgtaccagagggatccgtcagaattattgaccagtctagcaatgtcgaaatcgcaagtttcccaatctacaaagtgctgttttgtgcccgcggccacgacggcaccactgagtctaattgttttgcgtttacagagtcaagccacgggagtgaagagttccagatccacgtgtttagttgtgaaattaaggaagcagtctcacgtatcctttattctttttgcacggccttcaagcggagtagcagacaggtttctgatgtgaaagactcagtcattcctactcctgactcagacgtattcacattcagtgtgtctcttgaagtgaaagaggacgatggcaaagggaacttcagccctgttcctaaagacagagataagttctacttcaagctgaagcagggcatagaaaagaaagtggttatcaccgttcagcagctctcaaacaaggagctcgcaatcgagcgttgcttcggaatgctcctgagccccggtagaaatgtgaaaaatagcgatatgcatctgttggatatggagagcatggggaaatcttatgacgggcgagcttatgtcatcaccggcatgtggaatccaaatgctccagtgttccttgcgctgaacgaggaaacccccaaagacaaacaggtctatatgacagtggctgtcgacatggtggtgacggaagtggtggaaccggtaagattcttgctggaaactgtggtgagagtgtatcccgccaatgagcgcttctggtattttagccgtaagacctttactgaaaccttcttcatgagactgaagcagtctgagggaaaaggccacactaatgctggagacgcaatctacgaggttgtgtccctccaaagagagagtgacaaagaggaacctgttacaccaaccagcgggggtggacctatgtccccccaggatgatgaggctgaggaggaatcagacaatgaattatcttcagggaccggagatgtgtctaaagactgtcccgagaaaatactctacagttggggggagctgcttggcaaatggcactccaatttgggagcccggcctaaggggctatctactctcgtgaaatctggtgtgcccgaggccctgcgcgcagaggtgtggcaactcctggccggatgccacgacaatcaggccatgctggaccggtatagaatcctgattactaaacaacagatgaagttcagcctgactcctaggcaaacaatacatctggttaaatatgaagggtccatgaaagtgtctatgaccccctgcaatcaactgcagttcgatattaggctggatgtacttattacttacactttttgcttctcctcttttcctgaaccggaattatataaatacgtactgaaacatcagttaatcaagcggcttaacgcgtgctag

SEQ ID NO: 23998 - DNA, 3120 bp, synthetic construct
  source 1..3120: mol_type = other DNA; note = Synthetic coding sequence
atggccgtgcagctggtgcccgacagcgccctgggcctgctgatgatgaccgaaggacgacgatgccaggtgcatcttcttgatgacagaaaactcgaactgttggtgcagccaaaactcctggccaaagaactcctggatttggtggcatctcattttaatcttaaggaaaaagaatatttcggtatcgcctttacagacgagacaggccatctgaactggctccagttggataggcgggtcctggaacatgatttccccaagaaatctgggcctgtggttctatacttttgtgtcaggttttacatcgaatcaatcagttatctgaaggataacgcgacaatagagctgtttttcctcaatgcgaaatcttgcatctacaaagagctgatagatgtggatagtgaagtggtgtttgaactggcctcttacatccttcaggaggcaaagggggatttcagctctaacgaagtggtgcggtccgacctgaagaaactcccagctctgcctacccaggcactcaaggagcatccgtccctagcctactgcgaggatagggtaatcgagcactataagaagctcaatggccagacccgaggacaagccattgtgaattatatgtcaatcgtcgaatccctgccgacctacggggtgcactattatgctgtgaaagacaagcagggaattccatggtggctaggcctgtcttataaagggatctttcaatatgactaccatgataaagttaaaccacgcaagatatttcagtggcggcaactggagaatctgtattttcgggaaaaaaagttttctgtggaggtgcatgatccgagacgagcctcagtaacccgccgcacttttggtcactcggggattgccgttcacacttggtacgcttgtcccgctctgataaagagcatttgggccatggcaatctcccagcaccagttctatctggatcgcaagcagtccaaatctaagatccacgccgcccgatccctaagtgaaattgctatagatctgactgaaaccggtactctgaaaacaagcaagctcgctaatatgggctcaaaggggaaaatcataagcggttcatccggcagcctacttagttctggatcccaggagtccgatagctcacagtccgctaaaaaggacatgttagcagcattgaaatcccgacaggaagccttagaggagactttaaggcagcgcctggaagagcttaagaagctctgcctccgagaggccgagcttacgggaaaactgcctgtggagtatcctttagaccccggagaggagccacccattgtccgccgacggattgggactgcctttaagctggacgaacaaaaaattctccccaaaggagaagaggctgagctggagagactggagagggaattcgcaatccagtctcagatcactgaggccgctcggagactggcttctgaccccaacgtgtccaagaaactgaagaagcagagaaagacgagctacctgaatgctcttaagaaactacaggagatcgagaatgccataaacgaaaaccggatcaaaagcggcaagaaacctactcagcgcgcctccctcataatcgatgatggaaacattgcatctgaagacagttctctgtccgatgcccttgtccttgaagacgaagacagccaggtaacgagcacgatctctccactacattcccctcacaaaggtcttccaccacggccgccatctcacaaccgtcctccaccccctcagtcccttgaggggcttcggcagatgcactaccacaggaacgactacgataagagccctataaaacccaagatgtggagcgagtcgtctctagacgagccttatgaaaaagtcaaaaaacgatctagccactctcattcatccagccataagcggtttcctagtaccgggagttgtgccgaggctggcggcggctccaatagcctccagaattctcctattagaggtctgccacactggaatagtcagagctctatgcctagcacccctgatctcagagtgcgcagccctcactacgttcattcaacgaggagcgtcgacatcagtcccacacgcctccacagcctggccctccattttcggcaccggtcctcctctttagagtcccagggaaagctgctgggctctgagaatgataccggcagtcccgacttttacaccccccggacccgtagtagtaatgggtccgatcccatggacgactgtagctcttgcaccagccactcctcctccgagcattattatccagctcagatgaatgccaactacagcaccctggcagaagactcaccttccaaagccaggcagcggcaacgtcaacggcagcgcgccgccggcgctttggggagtgcttcgtccggctccatgcccaacctggccgcccgaggtggggctgggggtgcaggcggtgcgggagggggggtttatctgcactcacagagccaacctagctcacagtacaggattaaggagtacccactgtacattgaaggcggcgccacacccgtggtcgttagaagcctggaaagcgaccaggaaggccactacagcgtgaaagcacagttcaaaacgagcaattcttacaccgctggaggactcttcaaggaatcctggaggggaggtggcggcgacgaaggagacacgggacgactgacgccaagcagatctcaaattttgcggacacctagtctcggtcgggaaggagcgcacgacaaaggcgctggaagagccgcagtgtcagatgagctgcgccagtggtaccagaggtctacagcgagccataaggagcatagccgcctatcccatacaagcagcacctccagtgacagcgggagccaatacagtacatcaagccagtccactttcgtcgcccattctagggtcacccggatgccacagatgtgcaaggctacttcagcagcattgccacagagccaacggagtagcactccatcctctgagatcggcgctacgcccccgagctcacctcaccacatcctgacatggcagactggcgaggccaccgaaaattcccccatcttggacggctcggagtctccacctcatcagagcacagacgagtag

SEQ ID NO: 23999 - DNA, 3228 bp, synthetic construct
  source 1..3228: mol_type = other DNA; note = Synthetic coding sequence
atggtggtggaggtggacagcatgcccgccgccagcagcgtgaagaaacctttcgggctgagatctaaaatgggaaaatggtgctgtagatgtttcccatgttgcagggagagcggtaagagcaacgtgggcacttccggcgaccacgacgactccgctatgaagaccctccgctcaaaaatgggtaaatggtgtcgccattgtttcccgtgttgtcggggctcagggaaatccaatgtgggcgcctcaggcgaccacgatgacagcgccatgaaaacgcttcgaaataagatgggaaaatggtgctgtcattgcttcccctgctgtcggggctcctctaagtccaaggtcggagcatggggggattatgatgactctgcctttatggaaccgagatatcatgtcaggggtgaggatctcgataaactgcatagagcagcttggtggggtaaggtgcctcgtaaagacctgatcgtgatgctgcgagacactgatgtaaataagcaggataagcaaaagcgaactgcccttcatctggcttctgctaacggaaattctgaggtcgtgaaattactactggacaggagatgccagctcaatgttttggataataaaaaacggacggcgctcattaaagccgtccagtgccaggaggatgagtgcgctctaatgctcttggagcacggaacggacccaaacattcccgatgaatatggaaacactactctgcactacgcaatttataacgaggataaactcatggcgaaggctctgctgctttatggggctgacatcgaatcgaagaataagcatggactgacaccacttctgctgggcgtgcatgagcaaaaacagcaggttgtcaaatttctgatcaagaagaaggcaaatctcaacgccctggacaggtatgggcgaacagccttgatacttgctgtttgctgcggtagtgcttctatcgtgtcattactgcttgagcagaatattgacgtctccagccaggatctttccggccagacagcaagggaatatgcagtctctagccaccatcacgtgatatgccaattacttagcgactacaaggagaagcagatgttaaagatatcatctgaaaacagcaaccccgagcaagacctcaagttgacctccgaggaagaatcacagcgattcaaagggagcgagaactcacaacctgaaaaaatgtctcaggaacccgagatcaacaaagacggagacagagaggtagaggaggagatgaagaagcatgaatcaaacaatgttggcctgctggaaaacctgacaaacggagtgactgcgggcaacggcgacaatggtctgatccctcagcgtaaaagccgtacccctgaaaaccagcagtttcctgacaacgagtccgaggagtatcacagaatctgcgaactgcttagcgattataaagagaaacagatgcctaagtattcttccgagaactccaaccccgagcaggacctaaagctgacctccgaagaagaatcacaacgcctcaagggcagtgaaaatggccagccagagaaaagatcacaggagcccgagatcaacaaagatggagatcgagaactggaaaattttatggctatcgaagagatgaaaaagcaccggagcacacacgtggggtttcccgagaatcttaccaatggcgcaactgccggcaacggtgatgacggactgattcccccacgcaaatccagaactcctgaatcacagcagtttcctgacacagagaatgaggagtatcactccgacgagcagaatgacacccagaaacagttttgtgaagaacagaacactggcatcctgcacgacgagatactgatccacgaggaaaagcaaatagaagtggtggaaaaaatgaacagcgaacttagcctgagttgcaagaaggagaaagacatcctgcatgaaaacagcacgcttcgggaggaaatcgccatgttgagactggagttggatacaatgaagcaccagtcacagctccgagaaaaaaaatatcttgaggacattgaatccgtgaaaaagagaaacgataatctgttaaaggcgcttcagctcaacgagctgacaatggatgatgacaccgccgtcttggtgatcgacaatggtagcggtatgtgtaaggctggattcgccggcgatgacgccccaagagccgtgttcccttccatcgtggggaggcctcgacagcaaggtatgatgggcggcatgcatcaaaaggaaagctatgtcggaaaagaggcccagtctaagcggggcatcctcaccctgaagtaccctatggagcatggaatcatcaccaactgggacgacatggagaagatttggcatcacacattctacaatgaactgcgggtcgcgcctgaagagcaccccgtgctgctcaccgaggcgaccctaaaccccaaggctaatagagaaaaaatgacacaaattatgttcgagacgtttaatacccctgcaatgtacgtggcgatccaggccgtccttagcctgtatacgtccggccggaccaccggaatagtcatggacagcggggacggcgtgacccatactgtgcccatctatgagggcaacgcattgccccatgctactctccggttggatctggcaggtcgcgaactgcccgactacttgatgaaaattttaactgagcatggatatagattcactacaatggcagagagagaaattgtgcgcgacatcaaggagaaactctgctacgtggccctggattttgaacaagagatggcgaccgtagcttcatcttcttccctggaaaagtcctatgagctgccagacggacaggtgattaccataggtaatgaacggttcaggtgtccagaagcgctcttccagccctgtttccttggaatggagtcctgcgggattcatgaaacaacctttaacagcatcatgaagtcagacgtagacatccgcaaagacttatatacaaataccgtcctctctggaggcaccacaatgtaccccggaatggcacacaggatgcagaaggagatcgcggcgctggcccccagcatgatgaagatccggattatcgcccccccaaaaagaaagtacagtgtctgggtgggcgggagcattctggcctcactgtcaacgtttcaacagatgtggatcagcaagcaagaatatgacgagtcaggtccctctatagtgcatcgaaagtgcttgtag

SEQ ID NO: 24000 - DNA, 1752 bp, synthetic construct
  source 1..1752: mol_type = other DNA; note = Synthetic coding sequence
atgctgagcgagagcaaggagggcgaggagaaggaggaggtgaccatggacacatccgagaacagacccgagaacgatgtgcccgaacccccaatgcctatagccgatcaggtgagcaacgatgaccggcccgagggaagcgtggaagatgaggagaaaaaagaatctagcctcccaaagtcgtttaaacgtaagatctctgtcgtgagcgccaccaagggtgtgcccgccggtaactccgacacagagggcgggcagcccgggcgtaagcgccggtggggagcatcaaccgccaccactcagaagaagcccagcatatctattaccaccgagtctctcaagtcactgatcccagacatcaaacccctagcaggtcaggaagccgtggtggatcttcacgccgacgactcccgcatcagtgaggatgaaaccgagcgaaacggagacgacgggacccatgacaagggcctcaagatctgtcggacggttacccaggtcgtgccagccgaaggccaagagaatggacaacgggaggaggaggaggaagaaaaggagcctgaagcagagcctcccgtgcctcctcaggtgtccgtggaggtagccctgcctccccctgccgagcacgaagtaaagaaagtaaccctgggcgacacgctcactagacgctccatttcccagcagaaatctggggttagtatcacaatcgatgatcctgtcaggaccgcacaagtgccatctccccctcgtggcaaaatttccaacatcgtacacatttcaaacttggtgcgtcccttcaccctgggccaactgaaggaacttctgggcagaacaggaaccctagttgaggaggcattctggatagacaaaatcaaaagtcactgctttgtgacgtactccaccgttgaggaagctgtggccactcggaccgcactgcacggggtaaagtggccacagagcaatccaaaattcctctgtgcagattatgctgagcaagacgagctagattatcacaggggcctgttggtcgaccggccatcagaaacaaaaacagaagagcagggcatacccaggccactccaccctccacccccacctcctgtgcagccccctcaacacccccgggccgaacagcgcgaacaggagagagcagtcagggaacaatgggccgagagagagagagaaatggagaggcgggaacgaacaaggagtgagagagaatgggatcgtgataaggtcagagagggccccagatcacgttctcgtagccgtgaccggagaagaaaggagcgagccaagagcaaggagaaaaaatccgagaagaaggaaaaagcacaggaagaaccaccagccaagttgttggatgatctttttagaaagacaaaggctgctccatgtatctattggctgccattgaccgattcacaaatcgtgcagaaagaggctgagagggctgagcgtgccaaagaaagggagaagaggagaaaggagcaggaggaagaggagcagaaagagagggagaaggaggccgaaagagaaaggaataggcaactggagagggagaagagacgggaacactctcgcgagagggaccgggagcgcgagagagagcgggagcgcgaccggggagacagggacagggatcgggagagggatagagagagaggcagggaacgcgacagacgcgataccaagcgccactcccgctcgcgaagcaggagcactcctgtgcgcgatcggggaggacgccggtag

SEQ ID NO: 24001 - DNA, 963 bp, synthetic construct
  source 1..963: mol_type = other DNA; note = Synthetic coding sequence
atgagcaagagcgccagccccaaggagcccgagcagctgcggaagctgttcataggtggactgagtttcgagacgacagacgagtcactgcgttcccattttgagcaatggggcaccttgaccgactgcgtggtaatgagggacccaaacacaaagcgtagcaggggctttgggtttgtgacatatgcaacagtggaggaggtcgacgccgccatgaatactaccccgcataaagtggatggacgcgtggttgaacccaagcgggcggtgtctcgggaggactcacaacgcccaggggcccaccttaccgtgaaaaaaattttcgtcggcggaattaaggaagataccgaagagcatcatttacgtgactattttgagcagtacggtaaaatagaagtgattgagattatgaccgatagaggctctggtaagaaacgaggtttcgcgttcgtgacgttcgacgaccacgactctgtggataagatcgtcattcaaaagtaccataccgtaaaggggcacaactgcgaggtgcggaaagcactgcctaaacaggaaatggccagcgccagctcttctcaaagaggccgaagaggatcagggaattttgggggcggccggggtgatggattcggcggtaacgacaatttcggtcgcgggggtaacttcagcgggcggggtggctttggtgggtcctgtggtggcggaggctacggcggttcaggcgatggctacaatggcttcggtaatgacgggtctaatttcgggggaggtggctcctacaacgatttcggtaattacaacaatcagtctagtaattttggacccatgaagggaggaaatttcggaggcagatcctccggaccttacggaggaggtgggcagtattttgcaaaaccccagaaccagggcggatatggtgtcagctctagctcctcttcttatggctctggacgaaggttttag

SEQ ID NO: 24002 - DNA, 3294 bp, synthetic construct
  source 1..3294: mol_type = other DNA; note = Synthetic coding sequence
atggccgccgccgccgccgagcagcagcagttctacctgctgctgggaaatttattaagtcccgataacgtggtccggaaacaggcagaagagacctatgagaacatacccgggcagagcaaaattacgtttctgcttcaggccatacgcaatacaaccgcggcagaagaggcaaggcaaatggcagctgtacttttaagacgcctgctgtcatcggccttcgatgaggtctatcccgccctgccttctgacgtccagactgcgatcaagtcagagctactgatgataatacaaatggagacccagtcttcaatgagaaaaaaagtgtgtgatattgctgcagagttagcccgcaatctcattgatgaggacgggaacaatcagtggcctgaagggctgaaattcctcttcgattcagtctcctcccagaacgttgggcttcgggaggccgcactgcatatattttggaattttcccggcatatttggtaaccagcagcagcattacttggatgtcatcaaaagaatgcttgtgcaatgtatgcaggaccaggaacaccccagtatcaggactctctccgcgcgggcaacggcagctttcattcttgccaacgaacacaacgtcgcgctgtttaagcactttgctgaccttctcccgggtttcctccaagcagttaacgactcatgctaccaaaacgacgactctgtcctaaagtcactcgttgagatcgctgatacagttccaaagtacctccgccctcacttggaggcgacccttcaattatcactgaaactgtgcggggacacctcactcaataatatgcagcgacagctggcactggaagttattgtaactctcagtgagacagcagctgctatgttacgcaagcacacgaacatcgtcgctcaaactatcccccagatgttggccatgatggtagacctggaagaggatgaagactgggctaacgctgacgaactcgaggacgatgacttcgattctaacgcagtggcaggggaatccgcactggatcggatggcttgtggcctgggcggaaagctcgttcttcccatgatcaaggaacatattatgcagatgttgcaaaatccagactggaagtaccggcacgccggacttatggcgctaagcgccattggtgaaggatgccaccaacaaatggagggcattctaaatgagatcgtgaatttcgtgctactgttcctccaggatccccatccaagagtgcggtatgctgcatgcaatgcagtgggccagatggctactgacttcgccccaggtttccaaaagaagttccacgagaaagtgatagctgcattgcttcaaaccatggaagatcaggggaaccaacgggtacaggctcacgctgcggcagctttaataaacttcacggaagattgcccaaaatccttactgattccctacttagataatctggtgaagcacctccacagcattatggtccttaaactccaagaactgattcaaaaagggactaagctagtgcttgagcaggttgtgacgtccattgcctctgtggctgacacagctgaggagaagttcgtgccttattacgacctgtttatgcctagcctaaagcatatcgtggaaaacgcggtgcagaaagaactccggctattgcgcggcaaaaccatcgaatgcatatcacttatcggtctcgcggtcggtaaagaaaaatttatgcaagatgcctctgacgtcatgcagctgctcctcaagacccagactgattttaacgacatggaggatgacgacccccaaataagttatatgatatccgcctgggctcggatgtgcaagattctgggaaaggaattccagcagtacctgccagtcgtgatgggaccactgatgaaaactgcctccattaagccagaggtggctctgttggacacccaagacatggaaaatatgagtgatgacgacgggtgggaatttgtgaacctcggggaccagcagtccttcggcatcaaaaccgcaggcctcgaggagaaatccaccgcttgccagatgctggtctgttatgctaaggagttgaaagagggatttgtggaatacaccgagcaggtagtaaaactaatggtacccctcctcaagttttactttcacgacggcgttagggtggccgccgccgagtctatgcccctcctgttggagtgtgcccgggtgcgaggacctgagtacctcacccaaatgtggcactttatgtgcgacgcactcattaaggcaatcgggacagagcccgacagcgatgtcctgtctgaaatcatgcacagtttcgcaaaatgcatcgaagtaatgggggacgggtgtctgaacaacgaacatttcgaagaactgggcggcatattaaaggccaagctcgaggaacactttaagaaccaggagctgaggcaggtgaagcgccaagacgaggattacgatgagcaggtcgaggagagcctgcaggacgaagacgacaatgacgtgtacattctgacgaaggttagtgacatcctacactccatattctcttcttacaaagagaaagtgctcccctggtttgagcaacttttaccattgatcgttaacttgatctgccctcatcgcccctggccagaccgtcaatgggggctgtgtatcttcgacgacgtgattgaacattgcagccctgcatcctttaagtacgccgagtacttcctaagaccgatgctacagtacgtgtgtgacaattcccccgaagtgaggcaagccgctgcctatggcctgggggtgatggcacaatacgggggagataactacaggccattttgcacagaagctctacctcttctggtgagggtgatccaaagcgccgacagtaagactaaggaaaacgtaaatgcaacggagaactgtattagcgctgtaggtaaaattatgaagtttaagcccgattgcgtgaacgtcgaggaagtactgccacattggcttagctggctgcctttacacgaggacaaggaggaagccgtccagacattcaactatctctgcgatctaatcgagtcgaaccacccaattgtgctgggacccaacaacacaaatcttcccaagattttctctatcatcgcagagggagagatgcatgaggcgattaagcacgaggacccttgcgccaaaagactggctaatgtagtgaggcaggtacagacgtctggcgggctgtggacggagtgtatcgcccagctttctccagagcagcaggccgcgattcaggagctattgaacagtgcatag

SEQ ID NO: 24003 - DNA, 2715 bp, synthetic construct
  source 1..2715: mol_type = other DNA; note = Synthetic coding sequence
atgttccccgccctggagacccacctgaagcagaccatccccgacccctatgaggactttatgtacaggcacctccaatactatggctattttaaggcccagcgaggttccttgcctaactcagcgacccaccagcatgttcgaaaaaacaatccccagtgtctcctcaacggctcattgggggaaaaagatgacctaattcctgatacactacaaaaggagaagctgctgtggcccatttctctgagtagcgcggtacatcggcagatcgaggccatcaatcgcgacttccactcctgccttggctggatgcaatggcggggactatccagtctgcaaccaccgccgccacggtttaaagattccccggcctcagcgttcagggtggccggtatcacggattctcacatgctatcacttccacacctcaggagccgtcagcttctgtatgatgagttagacgaggtgaatcctcggctgcgggagccacaggagctgtttagcatcctctcaactaagcgtcccctccaggccccacgttggcctattgagtgtgaagttatcaaagagaacatccatcatattgagtgggcaccccctcagcctgagtatttctaccaaccaaaaggaaatgaaaaagtgcccgaaatcgtaggggagaaaaaagggaccgtggtttatcagctcgactcagtacccatcgaagggagctatttcacatcttctagagtggggggaaaacggggaatcgtcaaggagctggctgttacacttcaaggacctgaggacaacacactcctctttgaatcccgctttgaatctggcaatctccagaaggccgtgagggtggatacctatgaatacgaattgaccctcaggactgatttatacactaacaagcacacccagtggttctactttcgcgttcagaatacgcggaaggatgcgacgtacaggttcacaattgttaatcttttaaagcccaagagcctgtacaccgtaggcatgaaacctctcctttattctcagcttgacgccaacacaaggaacattggctggcgtagggaaggtaacgagatcaaatactacaagaataacaccgacgacggccagcagccattttactgcctcacctggacaatccagtttccatatgatcaggacacttgctttttcgcacacttttatccctatacttatactgatctacagtgctacctgcttagcgtggccaacaatcccatacagtctcagttttgcaagctgcagacgctgtgccggagcctggccgggaacaccgtttatctgctgaccataacgaacccatcacagacaccacaggaggccgccgcaaagaaggccgtggtgctttccgctcgagtgcaccctggggagagtaacggaagttgggtcatgaagggcttcctggactttatcctgagcaatagtcccgatgcacagctgttaagagacatatttgtctttaaggtcctgccaatgctaaatcccgatggcgtcattgtgggaaactatcggtgtagcctggctggcagggacctgaacagacactataaaacgattttgaaggaatcattcccttgcatctggtacactaggaatatgatcaagcgcttgttggaggaaagggaagtgctcctctattgtgatttccacgggcattccagaaagaataatattttcttgtatggttgcaacaacaacaatagaaagtactggcttcatgagagagtgtttcccctcatgctgtgcaagaacgctcctgacaagttttccttccactcttgcaactttaaagtacagaaatgcaaggagggtactgggagagtcgtcatgtggcgcatggggattcttaactcatacaccatggaatctactttcggcggctctacattagggaataaacgggacacgcattttaccattgaggacctgaaatcactgggttaccatgtgtgcgacacactacttgatttctgtgacccggaccagatgaaatttacgcaatgtctggctgagctgaaggagcttctgcggcaggaaatccataaaaagtttcatgaattgggccaagacgttgatctggagggtagctggagtgacatttctctgtcggacatcgagagcagaaattcgacctctggttccgactctagcttatccgacggactcccagtgcatttggcaaatatagcagacgagctgacacagaaaaagaagatgttcaaaaaaaagaagaagaagagtctgcagacacggaagcagcgcaatgagcagtatcaaaagaagaaccttatgcaaaaattgaaattgaccgaagatacctccgagaaagccggattcgcctccaccctgcagaaacagcccacgtttttcaaaaactcagaaaattctagcttcctcccaatgaaaaatgaaaatcctcgactgaacgagactaatctgaaccgacgcgacaaagatacaccccttgaccccagcatggccacgctgattctgcctaaaaataaaggtaggatgcagaataaaaaacccggtttcaccgtgtcctgttctcccaaacggaccatcaacagttcacaggagcccgcaccggggatgaagcccaattggccccgctccagatatcctgcgaccaagcggggatgcgccgcaatggcagcttacccctctctccacatctacacgtacccttag

SEQ ID NO: 24004 - DNA, 789 bp, synthetic construct
  source 1..789: mol_type = other DNA; note = Synthetic coding sequence
atggccctgagcctgggctggaaggcccaccggaaccactgcggcctgctgcttcaggcgttgcgctcgagcggcctccttttattcccttgcggccaatgcccttggcgtggggctggatctttcttggatcccgagatcaaagcctttttggaggagaacacagaggtgacatcaagcggctccctcacccccgagattcagctgagattgctaactccaagatgtaagttttggtgggagagagctgacctgtggccccactccgatccttattgggccatctattggccaggagggcaggctctctctcgctaccttctggacaatcctgatgtcgtgcgcggaaagtctgtcctggatctgggctcaggctgtggtgcaacagccattgctgctaagatgtccggggctagtcgtattttagctaatgacattgatccaattgctgggatggcaattacactcaattgcgaattgaaccggttgaacccattcccaattctgatccaaaacattcttaacctagaacaggataaatgggacttggtggttctgggtgacatgttttatgacgaggacctcgcagatagcctgcaccaatggctgaaaaaatgtttctggacgtacagaacaagggttctgattggggacccagggcgccctcagttttcagggcatagtattcagcatcatttgcacaaggttgtagagtattcactactggagtctacccgacaagaaaactcagggctgacaacgtctactgtatggggtttccagccatag

SEQ ID NO: 24005 - DNA, 2619 bp, synthetic construct
  source 1..2619: mol_type = other DNA; note = Synthetic coding sequence
atgaactaccccggccggggcagcccccggagccccgagcacaacggaagaggtggggggggaggagcctgggaactgggatcagatgctcggcccgctttcggtggaggcgtctgttgttttgaacacctacctgggggcgaccctgacgacggagacgttccactggctttgctgaggggagaaccgggcctgcatcttgcccctggcactgacgatcacaatcaccacctggctttagacccatgcctatctgacgaaaactatgatttttcttccgctgagtctggaagctctctgaggtactattcagagggggaatctgggggcggaggctcatcacttagtcttcatcctccgcagcagcctcctttggtccctaccaatagtgggggaggcggcgcaactggggggtcccctggcgaaagaaagaggaccagattgggaggcccagccgcccggcacaggtatgaagttgtcactgaacttggcccggaagaagtacgctggttctataaggaggacaaaaaaacctggaagcccttcatcggatatgattccctgcgcatcgagttagcattccgcacattgttgcagaccacaggcgcaaggcctcagggaggcgatcgagatggggaccacgtatgcagtcctacaggcccggcgagttctagtggagaggatgatgatgaggacagggcttgcgggttctgtcagtccacgactggacatgagcccgaaatggtggagctggtgaatattgaaccagtctgtgtaagagggggcctttatgaagtcgacgtgactcagggtgagtgttatcccgtatattggaaccaggctgacaagattccagtcatgcgaggtcagtggtttatcgacggtacctggcagccgctcgaggaggaggagagcaacctcattgaacaggaacatttaaactgttttcgggggcaacagatgcaggaaaactttgacatcgaagtctccaaaagcatagacggcaaagacgccgtacactccttcaaactgagcagaaatcacgtcgattggcactccgtggatgaagtctatctgtactcggacgcaaccacgtctaaaattgccaggactgtgactcagaagttggggttttccaaagcatcaagttccggaacacgcctacataggggttacgttgaggaggctaccttggaagacaaaccctcccagactacgcacattgtcttcgtagttcacggcattggccagaagatggatcaggggcggatcataaagaacacagcaatgatgcgagaagccgcccgcaagatcgaggaaaggcacttctcaaaccatgccacccatgtggagtttctccctgtcgagtggcgtagcaaactcacacttgacggcgataccgtcgattctataacaccagataaagtgaggggcctgcgtgacatgctgaactcctcagctatggatattatgtactacacctcccctctgtatcgggacgagttggtgaaagggctgcaacaggagctcaacaggctgtactctctcttttgctctaggaatcccgattttgaggaaaagggtggcaaagtgtcaatagtgtcccattccttgggttgcgtgatcacgtatgacatcatgaccggttggaatcctgtcaggctgtacgaacagttactgcagaaggaggaggagctgcccgacgagagatggatgagttacgaagagagacatctgctggatgaattgtatataaccaagcgtcggctgaaggagatagaggaacgccttcacgggctgaaggctagcagtatgactcagactccagccttgaaattcaaggtcgaaaatttcttctgcatgggaagcccactggcagttttcctggccctgcggggcatcagaccaggcaataccggatcacaggatcatatcctgcctagagaaatttgtaacagattgttgaacatcttccaccctactgatcccgttgcctacagattagaacccttgattcttaagcactacagtaacatcagtccggtccagattcattggtacaataccagcaaccccctgccctacgaacacatgaaacctagctttctgaatcctgcgaaagagcctacctccgtgtcagaaaacgaaggcatttccacgatcccttctccagtgaccagcccggtactgtctagaaggcattacggcgaatccatcactaacattgggaaagccagcattctgggcgccgccagcataggaaaaggtttgggagggatgctgttctcaaggttcgggagatcatctacaacacagtcatctgaaacgagtaaagattctatggaggacgagaagaaaccagtagcttcgccctcagccactacggtcggtacacaaaccttaccccactccagttccggcttccttgacagtgctcttgaattggatcaccggatcgattttgaacttcgcgagggcttggtggagagcaggtactggtctgccgtaactagtcatactgcttactggtccagccttgacgtggccctgttcctgcttacctttatgtataagcacgagcacgacgacgatgccaagccgaacctggaccccatctag

SEQ ID NO: 24006 - DNA, 1461 bp, synthetic construct
  source 1..1461: mol_type = other DNA; note = Synthetic coding sequence
atggtgagccacaccttccacatgcggaccgaggagagcgacgcctcgcaggaaggcgatgaccttcctaaaagctcagcaaatacaagtcatcccaagcaggacgatagtcctaagtcaagtgaggagactatccagcctaaagaaggcgacatccctaaagctcctgaggaaaccatccagtccaagaaggaggatctcccgaagtccagcgagaaggcaattcagcccaaggagtccaacattcccaaatctagcgccaagcccatccagcccaaactcgggaacatcccaaaggcttccgtcaagccttctcaacccaaagaaggggacattccaaaggctcctgaggagactatccagagtaagaaggaagatctgcccaaatcttccgaggaagcaatccaacctaaggaaggggacattcccaagagttcagccaagcccatccagcccaagttgggaaatattgctaagacgtctgtgaagcctagccagccaaaggagagtgatatacccaagtctccagaggagacaatccagcctaaggaaggcgatatcccaaagtctagcgctaaaccgatacagccgaaactcggaaatatacccaaggcgtccgtgaagccctcacagcccaaggagggcgatatcagcaagtcccctgaggaagcaatccagcctaaggagggggaccttcctaagagtttggaagaggccatccagccgaaggagggggatatccccaagagccccgaagaggcaatccaaccaaaggagggagatattcccaagtcgctggaggaggcgattcagcctaaggaaggggacattccaaagtctcctgaagagacaatccagcctaaaaagggcgatatccctaaatccccagaggaggccatccagcctaaagagggtgatatcccgaagagtccaaaacaggctatccagccgaaagagggggatatccccaaatctctggaggaggctatccctcctaaggaaattgacatccctaaatcgccggaagagaccatccagcccaaggaagacgacagcccaaaaagcctcgaagaggcgacaccatcaaaagagggcgacatcctgaagccagaggaggagactatggagtttcccgagggcgataaggtaaaggtcattctgagcaaagaggacttcgaggcaagccttaaagaggctggagagaggttggtcgccgtggatttcagcgctacttggtgcgggccctgtaggaccatcaggcccttctttcacgctctgtccgtgaaacatgaggatgttgtcttcctggaggttgacgctgataactgcgaggaagtcgtgagggagtgtgccatcatgtgtgtgcccacattccagttttacaagaaagaggaaaaggtggacgagttatgtggggccctgaaagagaaactggaggccgttatcgcagaactgaagtag

SEQ ID NO: 24007 - DNA, 1005 bp, synthetic construct
  source 1..1005: mol_type = other DNA; note = Synthetic coding sequence
atggccgccagcggcagcggcatggcccagaagacctgggagctggccaacaacatgcaggaagcgcaatccattgatgagatttacaagtatgacaagaagcagcagcaggagatcctagccgctaagccgtggacaaaagaccatcactactttaaatattgcaaaatctcagcccttgcccttcttaaaatggtaatgcacgccagatctggaggaaatctcgaggtcatgggcctgatgttggggaaagtcgacggagagaccatgattatcatggattcctttgcgctgcctgtggaggggactgagacacgcgtcaacgcccaggctgcagcttatgaatatatggcggcctacatagagaacgctaaacaggtgggtcgactggaaaacgctattggctggtatcattcccatcccggatatggttgctggctgagtggaatcgatgtgagtacacagatgctcaatcagcagttccaggagccattcgtggccgttgttatagatcctaccaggacaatcagcgcaggaaaagtcaatctgggtgcgttccgcacctaccccaaaggttacaaacccccggatgagggtccgtctgaatatcaaacgatccccctcaacaagattgaagactttggtgttcactgtaaacagtattacgccctggaggtgagttatttcaaatcttctctggacagaaagctcctcgagctcctatggaataagtactgggtcaacacactgtccagttcttcgctcttgaccaacgctgattacaccacaggtcaggtgttcgacctatcagagaaactcgaacagtcggaagcccagctggggcgcgggagttttatgctgggcctggagacgcatgaccggaagtctgaagataaactggccaaggctacaagggactcgtgcaagaccacaattgaggctatccatggcttgatgagccaggtaatcaaagataaactgttcaatcagatcaacatcagttag

SEQ ID NO: 24008 - DNA, 1350 bp, synthetic construct
  source 1..1350: mol_type = other DNA; note = Synthetic coding sequence
atggtgatggagaagcccagccccctgctggtgggccgggagttcgtgcggcaatattatacactcttaaacaaggctcccgaatacctgcaccggttctatggtcggaattcttcgtacgtccatggaggcgtcgatgcctcaggcaagccccaggaggccgtctatgggcaaaacgatatccatcacaaggtactgtcccttaacttctcagagtgccatacgaagattcgccatgtggacgcgcatgctacactgtcggatggtgtggtggtgcaggtgatgggattgttaagtaattcaggccagcccgaacgcaaattcatgcagacatttgtgcttgcgccagaaggctcagtgcctaacaagttctacgtgcacaacgacatgtttaggtacgaggatgaggtattcggcgactcagaacctgagctcgacgaggagtctgaggacgaagtggaagaggagcaggaagaaagacaaccgtcccccgagccggtgcaagagaacgccaacagcggatactatgaggctcaccccgtgacaaatggaattgaggagccactcgaggaatcatctcatgagcccgaacctgagcctgagtcggaaacgaaaaccgaagagctgaagccacaggtggaagagaagaatttggaagaactggaggagaagtctaccacccctcccccagccgaacccgtgtcccttccgcaggagcccccgaagccccgtgtcgaggccaagcctgaggtacagagccagccaccaagggtgagggaacaacgcccccgcgaacgccccgggtttcctccacgaggcccccggcccgggcgtggagatatggagcaaaacgattcggataataggagaatcatacgctaccctgattcccatcagctctttgtcggaaacttacctcatgatattgacgagaacgaacttaaagaattttttatgagtttcgggaatgtcgtcgaattacgaatcaacaccaaaggagtcggcggaaagttaccgaattttggcttcgtagttttcgatgactcagagcccgtgcaacgcatcctcatcgccaaaccgatcatgtttcgcggcgaggtccgactgaacgtcgaggagaaaaagactagagcagccagggaacgcgagacaaggggtggtggcgacgatcggcgggacatccggcgcaacgaccgcggacccgggggcccccggggtatcgtcggcggtggaatgatgcgagacagagatggaagggggcctcctccccgcggaggaatggctcagaagcttggatcaggccgcggaacgggacaaatggaaggacggttcactggccagcggcgttag

SEQ ID NO: 24009 - DNA, 333 bp, synthetic construct
  source 1..333: mol_type = other DNA; note = Synthetic coding sequence
atggaggagatccccgcccaggaggccgccggcagcccccgggtgcagttccagagcctcgagactcagagcgagtgcttgagtccagagccgcagtttgtgcaggataccgacatggagcagggactgactggagggattcttttgagactccccactaccaggattcactctgttaatagctgcccggcattgtcacacactcaggcctctgcattttcaggagagaccctcgcggtgttaaccgctggcatttccaagcgctggcctaagtataggctcccgatcgatatcgccagaccatgttcagagacaccgttcccccgtctgtag

SEQ ID NO: 24010 - DNA, 822 bp, synthetic construct
  source 1..822: mol_type = other DNA; note = Synthetic coding sequence
atgggccagaaggtgaccggcggcatcaagaccgtggacatgcgggatcccacataccggcccttgaagcaggaactgcagggcctggactactgtaagcctacgagactggacctgcttctcgacatgcccccggtgagctatgacgttcagctgttgcactcgtggaataataacgaccggtctcttaatgtgttcgtgaaagaggatgataagttaattttccataggcaccctgtagcacaaagcacagacgctatacgtgggaaagtaggctatacacgtggactgcacgtgtggcagatcacttgggcaatgaggcagagaggtacgcatgcagtcgttggagtcgcgactgctgacgcacctctgcactcagtggggtacactactctggtgggtaataatcatgaatcctggggatgggatttgggtagaaaccgcctctatcacgacggcaagaaccagccaagtaaaacctatccagcgtttttagaacccgacgaaacattcatcgtgcccgattcctttctagtggccttagacatggacgacggaactctgagctttatcgttgatggccagtacatgggggtagcctttagggggctgaaagggaaaaagctgtatcccgtggttagcgccgtgtggggccactgcgaaattagaatgcggtacctgaatgggctggatcctgagcctctgccactgatggatctctgtcggagatctgtgcggttggccctcggacgggaacgcctgggcgaaattcacactctcccacttcctgctagtctgaaggcttacttgctctaccaatag

SEQ ID NO: 24011 - DNA, 2916 bp, synthetic construct
  source 1..2916: mol_type = other DNA; note = Synthetic coding sequence
ctgagccggcgggtgccctgcgtgcggcggggctgccggcccccccttccccctctccccggctctcaaagtcgggcttggagccgcgatagggaggccccgctggaccccggccgacccgcgcagagcggacgcagaccaaccagccgatctgtgtcgcatgcttgcagttggaatggcggaagcctggacccactagaggggaccccagctctcttgcgctctgccgagcgtctgatgaggaaagttaaaaaattgcggctggacaaagagaatacggggtcttggcgctcatttagcctgaatagcgagggcgccgagcggatggccacaactggtacccctactgcggaccgcggcgacgctgcagcaacagatgaccccgccgcaagattccaagtccagaagcactcctgggacggtcttaggtctatcatccatgggtcacggaaatattccggtttgattgtgaataaggcccctcatgatttccagttcgttcagaagacggacgagagtggacctcactcgcaccgcctctattatctgggtatgccctacggatccagagagaactccctgctttacagtgagatccctaagaaggtgcggaaggaggccctgctcctgctctcctggaaacagatgctggaccattttcaggctactccccatcatggggtgtatagccgcgaggaagaactattacgagagcggaaaaggctaggggtattcggaattacaagctatgatttccacagtgaaagcggcttatttctcttccaggcctcaaacagtcttttccattgccgcgatggtggtaagaatggattcatggtgagcccaatgaaaccccttgagatcaaaacgcagtgctctggacctcgcatggatcctaagatctgcccagctgatcctgcctttttcagctttatcaacaattcggacttgtgggtggctaatatcgagaccggcgaagagcggaggctgacattctgtcaccaaggcttaagcaatgttctggatgaccccaagagcgctggcgtggcaacatttgtgattcaggaggaatttgacaggttcaccggctattggtggtgtccaacagcctcgtgggaaggcagcgagggactgaaaacattgagaatcctgtacgaggaagtggatgagagcgaggtggaggtgattcacgtcccttccccagctctcgaggagcggaaaaccgactcttatagatacccccggaccggttccaaaaatccaaagattgccctcaaacttgctgagttccagacagactcccagggcaagattgtctcaacccaggagaaagaactggttcaacctttcagctccctgttcccaaaggtggagtacattgccagggcaggatggacaagggacggcaagtacgcctgggcgatgttcctggatagaccccagcagtggctccagttggtgctgttacccccggcgctctttattccctccaccgaaaacgaggagcagaggcttgctagtgctcgcgccgtgcccaggaatgttcaaccctacgtagtttatgaggaggtgaccaacgtttggataaatgttcacgatattttttatcccttcccccaaagcgagggtgaggatgaactgtgttttctgagggctaacgaatgtaagactggcttttgtcatttgtataaggtgaccgccgtgctaaagtcacagggctacgactggtcagagccgtttagtccgggagaggatgagttcaagtgcccgataaaagaggaaatcgccctgaccagcggcgagtgggaggtcctggccaggcacgggtcaaaaatttgggtgaacgaggagaccaagttagtctactttcagggcaccaaagacactcctctggagcaccacctgtacgtcgtaagttacgaagccgctggggagattgtaaggctcactactccgggtttctcccatagctgttccatgtctcaaaattttgatatgtttgtatctcactattcttccgtgtctacacctccttgcgttcacgtctacaaactatccggacccgatgacgaccccctacataagcagcctcgcttctgggcaagcatgatggaggctgctagctgcccaccggattatgtgcctccagaaatattccactttcacacgcggtcagatgtaaggctctatggcatgatttataagcctcatgccctacagccgggcaagaaacatcctacagtcctgttcgtctacggaggcccccaggtgcagttggtgaataacagctttaaaggcattaagtacctgagactgaacacattagccagtctcggatacgctgtggtagtgatcgacggccgtgggtcctgccagcgcggactcagattcgagggcgcccttaagaaccagatgggccaggtggagattgaagatcaggttgaagggctgcagttcgtggcagaaaagtatggttttatcgacttgagcagggtggctatccacggttggtcatacggaggtttcctcagtctgatgggtctcatccacaagcctcaggttttcaaagttgcgatcgccggcgctcctgttaccgtgtggatggcctatgacacaggctacacagaacgctatatggatgtgccagagaataaccagcacgggtacgaggccggatccgtcgctctccacgtcgagaaactgcccaacgaaccaaatcggctgttaatccttcacggatttctagacgaaaatgtccacttctttcatacaaactttttggtatcgcagctgattagagcgggcaagccctatcaactgcagatttacccaaacgagcggcattctatccgatgtccagaaagtggcgagcactacgaggttaccttactccactttcttcaagagtatctctag

SEQ ID NO: 24012 - DNA, 2592 bp, synthetic construct
  source 1..2592: mol_type = other DNA; note = Synthetic coding sequence
atgggcaaccgggagatggaggagctgatccccctggtgaaccggttacaggatgccttctccgcactcgggcagagttgcctcttggagttgcctcaaatagcagttgtgggcggccagagtgccgggaagagctcagttctagaaaactttgtaggtagggattttttgccccggggttcgggaattgtgacacggaggcctcttgtcctgcaactggtgacttccaaggcggagtacgcagaattcttacattgcaaaggtaaaaaattcacggactttgatgaggtgagactggagatcgaggccgagacagacagagtaactggcatgaacaaaggtatctccagcatccctattaacctacgggtgtactcgccccacgttctgaacctgacactgattgacctgccagggatcactaaggtacccgttggagaccagccccccgatattgagtatcagattcgcgagatgatcatgcagttcattacacgggaaaattgccttatcctggcagtgactcctgctaacaccgacttggctaacagcgatgcactaaagctcgctaaagaagtggatcctcaaggcctacgaacaattggggtcatcactaaactcgatctgatggacgagggtacagatgccagagacgtgctggagaataaattattgcctctaaggagaggttatgtgggggtggtaaataggtcacagaaggacatcgatgggaaaaaggacataaaggccgccatgcttgcagaacggaaattttttcttagtcaccctgcttaccgacacattgccgataggatggggaccccccacctgcaaaaggtgctgaatcaacagctgacaaaccatattcgagacactttgccaaactttcgtaacaaactgcagggccaacttctatcgatagagcatgaggtcgaagcttacaagaatttcaaacccgaggacccaacacgaaagaccaaggcccttctccagatggtgcagcaattcgccgtcgactttgagaagcgaattgaggggagcggggaccaggtcgatactctcgagcttagtggcggagctaaaattaacagaatcttccacgagcgctttccattcgaaatcgtgaagatggagtttaacgaaaaggagctccggcgggagataagctatgccattaaaaacatccacggcataagaaccgggcttttcactcccgacatggccttcgaagcaatcgtcaaaaagcagatcgtgaagctcaaagggccatctctgaagtctgtcgatctggtgatccaagaactgatcaatactgtcaaaaagtgcactaagaaactcgccaatttcccgcgcctgtgtgaagagactgagcgaattgtcgccaatcacatcagagagagagaaggaaagacgaaggatcaggtcttactgctaatcgacatccaggtcagttacataaacacaaatcatgaggactttattggttttgcaaacgctcagcagcgcagctcacaggttcacaagaaaaccacggtggggaaccaggttattcgtaaagggtggctgaccatttctaatatcggcattatgaagggcggtagcaaaggatattggttcgtccttactgccgagagcctcagctggtataaggacgacgaagaaaaggaaaagaaatacatgctgcctctggataatctcaaagtccgcgacgtcgaaaaatcttttatgagtagtaaacacatctttgcgctgttcaacacagaacaaagaaatgtgtacaaagattacagattcctagaattagcgtgtgactcccaagaggatgtggattcctggaaagctagtttgctccgagccggcgtctacccagacaagtctgtgggaaataacaaggccgagaatgatgaaaacggacaggccgagaacttcagcatggacccccagttggaaaggcaggtggaaaccatccggaaccttgtggactcttacatgagtataatcaacaagtgcatacgggatttaatccccaagaccatcatgcacttaatgattaacaacgtgaaggattttatcaactctgaattattagctcagctgtatagcagtgaagatcagaacaccttgatggaggagtccgcagaacaagcacagaggagggacgagatgctcagaatgtatcaggccctgaaagaggccctcggcataatcggcgacatatccaccgcaaccgtgagcactccggctccgcctccagtcgacgatagttggatccagcactcccggcgaagtccccctccatcccccacaacccagaggcgcccaactttgagtgcccctcttgccagacctacctcaggccgcggaccggcccccgccattccttctcctggccctcatagtggggccccaccagttccgttccggcccgggcccctgccccctttcccctcaagctctgacagctttggcgctcctccccaggttccctctcggccgactcgggccccaccatcagtgcctagtcgccgccctcccccgtcaccgactcgcccaaccatcatcaggcccctcgaatcaagcctgctggattag

SEQ ID NO: 24013 - DNA, 1263 bp, synthetic construct
  source 1..1263: mol_type = other DNA; note = Synthetic coding sequence
atgctgaaggccgtgatcctgatcggcggcccccagaagggcaccaggttccgtcccctgtccttcgaagtgcccaaaccgctgttcccagtggccggagttcccatgattcagcatcacatcgaagcttgcgcgcaagtcccaggaatgcaagaaattctgttgatagggttctatcagccagacgaacccttaacccagtttcttgaagccgcccagcaagaatttaatctgccggtccgctacctacaagaattcgccccactaggaaccgggggtggactgtatcactttcgtgaccagattctggccggaagtcccgaggccttctttgttcttaatgccgatgtgtgtagcgattttcccttgagcgccatgctggaggctcacagacggcagaggcacccctttctgctgctcggcactactgctaaccgaacccagtcgctcaattatggctgcatcgtggagaacccccaaactcacgaggtgttgcactacgtggaaaaaccatctacattcatttccgacatcatcaactgtgggatctacctgttcagtcccgaggcattaaaacccttgagagacgtgttccaacgtaatcagcaggacgggcagttggaggatagtcctgggctgtggccgggggctgggaccattagactcgaacaagacgtgttctctgctctcgccgggcaggggcagatatacgtgcatctaacagacggtatttggtcccagattaagtccgccgggagcgcactctacgcctcccgtttatatttgagcagatatcaggacacccacccagaacgcttagctaagcacacccctggcgggccttggattagaggcaacgtgtatatccaccctaccgccaaagtcgccccgtcggccgtattgggccctaacgtgtccattgggaagggcgtgaccgttggcgagggcgtgcggttgagagagtcaatcgttttgcacggtgctacactgcaggagcacacctgtgtgttgcactcgatcgtgggatggggctctaccgtcggccggtgggcacgtgtggaggggacaccatctgaccctaatcccaatgaccccagggctaggatggattctgagagcttattcaaggatggcaagcttcttcctgctataacaatcctgggttgtcgcgtccggatccccgcggaggtgctgattctgaattctatcgttctacctcacaaggagctgagcaggagctttaccaaccaaattatcctgtag

SEQ ID NO: 24014 - DNA, 2481 bp, synthetic construct
  source 1..2481: mol_type = other DNA; note = Synthetic coding sequence
atggtggcccccgtgctggagaccagccacgtgttctgctgccccaatcgcgtgcgaggtgttctcaactggagcagcggcccccgaggactgttggccttcgggacctcctgcagtgttgtcctctatgatcctctgaaacgcgtggtggtcacaaatctgaacggccataccgcccgagtgaattgcattcagtggatctgcaagcaggatggatctcctagtaccgagctagtgtccgggggatcggataaccaggtgatccactgggagatcgaagataatcaattgctaaaggcggttcatctgcagggccacgaaggccctgtatacgctgtccatgccgtataccagagacgaacctcagacccagcactgtgcactctgatcgttagcgctgccgcagattcagccgtccggttatggagtaaaaaggggcctgaggtgatgtgtctacagaccctcaactttgggaatggttttgccctggctctgtgtctgagttttctccctaacacagacgtaccaatactggcctgcggcaacgacgactgtcgaatccatatcttcgcacagcaaaacgatcagttccaaaaggtcttatcactgtgtggccacgaggactggatccgcggtgtggagtgggcagcgttcggtcgggacctgtttctggcttcctgctcccaggactgcctgatcagaatttggaagctgtacattaaaagcacttctttggaaacacaggacgatgataatattcggctgaaagagaacactttcactatagaaaacgagtcagtcaaaatcgcattcgccgtcactctggaaaccgtgcttgctggacatgaaaattgggttaatgctgtccactggcagccagtcttctacaaggatggagttttacagcagccggtgagactactctctgcctctatggataagaccatgatcctatgggcccccgacgaggaatcaggtgtgtggctcgagcaagtgcgcgtgggcgaagtcggaggcaataccctgggcttttacgattgtcagttcaacgaggacggctctatgatcattgcccacgcatttcatggggcactccatttatggaagcagaacacagtgaatccaagagagtggacccctgagattgtgatctccggccactttgatggcgttcaggatctcgtttgggaccccgagggggagttcatcattactgttggaacagatcagacgactcggctgtttgctccatggaagagaaaagatcagtcccaggttacctggcatgagatagctagacctcagattcacggttacgacttgaagtgtctcgcgatgataaaccgattccagttcgtttccggcgccgatgagaaagtcttgcgcgtgttttcagccccacggaattttgttgagaacttttgtgccatcacagggcagtctctgaatcatgttctatgtaaccaggattccgacctccccgaaggagccacagttccggcactggggttgtcgaacaaagccgtgtttcagggagatattgcgtcgcagcccagtgacgaggaggaattgctgacaagtactggatttgagtaccagcaggtcgcatttcagccttccatcttgaccgaacctccaacggaagaccatctactacagaacaccttgtggccagaagtgcagaagctgtacggccacgggtatgagatcttctgcgtgacctgcaattcttcaaaaactctcctagctagtgcctgcaaggctgccaagaaggagcacgctgccatcattctatggaataccactagctggaagcaggtccagaatttggtgttccacagtctgaccgtgacccagatggcattttctcctaacgagaaatttttacttgccgtgagtagagataggacatggagcctctggaaaaaacaggacaccatctccccagagttcgagcccgtgttcagtctgtttgcctttacaaataaaatcactagcgtgcattccagaatcatctggtcctgtgactggagcccggacagcaaatatttctttactggttcaagagacaaaaaggtggtagtgtggggagaatgcgattccacggacgactgtattgagcataatatcggaccctgtagcagcgtcttggatgtcggcggcgctgtcacggcggtgagcgtctgtcctgtgctccacccgagccagcggtacgtggtcgcggtgggacttgagtgcggcaaaatctgtctctacacctggaaaaagaccgaccaggtgcctgagatcaacgactggactcactgcgttgagacaagtcagtctcagagccacactctggctatccggaaactgtgctggaagaactgtagtggcaaaacagaacagaaagaggctgaaggtgccgagtggcttcatttcgcttcctgcggcgaggaccacacagttaagattcatagggtgaacaaatgcgctctctag

SEQ ID NO: 24015 - DNA, 1152 bp, synthetic construct
  source 1..1152: mol_type = other DNA; note = Synthetic coding sequence
atggaccggacctgcgaggagcggcccgccgaggacggcagcgacgaagaagacccagactccatggaagcccctacccgcatccgggatactccagaagacatcgtgttggaggctcccgcaagcggactcgccttccacccagccagagacttgctcgcagcgggggatgtcgacggagacgtgttcgttttctcgtactcctgccaggaaggtgaaactaaagagctgtggtccagcggccaccatctaaaggcttgcagggccgtagctttttcagaggatggacagaagctgattactgtgtcaaaagataaggccatccatgtgctggacgtggagcagggtcagctagagagacgagtgagtaaggctcacggggctcctatcaattctctcctgttggtcgacgagaatgtactcgccaccggggatgatactggaggaatctgtctgtgggaccagcgaaaagaaggacctctgatggacatgcgccagcacgaggaatatattgctgacatggccctggatcccgctaaaaaattgctcctgaccgcctcgggagacggttgtttggggattttcaatatcaaacgcagacggtttgagcttctgagcgagcctcagagcggagatctgactagcgtgacgttaatgaaatggggaaagaaggtcgcttgcggcagcagcgaagggactatctatctgtttaactggaatggctttggggccacatccgaccgtttcgccctcagggcagagtccattgactgtatggttccagttaccgagagtctcctttgcacaggctcaactgacggagtgattcgcgcagtgaatatcctccctaatagagtggtggggtccgtgggccagcacaccggtgagccagtcgaggagctggctctgtctcattgcgggaggttcctcgcaagctccggccacgatcaacgcctgaaattttgggacatggcccagcttagagccgtggtcgtggatgactacagacgcagaaagaaaaaaggcggccctcttcgagcactgtcctcaaagacttggtctacagacgatttttttgccggcctgagagaggagggagaggactctatggctcaggaggagaaggaagagacgggtgacgattccgattag

SEQ ID NO: 24016 - DNA, 999 bp, synthetic construct
  source 1..999: mol_type = other DNA; note = Synthetic coding sequence
atgagcgaggccggcgaggagcagcccatggagaccaccggcgccaccgaaaatggacacgaggctgtccccgaaggggagagtcccgccggcgcgggtacaggggcagccgccggagcagggggagcgaccgccgcccctccttcagggaatcagaatggtgccgagggtgatcagatcaatgcaagtaagaatgaggaggacgcgggtaagatgtttgtcggtggcctctcatgggacacatccaaaaaagatttgaaggactacttcactaagttcggggaggtcgtcgactgtaccattaaaatggaccctaatactggacgtagtcgcggtttcggctttattctctttaaagatgcggcttctgtagaaaaagtcctagaccagaaggagcatcgactggacggtcgcgtgattgaccctaagaaagccatggctatgaaaaaggacccggttaaaaagatcttcgtgggagggttaaacccggaggccactgaggaaaagatccgcgaatattttggtgaattcggtgagatagaggccattgagctgcccatggatcctaagctgaataaacgcagggggtttgtcttcatcacctttaaagaggaagagccggtgaagaaagtgttagagaaaaagtttcacacagtttccggcagtaaatgcgaaatcaaggtggcccagcccaaggaagtgtaccagcagcagcagtatgggagtggcggcagaggcaatagaaatcgaggcaatagaggctctggagggggagggggtgggggtgggcagtcccagagctggaaccagggctacgggaactactggaatcagggctacggctaccagcagggatacggtccagggtatggggggtacgactactcaccctacggctattacggttatggacctgggtatgactattctcagggtagtacaaattatgggaagagccagaggaggggcggtcaccaaaacaattataaaccctattag

SEQ ID NO: 24017 - DNA, 2745 bp, synthetic construct
  source 1..2745: mol_type = other DNA; note = Synthetic coding sequence
atgggcgacagccgggacctgtgcccccacctggacagcatcggcgaggtgacaaaagaggatctgctgttaaagtccaaaggtacttgccagagttgtggggtcacggggccaaatctgtgggcatgtttgcaagtggcgtgcccctacgtaggatgcggcgaaagtttcgccgaccattctaccattcatgcgcaagccaagaagcacaatctcaccgtgaatctgaccactttccgactctggtgttatgcatgcgaaaaagaggtgtttttggaacagaggctggcggcacccttactggggtcttcgagcaaattttcagagcaggatagcccccctccgtcacaccctttgaaagccgtgcccatcgccgtcgcagatgaaggagagtccgagtctgaagacgacgatctaaaacccagaggcctgaccggaatgaagaacctggggaactcatgctacatgaacgccgcgctgcaggcactgtccaactgtccccctttaactcagtttttccttgaatgcgggggattggtgcggacagacaagaaacctgctttgtgtaagagttatcaaaagctcgtgtccgaggtgtggcataaaaaacggccttcctacgttgtgccgacaagcctctcacacggcatcaaactcgtcaatcctatgtttaggggatatgcacaacaggacacacaggagtttcttcggtgcctcatggaccagctccatgaggaactaaaagagcctgtcgtcgcaaccgtcgcgttgaccgaggccagggatagcgactcttctgatacagacgaaaaacgcgaaggcgaccggagtccttctgaagacgaattcttatcttgtgatagctcctccgacagaggtgaaggggatggacagggcagaggcggaggtagttctcaggccgagacggagttactgattccagacgaggccggcagagcgatctccgagaaagagcggatgaaggaccgcaagttttcctggggacagcagcggaccaactcggaacaggtggatgaagatgctgatgtcgacaccgcgatggccgctttggatgaccagccagccgaagcccaaccgcctagtccccgatccagcagcccgtgccggacacctgagcctgacaatgatgcacatctgaggtcatccagccggccttgttcgcctgtccatcaccacgagggacatgccaaactgtcttcatctccgcctcgtgccagcccagtaaggatggcccctagctacgtgttaaaaaaagcacaggtcctgtctgccggatctaggagaaggaaagaacagaggtatagatctgttattagcgacatctttgacggatcaatactgtcactggtacagtgtttgacttgcgaccgggtctcaacaaccgtggaaacttttcaggacttgagtttaccaatccccggaaaagaggatcttgccaaattacatagcgccatttatcaaaatgtgcccgcaaagcctggcgcttgcggggacagttacgccgcgcagggatggctggcctttattgttgagtatattagacggttcgtcgtgagctgcacaccgagttggttctggggacctgtcgtcaccctggaggactgtctggcagcatttttcgctgccgatgagcttaagggagacaacatgtattcatgcgagagatgcaagaagctgaggaacggggtcaaatattgtaaagtgctcagactgccggagatcctgtgtatacatctcaaacggtttagacacgaggtcatgtacagcttcaagattaattcccatgtctcattcccactggaggggctggacctgcgacccttcctcgctaaagagtgcaccagccagatcactacatacgatctgctgtcagttatttgccaccacggtaccgcgggcagcggtcactacattgcctattgtcagaacgtgataaacggccagtggtatgaatttgacgatcagtacgtcaccgaggtgcatgagactgtggttcaaaacgcagaaggttacgtgttattctataggaagtcttcagaggaagccatgcgggagcgccagcaagtcgtgtccttagcagccatgcgcgaaccctccttgcttagattctatgtgtcccgcgagtggctcaacaagttcaacaccttcgccgaacccggaccaattactaaccagacctttttgtgcagccatggtggaattcccccccacaaatatcactacatcgacgacctggtggtgattctgccgcagaacgtgtgggagcacctgtataacaggtttggaggcggccctgccgttaaccacctgtacgtgtgcagcatttgccaggtcgaaattgaagccttggcaaagcgccgaagaatcgaaatagacacctttatcaagctgaataaggcctttcaggccgaagagtcaccgggtgttatctattgcatttcgatgcagtggttcagggagtgggaggccttcgtaaaaggtaaagacaacgaacctccgggccccatagacaacagtagaatcgcacaagtgaagggctccggccatgtacagttaaagcagggagccgattacggccagatctcagaggagacatggacttacttgaactctctttacggcgggggacctgagattgccatcagacagtctgttgctcagcctctggggcccgaaaacttacatggcgagcaaaagattgaagcagagactcgcgcagtctag

SEQ ID NO: 24018 - DNA, 2772 bp, synthetic construct
  source 1..2772: mol_type = other DNA; note = Synthetic coding sequence
atggccgccagcaccggctacgtgcggctgtggggcgccgcccggtgttgggtgcttcgtcgaccaatgctggcggctgcgggcggccgtgtcccgaccgcagcgggagcttggctattgcgaggacagcgcacatgcgacgcttctcccccttgggccctctggggccgcggcccagctatcggcgggagcgctggtgctggagagggcccagtgatcaccgcacttacacccatgacaattccggacgtgtttccacacttaccgctgatcgctataacccggaaccctgtgttccccagatttatcaagataattgaagtaaagaacaagaaactggttgaattgttacgccggaaggtccggctcgcgcaaccctacgtgggcgtgtttctcaaacgcgatgactcgaacgaatcagatgtagtagagtctctggatgagatctaccacaccggtactttcgcccaaatccatgagatgcaggacctcggcgacaagttgcgaatgatcgtgatgggtcatcgccgagttcatatctcacgacaactggaagtggagcctgaagagccggaggcagaaaataagcacaagccaagaaggaagagtaagcgcggaaagaaggaggccgaggacgagctttctgctcgccatccagctgaattagccatggagcccacccctgagctcccagccgaggtgcttatggtcgaggtagaaaacgtcgtgcatgaggacttccaggtgacagaagaggtcaaggctctgactgccgagatcgtcaaaaccatccgcgatatcatagccctgaaccctctgtacagagaatctgtgctccagatgatgcaagccggccagcgcgttgtggacaatcctatctacctttccgacatgggcgcggctcttaccggcgctgagtcccacgagttacaggacgtattggaggagactaacatccctaaacgcctctataaagccctgagtctgctcaagaaagagttcgagcttagtaaacttcaacagagactaggtagggaggtggaggagaaaattaagcagacccatcggaaatacttactgcaagagcagctcaagatcatcaaaaaggagctcggcctggagaaggacgataaggatgctatcgaggaaaagtttcgtgaacggctgaaagaactggtcgttccaaagcatgtgatggatgtggtggatgaggagctgagcaagcttggattgctggacaaccactcatccgagtttaacgtaacccggaactacctggactggctaactagtataccctggggtaagtatagtaacgagaacttggacctggccagagcccaggcagttctggaagaggaccattacggcatggaggacgtaaagaaaagaatcttagagtttatcgcggtgtctcagctgcgggggtcaactcagggcaaaatcctatgcttctacggtccccccggcgtaggcaagacctcgatcgccaggagcattgcgcgtgccctgaatcgtgaatacttcaggttttcagtaggagggatgactgacgtggcagagataaaggggcaccgacgcacctacgttggtgccatgcctgggaaaattatccagtgccttaagaagaccaagactgagaatccactgattttgatcgacgaggtcgacaaaatcgggaggggctaccagggtgacccctcttctgctctccttgaactgctggaccctgagcagaatgccaatttcctcgaccattacctggacgtgcctgtggacctgagcaaggtcttgttcatttgcacggccaatgtgactgataccatccccgagcctctaagggatcgaatggaaatgatcaacgtttctggttatgtggcccaggaaaaactggccatagccgaaaggtacctggtgcctcaagcccgggctctgtgtggcctggacgagagcaaagccaagctctcctccgacgtgctgaccctgcttatcaagcaatactgccgagagagtggggttcggaatctgcagaaacaggtcgagaaggtactgcggaaaagcgcgtacaagatagtgtcgggtgaggccgagagcgttgaagtaactccagaaaacctccaggattttgtgggcaagcccgtatttactgttgagcgcatgtatgacgttactcctccaggcgtggtcatgggactggcttggacagccatgggagggtctacattattcgtcgagacaagcctgcgaaggccccaggataaggatgccaagggcgacaaagacggtagtctcgaagttactggacagctcggtgaggtgatgaaggaatctgcaaggatcgcctatacctttgcccgcgcattcctcatgcagcacgctccggccaatgattaccttgtcacttcgcacatccacctgcatgttccagagggtgcgactcccaaggatggaccttctgccggatgtacgattgttactgcattgctaagccttgcaatgggccgaccagtaaggcagaacctggctatgacaggtgaggtttccctgaccggaaagatcctccccgtcggagggattaaagagaagaccatagctgctaaaagggcaggcgtcacgtgcattgtcctcccagcagagaataaaaaggacttttacgatctggctgctttcattacggaaggacttgaggtccactttgtcgaacattaccgggaaattttcgacatcgccttcccggatgagcaggcagaggccctggctgttgaaaggtag

SEQ ID NO: 24019 - DNA, 681 bp, synthetic construct
  source 1..681: mol_type = other DNA; note = Synthetic coding sequence
atgggccccctgccccggaccgtggagctgttctacgacgtgctgtcaccctatagttggctcggttttgaaatcctgtgtagatatcagaatatctggaatataaatctccagcttcggccctccctaattaccggcataatgaaggacagtggcaacaagccacccggcctcttaccacggaaggggctttacatggctaacgatttgaagcttctgcgtcatcacctgcagattccgattcattttcccaaggactttttatccgtgatgctcgagaaaggctccctcagcgccatgcgattcctgactgccgtcaatttggagcaccctgagatgctggagaaggccagccgagagctttggatgcgtgtctggagtcggaatgaggacataactgagccccagtctatcctggccgccgccgagaaggctggcatgtctgccgaacaggcacaaggcctgttagaaaagatagctacaccaaaagtgaagaatcagctgaaggagacaacagaggccgcctgcaggtacggcgcgttcggcctccctatcactgtggcccatgtggacggacagacccatatgctgtttggatctgacaggatggaactcctggctcacctgctgggagagaaatggatgggccccatcccgccagctgttaatgctagactctag

SEQ ID NO: 24020 - DNA, 2055 bp, synthetic construct
  source 1..2055: mol_type = other DNA; note = Synthetic coding sequence
atggaggccaaccacagcgagcagctgagcgccgagcggcagagcacaccgccaggagacagctctagtctgccgtctcacaatggactggagaaagaggatggacaagactccccaactcctgttcagcctcccgagaaggaagccagcgtgcatccagacatctcagaggaactaaataggcagctggaggacattattaacacttacggtagcgctgcctcaaccgcagggaaggaaggcagcgccagagccagcgaacaacccgagaacgccgagagcccagataacgaggatggtgattgcgaggaaactacagaagaggcgggacgggagcctgtggcctctggtgaacctcccactgtcaaggaacctgttagcaacaaggaacagaagctcgagaagaagattctaaaggggttagggaaggaagcaaacctcctgatgcagaatctgaacaagcttcagacaccagaggagaaatttgacttcctgtttaaaaagtatgcagagctgttggacgaacacaggaccgagcagaagaagcttaagctcctgcagaagaagcaggttcagatccagaaagagaaggaccagttgcagggtgagcactccagggccattctggcacgatccaagctggagagcctctgccgcgagctacaacgccacaataaaaccctgaaggaagaagccctgcagagagctagagaagaagaagaaaaacgtaaggagattacgtctcacttccagtctacactcaccgacattcaaggccaaatcgagcagcagtccgaacggaatatgaagctctgccaagagaacacagagttagccgagaagcttaagtctattatcgaccagtacgaattgagagaagaacatctggacaagatcttcaagcacagggaactacagcagaaactcgtggacgccaaactcgaacaggcgcaagagatgatgaaggaagcggaagagcgacacaagagagagaaggaatacctgctcaaccaggctgccgaatggaaactgcaagctaaagtacttaaggaacaggaaaccgtgctgcaagctcaattgaccttgtattccgggaggtttgaagagtttcaatcaaccctcacaaagagcaatgaggtattcgccacctttaagcaggagatggacaagactaccaagaagatgaagaagcttgagaaggatactgcgacatggaaggctcgatttgagaactgcaataaagctttactcgacatgattgaggaaaaggcactaagggctaaagaatatgagtgctttgtcatgaaaattggccgcctggagaatctgtgtcgcgctctccaggaggaaagaaatgagctgcacaagaagatccgcgacgccgagatcagcgaaaaagacgaccaatcccagcacaacagcgacgaggagcctgagagcaacgtgagcgtcgatcaagaaatagacgcagaagaagtgaatagtgtgcagactgctgttaagaatctggccacagcttttatgataatacaccatccagagtctacgccacatcagagtaaagaaacccagccggaaatcggcagctcccaggaaagtgccgatgcagccctcaaggagcctgaacaacctccactcatcccctctcgagattcagagtcccctcttccacctttgaccccacaagccgaagctgagggtggaagcgacgcagagccccctagcaaggcctccaattcccctgccggccttggtgcagaaacccagtgcgaggggctgcccgtaggagcgcaggccgatcaagccagttggaaacccgaagccgaggcctcaggccaagccccccaggctcctaccgaagcctctctccagaaaatggaggcagacgttccagctccagcctgtgcagccgaagagcatgtggccgcaatggtgcccgcgtgtgaaccaagccgccaacccccccgagcagcagccgaagaactgcctgttggcgcctccgcgggccctcagcccaggaatgtcgccgacactaacctagagggcgtggattag

SEQ ID NO: 24021 - DNA, 1461 bp, synthetic construct
  source 1..1461: mol_type = other DNA; note = Synthetic coding sequence
atgaacggcaccctggaccaccccgaccagcccgacctggacgccatcaaaatgtttgttggccaggtgcccagaacatggtcagaaaaggacttgcgggaattgttcgagcaatatggggcagtctatgagattaacgtcttgcgagaccggtcccagaacccacctcagtccaaggggtgctgtttcgtgactttctacacgcggaaggctgctctcgaggctcagaacgcgttgcataatatgaaagtgctgcccggaatgcaccatcccattcagatgaaaccagctgactccgagaaaaacaatgcggtggaggaccggaaactcttcataggtatgatctccaagaagtgcaccgaaaacgatattcgagtcatgtttagttctttcggccagatcgaagagtgtcggatactgcgcgggcccgacggactctcaaggggttgtgctttcgtgacgttcaccactagagcaatggctcagacagcgatcaaagcaatgcaccaggcccagacaatggaaggctgtagtagccccatggtggtcaagtttgctgatacacagaaggacaaagagcagaaacgcatggcccagcaacttcagcaacagatgcagcagatcagcgcagcatccgtctggggtaatctagctggacttaatacactgggaccccagtacttagccctttatctgcagttgcttcagcagacagcatcctctggaaatttgaataccctcagctcgctccaccccatgggtggtttgaatgccatgcaactgcagaatttggctgctctcgctgctgcggccagtgccgcccaaaacaccccctccggtacaaacgcccttaccacctcttcttctccattgtcagtgctcacctcgtctggctcatctcccagttcatcgagctccaacagtgtaaatcccattgccagcctgggagctctacagactttagccggcgctactgccggcttgaatgtgggaagtttggcgggaatggccgcccttaatggagggctggggtccagcggactctctaacgggaccggctccacaatggaggccctcacccaggcctatagtggaatacagcagtacgccgcagccgctctgcccactctctataatcagaaccttctgacacagcaatcgatcggtgcagctggatcacaaaaggaaggtcccgaaggagccaaccttttcatttaccacttaccacaggagtttggggaccaagatttgctgcagatgtttatgccgtttggtaatgtggtgagtgccaaagtctttattgataagcagactaatttgagtaaatgtttcggcttcgtgtcttatgataaccctgtctccgctcaggctgcaatccagagtatgaatggctttcagataggaatgaaaaggcttaaagtccagctaaaaagatctaagaatgacagcaagccgtactag

SEQ ID NO: 24022 - DNA, 7812 bp, synthetic construct
  source 1..7812: mol_type = other DNA; note = Synthetic coding sequence
atggagaaggccaccgtgcccgtggccgccgccaccgccgccgagggcgaaggcagtcctcccgccgtggctgccgtagcaggacctcccgccgctgccgaggtgggtgggggagtggggggatcatcccgggcgcgcagtgcatcgagtcctaggggcatggtccgggtgtgtgatttactcctcaagaagaaaccaccccagcaacagcaccacaaagccaaaaggaatcggacatgcaggcctcctagctcaagcgagtcatcttccgacagtgacaattcaggcggagggggaggtggcggaggcggggggggcggaggaggcggaaccagctcaaataatagcgaagaagaagaagatgatgacgatgaggaggaagaggtgagcgaagttgagagcttcatcctcgatcaggatgatctggaaaatcctatgcttgagactgcctcgaaactgttgctgtccggtacagccgatggagcagatttgcgcaccgtggacccggaaacccaagcaaggcttgaagcactcctggaggcagctgggattgggaagctcagcacagcagatggtaaagccttcgccgaccccgaggtcttgcgccgcttgaccagtagtgtgtcttgcgcgctcgatgaagcagccgccgccctgacacgcatgagagccgagagtactgctaatgccggccaatccgacaacaggtctctggccgaggcttgcagcgagggagacgttaacgcagtgcgcaagcttctgattgaggggcgctccgtgaatgagcatacagaagaaggagagtccctgttatgtctggcatgttccgccggatactatgaactggcacaggtgctgctcgcaatgcatgctaacgtagaagacaggggcatcaaaggggatattaccccactgatggccgccgccaatggggggcacgtaaagatcgtgaagttgttattggcccacaaagccgatgtaaatgcccagagttccaccggtaacactgccttgacttacgcgtgcgccggcggctacgtggacgttgtgaaagtgcttcttgaaagtggtgctagtatcgaagaccacaatgagaatggccatacccctctgatggaggccgggtccgccggacacgtagaggtcgccagactgttactcgagaatggggccggtattaatactcattccaacgagtttaaggaaagcgctctgaccttggcatgttataagggacatctggagatggttcgatttctccttgaagcaggcgcagatcaggagcataagacagatgaaatgcacacagctctgatggaagcatgtatggatggccacgtcgaagtcgctcggctgctgctggatagtggcgctcaggtgaatatgcccgccgactcattcgaatcccctcttactctggcagcttgcggaggacatgtggagctggccgccttgctgattgagcgcggggcttctttagaggaggtgaatgacgagggatatacccctttgatggaggccgctcgcgaggggcacgaggagatggtagctctattgctgggacagggtgcgaacattaatgcccagacagaagagacccaggagaccgccctgacactcgcctgctgcggtggtttcctcgaggtcgccgacttcctcatcaaagcaggagccgacattgaattgggttgctcaacaccgctgatggaagcggctcaagagggtcacttggagcttgtcaaatacctgctagccgccggcgccaacgtgcatgccaccacggcaaccggtgatactgccttaacctacgcctgcgaaaacggacacactgatgtggccgacgtgttgctgcaggcaggcgctgatctcgagcacgagagtgagggcggtcggactcccttgatgaaagctgccagggccggccatgtgtgcaccgtgcagtttctcatttccaagggtgctaatgtgaataggaccactgccaataatgaccatacagtcctgtctctggcctgcgctggtggtcacttggcagttgtggaacttctgttggctcacggggccgatcccacacataggctgaaggatggatccactatgctgatcgaagctgccaaaggcggacatacatcagtagtatgttacctgctcgattaccctaacaacctcctgagtgcaccccccccagatgtgacgcagctgacacctccatcacatgacctgaatagagcaccccgagttcccgtacaggcccttccgatggtggtgcctccacaggagcccgataagccccctgctaacgtagcaacaacgttaccaatccgcaataaggccgcctcgaagcagaagtcaagctctcacctccctgccaatagtcaggacgtgcagggctatattactaatcagtctcccgagtccatcgtcgaggaggctcagggcaaattgactgagcttgaacagaggataaaagaagcaatagagaagaacgctcagctgcagtctttagagctggctcacgcagaccaactgacgaaagagaaaattgaagaacttaataaaacccgagaagaacaaatccagaagaagcagaagattcttgaagagctgcagaaagtggaaagggagctgcagctcaagactcagcaacagctaaaaaagcaatatttagaggttaaagcacagagaatacaattgcaacagcagcagcaacagtcttgtcagcacttgggactgttaacacctgttggggtgggagaacagctctctgagggggattacgccagattgcagcaggtcgatcctgtcctgctcaaggacgaaccgcagcagacggccgcccagatgggtttcgctcccatacagccactggccatgccacaggcactgcctttggctgcaggccccctgcctcctgggtccatcgccaatctgacggaattacagggagtcatcgttggacagccagttttgggccaggcccagctggctggccttgggcagggtattctgactgaaacccaacagggattgatggtagcttcacccgcccaaactctgaacgatacattagatgacatcatggcagctgtgtccggaagagcgagcgcgatgagcaacacaccaacacattctattgcagcaagcatctctcagcctcagacccccacccctagcccaattattagcccatccgccatgttgcctatttatccagctatcgacatcgacgctcaaaccgaaagcaatcatgatactgccttgacattagcttgcgctggcggacacgaagagttggtccagaccttgctggagcgaggcgcctccatcgaacaccgcgacaagaagggattcacacctctgatcctggccgccacagcagggcacgtgggcgtggtggagatcttgctggacaatggtgctgacatcgaggctcagagcgagagaaccaaagatacacccctatcactagcttgcagtgggggcaggcaggaggtagttgagttgctgctcgcacggggggcaaacaaggagcaccgaaacgttagtgattatacgcccctgtctctggctgcctcgggagggtatgtgaacatcattaagattcttctcaacgccggggcagaaattaacagccggaccggttccaaactgggaatctcacctctcatgctcgcagccatgaatggccacaccgccgctgtgaaactactcctcgatatgggctcggacatcaacgcccagatagagactaatagaaataccgcactcactcttgcatgcttccagggtaggacagaagtggtttctctgctcctggataggaaggctaatgttgagcaccgtgcaaaaacaggactgacccctcttatggaggccgccagcggaggttacgccgaggtggggcgcgttcttcttgataagggagcggatgttaatgcaccccctgttccttctagcagagacactgcactgacaatagccgccgacaaggggcactacaagttctgtgaactcctcatcgggcgcggcgcacacattgacgtgcgcaataagaaaggtaacacacccctttggttagccgctaacggaggccatctggacgtagtgcagctcttagtgcaagccggggccgatgtggacgcagcagacaacagaaagattactccgctgatggctgccttccggaaaggccacgtcaaggtcgtgagatacttggttaaggaggttaatcagtttccttcggattccgagtgtatgcggtacatagccactataactgataaagagatgttgaagaaatgccacctttgtatggagagtattgtacaggccaaagaccgtcaggctgcagaagctaacaagaatgcgtctatcctgctcgaggaactggacctcgagaagctgagggaagagtcaaggaggttggcattagctgcaaaaagagaaaaacgaaaggagaaacgcagaaaaaaaaaggaagaacagcgaaggaaattggaggagattgaagctaagaataaagagaattttgaattacaagctgcccaggaaaaggaaaagttaaaagtcgaggacgaacccgaggtcctaacagaacccccaagcgccaccacaaccaccactatagggatttccgctacctggaccactttggccggatcacacggaaagcggaataacacaattaccaccacctcatccaaaagaaaaaacagaaaaaataagattacccctgagaatgtccagatcattttcgacgatccactcccaatttcttacagccagcccgaaaaggtgaacggcgaatccaagtcttcctcaacttctgagtcaggggattccgacaatatgcggatttcatcctgcagcgacgagagtagcaattcaaacagctcccggaagtccgataaccattctccggccgtggtcacaacaacagtgagttccaagaaacagccctcagtgctggtgacttttcccaaagaagagcggaagtcggtaagcgggaaagccagcattaaattgtcagagactatttcggagggcacatctaactccctgtctacctgtaccaagagcgggccttccccactgtcatcccccaatgggaagctaacggtcgcatcccctaagcgcggccagaagcgcgaagaggggtggaaggaagtagtacgtcggagtaaaaaggttagcgtcccttctacggtcatctccagggttataggccggggtggttgtaatatcaatgccatccgagaatttactggggcacatatcgatatagacaagcagaaagataaaaccggcgaccgcatcatcacaatccgcggcgggaccgagagcacccggcaagccacccagctgatcaatgccctgataaaagatcctgacaaagagatcgacgagctgattcccaagaataggctgaagtcctcttccgcaaactccaagatcggtagcagtgcacctaccaccaccgctgctaataccagtctgatgggcatcaagatgactacagtagccttgtcctccactagtcagacagccactgccctgaccgtgccagccataagtagcgcctccacacacaagacaattaagaacccagtgaataacgtgcggcccggcttcccggtatccctaccgctggcctaccccccaccccagttcgcccatgcactcttggcagcccagacgtttcagcagatcagacctccacggctccctatgacccacttcggcggtacctttccccccgcccagagcacctggggacccttccccgtgagaccactgtccccggccagggccaccaatagtcctaagccacacatggtgccaagacactctaatcagaattcatctggctcccaggtgaactcagcaggctcacttactagcagtcccaccacgacgacctcatcttccgcatcgaccgtgcctgggacttcaaccaatggatctccaagtagtccctctgtccgtagacagctgttcgtcacagtggtgaagacctctaatgcaaccactactactgtcacaactaccgcatctaataacaacactgctccaaccaatgctacttaccccatgccaactgccaaagaacactaccctgtgtctagccctagctcgccttcaccccctgcccaaccgggtggggtttcccggaacagcccccttgactgcggaagcgcttctcccaacaaggttgcgtcaagctccgaacaggaggccggctcgcctcccgtcgtggagaccacaaatacaaggcccccgaatagctcttcttcttcaggaagcagcagcgcccattcaaaccaacagcagcctccaggatctgtttcgcaggagccaaggcctccattgcagcagagccaagtgccccctcccgaggtacgcatgaccgtgccaccccttgcgacttcatccgcacctgtcgcagtgccttctacagcccccgtcacctacccaatgccccaaaccccgatgggctgccctcaaccaacaccgaaaatggaaaccccagccataagacccccccctcatggcacaactgcacctcataaaaactcagcatccgttcaaaatagttctgtggcagtactatcagtaaatcacatcaagcggccccattcagtgcccagctccgttcagctccctagcaccttgtctacccagtccgcctgtcagaacagcgtgcatcccgccaataaaccaatcgctcccaactttagcgctcccctcccttttggtccctttagtacactgttcgagaactcgccgacctccgcccatgccttctgggggggctcggttgtaagctctcaaagtacccccgaatctatgcttagtggaaaatcatcataccttcctaactcggaccccttacaccaatccgacacttcgaaggccccaggttttaggccaccattgcaaagacctgccccctccccgtctggtatcgtcaacatggactctccctacggtagcgtaaccccctcaagtactcacctgggtaatttcgcttctaatatttcaggtgggcagatgtatggacccggagctccattgggcggtgccccagccgccgccaattttaatcgacagcatttcagcccattgtccctcctgacaccatgctcatccgctagcaacgactcgtccgctcaatcagtcagcagcggggttagagctccatcccctgctccttcttccgtgcccctgggaagcgagaaacccagcaatgtttcccaggaccgcaaagtgcctgtccctatcgggaccgagcggtctgctcgtattcgacaaaccggtaccagtgccccctcggtaatcggttctaatctgtcaacctcggttgggcacagcggaatatggagctttgaaggtataggaggtaaccaagacaaggtcgattggtgcaacccagggatgggcaaccccatgatccatcgtcccatgtcagatccaggtgtgttcagccaacaccaagctatggagagagatagcaccggaatcgtgaccccctcgggtacattccatcagcacgttccagccggctatatggattttcctaaagtggggggaatgcccttctccgtgtacgggaacgctatgatcccacccgttgcccccatcccggatggggctgggggcccaatctttaacggaccccacgcagctgacccttcctggaactcgctgataaagatggtcagttcatccactgaaaataacggcccccaaacagtatggacaggaccttgggctccacatatgaattcagtccacatgaatcagctcggttag

SEQ ID NO: 24023 - DNA, 3075 bp, synthetic construct
  source 1..3075: mol_type = other DNA; note = Synthetic coding sequence
atgaccgagggccggcggtgccaggtgcacctgctggacgaccggaaactcgagttattggtgcagcctaagcttcttgctaaggagctgcttgatctggtggcgagtcatttcaatttgaaggagaaagagtacttcggaatcgccttcaccgacgaaactgggcacctcaactggctgcagctggatagaagagtgttggagcacgactttccaaagaagagtggcccagtagtgctttacttctgcgtaaggttctacattgagtctatttcttacttgaaggacaatgcgaccatcgaactcttcttcctgaacgcaaagtcatgtatttacaaagagctaatcgacgtagacagcgaggtcgtgttcgaattagcctcatatatacttcaagaagcaaagggcgacttctcttctaacgaagttgtgcgatctgacttgaagaagcttcctgctctccctacacaggctctgaaagagcacccgtccctcgcatactgtgaagatcgtgttatagagcactacaagaagctcaacggacagacacgtggtcaagctatagtgaactatatgtccattgtcgagagtctgccgacctacggcgttcactactatgcggtgaaagacaaacaagggattccgtggtggctgggactgtcatacaaggggatcttccagtacgactaccatgacaaggtgaagcccagaaagatcttccagtggagacagctggaaaacttgtatttccgggaaaagaaattcagtgtcgaggtgcacgacccccgaagagcctcagtcacgaggcgcacattcggtcactcgggtattgctgttcatacctggtatgcctgtccagccttgataaaatcaatctgggctatggcgatctctcaacatcagttttacctggatcgaaagcagtcaaagagcaaaatccacgccgctaggtcactctccgagatagcaatcgatctcaccgaaacgggaacgctgaaaacttctaagctggctaacatggggtccaagggaaagattatcagcggctcttccggaagtctgcttagtagcggctcccaggagagcgattcctcacagtcagcaaaaaaggatatgctggcagcattaaagagccggcaagaggcgctggaggaaacattgaggcaaaggcttgaggagcttaaaaaactgtgcctgcgcgaggccgaacttaccggaaaattaccagtggagtatcccctggatcccggcgaagagccacccatcgtcaggcggcggatcggaaccgcttttaagttggatgaacagaaaattctgcctaagggggaagaggcggaacttgagagactggaacgcgaatttgccattcagagccagataacagaggccgccaggaggctcgccagcgacccgaacgtgtccaagaagctgaaaaagcagcggaagacctcctacctcaacgcactgaagaaattacaagaaatcgaaaacgcaattaatgagaacaggattaaaagtggtaaaaaacctactcaaagggcctcactgatcatcgacgacggaaacatcgcatccgaggatagtagcttaagcgacgcattggtccttgaggatgaagatagccaggtaacttccactatctctcccctccactctccccacaaggggctgccgccacgacccccatcccacaatcgcccccctcctccacaaagtctggaggggctgagacagatgcactaccaccgtaacgactacgacaagagccctattaagccgaagatgtggagcgaatcatccctggatgagccctatgagaaggtaaagaagcgctcatctcacagccactcgtctagccacaagagattcccatcaactggctcgtgtgccgaggcaggtgggggctcaaacagcttacagaattctccaatccgggggctgccccattggaattctcagagcagtatgccatcaactcctgacctgagagtgaggagcccacactacgttcattcaactcgatcagtggacatttcacccacccggttacactctctggctctgcattttcggcaccgtagcagttcactggagtcccaggggaagttgttggggtcagaaaacgacaccggatcccccgacttttacacaccacgcacaaggagctctaacgggagtgatcctatggatgactgcagtagctgcacatcgcactcgagtagcgagcattactaccctgcacagatgaacgcgaattatagtactctagctgaggattctcctagtaaagctaggcagcgacaacgacaacgccaacgggctgccggcgctctcgggtccgccagcagtggctcaatgcccaacctggccgcccgaggaggcgctgggggcgcgggaggagccggcggcggcgtatacctgcattcacagtctcagcccagtagccagtatcggatcaaagaataccctctgtacatcgaaggaggcgcgacaccggtcgtggttcgaagccttgagtcagatcaggaagggcactatagcgtcaaggcacagtttaaaacctcaaactcctatacagcaggcggcttatttaaagagagctggagaggcggtgggggcgacgagggtgacacaggaagactaactccaagccggtcccaaattctgcgcacccccagcctgggtcgcgaaggagcacatgacaagggggcaggccgggctgccgtgtcagacgagcttaggcagtggtaccaaaggagcacagcctcccacaaagagcactccaggctgtcgcacaccagtagtacaagctcagactcaggatcccagtactccacctcttcacagagcacgttcgttgcacactcacgagtgactcgcatgcctcagatgtgtaaggctacttctgccgcgctgcctcagtcacagagatcttcaacaccctctagtgagattggcgcgacacctccgtcttcgcctcaccacattctgacctggcagactggcgaggccaccgaaaacagcccaattttagatggtagcgagtccccaccccatcagtccacagatgagtag

SEQ ID NO: 24024 - DNA, 864 bp, synthetic construct
  source 1..864: mol_type = other DNA; note = Synthetic coding sequence
atgagccaggcctggtggcacaccagcgtgagccccgccacccaggaggccaaagctggtggccttttgcagcccagaagacaacgtctgtggctcaaacgttgccgcatctccagcagcgcctgcgaagatttgtctgcagcattaatcgccaataagaatcttacacgaatggatctttcgggtaacggagtgggttttcccgggatgatgctgttatgtgaaggattgaggcacccacagtgtcgcttgcagatgattcagttaagaaaatgccagttggagagcggagcctgtcaggagatggcatcagtcctggggacaaacccacatttagtggaactcgacttgaccggcaatgctttggaggacctgggccttagactgctctgccagggattaaggcatcccgtctgtcgcttgaggactctatggttgaagatctgccgactcactgccgcagcctgtgacgagctagcctctaccctgagcgtaaaccagtccctcagagaactggacctctctctgaatgagctgggcgatcttggagtgctgcttttgtgtgaaggcctgcggcatccaacttgcaaactccagaccctccgcttagactcttgcggcctgaccgcaaaagcatgtgagaatctttatttcaccctgggcattaaccaaacacttactgacctctacctgactaataacgccctcggcgatactggtgtgcgactcctgtgtaaacgcctgtcacatccaggatgcaaactgcgcgtgctgtggcttttcggaatggatttaaataagatgacccattcacgccttgcggctttgcgcgtcacaaagccatacctcgacatcggttgttag

SEQ ID NO: 24025 - DNA, 615 bp, synthetic construct
  source 1..615: mol_type = other DNA; note = Synthetic coding sequence
atggccggctacctgagcgagagcgacttcgtgatggtggaggagggtttttctactcgcgatctactgaaagaactcactttaggagcaagccaggcaaccacagacgaagtggcggctttttttgtcgcagatttaggggctatagtgcggaaacacttctgctttctcaagtgtcttcctcgtgtcaggcctttttatgccgtcaagtgcaacagcagccccggagtcctgaaggtcctcgcacaactcggattagggttctcatgtgccaacaagatcgccagcgtcatcaatagcgccctggatctgtattttccggaaggttgcggagtggacattttcgccgaactaggcaggtactatgtgacctcagcttttacggtcgccgtctccatcatcgccaagaaagaagtgctcctggaccaacctggccgggaggaagagaacgggtccacgtccaagactattgtgtaccacctggacgagggcgtatacggcattttcaacagcgtactttttgacaatatctgtcccaccccgatcctacagaagagcaagaaccattcgccgtgttatatgagcctagagagcattcactttatcgccgtgtag

SEQ ID NO: 24026 - DNA, 519 bp, synthetic construct
  source 1..519: mol_type = other DNA; note = Synthetic coding sequence
atgatgaagctgaagagcaaccagacccggacctacgacggcgacggatataagaagcgcgccgcatgcctgtgcttccgctccgagtctgaggaggaagtcctgttggtgtcctccagtcggcaccccgatcgatggattgtccctggagggggcatggagcctgaggaagagccgagtgttgccgctgtgcgggaggtctgcgaggaggccggcgtgaaaggaacccttggccgattggtgggaatcttcgagaaccaggagcggaagcaccgtacctacgtgtacgtcctcatcgttaccgaagtcttggaagattgggaggattctgtgaacatcggcagaaaaagggaatggtttaagatcgaggacgctattaaggtcctgcagtatcacaagcccgtgcaggcatcttatttcgagacactgcgacaagggtattccgccaacaacggcacgccggttgtcgctaccacatatagcgtctctgcccagtccagcatgtctgggatccggtag

SEQ ID NO: 24027 - DNA, 4284 bp, synthetic construct
  source 1..4284: mol_type = other DNA; note = Synthetic coding sequence
atgagcatgctgaagcccagcggcctgaaggcccccaccaagatccttaagccgggcagcacagctttgaaaacgccaacagccgttgtggctcctgtggaaaagactatctcctctgagaaggccagtagtactccatcctccgaaacacaggaagagttcgtcgatgacttccgggtgggcgaaagggtctgggtgaatgggaataagcccggctttatccagttcctcggggagacacaattcgcccccggtcagtgggccggtattgttctcgatgagcccatcggtaaaaacgatggcagcgtcgcaggggtcagatactttcagtgtgagccgctcaagggcatcttcacacggccctcaaagttgacacggaaggtccaggctgaggatgaagccaacggactccaaactaccccagctagccgcgcgacatcccccctatgtactagtactgcctccatggttagctcctcaccatccaccccatctaatataccacaaaaaccatcccaaccagccgccaaagagcctagtgccacccccccaatcagtaacctgaccaaaacagccagcgaatcaatcagcaacctaagcgaggcagggtcaatcaagaagggggagcgtgaactgaagataggggacagagtgctagtgggtggaaccaaggctggtgtggtgcggtttctgggcgaaacagattttgcaaaaggtgaatggtgcggggttgaactcgacgagcctttgggaaaaaacgatggagccgtggcaggaacaagatatttccagtgtcagcctaagtacgggctcttcgctcctgtacacaaggtaacaaaaatcggcttcccaagtacaacccctgccaaggcaaaggccaatgctgtccgaagggttatggctaccacttctgctagcctaaagcgaagtccaagtgccagtagcctttccagtatgtcctcagtggcatcatcggtgagctccaggccaagtcgaacagggctcttaaccgaaacctctagcagatacgctcgcaaaatctccgggacaactgcactccaggaggccctcaaagaaaagcagcagcatattgagcagctccttgccgagagagacctcgagagggcagaggtggccaaagctactagccatgtaggtgagattgagcaagaacttgctctggccagagacggacatgatcagcacgtgttagaattggaagctaaaatggaccagctgcgaacaatggttgaagccgcagacagagaaaaagtggaactgctcaatcagctggaggaagaaaaaaggaaagtcgaggacctccagtttcgtgtggaggaggagtctataactaaaggcgacctggaaactcaaactaaactggagcacgctcggattaaggagctagagcaatcattattgttcgaaaaaaccaaagctgataaactgcagcgggagctggaggacactagagtggccaccgtgtctgaaaagtcgcgcattatggagcttgagaaggatctcgctctccgggtgcaggaggtcgccgaattgcggcggaggctggaaagcaataaacccgctggagacgtagatatgagcctgtccctcctgcaagaaatctcttcattgcaggaaaaattggaagtgacccgtacagatcatcagcgggaaatcactagtcttaaagagcacttcggggcccgggaagaaactcatcagaaggaaattaaagctctgtacaccgccaccgagaagcttagcaaggaaaatgaatccctgaaaagtaagctcgagcacgccaacaaggagaactcagacgtgatagccctctggaagtccaaattagaaactgccatcgcaagccaccagcaggctatggaggagctgaaggtgagtttctctaaggggctgggcacagaaaccgcagagttcgctgaattaaagacacagattgaaaagatgcgactggattaccagcatgagatagaaaacctacagaatcaacaggatagcgaacgggccgcgcacgcaaaggagatggaagctctgcgcgctaagttaatgaaagttataaaggaaaaagaaaacagcttagaggctatacggtccaagttggacaaagccgaggatcagcatttggttgagatggaagacacactgaataaacttcaggaggcggagatcaaagtgaaggaactagaggtcctgcaggcaaagtgcaatgagcagaccaaagttattgataattttacaagccagctgaaagccaccgaggagaaattactggatctggatgcactgcgaaaagcctcgtccgaaggaaagagcgagatgaagaaactgcgccagcaactggaagctgccgagaaacaaataaaacatctggaaattgagaaaaatgcggaatcatcaaaagcttcttccatcactagggagcttcagggccgcgagctgaagttgacaaacctccaggaaaatctttctgaggtctctcaggtaaaagaaaccttggaaaaagagctgcagatcctaaaagagaagtttgcagaggcctccgaagaggctgtgtcagtgcagcggagtatgcaggaaacagtaaacaaactacatcaaaaggaggagcaatttaatatgttatcaagcgatctcgaaaaacttagagagaacttggctgacatggaggccaaattccgcgagaaggacgagagggaggagcaacttattaaggcaaaagaaaagctcgagaacgatattgcagagattatgaaaatgtcaggggacaattcctcccagctaacgaaaatgaatgacgagctgcggctcaaggagcgcgacgtggaagaactgcagctgaaactcacaaaggcaaacgagaatgcgtcattccttcagaaatctattgaggacatgacagtgaaggctgagcagagtcaacaagaggctgctaagaagcacgaagaagagaagaaagagctcgaaagaaaactgtccgacctggagaaaaaaatggaaacttcacacaatcagtgccaggaattgaaggcacgttacgaacgcgcaacttccgagacaaagactaagcacgaggagatactgcaaaacctgcagaaaactttgctggatactgaagacaagctgaagggtgcccgtgaggaaaatagcggcctccttcaggaactggaagagcttaggaagcaggccgacaaagcaaaggccgcacagacagccgaagacgcaatgcagatcatggaacagatgactaaggaaaagaccgaaactctggcaagtctagaagatacaaaacagacgaacgctaaactgcagaatgagctggacactttgaaggagaacaatctgaaaaatgtagaagaacttaacaaatcaaaggagctcttaaccgtcgagaatcagaagatggaggagttccgcaaagaaatcgagacccttaagcaggccgccgcccagaagtcacagcagctgtcggccctccaggaggagaatgtgaagcttgcagaggaactcggacggtctcgggatgaagttacatcgcaccaaaagcttgaggaggaacggtcagttctgaataaccagcttctggaaatgaagaaacgggaatctaagttcattaaggacgccgacgaggagaaggcttccttacaaaaaagcatcagcataacctcagccttattgacggagaaggatgccgagctggaaaagcttcggaacgaagtgaccgtccttaggggcgagaatgcttcggctaaaagccttcattccgtggtacaaacacttgagtccgacaaggttaagctagaactgaaagttaagaatctggagctgcagttaaaggaaaataagagacaattgagttcctccagcggtaataccgacactcaagctgatgaagatgagcgagcccaagagagtcaaattgacttcctgaacagcgtcatcgtggacctacagcgaaaaaaccaggatttgaagatgaaagtcgagatgatgagcgaagccgccctgaatggtaatggggatgatttaaataactacgattccgacgatcaggagaagcagtccaaaaagaagccaagactcttctgcgacatctgtgactgtttcgatcttcacgatacggaagactgcccaacccaggcgcagatgtccgaagaccccccccactcgactcaccatggatctaggggtgaggagcggccttattgtgaaatttgcgagatgttcggtcactgggcgacaaattgcaatgatgatgagactttctag

SEQ ID NO: 24028 - DNA, 1179 bp, synthetic construct
  source 1..1179: mol_type = other DNA; note = Synthetic coding sequence
atgggcgacagctgccccgccgtgaccttccggagccagaaggagaacagagccgggttacaggaaaaactgaggtatctgcagcaacagttgcaggacgagacaccacgccgccaggaggctgaattacaggagccagaggaaaagcaggaacctgaagagaagcaggaacctgaggagaaacagaagcccgaagcggggctgtcctggaacagtctgggccccgccgctaccagccaggggtgtccagggccgcccgggagccctgataaacctagtaggccccacggactcgtgcccgcgggatggggcatgggcccacgggctggcgagggtccttatgtttcagaacaagagcttcagaaattgtttacaggaatagaagagctgagacgagaagtgtctagcttgacagccaggtggcaccaagaagagggagccgtacaagaggcattgcgcctcctgggggggcttggtggtcgggtggacgggtttctcggacagtgggagcgggcccagagggaacaggcccagaccgcccgcgacttacaagagctgcgaggccgggccgatgaactgtgtaccatggtcgaacggagtgctgtaagtgttgcgtcactgaggtccgagctcgaggggctgggacccctgaaacctatactggaggaatttggacggcagtttcagaacagtaggaggggtcctgatcttagtatgaatttggacaggtcacaccaagggaattgcgcgaggtgcgcctctcaggggtcacagctaagtaccgagtccctgcagcagcttctggatcgggcgctaacttccctggtggacgaggtgaaacagagaggtttgactcccgcctgcccctcatgtcagcgtttgcataaaaaaatcctggagctggaacgtcaggcactagcaaagcatgttcgggcggaggcgctctctagtacattaaggttagcacaggatgaggcactgcgtgcgaagaatttgctgctcaccgataagatgaagcctgaggagaagatggccacactcgaccacctgcacctgaaaatgtgcagtctgcacgaccacctgagcaacctacctctggagggttccactggcaccatgggaggcggctcttccgctggaacccctcctaaacagggcggatcagctcccgagcagtag

SEQ ID NO: 24029 - DNA, 1692 bp, synthetic construct
  source 1..1692: mol_type = other DNA; note = Synthetic coding sequence
atgagcgacgacgccggcgacaccctggccaccggcgacaaggccgaagtgacagaaatgcccaattcagattcccttccagaagatgctgaagtccactgtgatagcgctgctgtcagtcatgaaccaaccccagcagaccctcgcggtgaaggacatgaaaatgccgcagtccagggtgccggagctgcggctataggtcctcccgtgcagccccaggatgccaacgccctggagcctccactgaacggagacgtgaccgaggacacactggccgagtgcatcgattctgtctcgctagaagccgagccgcgatcagagatcccgcttcaggaacaaaattacctggctgttgattctcccccaagcgggggagggtgggctggttggggatcctggggcaaatctttgctgagctccgcaagcgccacggtgggtcatgggctgaccgcagtaaaagagaaagccggcgctaccttgaggattcacggcgtcaacagcggaagctctgaaggggcccagccgaacaccgagaacggggtgccagagattaccgatgccgctacagatcagggccctgccgaatcccccccaacttccccctcctcagcaagcagagggatgctttcagccataaccaacgtagtgcaaaatactgggaaatctgtgctcactggggggctagatgctttggaatttatcggcaaaaaaactatgaatgtcctcgcagaatctgacccaggttttaagaggacaaaaacacttatggagcgcacagtttctctgagtcagatgctgcgagaagctaaagagaaagagaaacagagactggcccagcagttaaccatggaaagaactgcccactacggcatgttgtttgacgaatatcaggggctgtcacatcttgaggcgcttgagattctgtccaacgaatccgagagcaaggtccaatcatttctcgcctctctggatggagagaagctggaactcctgaagaacgatctgatttcgattaaggatatctttgctgccaaagagttggagaacgaggaaaaccaggaagaacagggactggaggagaagggagaggagttcgcacgaatgctgacagagctgctgtttgaattacacgtcgcagccacacccgataagttgaacaaagccatgaagagggctcacgattgggtcgaagaggaccagacagtggtgagcgtcgacgtggcaaaggtgtccgaagaggagacgaaaaaggaagagaaggaggaaaagagccaggacccacaggaggacaagaaagaggagaaaaagaccaagacaatcgaagaagtttacatgtcgtcaatcgagagcctggccgaagttactgcccggtgcatcgaacagctgcacaaggtcgccgagctgatcctccacggtcaggaagaggagaaaccggcacaagatcaagccaaggtactgataaaactgacaaccgcaatgtgtaatgaggtcgccagtctcagcaaaaaattcacaaattctctgaccaccgtggggagcaacaaaaaggcagaagtcctgaatcctatgatctcaagtgtgctgctggagggatgcaactctacgacatacatacaggatgctttccagctgctgctacctgtgttgcaagtctctcatattcagacttcatgtctgaaggctcaaccctag

SEQ ID NO: 24030 - DNA, 1257 bp, synthetic construct
  source 1..1257: mol_type = other DNA; note = Synthetic coding sequence
atgttcagccccgaccaggagaaccaccccagcaaggcccccgtgaagtacggagaactgatcgtgctggggtataatggtagcttacccaacggagatcggggcagaagaaagtccagattcgccctcttcaaacgacctaaagcaaacggtgtgaagccctctactgtccacattgcgtgcaccccccaggcggccaaggctatatcaaataaggatcagcatagcatcagttacactctttctcgggcacagactgtggtggtggaatacacacacgacagcaataccgacatgtttcagatcggtcgcagcactgagtccccaatcgatttcgtggtgaccgatactgttccaggctcacagtctaatagcgacactcagagcgtccaaagcacaatctctcgttttgcttgccgaatcatatgtgaaagaaatccccctttcaccgcccgtatttatgctgccggcttcgacagtagtaaaaatattttcctcggggagaaggccgctaaatggaagacatcagacgggcagatggacggactgaccacaaacggagtcttggtgatgcatccaaggaacggtttcacggaggatagtaaaccagggatctggcgggagatcagtgtttgcggtaatgtgttttccttgagggaaactcggtccgcacaacagcgcggaaagatggtcgaaattgaaacaaaccaacttcaggacggctcgctgattgatctgtgcggtgctacactactttggaggacagctgagggtctgagtcatactcccacagtgaagcatctggaggccctgcgacaggaaattaatgctgccaggcctcagtgtccagtgggatttaatacactcgcatttcctagcatgaaaaggaaggacgtggtggatgaaaagcagccttgggtgtatcttaattgtggccatgtccacggctaccacaactgggggaacaaagaggagagagatgggaaggatcgagaatgccccatgtgtcggagcgtggggccatacgtgcctctttggttgggctgcgaggccggcttttatgtcgacgccggtcctcccactcacgcctttagcccttgcggtcatgtctgttcggaaaaaacaacggcatactggtctcaaattccgctgccacacggcacgcatacctttcatgcagcctgtcctttttgtgcccatcaactggccggtgagcagggatacatacggcttatctttcagggcccgttagattag

SEQ ID NO: 24031 - DNA, 3963 bp, synthetic construct
  source 1..3963: mol_type = other DNA; note = Synthetic coding sequence
atgcaggacgacagcatcgaggccagcaccagcatcagccagctgctgcgtgaaagctacctggctgagacgaggcatcgagggaacaatgaaaggtccagagccgaaccttcttctaacccatgtcatttcgggtccccctctggcgccgcagaaggggggggaggccaggacgatctgccagacttgtctgcgttcttgagtcaggaagagctggatgaatcagtaaatctggccaggctggccatcaactatgacccattagaaaaagccgacgagacccaggccagaaaaagactgagccccgaccaaatgaaacacagtccaaacctttcctttgagccgaatttctgtcaggacaacccccgatcaccaacatcatccaaggagtctccacaggaagccaaaaggcctcagtactgctcagagactcagagcaagaaggtgttcttgaacaaggcagccgactttatcgaggagttgagtagtctgttcaaatcccacagctccaagaggatccgccctcgggcctgtaagaatcacaagtcgaagttggaatctcagaataaagtgatgcaagagaactcctcttccttttcggatctgagcgaacgtagagagcggagttctgtgcctattccaatccctgcggacacgcgggacaatgaagtgaaccacgcgctcgaacagcaggaagcaaagagacgagaggcggagcaagccgcaagcgaggcggctgggggtgacacaacccccgggtccagtccatcaagtttgtattacgaggaaccactggggcaacccccgaggtttacccagaagctgaggagtcgggaggttcctgagggaacacgtgtacagctggactgtatcgtggtgggcatccctccaccccaggttcgctggtactgtgaagggaaggaactggagaactcgcctgacattcatatagtacaggcaggtaacttgcacagtctcactatagcggaagcctttgaagaggacaccggcaggtacagttgtttcgcgtccaacatttatgggacggactccacgagcgcggaaatatacattgagggagtttcctcatctgactctgaaggagatcccaataaagaggagatgaacaggatccagaagcctaatgaagtgtcatcgccacctactaccagcgcagtgatacccccagcagtgccacaggcccagcacctggtggcccagcctagggtcgcgacaatacagcagtgtcaatcccctacaaactatctccaagggttggatggaaagcctattatcgctgcgcccgtcttcaccaagatgttgcagaaccttagtgcttccgaagggcaactcgtagtttttgagtgtagggtgaagggtgctcccagcccaaaggtcgaatggtatcgcgagggaaccctgatcgaagactccccagatttcaggattttgcagaagaagcctcgttccatggctgagcctgaggagatttgcactttggtaatcgctgaagtgtttgcagaggacagcgggtgcttcacctgtaccgcctcgaacaaatacggcacggtttcatctattgcccagctgcacgtgcgcgggaatgaggatctctccaataacggatctctccactctgcaaactccaccactaatctcgccgccatcgagccccaaccaagtcccccacattctgaaccaccttccgtggagcagcccccaaagcccaaactggagggtgtcttggtgaatcataacgagccgaggagctctagtcggatcggactgagggtacacttcaacctccccgaggacgataagggttcagaagcctcgtccgaagctggagttgtgaccacccgccagacccgccccgactcatttcaggagcgcttcaacggccaggcaaccaagaccccggaaccgtcctcccccgtaaaagaaccaccccctgttctggccaaacccaaactggatagcacacaattacagcagctacataaccaggtgctcctcgaacagcaccagttacagaatccacccccctccagtcccaaggaattccctttttctatgaccgtgctgaattccaatgctccccctgcagtgacgacttccagtaagcaggtgaaagctccttcctcacaaacctttagcctggcgcgcccgaagtattttttcccctccactaatactacggctgcaaccgtcgccccttcctccagtcccgtatttacactatcttccaccccgcagacaattcagaggactgtaagtaaggagagcctactcgtgtcccatccctcagttcaaaccaagtcccctgggggactgagcattcagaatgagcccttgccccccggaccaaccgagccaacacctccgccttttaccttctcaatcccctctggtaaccagttccagccacgctgcgtgagccccatacccgtgagcccaactagccgtattcagaaccctgttgcatttttgtcctccgtcctgccgtcactgcccgctattccacccacaaatgccatggggttgcccagatccgccccctcgatgccttcgcaaggtttggcaaaaaaaaatacgaagtcccctcaacctgttaacgatgataacatacgcgagaccaagaacgccgtgatccgtgatctgggcaagaagatcacgttcagcgacgtccgtcctaaccaacaagaatataaaatcagtagttttgaacagcgtcttatgaatgagattgagtttagattggagcgcactcctgtggatgaatccgacgatgagatccagcatgatgagattcccaccgggaaatgtatcgcccctattttcgataagcgcctgaaacactttcgcgtgacggagggatcacctgtgacctttacttgtaagatagtgggcatccccgtgcccaaagtctactggttcaaagacgggaagcaaatctcgaagcgaaacgagcactgcaagatgcgccgcgaaggcgatggaacctgcagcttacacatcgaatccaccacctctgacgatgacggaaactataccatcatggctgccaatccgcagggtcggatttcatgcagcggccacttgatggtgcaatctctgcctattaggagcagactcacctcagccggccagtcacacaggggccgctctcgcgtgcaagagcgcgacaaggagccgctccaggaacgatttttccgcccacatttcctgcaggcccccggcgacatggtcgctcatgaaggacggctgtgccgcctggactgcaaggtgtctgggcttccaccaccagagctgacctggcttttaaacggacagcctgtcctgccagatgcatcacacaaaatgttagtgcgcgagacaggagtgcactctctgctgatcgatcctctgacacaaagggatgccggtacctataagtgtatcgccaccaacaagaccggacagaacagcttcagtctagaactctcagtcgtcgccaaggaggtcaaaaaggcacccgtgatcttggagaagctccagaactgtggcgtgcccgagggccatcctgtgcggctggagtgtcgtgtgattggcatgcctccgcccgtcttctattggaaaaaagataacgaaaccatcccctgtacccgggaaagaatcagtatgcaccaggatacaaccgggtatgcctgcttgctcattcaacccgccaaaaagagcgatgccgggtggtacactctgtcagcaaagaatgaagctggaattgtcagctgcaccgctcgactggatatttatgcccagtggcaccaccagatccccccacctatgtcagtacgacctagtggtagccggtatggtagtctcactagtaagggcctcgacatattctccgcctttagctcaatggaaagtaccatggtatatagctgtagttcccgaagcgtagtagagagcgatgagctttag

SEQ ID NO: 24032 - DNA, 4206 bp, synthetic construct
  source 1..4206: mol_type = other DNA; note = Synthetic coding sequence
atggccagctgcgccagcatcgacatcgaggacgccacccagcacctgcgagacattctcaagctggatagaccagccggcggccccagtgctgaatctcctaggccaagctccgcatacaatggcgacttgaatgggctgctggtgcctgacccgctctgctccggggattcgacatctgcaaataagaccggcctgagaaccatgccccctatcaatctgcaggaaaaacaggtcatttgtctttcgggggacgattcatcaacctgtattggcatcctagcaaaagaggtggagattgtggcatcgagcgacagttcaatcagtagcaaagctcgcggatctaataaggtaaagattcagcccgttgctaagtacgattgggaacagaagtactactatggcaacttgatcgccgtaagtaatagctttttggcctatgccatcagagccgccaataacggcagtgcaatggtcagggtcatcagcgtatcaacatcggagcgcactctcctgaaaggtttcaccggctccgtggcagatctagctttcgctcacctgaacagcccacagttggcgtgcctggacgaggcagggaacttattcgtgtggcgtctggccctggtaaatgggaagatccaggaggagatcctggttcacatccggcagccggaaggtacacctctcaatcacttccggcgcatcatatggtgcccctttattcccgaggagtccgaggactgttgcgaggagtccagcccaactgtggcgctgcttcacgaagaccgggcagaggtctgggacctggacatgctacgctcctctcatagtacatggccagtggacgtctcacaaatcaaacagggctttattgtggtgaaagggcattccacctgcctgtcggagggagccctctcaccagatggtactgtgctggccacggcttcgcacgatggctacgtgaaattttggcagatctacattgaggggcaagatgaacccagatgcctacacgagtggaaaccccacgatggcagaccactttcatgtctgctgttttgcgacaatcataaaaagcaagaccctgacgtaccgttttggcgcttcttaattaccggagccgatcagaacagggaactgaagatgtggtgcacagtgtcttggacttgcttacagaccattagatttagtccggacattttctcaagtgtgtcggtcccccctagccttaaagtctgtctcgacctgagtgcagagtacctaattctatctgatgtccaacgcaaggtcctgtacgtgatggaattactgcagaaccaggaagaagggcacgcctgtttttcaagtatatcggaattcctcctaactcacccagttctgtcctttgggatccaggtggtaagtaggtgccgcctccgccataccgaggttctgcctgcagaggaagagaatgattcactaggggccgacgggactcacggcgcgggtgcaatggagtctgccgcgggcgtgctgatcaagcttttctgcgtccacacaaaggccctccaggatgtgcagatccgttttcagccccaattgaatccagacgtggtggcccccctgcctactcacacagctcatgaagattttacctttggggagagccgaccggaattagggtccgagggacttggttcagccgcccatggtagccaacctgacctcagacgaatagtggaattacccgctcccgccgacttcctttctctgtcgtccgagaccaaaccaaaattgatgactccggacgcgttcatgacgcccagcgccagtctgcagcagataactgcatcgccaagctcctctagttctggctcgagttcatcttctagcagttcaagtagctctctgacggcagtgagcgccatgtcctctacgtcagctgttgatccttctcttaccagacctccagaggagctgacactatcccctaaactacagctggacggctctttgactatgagctcatccggaagcctgcaggcgtctcctcgaggcttgctgcccgggctcctgccggctcccgctgataagctcactcctaagggtcccgggcaagtgcccactgctacatcggccctgagcttggagctccaggaggtcgagccactggggttaccacaggcttctccatctcggacgagatctcccgacgtaatcagttctgcctccaccgccctatcccaagatatccccgagattgctagcgaagctctttcgcggggattcggctctagtgcacccgagggtttagaaccagactcgatggcttcggccgcaagtgcccttcaccttttgtcccccaggccaaggccaggaccggagctcggaccccagcttggcctggacggaggccctggcgacggagaccgtcataacacaccatccctgctggaggcggcactcacccaggaagccagtacccctgactcacaggtgtggccaactgcaccagacatcactagggaaacttgctcaaccctggctgagtcacctcgaaatggcctgcaagaaaaacacaagagcttggctttccataggcctccttatcaccttctacagcagcgcgatagccaggacgcgtcagcagagcaaagtgatcacgatgatgaggtagcttctctcgccagcgcatccggtgggtttggtaccaaagttcctgcacccaggctgccagcaaaggattggaagactaaggggtcccccagaacctcacccaagctcaagcgcaagagtaagaaggacgatggcgatgccgccatgggaagcaggctgactgaacatcaggtggctgagccccccgaagactggcccgcacttatctggcagcagcagcgcgagctcgctgagctgcgccacagccaggaagaattgctccaacggctctgcacacaactggaaggacttcaaagtactgtgaccgggcatgtcgagcgtgccctggagacccgccatgaacaagagcagcgacgcctcgagcgggccctggccgaaggacaacaaaggggggggcagctccaggaacagctcacacagcaactgagtcaggctctttcgtccgctgtggccggaagattggagcgcagcatccgggacgaaataaagaagactgtgccgccttgtgtgagccggtctctggagccgatggctggccagttgtccaatagcgttgccaccaagttgaccgccgtagaagggtccatgaaagaaaacatcagtaagctgttaaaaagcaagaacctgacagatgctattgcaagagccgcagccgacacgctgcaagggcccatgcaggccgcctaccgggaggcctttcagagcgtggtccttccagcgttcgagaaatcctgtcaggcaatgtttcagcagatcaacgatagtttccgcttaggaacacaggagtacctgcagcagctggagtcacacatgaaatcccggaaggccagggagcaggaagctagagagcccgtgctggcccagttgcggggcctcgtgagcacactgcaatctgcaaccgagcagatggcggccaccgtggcaggatctgtgcgtgcagaggtacagcaccagctgcatgtggcagtcgggtccctgcaggagtccatattagcacaggttcagagaattgtgaaaggtgaagtatctgtggccctcaaagagcaacaagcagcagtgaccagctccattatgcaggctatgcgatcagccgccggaacccccgtacccagcgcccacctggactgccaggctcagcaggcacacattcttcagctgttacaacaaggccatctcaaccaggcatttcagcaggccctcacagcggcagacctaaatcttgtactgtatgtgtgcgagacggtggacccggctcaggtatttggccagccgccatgcccactgagccagccagtgctcctgtccctcatccagcagctggcctctgatcttggaactcggaccgacctgaagttgtcctaccttgaggaggcagtgatgcacctcgaccactctgacccaataacccgcgaccacatgggcagtgtgatggctcaggtcaggcaaaagttatttcagttcctgcaggccgagccccacaattcactcggtaaagcagcaaggcgtctgtctttaatgcttcacgggttggtaactccctcactcccctag

SEQ ID NO: 24033 - DNA, 576 bp, synthetic construct
  source 1..576: mol_type = other DNA; note = Synthetic coding sequence
atgagcagcggcgccgacggcggcggcggcgccgccgtggccgccaggtctgacaaaggcagtcctggagaagacggcttcgtacccagtgccctgggcacacgagaacactgggacgcagtttatgaacgggaactgcagacattccgcgagtatggcgataccggagagatctggtttggcgaggaatccatgaataggctgatcaggtggatgcaaaagcataagattccactggatgcctctgtgcttgacatcggcaccggaaatggcgtgttccttgtcgagttggcgaaattcgggttctccaacatcactggaatcgattactcacctagtgcgatacaactgagcggtagcatcatcgagaaggaaggactctccaacatcaaacttaaggttgaggactttctgaacttgagtacccagctgtccggcttccacatttgtattgacaaaggaactttcgacgcaatatcccttaaccccgacaatgctattgaaaaacggaaacagtacgtcaaatcactgtcccgtgtgctgaaggtcaagggattctttaacaatgtgatgtag

SEQ ID NO: 24034 - DNA, 2622 bp, synthetic construct
  source 1..2622: mol_type = other DNA; note = Synthetic coding sequence
atgggcaaccgggagatggaggagctgatccccctggtgaaccggttgcaggacgctttctctgccttgggacagagttgtctccttgagttaccgcagatcgctgttgtgggcggacagtccgctgggaagtccagcgttttggaaaatttcgtggggagggattttcttccacggggttctggaatcgtcacacgccgccccctcgtgctgcagctggtgacctcaaaggccgagtatgccgagttcctgcactgtaagggaaaaaagtttacagatttcgacgaagttcgcctcgaaatagaggctgagacagatcgggtcacaggcatgaacaagggaataagttcaatcccaataaatttacgcgtgtatagtccccacgtgctaaacctgacattgattgacctccctggaattactaaggtcccagtgggcgatcagccccccgatatagagtatcaaatccgcgaaatgatcatgcagtttattactagggagaactgcctgatactagctgtcacccccgcaaacaccgatctggccaactccgatgcgttgaaactagccaaggaagttgatccccaaggactacgtacaatcggcgtgatcacgaaactcgatctcatggatgaggggactgacgccagggatgtattggaaaataaactcctgcccctgcggagaggctatgttggtgtggtaaacaggtcgcagaaagacatcgacggaaaaaaggacatcaaagctgccatgctcgctgagagaaaattcttcctaagccacccagcataccggcacatcgccgatcggatggggacccctcacctgcagaaggtgctaaatcagcagttgactaatcatatccgcgataccttacccaatttcagaaataaactccagggtcagcttttgtccattgagcatgaggtcgaggcttacaagaactttaagcccgaagatcctacgagaaagactaaggcccttctgcagatggtgcagcaatttgcagtggactttgagaagagaatcgaggggtcgggagatcaggtcgacacgttggagctgtctggcggggcaaaaattaatagaattttccatgaaaggtttccctttgagatcgtgaagatggagttcaatgagaaagaactgagaagagaaatctcttatgctattaaaaatatccatggcattcggacaggcttatttacgcctgacatggccttcgaagccatagtcaagaagcaaatagttaaactaaaaggaccaagcctaaaaagcgtcgacttggtgatacaggagctcatcaatacggtcaaaaaatgtactaagaagttagccaattttcctcggttgtgcgaggagactgagcggatcgtcgcaaaccacatcagggagagagaaggtaaaaccaaagaccaggtgctgctgctgatcgacatacaggtgtcatacatcaacaccaaccatgaggattttatcggattcgccaacgctcagcagcgcagctctcaggtgcacaagaagaccaccgttggcaaccaaggaaccaacctgcctcctagtcgacagatcgtgatcaggaaaggttggttaacaatctctaacatcggaatcatgaagggcggaagtaagggatattggtttgtcctgactgccgagtccttgagttggtataaagatgacgaggagaaagagaagaaatacatgctgccactggataatctgaaggtacgggatgtcgaaaagtcctttatgtccagtaagcacatcttcgcattgttcaacacagaacagcgaaacgtgtataaggactataggttcctggaactggcctgtgactcacaggaagacgtggactcctggaaagcatccctactgagggctggtgtgtaccccgataagagcgtgatgaataaaaaggccgagaacgacgaaaacgggcaggctgaaaatttcagcatggaccctcaactggagcggcaggtggaaacaattcggaatctggttgactcctacatgtctatcatcaacaagtgcattcgcgatctcattcccaaaacgatcatgcaccttatgatcaacaacgttaaagattttatcaattcagagctcttggcgcagctgtattcttccgaggatcagaacactttgatggaggaatcagcagagcaggctcagaggagggatgaaatgctcagaatgtaccaagccctgaaagaagcactcgggatcataggggacatctctaccgcaaccgtttcaacgccagcacctcctcctgtggacgacagttggattcagcatagccgccgatctccacccccctcaccaacgacccagaggcggccgaccctcagcgcacccttggcaaggccgaccagtgggagagggcctgcccctgcaattccgtcaccaggtccccattctggagccccacccgtgcccttccggccagggcctctgcccccgttcccctcgtcctcagactccttcggcgccccaccgcaggtaccgtcccgacctacgcgagcccctccgtccgtcccttcccgccgcccacctcctagtcctacgcggcccaccataatccgaccactcgagtcatccctgctggactag

SEQ ID NO: 24035 - DNA, 3111 bp, synthetic construct
  source 1..3111: mol_type = other DNA; note = Synthetic coding sequence
atgcggaagcaggaggtgcggaccggccgggaggccggccagggccatggaaccggaagccccgctgaacaggtgaaggcgcttatggatctgctggccgggaaaggttcccagggctcccaggccccacaagccttggatcggactcccgacgcgccgctcggaccatgttcaaacgattcgagaatccaaaggcacaggaaggctttgctctcgaaggtcggcggcgggcccgagcttgggggaccctggcatcgcctcgccagtctgctgctggtggagggtttgacagacctgcagttgcgagagcacgactttacccaggtggaagctacccgcgggggcggccatcctgctcggacagtggccctcgaccgcctgttcctgccactgagcagagtgtccgttcctcctcgcgtcagcataactattggggtggctgggatggggaagaccactctcgtcagacattttgtgaggttgtgggcccacggccaggtcggcaaggacttttcgctcgtgttgccgcttaccttcagggatttaaatacccatgagaagctttgcgctgatcggctcatctgctccgtattccctcatgtgggagaaccatcactggccgtggccgtccccgcaagagccctcttgattctcgacggactggacgagtgtcgtaccccgctcgatttctctaacaccgtagcctgcaccgaccctaagaaggagattccggtcgatcacctaatcaccaacatcatacgcggaaatctgtttccggaggtttcaatctggattactagccgaccttccgcctcaggccagattccaggagggctggtggatcggatgaccgaaatccggggattcaatgaagaggagattaaggtttgcctggagcaaatgtttcctgaagaccaagccttactcggctggatgctcagtcaggtacaggcagaccgagcactgtatttgatgtgtacagtcccagccttctgcagattgactgggatggccttgggccacctatggcgttccaggactggaccacaggacgctgaactgtggcccccccgaacattgtgtgagctgtacagctggtacttccgtatggctctgtctggggagggacaggagaagggtaaagcctccccaaggatcgagcaggtggctcatgggggccggaagatggtggggactctgggaaggctggcttttcatggtttgctgaagaagaagtatgttttctacgagcaggacatgaaggcttttggtgtggatcttgcccttctgcagggggctccgtgttcctgtttcctccagcgggaggagacactggcctcttccgttgcgtattgcttcactcacctgtcattacaagaatttgtggcggcagcatattattacggcgcttcccgaagagctattttcgatctgtttaccgaatctggcgtgtcatggccccgtttgggatttttgacacactttcggtcagccgctcaacgagcaatgcaagcggaggacgggcgcctggatgtctttctccgattcctttctggcttgctctctccacgggttaacgccttacttgccggctctctgttggcccagggcgagcaccaggcttacagaacacaggtggccgagctgctgcagggctgccttagacctgatgcggcggtctgcgcccgagctatcaatgtcctccattgtctccatgagctccaacatactgagcttgccagatctgtggaggaggctatggagtctggtgccctggctagacttaccggtccagcacacagagccgcactggcatatcttctacaggtctctgacgcctgcgcccaggaggccaatttgtctctgtctttgagccaaggcgtgctgcaaagtttgctaccacagctgctgtactgcagaaagctgcggctggatactaaccagtttcaggatccagtgatggaattactgggaagcgttctgagtgggaaggattgcagaatccagaagatctcgctggccgagaaccaaatcagcaacaagggtgcgaaagctctagcccgatccctgctcgtaaaccgatctttgactagcctggacttgcgtggaaactccatcggaccacagggagctaaggcgctcgctgacgcgctgaagatcaaccgtactctcacttccctgtcactccaaggcaatacagttcgggatgatggcgcgagatcaatggcggaggccctggctagtaatagaactctcagtatgttacacttgcagaaaaatagcattggccctatgggggctcaacgaatggctgacttgaaacagaaccgtagcctgaaagaattgatgtttagcagcaacagcattggggacggtggcgccaaagcattggctgaggcccttaaggtgaaccagggcctggagtcactggacctacaatcaaactccatctcagacgcaggggtggccgctctgatgggcgctctgtgtactaatcagacgctcctctctctgtccctccgcgaaaattcaatcagtcctgagggggcccaggcaatcgctcacgcactgtgcgccaatagtaccctcaaaaatctcgatcttcagtggaattttattcaagcaggtgccgcgcaggctttgggacaggccctgcaactaaaccggagtctgactagcctggacctccaagaaaacgccattggcgatgacggggcatgcgcagtggctagagctctgaaagtgaacacggcgctcactgcactttacctacaggttgcttccatcggcgcttccggcgcccaggtccttggtgaggcattggccgttaatagaacactggaaatcttggatctgagggggaacgccatcggcgtggccggtgctaaagcactggcaaacgctttgaaggtgaatagctcgctacggcggctgaacttgcaagagaattctctgggcatggacggggcgatctgtatagcaaccgcgctgtcgggcaaccatcgcctgcagcacattaatctacagggcaaccatatcggggacagcggggcccggatgatctcggaggctatcaagaccaacgctccgacctgcaccgtggagatgtag

SEQ ID NO: 24036 - DNA, 2784 bp, synthetic construct
  source 1..2784: mol_type = other DNA; note = Synthetic coding sequence
atgttctggaagttcgacctgaacaccaccagccacgtggacaagcttctggacaaagaacacgtgacactgcaagaactcatggatgaggacgacatcctccaggagtgtaaggcacagaaccagaaactgctcgatttcctatgccggcagcagtgtatggaagaactcgtctctctcatcacccaagacccgcccttggatatggaggagaaggtgagatttaagtatcctaacacagcatgtgagctcttgacttgcgacgtgccccagatctccgatcgtttgggaggtgacgagtcactcctgtcccttttgtatgattttttggaccacgagcctcctcttaatccccttctggcgtcgttcttcagtaaaaccattggcaatctcatagctaggaaaactgaacaggtaataacgttcttgaaaaagaaagataaatttatctccctcgtgctcaaacatatcgggacttcggcgctgatggatctgctgctccggcttgtgtcatgcgtggaacctgctgggctgcgtcaagacgtgctgcattggctcaacgaagaaaaggttatccagcgtctggtcgagttgattcacccatctcaggacgaggaccgtcagtctaacgcttctcagacactgtgtgatatcgtcagactcggccgtgaccaggggagtcagctacaagaggcgttggaacccgatccgctgctgaccgctctggaatcccaagactgcgttgagcaactgctgaaaaatatgtttgatggtgatagaactgaaagctgtttagtgtccggcactcaggtcctgctgaccttgctagagactcgtagagtgggtacagaggggctggtggattctttttctcagggactggaacggtcctacgccgtctctagctctgtgcttcatggtattgagcctcgcctgaaagattttcaccagctgctgttaaatcctcccaagaagaaggccatcttgactacaattggcgtgctcgaggagcctcttggcaatgctcgcctgcacggggctcgcctgatggccgcgctgctgcacaccaacacacctagcataaaccaagagctatgccgattgaatactatggatctcctgttggatctcttcttcaaatacacctggaacaatttcctgcactttcaggttgagttgtgcatcgccgcgatcctgagccacgccgctcgtgaggaacgcaccgaggcctcaggatccgaaagtcgggtggagcctccccatgagaatgggaacaggtccctcgaaacgccgcagcccgcggcatcgttgcctgataatactatggttacacatctgttccagaaatgctgtctggtgcagcgcattctggaggcgtgggaggccaatgatcacacgcaggctgcgggggggatgcgccgtgggaacatgggccatctgacacgtattgcaaacgccgttgtacagaatctggagcgaggtcccgtccagacccatatttcagaggttatccgcggactgcccgccgattgccgcgggcgctgggaatcttttgtcgaagaaactctgacagaaacgaataggcgaaacaccgtcgatctggcattcagcgattaccagatccaacagatgacagccaactttgtggatcagttcggcttcaacgacgaggaatttgccgaccaggacgacaacattaacgcccctttcgaccgcatcgctgaaattaatttcaacatcgacgccgacgaggactccccaagtgccgccctctttgaggcctgctgcagcgaccgaatacagcccttcgatgacgacgaggacgaggatatttgggaggacagcgacacacggtgcgcagcacgggtaatggctagacctcgcttcggcgcgccccatgcctctgaaagctgcagcaaaaatggaccagaacggggaggccaggacgggaaagcttcattagaggcacatcgtgatgcccctggcgcaggtgcacccccggcccccgggaagaaggaagccccccctgtggaaggcgactctgaggctggcgcaatgtggaccgctgtgttcgacgaacctgctaacagcacccctacagctccaggcgtcgtccgtgacgtcggttccagtgtatgggcagctggtactagtgccccagaggagaaaggatgggcaaagttcacagattttcaaccgttctgttgcagtgagtctggaccacgctgtagttccccagtggacacggagtgcagccacgccgaaggaagccgaagccaggggccagagaaagcattcagtcctgcaagcccttgcgcttggaacgtgtgtgtgacacgtaaggcaccgctcctggctagtgattcctcatccagtggaggtagtcactccgaggacggcgaccaaaaagcagcctccgctatggatgcggtgagtcgaggcccaggtcgagaggcacctccgttgcccaccgtggccagaaccgaagaagccgtgggtagggtcggctgtgccgattctaggcttttgtcccccgcttgccccgcacctaaggaagttacggccgcccctgctgttgctgtccctcctgaagcgaccgtagccattaccacagcactgagtaaggcgggacctgccatccccacacctgcagtatccagcgctctggcagtggctgtgcctttaggcccaatcatggctgtcactgctgcacccgcaatggtggctaccctcgggaccgtgaccaaagacggacagatgcccagacaaaaggagctgccttag

SEQ ID NO: 24037 - DNA, 2220 bp, synthetic construct
  source 1..2220: mol_type = other DNA; note = Synthetic coding sequence
atgggcttcagcaacatggaggacgacggccccgaggaggaggagagggtggccgagccccaggctaactttaacacaccccaagccctgagattcgaggaactgctagcgaacttgctcaacgagcaacatcagatcgccaaggaattatttgagcagctgaaaatgaagaagccaagcgcaaagcagcagaaggaggtcgagaaggtcaaaccccagtgcaaggaggtgcaccagaccctgatccttgaccctgctcaacgcaaacggctgcagcaacagatgcagcaacacgtccagctgttgacacagatccaccttttagcaacctgcaacccaaatctgaacccagaggcaagctctacacggatctgcctgaaagaactgggtaccttcgcccagagctcaatagcgctgcaccaccagtacaaccccaaattccagacattgttccagccttgtaatctcatgggcgcgatgcagctgattgaggattttagcacacacgtgagcattgattgtagccctcataagactgtcaaaaagactgcaaacgagttcccttgcctgcccaaacaggtcgcctggatcctggccaccagcaaagtttttatgtaccccgagttgctgcccgtttgttctctgaaggcaaagaatcctcaggacaagatcctctttaccaaggcggaggataacttactcgccctgggcttaaagcattttgagggaacggaattcctgaacccactcataagtaagtatctgctgacctgtaagaccgccaggcagctcacggtgaggattaaaaatctaaacatgaatagggcgccagacaacattattaagttctacaagaagaccaaacagctcccggtgcttggaaagtgttgcgaagaaatccagccccaccaatggaagcctccaattgaacgggaggagcaccggctgcctttttggctgaaagcttcgctgccctccattcaggaagagttaaggcacatggccgatggcgctcgggaagttggaaacatgaccggaacaacggagatcaattctgaccaaggtttagagaaagataacagcgagcttggttctgaaacaaggtacccactcctactccctaaaggcgtcgtactcaagctcaaaccagtggcggaccgtttccccaagaaggcgtggcgacagaaacggtcctctgtcctgaaacccctgctaattcagccttctccttctcttcagccatccttcaaccctggcaaaaccccagcgcagagtactcattcagaggccccgccaagcaaaatggtcctccggatcccgcatcctatccagcctgcaactgttttacagacagtccctggggtcccgcctctgggcgtcagtgggggtgagtctttcgagagccccgctgccctgcccgccatgccacctgaggcccgcacttccttccctctcagcgagtctcagaccctcctctctagcgccccagtccccaaggttatgatgccctctcccgcgtctagtatgttccgtaagccctacgtgagaaggcgtcctagcaagcggcggggtgcacgagctttccgttgcatcaaaccagctcctgtgatccacccggctagtgtgatcttcacggtgccagccacaacagtcaaaatcgttagcctaggtggtggttgtaacatgatacaaccagttaacgctgcggtcgcccagtcgccccagacgattccaatcgcaaccctgctggtgaaccccactagttttccttgtccactgaatcagcccctggtggcctcaagcgttagcccactgattgtcagtggtaattccgtcaatctccctatcccctcgacaccggaagacaaagcccatatgaatgtagatattgcctgcgccgtggccgatggagaaaacgcattccaggggctggaacccaaacttgaaccacaggaactatctccactgtcagccactgtttttccgaaagtcgaacactcacccgggcctccacctgtggataaacagtgccaggaaggcctttctgaaaacagcgcctaccggtggacggtcgtgaagactgaagaagggcgccaggccctggagcctttgccccaggggatccaagaatctctcaacaactcttctcccggtgacctcgaggaagtggtgaagatggagccggaagatgctaccgaggaaatttccggattcctctag

SEQ ID NO: 24038 - DNA, 1911 bp, synthetic construct
  source 1..1911: mol_type = other DNA; note = Synthetic coding sequence
atggagaaggccgtgaacgacggcagccacagcgaggagctgttctgccacctgaaaactatttcagaaaaagaagacctgcccagatgtacgagtgaatctcacctctcctgccttaaacaggacatactcaatgagaagactgaattggaagccacactcaaagaagcagaactcgtaacacatagtgttgaactcctgctacctttgttcaaggacactatagaaaaaattaactttgagaatgccaatctgtctgccctcaacctgaagatttcggagcaaaaagagatcctgatcaaagagcttgacacgtttaagtcagtcaaacttgccctggagcatctccttcgcaagagggattacaagcagaccggtgataacctgtcatcgatgctgcttgagaatctgaccgacaatgaaagcgaaaacacaaatttaaaaaagaaagtgttcgagaaggaagcccatatacaagagctgtcctgtctatttcaatctgagaaggcaaataccttaaaagcaaataggttttcccaatcagtgaaggtcgtgcacgaacgactccagatccagattcacaagcgggaagcagagaacgacaaactcaaagagtacgtgaagtcacttgagaccaaaatcgccaagtggaatcttcaaagcaggatgaacaagaatgaggcaattgtgatgaaagaggcttcacgccaaaaaactgtggcactgaaaaaagcatcaaaagtgtacaaacagagactagatcatttcaccggagctattgaaaagttgactagtcagataagagatcaggaagcgaagctgtccgaaactatttccgcgagtaacgcttggaaatctcactacgagaagattgtcatcgagaagactgaactagaggtgcaaatcgaaacaatgaaaaagcagatcatcaacctcctggaggacctcaagaagatggaagaccacggaaagaactcatgtgaggagattctgcgaaaagtccactctatcgagtacgagaacgagaccctgaaccttgagaatactaagctcaaactcaggttcccctgtagaattacagagtcaaaaaacatgaacatcctcatagtgcttgatatgctctgctacattagtagtgagaagacaactttagctgccctaaaggacgaagtggttagcgtggagaatgaactgagtgagctccaggaggttgagaaaaagcagaaaactctaatagagatgtataaaacccaggtccagaaacttcaggaggctgccgaaatcgtgaagtcgaggtgcgaaaacctgcttcataagaacaatcagattaccaaaacaaaaaacaaaaacgtggagaaaatgaggggacagatggagagtcacctcaaggaacttgagcgcgtctgtgacagccttacagccgctgagagaagattgcatgagtgccaggagtctcttcagtgctgtaaagggaagtgtgctgatcaggagcatactattagagaactccaggggcaggtcgatggcaatcacaacttattaactaagctgagtctggaggaggagaactgcttaattcagctcaaatgtgagaacctccagcagaaactcgagcagatggatgccgaaaataaagagctcgaaaaaaagcttgcaaaccaggaggagtgtctgaagcatagcaacctcaagttcaaggaaaaatcagctgaatatacagccttagcgcgtcaactggaggccgccctcgaagagggtagacagaaggtggccgaggaaattgagaagatgtcctcacgcgaaagcgccctgcagattaaaatactggatttagagacagagcttagaaagaaaaacgaggagcagaaccaactcgtttgtaagatgaacagtgatcctgaaacaccctag

SEQ ID NO: 24039 - DNA, 873 bp, synthetic construct
  source 1..873: mol_type = other DNA; note = Synthetic coding sequence
atggccgccgtggagaagcggcggcaggccgtgcccccccccgccgggttcaccgacagtggtcggcagtccgtgagccgcgctgccggcgctgctgaaagtgaggaagattttctcagacaggtgggtgtgacggaaatgttgagggccgcactactgaaggtcctggaggctaggccggaggagcccatcgcattcctcgcccactattttgaaaatatgggcctgcgttcacccgtgaatggaggagccggggagccgccaggccagctgttgctgcagcaacagagactggggcgagcattgtggcatctacgcctcgcccatcactctcaacgcgctgcattcaacaataatgtgtccgtggcgtacgagtgtctgagtgctggtgggaggcggaaacggcctggccttgacggcagaacatactccgagctactgcgccgaatctgcagggatgggcaggccccggaggaagtggtggctccactcctccgaaaggttcagtgccgggatcatgaagccgtacccctgagtgtgttccgcgcggggacactcacctgcttcgtgcttttagagttcgttgctcgagctggggcgctttttcagctgctggaggattccgccgccgctgtcgccgaccggagagtcggacaggctgtgctggacacactggaaggcgcattgcaggcctcggatgcagccgccccagctcgattcttggaagccggaagtcgacttggtcccgattcccttgcccttgctctggacagggctgtgggtgggcgccggccaagtgcgcccatgacccgggaggaatttcttgagagagctgcggcgctatttatcgccaaagttaaaccagtggggtag

SEQ ID NO: 24040 - DNA, 1221 bp, synthetic construct
  source 1..1221: mol_type = other DNA; note = Synthetic coding sequence
atggccgacagccagctgttctgcgtggccgaggagcggagcggccactgcgcagttgtcgatgggaatttcctttacgtgtggggggggtacgtttccatcgaggacaacgaggtatacctgcctaacgatgagatatggacttacgatattgactctggcctctggagaatgcatctcatggagggggagctgcctgcgtctatgtccggcagctgtggtgcgtgcataaacggcaagctgtatatattcgggggctatgacgataaaggctattcaaaccgtctgtattttgtcaacctccgaacaagagatgagacatatatctgggaaaaaatcacagacttcgaagggcagccgccaaccccacgtgacaagctctcgtgttgggtctacaaggacagactgatttacttcggaggttatgggtgtcggagacactcagagctgcaggactgcttcgacgtccatgatgcatcctgggaagaacagattttctggggttggcacaatgacgtccacatatttgacactaagacccagacctggttccagcccgaaatcaaggggggagtgcctcctcagcccagggctgcccatacatgcgcagtgctagggaataaaggttacatcttcgggggcagagtgctgcagacacgcatgaacgacctccattatctgaacctagatacctggacatggagcggccgcattaccattaacggcgaaagcccaaagcaccggagttggcataccctcacccccattgccgacgataaactgtttctgtgtggcggtttgtccgctgacaacatccctctgtccgatgggtggatacataacgttaccacaaactgttggaaacagttgacacatcttccaaagactagaccgagactctggcacactgcctgcctgggcaaggaaaacgagattatggtgtttggggggtcaaaagatgacctcctcgccctagacaccgggcactgtaatgacttgcttatatttcagacccagccctactctctgttgaggtcatgccttgactgcatcggcaagaactctattatgttggagagccagatctctcttctgcctcctaagctgcttcagcaggtgttgaagaagatcactttctgggctgccgccaatcacagagaggaacagcgggttcagaaggaggaaacagagaataagtatcaatggatcagcagtaactag

SEQ ID NO: 24041 - DNA, 1113 bp, synthetic construct
  source 1..1113: mol_type = other DNA; note = Synthetic coding sequence
atggtgcagcccttcaccaccatccccttccccccccccccccagaacggaatccccactgaatacggggtccctcacacccaagactatgccggtcaaactggcgagcacaaccttaccctttacggatctacgcaggcgcatggggaacagtcttctaactcaccttcaacacaaaacgggagcctaacaacagagggcggcgcacagaccgacggtcagcagtcccagacccaatcgagcgagaatagcgagtctaagagcacacctaaaaggttgcatgtgtctaatattccattccggtttcgggatccagatctgcgtcagatgttcggacagttcggtaagattttggacgtcgaaatcatatttaatgaaaggggaagcaaaggatttggcttcgtcacattcgaaaactctgcagacgctgatcgagctcgcgagaaattgcacggaacagtcgtggaaggtcgtaagatagaagtcaacaacgccactgcccgtgtaatgactaataagaagatggtgaccccatacgccaatgggtggaagctgagcccagttgtgggtgcagtgtatggacctgaactgtatgctgccagctctttccaagccgacgtctcccttggaaacgatgccgccgtccctctctctgggcgtggtggcatcaacacatacatcccgttgataatccctggcttcccttacccgaccgctgccaccactgcagcagcctttcgcggggctcacctcaggggaaggggcagaactgtgtatggagctgtgagagcagtcccaccaaccgctatacccgcctaccctggcgtggtctatcaagacggtttctatggggcggacctgtatatcgaaagtgcgaactgtttccgctcaaatagagtcgacatgcagccaacagatatgcactctctcctgttgcagccccaacccccactgctgcagcctctccagccattgaccgtgacggtcatggctggctgtacgcagcctactcctacaatgccccttcccctgccactggcgatggagttggccctgtggcgcgtttatacagaagtcgccactgccgaccttcctccaaccgaagttacatag

SEQ ID NO: 24042 - DNA, 534 bp, synthetic construct
  source 1..534: mol_type = other DNA; note = Synthetic coding sequence
atgagcgaggacagcgagaaggaggactacagcgaccggaccatctcagatgaggatgagtcagacgaggatatgttcatgaagtttgtgtcagaggacctgcatcgctgtgctcttctcactgcggatagtttcggtgacccattctttcctagaacaacccagattctgctggagtaccagctggggcggtgggtgccccgactgagggagccacgagacctgtacggagtgtcctctagcggccccctgtcccccacccgctggccgtaccactgcgaggtgatcgacgaaaaggtgcaacatatagacggcgtcagttgctggagcgagtcccaccaggcaggggctcaatggtgcgacttggggagcctgcagcccccgcccccacgctttaaacgcttcgcatgtttcagcctgctgagctccagggactaccgccgggtcccaccccgcagcgcgaactttgtgtttcttgtggagacagggttccatcacgtgggacaggatgggcttcggttactgacctcctag

SEQ ID NO: 24043 - DNA, 1827 bp, synthetic construct
  source 1..1827: mol_type = other DNA; note = Synthetic coding sequence
atgagcgacaagagcgacctgaaggccgagctggagcggaagaagcaacggctggcccagatccgcgaggagaaaaagcgaaaggaagaggagcgcaaaaaaaaggaggctgatatgcagcagaagaaggaacccgttcaagatgacagtgatttagatcggaagaggagagaaactgaagcgctactgcagtctatcggaatttctcccgagccccccctggtgcccacacccatgtcaccatctagtaagtcagtgtcgacgccgagcgaggcaggcagccaggactcaggcgacctagggccacttaccagacgccgcttacacaagctgggtgtgagcaaagtgacccaggtggatttcctccctagggaggttgtcagctactccaaggaaacccagacccccctggccacccaccagtcagaagaagacgaggaggacgaggagatggtggaatctaaggtgggacaagattccgagttagagaaccaggataagaagcaggaggtgaaggaggcccctcccagagaactgacagaagaggagaagcagcagattctccactcggaagagtttcttatcttctttgatagaacaataagggtcatcgaacgggctctagctgaggactccgacatatttttcgactactctggccgtgagcttgaggagaaagatggcgacgttcaggccggagccaacctgtcgttcaaccgccagttctatgatgagcactggtctaaacaccgagtggtgacgtgtatggactggtccttgcagtaccccgagctgatggtggccagttataacaacaatgaggatgccccacacgaaccagacggcgtggcactcgtgtggaacatgaaattcaagaaaactacacctgagtatgtcttccactgtcagagttcagtcatgagcgtgtgcttcgcgagattccacccaaacctggtagtgggggggacctatagtgggcaaattgtgctctgggataaccggtcccaccgtagaacaccagttcagagaacccccctgtcagcagctgctcacactcacccggtgtactgcgtcaacgtggtgggaacccagaatgcgcacaatctgattacggtttcaaccgatggcaagatgtgctcctggtctctggacatgttaagcacacctcaagaatctatggaattggtgtacaataagagcaagcctgtcgccgtgaccggtatggctttccctacaggtgacgtgaataatttcgtcgtgggtagtgaagaggggacggtctatactgcatgcagacacggcagcaaggctggtatcggtgaggtttttgagggccatcagggtcccgtaaccggaattaactgtcatatggctgttgggccgatagacttttctcatttatttgtgacctcctctttcgactggacagtaaagctatggacgaccaagcataataagccgctgtatagtttcgaagacaacgccgattacgtctacgacgtaatgtggtcgccagtccaccctgcactgttcgcgtgcgtggatggaatgggccggcttgatctctggaaccttaataacgacaccgaggttcctaccgcaagcgttgccatcgaaggggcttccgcgctgaacagggtgagatgggcccaggccgggaaggaggtagccgtcggagactccgagggtcgcatttgggtttatgatgttggggaactagccgtgccacacaacgacgaatggactcgctttgctaggacacttgttgagatccgcgctaacagagctgacagcgaggaggaaggtacagtggagctcagtgcctag

SEQ ID NO: 24044 - DNA, 627 bp, synthetic construct
  source 1..627: mol_type = other DNA; note = Synthetic coding sequence
atggagggcgccgccgcccccgtggccggcgaccggcccgacctgggactgggtgcacccggcagcccaagggaagccgtggccggtgcgaccgctgccctcgaacccagaaagcctcatggcgtgaagagacaccaccacaagcacaacctgaaacaccgctacgaactccaggagacccttggcaaaggtacctacggaaaagtcaagcgcgctactgagaggtttagcggaagggtggtggccataaaatcaatccggaaagacaaaatcaaggacgagcaggacatggtccacatcagacgagaaatcgagattatgtcaagtttgaaccaccctcacatcatcagcatatatgaagtgtttgaaaacaaagacaaaatcgtgatcattatggagtatgccagtaaaggagagctgtacgactatatcagtgagcgcaggcgcctctccgaaagggaaaccagacacttctttagacagatcgtctctgcagtgcattactgtcacaagaacggcgtagtgcatagggatctaaagctaaaacgcccatcacgagaaaaccaggtgaccacactacctcagtctgcagttagcctgagatcatgctggacggtaatgatgtag

SEQ ID NO: 24045 - DNA, 990 bp, synthetic construct
  source 1..990: mol_type = other DNA; note = Synthetic coding sequence
atggaggtggccgagcccagcagccccaccgaggaggaggaggaggaggaggagcactccgcagaaccgcgcccccgtacacgatccaaccctgaaggggcggaagatcgcgccgtgggcgcccaagcttccgtaggtagtcggtctgaaggtgagggcgaagcagcctcggcagacgatgggtcgctcaataccagtggcgctggcccaaaaagttggcaggtgccacctccggccccagaagtccagatacgcactccccgcgtaaattgccctgagaaggtcatcatttgcttggacctaagcgaagagatgagccttccaaaactggagtctttcaacggctccaaaactaacgccctcaatgtttcccagaaaatgatcgagatgtttgtgcgtaccaagcacaagatcgacaaaagtcatgagtttgccttggttgtcgtcaacgacgatactgcatggctttctggcctcacatctgacccaagggaactgtgctcctgcttatatgatttagagacggctagttgcagcaccttcaatctggagggactgttctccttaatacagcagaagactgagctcccagtgacagaaaacgtccagaccattccgcccccttacgtggtacggacaattttggtctactcccgcccgccctgccaaccacagtttagcctgaccgaacccatgaaaaaaatgtttcagtgtccatactttttcttcgatgttgtctacattcataatggtacagaggaaaaggaggaggaaatgagttggaaggatatgttcgctttcatggggtcgctggacactaagggcacatcatacaaatatgaggttgcccttgctgggcctgctcttgaattgcacaactgtatggccaaattgctggcccaccctctgcaaagaccctgtcagtcacatgcctcgtatagcttacttgaggaagaggacgaggccatcgaggttgaagctactgtttag

SEQ ID NO: 24046 - DNA, 885 bp, synthetic construct
  source 1..885: mol_type = other DNA; note = Synthetic coding sequence
atgagccagcccgccggcggccggcggaagccccggaccctgggcccccccgtgtgcagtatccgcccattcaagtcttctgagcagtatctggaggcgatgaaggaggatctggccgaatggctgcgagatctctacggtttggatattgatgccgcaaactttctccaagtcctggagactgggctggtgctttgccagcatgcaaacgtggtgacagacgctgccttagcctttttagccgaggccccggctcaggcccaaaagatcccaatgcctagggttggcgtcagctgcaatggcgccgcacaaccgggcacctttcaggcaagagacaacgtcagcaatttcatacaatggtgccgtaaagaaatgggtatacaggaggtgctgatgtttgaaacagaggacctggtactgcgcaaaaacgtgaaaaacgttgtcttatgtttacttgagctcggacgccgggcatggcgtttcggcgttgctgcccccacactcgttcaactcgaggaggaaatcgaggaagaagtacgaagagagctggcactcccccccctgcctcagcctggaccggatggagccgagccttgtgaacctctgcatgtgccctcagccgtgctccatggccagtccgtttacgtgttcctcggaccagcccgtcagcctcccaaagaccggctcctgagggccgttctggggtccaagggcggcgaagcctcccgggtggatggagccagcgttggggaggaagaggaggagggcaaagaagaaaaagaaccggccgctcctcttgagtcctccccacagcctcctgagggtctccagcctcactggctgaatcaggcacctttgccgccagaggaagaaagctgggtttag

SEQ ID NO: 24047 - DNA, 1554 bp, synthetic construct
  source 1..1554: mol_type = other DNA; note = Synthetic coding sequence
atggagaccgacctgaacagccaggaccggaaggacctggacaagtttattaagttctttgctctgaagaccgtgcaggtgattgttcaggccagactgggcgagaagatctgtaccagaagcagctccagtcccacaggcagcgactggttcaatctcgccatcaaggacatccccgaagttacgcacgaggccaaaaaagccctggctggtcaattgccggccgtggggcgaagcatgtgtgtggaaatcagcctgaaaacctccgagggtgattccatggaactggagatctggtgccttgagatgaatgaaaagtgcgacaaggagattaaagtatcatatactgtgtacaatcggctgtccctattgctgaaaagtctgctggctatcacacgagtgacgccggcttacagactgtctcgcaagcaaggccacgagtacgttattctatatcggatttatttcggagaagtacagctgtctggcctaggagagggctttcagaccgtccgcgtgggcacagtggggacccccgtgggcactatcaccctgtcatgcgcatatcgtatcaacttggcctttatgtctactcggcagttcgaacgaaccccccccatcatgggcattatcatcgaccacttcgtggaccgcccatacccatcatcatcccctatgcacccttgtaattacaggacagctggcgaggacactggagtcatctacccaagtgtagaggattcccaggaggtgtgcaccacaagcttctcgacgtcccccccatctcagctgtctagctctaggctgtcctaccagcccgccgccctaggggtcggcagcgctgacctggcctaccccgtggtctttgccgcaggccttaacgcaacccatccacaccagctgatggtcccaggcaaagagggcggcgtgcctttggcccctaatcagccggttcacggcacccaggctgaccaggagcgtctcgctacatgtactcccagcgaccgcacacattgtgcagcgactccttcaagctccgaggacactgagaccgtgtcaaattcatctgaaggccgcgcgtcaccccacgacgtccttgagacaattttcgtcaggaaagtaggggctttcgttaataaacctattaaccaggtcacactgactagccttgatatacccttcgccatgtttgctcccaaaaacttggagttggaggatacagatccaatggtcaacccacccgacagcccagagaccgagtcacccttgcaggggtcactccattccgatggcagtagtggcggcagcagcgggaatacacacgatgatttcgttatgatagatttcaaaccggccttttccaaggatgatattctcccgatggatctagggactttttaccgcgaatttcaaaaccccccccagctgagctctctgagcattgacatcggagcgcagagtatggcggaagacctcgactcccttcctgaaaagcttgccgtgcatgagaaaaacgtccgggagtttgacgcgtttgtggagacgctgcagtag

SEQ ID NO: 24048 - DNA, 951 bp, synthetic construct
  source 1..951: mol_type = other DNA; note = Synthetic coding sequence
atggccaccttcgtggagctgagcaccaaggccaagatgcccatcgtaggactgggcacatggaaatcaccactgggaaaggtgaaagaggcagtgaaagttgcaattgacgcgggttatcggcatatcgattgtgcctatgtttaccagaatgagcatgaggtgggtgaagcaatccaggagaagatacaggagaaagctgtgaagagggaggatctctttatcgtctcaaaactatggcccacgttcttcgaacgtccacttgtccgtaaggcgtttgagaaaacattgaaggatctgaagttgagctacctggacgtgtacctcatccactggccccaggggttcaagtcaggcgatgatctgttccctaaggatgacaaaggcaacgcaatcggtgggaaagccactttcctggacgcatgggaagccatggaggaactggtagatgagggactggtaaaagcactgggcgtgtctaactttagtcatttccaaattgagaagttgctcaataaacccggcctgaagtacaaaccagtcactaatcaggtcgagtgccatccatatctgactcaagagaagctcatccaatactgtcactctaaggggatcactgtgacagcctactcccctttggggagcccggacagaccgtgggcgaagcctgaggacccaagtctgctggaagacccaaaaataaaagaaatcgccgccaagcataagaagaccgctgcacaggtcctgattagatttcacatacagaggaacgtgattgttattcccaagtcagtgacccccgcacgtattgtcgaaaatatacaggtcttcgactttaagctgagcgatgaggaaatggcaacaattctgtctttcaaccgcaattggcgggcatgtaatgtgcttcagtcatctcacctggaggattaccctttcaatgccgagtattag

SEQ ID NO: 24049 - DNA, 8274 bp, synthetic construct
  source 1..8274: mol_type = other DNA; note = Synthetic coding sequence
gagcccaaggtggtgttcgccaaggagcagcccgtgcaccgggaggtacaggctcaagccggagcctccactaccctgagttgtgaggtagcccaggcccaaaccgaggtcatgtggtacaaagacgggaaaaagctctcgttttcaagtaaagtgagaatggaggcagtcggatgtacacgtcgcctggtcgtgcagcaggctggccaggctgttgctggggaatactcttgcgaggctggctcacaacggctgtcgttccacctccacgtggcggaacccaaggcggtcttcgctaaagaacagcctgctcacagagaggtacaggctgaagcgggcgctagtgccactctgtcttgtgaagtagcccaggcgcagacagaggtcacttggtacaaagacggaaagaaactgagcagttcactcaaggtccacgtcgaggcggcgggatgtacgcgacgcctggtggtccagcaggctggacaggccgacacaggggagtatagctgcgaggccggcgggcagcagttgagcttccgcctgcaagtcgccgagccaaaagccgtctttgcaaaggagcagcccgcaagccgcgaggtccaggccgaagctggaacatctgctacgctgtcttgtgaggtggcccaggctcagacagaggtgacatggtataaggacggtaaaaagctgtcttcaagttcaaaagtgaggatggaggcagtgggttgcacacgccggttagtggtgcaggaagccgggcaggctgatgccggggagtattcctgcaaagcaggcgatcagcggttatcatttcatttacacgtcgctgaacccaaggtggtttttgccaaggagcagcctgcacatagggaagtgcaggccgaagctggggcatcagcaactctttcttgtgaggtggctcaagcccaaaccgaggttacgtggtataaggatggaaaaaaattgtctagctcttctaaagtccgcgtagaggccgtgggatgcactagacggctggtggtccagcaggcaggtcaagctgaagccggggaatattcttgtgaggccggtggacagcaactgagcttccgactgcaggtggctgagccaaaagcagtgttcgccaaggagcaggtggtctttgctaaggaccagccagtccatcgcgaagttcaggcagaggccggaacttcaacaatgctgagttgcgaagtggcccaggcccagaccgaggtcatgtggtataaggacgggaagaaattgagttctagcagcaagatgcgggtcgaagcagtgggctgcacccgcagactagtggtgcaggaagctggccaggctgacgccggggaatattcctgcgaggcaggaggccagcgtctcagtttccatcttcacgtcgctgaaccgaaggtggtgtttgctaaggagcagcctgcctgccgggaggtacaagccgaagccggtgcgtccgccacccttagctgtgaggtggcccagggccagatggaagtgacctggtataaggacggcaagaagctcagtagcagctccaaagtgcatatggaagcatcaggctacactcgaaggctcgtggtccagcaggccgggcaagcagatgcaggtgaatatagctgtgaagctggaggccagaggcttagtttccgcttacacgtggcagagctcgaaccccagatttcagaaagaccttgtcgccgggaacccctagtggtcaaggaacatgaggatatcatcttaaccgccacactggccacccctagcgccgccaccgtcacgtggctgaaagatggcgtcgagatcaggcggtcgaaaagacacgagaccgccagccaaggggatacacacacgttaacagtgcacggagcccaagtgttggatagcgcaatctactcctgcagggtgggagcggagggccaagatttccctgtgcaagtggaagaggtcgctgctaagttctgcagactcctggagcctgtgtgtggcgaattaggtggaaccgtgaccctggcctgtgaactctcccccgcctgtgcagaggtggtctggcgatgtggcaatacccagttacgggtgggaaagcgtttccagatggtagccgaaggtccagtgcgctctttgacagtgttaggacttcgagccgaagacgccggtgagtacgtctgcgagagccgcgacgaccacacttctgcacaactcacagtgagcgtgccgagggtggtgaagtttatgtctggactatccacagttgtagccgaagaaggcggtgaagctaccttccagtgcgtggtctcgccctcagatgtcgcagtggtatggtttcgcgatggcgcgcttctccagccaagtgaaaaatttgcaatcagccagtcgggtgcatcacatagccttaccatcagcgacctagtgttggaggatgctggacagattacagtggaagcagagggcgcgtcatccagtgctgctctgagagtgcgggaggccccagttctcttcaaaaagaaattagagccacagaccgtggaggaacgatcaagtgtaactctagaggtggaacttactaggccctggcctgagctgagatggacacggaatgctacggccctggcgccggggaagaatgttgagattcatgctgaaggagcaaggcatcgattggttttgcacaacgttggatttgccgatcgtggcttttttggatgcgagacacccgacgacaaaactcaagcaaagcttaccgttgaaatgaggcaggtgaggttagtgcgcggactccaggccgtggaggcaagagagcagggcacagccactatggaagtccagctgtcgcatgccgacgttgatggctcttggactagagacggtctgagatttcaacagggtccaacgtgccacctcgcggtgagagggccaatgcacaccctgactttgagcgggctcaggcccgaggacagtggactcatggtattcaaggctgagggagttcataccagcgcccgcttagtggtaactgaactaccagtcagcttttctcggccccttcaggacgttgtaaccacggagaaggaaaaggtcactctggagtgtgagctaagccgccctaatgtcgatgtgaggtggcttaaggacggggtggagctccgcgctggaaaaaccatggcaatcgccgcacagggagcctgtcgcagtctgaccatttatagatgtgaattcgccgatcagggagtatatgtgtgcgatgcccatgatgcccaatcctcagcctccgttaaggtccagggacgaacttatacactcatttacagacgggtgctggctgaagacgccggggaaatacaatttgtcgctgagaacgccgaaagtagagctcagttgagggttaaggaactgcctgttacgctcgtcagacctctcagggacaagatagccatggagaaacataggggtgtgctggagtgccaggtgagccgtgccagtgcccaagtcaggtggtttaaggggtctcaagagttacaaccaggccccaagtacgaactcgtgagtgatggactgtatcgcaagctgatcatatctgacgtgcacgcagaggatgaggatacctacacctgtgacgccggagacgtgaaaacaagtgctcagtttttcgtcgaagaacagagtatcacaattgtgagggggctgcaggatgtaaccgtcatggagccggctcctgcgtggtttgaatgcgaaacgagtatcccgagcgttcgaccccccaagtggctcctgggcaagaccgtgctgcaggcaggcggtaatgttggactggagcaagagggaacagtccaccgactgatgctgcgtaggacctgctccacaatgaccggtcctgtgcactttacagtgggtaaatcgcgctcctcagccaggctggttgtgtcggacataccagtggttctcaccagaccactcgagcccaagacaggtagagaactgcagagcgtggtgctgtcctgtgacttccgacccgcccccaaggccgtgcagtggtataaggatgacacccccctcagcccatccgagaagttcaagatgagtctggagggtcagatggcagaactgcgcatcctgagactgatgcccgctgatgccggagtgtacaggtgccaggctggcagtgcgcactcatcaactgaggtgacggtcgaggcccgggaggtaacagtgacaggccctctccaggacgccgaggctaccgaggaagggtgggcatctttcagttgtgagctttctcatgaggacgaggaagtggagtggtctctgaatggcatgcctctgtataatgactctttccatgaaatttctcacaaagggcgacgccacacactcgttcttaaaagtatccagcgtgctgatgccggtattgtgagggcttcatctctgaaggtgagtacttcagctcgtctggaggtgagagtgaagccagtagtcttccttaaggctttggacgacctgtcagccgaagaaagagggaccctggccctccagtgcgaggtcagtgatcctgaagctcacgtggtatggcggaaagacggtgtgcagcttgggccctccgataagtacgattttttacatacagcaggaactcgcgggctcgtggtgcacgacgttagtccagaggacgccggactttatacgtgtcatgtgggcagcgaagagactagagcgcgcgtaagggtacacgacttgcatgtcggaatcacaaagaggctgaagaccatggaagtgttggagggcgaatcctgttccttcgagtgtgtgctcagtcacgagagtgcctctgatccagccatgtggaccgtcggtggtaaaacagtcggctccagctctcgttttcaggctactcgtcagggacgaaaatacatccttgtggttagggaggccgcgccatcggatgccggggaggtagtcttcagcgtgcgcgggctgacatcgaaggcctccctgatcgtgcgggaaagacctgccgctatcattaagcccctggaggaccagtgggtcgccccgggagaagatgtggagctccgctgtgaactaagcagagccggaactcccgtacattggctcaaggaccgaaaggcaatcaggaagtctcagaaatacgatgtggtatgtgaaggtaccatggccatgctggtgatcagaggcgcgagtttgaaggatgccggggaatatacctgtgaggtcgaggcctccaagtcaacagccagcctgcacgtggaggaaaaggccaactgcttcaccgaggagctgacaaatttgcaagtggaggaaaaaggcactgcagtttttacgtgcaagacggagcaccctgcggcaacagtgacttggcggaaaggactgttagagctaagagccagcgggaagcaccagccctcacaagagggactcactctgagactcaccatttctgctctggaaaaggccgacagtgatacgtatacctgcgatatcggccaggcacagtcacgcgctcagttgctggtccagggccggagagttcatattattgaggatctggaggacgtcgatgtccaggaggggtctagcgccacgttccggtgcagaatcagccccgcaaactatgaaccggtccactggttcctagataaaaccccattgcacgctaacgagctgaacgagatcgatgctcaaccggggggataccacgtcttaaccctgcggcagcttgccctgaaggatagtggaaccatctacttcgaggccggggaccagagggccagcgctgctcttcgagtaaccgaaaaacccagtgtcttctctcgcgagcttactgatgccactatcactgaaggcgaagacttaaccctggtgtgcgagacaagcacctgcgacatcccagtctgctggaccaaagatgggaagactcttcgcgggagtgccaggtgccagttatcccacgaggggcacagagcccagctcctgattaccggagctaccctgcaagattctggacggtataagtgcgaggctggcggcgcctgctccagcagcatagttagagttcacgccagacccgtgcggtttcaggaggctctgaaggacttagaagtcttggaaggaggcgcagcaactctgcgctgtgtcctatcaagtgtggctgcccctgtcaaatggtgctatgggaacaacgtgcttaggcccggtgataaatactcattgaggcaggagggcgccatgctggagctggtggttcgtaatttgcgcccgcaggattcaggtcgttacagttgctcttttggcgatcagactacctctgcaaccctgaccgttaccgcactgccagcgcagtttatcggcaagctgcggaacaaagaggctaccgaaggggcaacagccaccttaaggtgcgaactgtccaaggctgcaccggttgagtggcgaaaggggagtgaaactctccgggacggcgaccgctactgtcttaggcaggatggtgccatgtgcgaactgcagatacgggggctggctatggtggacgccgcggaatattcatgtgtgtgcggggaagagcgcacaagcgcctccctgacaatacggccgatgcccgcacattttattggaagattaaggcaccaggagagcatcgaaggggctactgccaccctgaggtgcgaattaagtaaagctgctccggtggagtggagaaaaggcagagagtctttacgagacggcgaccggcactctctgagacaggacggggccgtgtgcgagctccaaatctgtggccttgctgtcgccgatgctggggagtatagctgtgtttgtggggaagagcgaacaagtgcaactttgaccgtgaaggccctgcctgcaaagttcactgagggccttaggaatgaagaggccgtggaaggagccacagctatgctgtggtgcgaactgagcaaagtcgcccctgtagagtggcgtaagggaccagagaatctccgcgatggagatcggtatatcttaaggcaggagggtactagatgtgaattgcaaatctgcgggctcgccatggccgacgcgggagagtacctgtgcgtgtgtggccaggagagaacttccgccacattgacgattcgagcccttcccgctaggtttatcgaggatgtcaaaaaccaggaggcacgtgaaggggcgactgccgtgttacagtgcgagctgaattcggcagcgccagtcgaatggcgtaagggctctgagaccctccgggacggagataggtactcactcaggcaggacggcaccaaatgcgagttacagatcaggggtttggcaatggccgataccggggaatactcttgtgtctgcggacaggagcgaacatcagctatgttgaccgtgagagctcttcctattaagttcactgaaggtttgaggaatgaggaagctacagagggagctaccgcggtattacgatgcgagttgtccaaaatggcgccggttgagtggtggaaaggtcatgagacgttgagggatggtgatcgccatagcctccggcaggacggagcacgttgcgagttacaaatcagagggcttgtcgccgaggacgcgggcgagtatctctgtatgtgcgggaaggaacggacgtcagctatgttaacagtgcgagctatgccctctaaattcattgagggattgaggaatgaagaggctaccgagggggatacagccaccctctggtgtgagctatcgaaggcagcacctgtagagtggaggaagggccatgaaacgttgcgggatggggaccggcacagcttgaggcaggatggaagtagatgtgagctgcagatccgaggactcgcggtcgtggatgccggcgaatatagctgcgtgtgtggccaggagcgaactagcgctactttgacggtgagagctttacctgcacgtttcatagaggatgttaaaaaccaggaagcgcgggaaggagcgactgccgtgctccagtgcgagctgagcaaggcggcacctgtggagtggcgaaaaggcagcgaaacactccgcgggggtgataggtattctcttagacaagacggcacaagatgcgagctccaaatccatgggctgtccgtcgctgacaccggagagtacagctgcgtctgcggccaggaaagaacatccgcaacattgaccgttagggccttgccagcccggcactcccggagcgaagatcagggtggccttaggagaggccactcctataccgctgtctag

SEQ ID NO: 24050 - DNA, 1449 bp, synthetic construct
  source 1..1449: mol_type = other DNA; note = Synthetic coding sequence
atggtgatggagaagcccagccccctgctggtgggccgggagttcgtgaggcaatattatactttgctgaacaaagctcctgagtatctacatcggttctatggcagaaatagcagctatgtgcatggcggagtggacgctagcggcaaaccgcaggaggctgtttacggtcagaacgacatccaccacaaagtgctgtcattaaattttagcgaatgccataccaaaatacgtcatgtggatgctcatgccaccttgtcagacggagtggttgtccaagtgatgggccttctgtctaattccgggcagccggaacgcaagtttatgcagaccttcgtgctggcccctgagggcagcgttcccaataaattctatgtgcacaatgacatgtttcggtacgaggatgaagtgtttggggattcggagccagaattagatgaagagtctgaagatgaagtggaggaggagcaggaagagcgacagccatctcctgagcctgttcaggaaaatgctaatagtggatattatgaagcccacccggtaacaaatggaatcgaggagcccctggaggagtccagccacgagcctgagccagagcctgagtccgagaccaaaaccgaggagctgaaaccgcaggtagaggagaaaaacctggaggagctggaagaaaagtccactacccccccacctgccgagcctgtctcactgcctcaagagccaccaaaagcctttagttgggcctccgtcacctctaaaaaccttcccccctctggtactgtgtcatcctctggcattcctcctcatgtgaaggcccctgtctcccaaccccgggtggaggccaaacctgaagtacagagtcagcctcctcgagtgcgcgagcaaaggcctagagagagacctggattccccccaaggggacctagacccggccggggcgatatggagcagaatgacagcgacaaccggcggataattaggtaccctgacagtcaccaactgtttgttggaaacttgccccatgatatcgacgagaacgagctgaaagaattttttatgagttttggcaatgtggttgagttgagaatcaacaccaaaggagtgggtggaaaattgccgaactttggatttgtcgtgttcgatgactctgagcctgtacagcgaatcctcatcgcgaagcccattatgtttagaggggaggttcgcctgaacgtagaagagaaaaaaacccgcgctgcaagggagcgagagactaggggtggtggggacgacaggcgcgacatccggcgaaatgataggggtcctgggggcccaagggggatcgtgggcggcggtatgatgcgggatagggatggtcgcggccctcccccccgaggcggcatggcccaaaagctgggctccggccggggcacagggcagatggaaggtagatttacaggacagaggaggtag

SEQ ID NO: 24051 - DNA, 807 bp, synthetic construct
  source 1..807: mol_type = other DNA; note = Synthetic coding sequence
atgagcggccggaagcggagcttcaccttcggcgcctacggcggcgtggataaaagctttacatccaggcgcagcgtgtggaggagcgatgggcagaatcaacatttccctcaagctctcgatctatcgagagttaatcttgtcccatcctatacaccttcactctacccaaaaaataccgacctgtttgagatgattgagaaaatgcaggggtccagaatggacgagcaaaggtgctcgtttcccccaccccttaaaaccgaagaggattatattccctacccttcagttcatgaggtcttgggaagggagggaccttttccgctgatactgctccctcagttcgggggatattggatcgaaggcacaaaccacgaaattaccagcatacccgaaacggaacccctgcagagtccgacaactaaagtgaagctcgaatgcaatcctaccgcccgtatctatagaaaacactttctgggtaaggagcatttcaactattattcacttgacgctgccttgggccacctcgtcttttcacttaaatacgacgtaatcggcgaccaggaacatctgcgcctgttgctgcggactaagtgtaggacctaccacgacgtgatccctataagttgcctgaccgaattcccaaatgtagttcagatggcaaagctggtatgcgaagatgtgaacgtggacagattttatcccgtcctatatcctaaggcctctcgactaatcgtgacctttgacgaacacgttatatccaataattttaagttcggcgtgatctaccagaagctaggccaatag

SEQ ID NO: 24052 - DNA, 606 bp, synthetic construct
  source 1..606: mol_type = other DNA; note = Synthetic coding sequence
atgtacaccctgctgagcggcctgtacaagtacatgttccagaaggatgaatattgcatcctcatcttgggcttggacaacgccgggaagacaacattcctagaacagtcgaagacccggtttaataaaaattataaaggcatgtccctgtccaagatcactaccacagtgggtctaaatataggcaccgtggacgtgggaaaagctcgcctgatgttctgggatctgggtgggcaagaggaactgcagtctttgtgggacaagtattacgctgagtgccatggagttatttatgtcattgactccaccgatgaggaaagattagctgagagtaagcaggcctttgaaaaggtagtgacttctgaggctttgtgcggcgtccctgtcctggtcttggcgaacaaacaggacgtcgagacttgcttgtcgattcctgatattaaaacagctttctccgattgtacaagcaagattgggagaagagactgtctgacacaggcgtgctctgcactcaccggcaaaggggtcagggaaggcattgaatggatggtgaagtgcgtagttcggaatgtacatcggccgccacggcaacgtgacatcacctag

SEQ ID NO: 24053 - DNA, 1707 bp, synthetic construct
  source 1..1707: mol_type = other DNA; note = Synthetic coding sequence
atgggcctgctgaccttccgggacgtggccatcgagttcagcctggaggaatggcaatgtctggacaccgctcagcgtaatctgtataaaaatgtgatactggaaaactaccgtaatcttgtcttcctcggcatagctgtctccaaacaggacctgataacgtgcttggagcaggagaaggaaccactgaccgtcaagcggcacgagatggtgaatgagccacctgtaatgtgttcacatttcgcacaggaattttggcccgaacagaacattaaagactccttcgagaaggttacactgcgccggtacgagaaatgcggcaacgacaatttccagctaaaagggtgcaaaagcgtggatgaatgtaaactgcataaaggaggttataatggactcaaccagtgcctaccaacgatgcagtcaaaaatgttccaatgcgataaatatgtgaaagtatttaataagtttagtcactccgataggcacaagatcaaacacatggaaaataagcctttcaaatgtaaagagtgcggacgcagcttctgtatgcttagccacctcactcgccatgagcggaactacaccaaggtgaatttctgcaagtgtgaggagtgcgagaaggccgttaaccagtcatctaaactcactaagcacaagcggatctacacatgcgagaagctctacaagtgccaggaatgtgacaggacctttaaccaatttagcaacctgactgagtataagaaggactacgccagggaaaaaccctacaagtgcgaagagtgcggtaaagccttcaatcagagcagccacttaactacacataagatcatccacaccggcgaaaagccttacaagtgtgaagagtgcggcaaggcctttaatcaattttcaaacttgacgactcacaagaaaatccataccggggagcagccatatatatgtgaggaatgtggaaaggccttcacccagtctagtacactgacaacacacaagcggatccacacaggggagaaaccatataagtgtgaagagtgcggcaaggctttcaatcggagctccaagctgacagagcataagaatatacacacgggagaacagccctacaagtgcgaggaatgtggcaaagccttcaacagaagcagcaacttgacagaacataggaagatacataccgaggagaaaccttataaatgtaaagagtgcggcaaagcgttcaagcatagcagtgccttgaccacacataaacggatccacacaggagaaaagccttacaaatgtgaggagtgcggtaaggcgttcaacagatcttccaagctaacagagcacaaaaaactccacaccggcaagaagccctacaagtgtgaagagtgcggtaaagctttcatacagtcaagtaagctgacggagcacaagaaaattcactccggggagatcccctacaagtgtgaggagtgcggcaaggcattcaagcattcttcaagtcttaccacccacaaaaggatacataccggggaaaaaccttacaagtgtgaggaatgcggcaaagctttctcccgaagttcaaagctgacagaacacaaaatcatacacacgggagaaaagccctataagtgtgagcgctgtgataaagcatttaatcagtccgccaatttgaccaagcacaaaaagattcacacaggcgagaaactgcagaattggaacgtgtag

SEQ ID NO: 24054 - DNA, 1383 bp, synthetic construct
  source 1..1383: mol_type = other DNA; note = Synthetic coding sequence
atggacagcgagctgatgcacagcatcgtgggcagctaccacaagccacccgagagagttttcgtgcccagctttacccagaacgaaccttcacagaattgccaccctgcaaacttagaggttaccagcccaaagattctgcactcacctaactctcaagcactgatactagctctcaaaactttgcaggaaaagatccataggcttgagcttgagcgaacccaagccgaagacaatcttaatatcctgtctcgagaggccgctcagtataaaaaagccttggaaaacgagacgaatgaaaggaacctagctcaccaagaactgattaaacagaagaaggatatctccatccagttgagtagtgctcagagtagatgtacattgcttgaaaaacagctggaatatactaaaaggatggtgctgaatgtggagcgggaaaaaaatatgatcctggaacagcaggcccaactgcaaagggagaaagaacaggaccagatgaagctctacgcaaaactggaaaagttggacgtgctggagaaagagtgttttaggttaaccaccacacaaaaaacagctgaggataagatcaaacatctggaggagaaactcaaggaggaagagcatcagagaaagctgttccaggacaaagctagcgagttgcagactggcctcgaaatctctaagattatcatgagctctgtaagcaacctgaaacatagcaaggagaagaagaaaagtagcaagaagacaaagtgcatcaaacggcgtcccccctggcagatttgtagtaaattcggcgcgttaccatttgttgctgagaagatgcgccagcacagagaccctcacatattacaaaaacctttcaatgtgacagagacccggtgcctccccaaacctagtcggactaccagctggtgcaaggccatcccccctgacagcgaaaagagtataagcatatgtgataaccttagtgaacttctcatggctatgcaagacgagctagaccaaatgagcatggaacaccaggagcttttgaaacagatgaaggagacggaaagccactcggtgtgcgacgacatcgagtgcgagcttgaatgtcttctgaagaaaatggagataaaaggggaacagatctccaaacttaagaagcatcaggacagtgtctgcaagctgcaacagaaggtacagaactctaaaatgagtgaggcctcaggcatccaacaagaggactcatatcccaaaggatctaagaacatcaagaacagtccgaggaagtgtctgactgatacaaacttgttccagaagaatagtagcttccacccaatacgagtccataatttgcagatgaagttacgaagggacgatatcatgtgggaacagtag

SEQ ID NO: 24055 - DNA, 1833 bp, synthetic construct
  source 1..1833: mol_type = other DNA; note = Synthetic coding sequence
atgagccagaccagcctgaagcagaagaagaacgagcccggcatgaggagttcaaaagaaagtctggaagctgaaaaaaggaaggagtcagataaaacaggggtgcgtttgagtaatcagatgcggcgggcggtgaaccctaaccacagcctgcgatgctgtccattccagggccactctagctgccgcaggtgcttgtgcgctgctgagggaactgccctgggcccatgccacactatccgaatctatatccacatgtgcctgctctgggagcagggtcagcagatcacgatgatgagggggtcccaggagtcctctcttcgcaagaccgatagtcgtgggtatctcgtgaggagtcagtggtccagaatcagccgcagcccctcaactaaggctcccagcatcgacgaaccccgtagccggaacactagcgccaagctgcctagttcctcaaccagttctcgcacccctagcacaagtccaagcctgcacgattccagtccccctccactgtcaggccaaccctcactccaaccccccgcttctccccagctgccccgaagcctggattcccggcccccaactccgcctgaacctgatcctgggagtaggcggagtacaaaaatgcaagaaaaccccgaggcctgggcccagggaatagtgagagagatccgacagacccgtgactcgcagccactggagtactctcgaacttcaccaaccgaatggaagtcctcatcacagcgcagagggatttatccagctagcacccagctggatcgtaattccctgagtgaacagcagcagcaacagcgggaggatgaggacgattacgaagctgcctactgggcaagtatgagaagtttctacgagaaaaacccttcctgcagcagaccttggccgcctaaacccaaaaacgcaattacaatagcattaagcagttgtgctctctttaatatggtggatggaagaaagatctatgaacaggagggcctcgagaaatatatggagtaccagctcaccaatgaaaacgtcatcttgacccccggacctgccttccggtttgtgaaggctctgcagtatgtgaatgctcgcctgcgggatctgtaccccgacgagcaggatctgtttgacatcgtgcttatgacaaataaccatgcacaggttggggtccgactgataaacagtgtgaatcactacgggctgctgatcgatcggttctgcctcacagggggtaaggatcctattgggtacttgaaggcttacctgactaacctgtatattgcagcggacagtgaaaaagtccaagaggcaatccaagagggcattgcatctgccacaatgttcgacggagccaaagatatggcatactgtgatacacagctgagggtcgcctttgatggggatgcagtgttattctccgacgagtcggagcattttaccaaagagcacgggttagacaaattcttccagtatgacaccctttgcgaaagtaaaccgctggctcaggggccgctcaagggcttcctggaagatctgggccggctacagaagaagttctatgctaagaacgagcggctgttgtgcccaattagaacatatttggtcacagcgaggtcagctgccagctctggagcacgggtcttgaagaccctgcgacgttggggactggagatcgatgaagcgctgtttctcgcgggagcacctaaatcccccatcttggtcaaaatccggcctcatatctttttcgacgaccacatgttccatattgaaggtgcccaacgtctcggaagcatagccgcctacggtttcaacaaaaaattttccagctag

SEQ ID NO: 24056 - DNA, 456 bp, synthetic construct
  source 1..456: mol_type = other DNA; note = Synthetic coding sequence
atgagcaagaacaccgtgagcagcgcccggttccggaaggtggacgtcgatgagtatgacgagaacaaattcgtcgacgaggaagatggtggggatggtcaggctgggcccgatgagggcgaagtggactcctgcctgcgccaggggaacatgaccgcagcactgcaggcagccctaaaaaatccaccaattaatacaaaaagtcaagctgtgaaagatcgcgccggaagtatcgtgctgaaggtgcttatcagcttcaaagcaaatgacattgagaaggccgtccagtcactggacaagaacggcgtggatctcctcatgaaatatatctataagggcttcgagagcccgtccgacaatagtagcgcaatgctgctccagtggcacgagaaggccctggcggcaggtggcgttgggagcatagtgcgggtcctgacggcgagaaagaccgtctag

SEQ ID NO: 24057 - DNA, 3522 bp, synthetic construct
  source 1..3522: mol_type = other DNA; note = Synthetic coding sequence
atggtgaccgtgggcaccaacatcctgcccagccggcccgccgcctcagcaaataccgcccgggaagacgcggccctgttcagcaggcgtattcccccgagacacaaaaacggagccgcccagccgggcgccgcacccggccctggggctcctggcgccaacatgggcaacgctcactcaaaaagtggggacaggcactcagcgttgcctggccggcccgaactgtccttctacggtagctttccgagaaagtggagtgagaacgtgtttcttgacaatgaactcttgaccagcaaaatactcagtgtcttacgccctcagagtgaacgtggctttcgggccggggatctgcgctacccaacacatttcctctcaaccaattctgtgctcgccagcgtgactgcttccctcaaggaacaccctcggggcaccttactgtcagatgggagcccagcgctgtcccgcaacgtgggcatgacagtttctcagaaagggggaccccaacccacaccaagccctgcagggccgggcacccagctcggacctatcactggggagatggatgaggcagactccgccttcctgaaattcaagcagacagcagacgactcactctcactgacctcccccaataccgaaagcatctttgtggaggacccttacactgcttcgttgaggagcgaaattgaaagcgatggccatgagttcgaggcagaaagctggtccctagctgtggatgccgcctacgccaagaagcagaagcgcgaggtagtgaagaggcaggatgtactgtatgagctgatgcaaaccgaggtgcaccacgtgcgcaccctaaagatcatgctgaaagtctactcgagagccctgcaagaggagctgcagttctcttctaaggcaattggcaggctgtttccgtgcgccgacgacttactggagacccactctcattttctggccaggctgaaagaaagaaggcaggaaagcctcgaggagggcagcgatcggaattacgtaatccagaaaatcggggatctgctggtacagcagttctcgggagagaacggcgagagaatgaaggagaagtatggcgttttctgcagtgggcacaacgaggcggtaagtcactacaagctactccttcagcaaaataaaaaattccagaatctgatcaaaaagattggaaatttctctattgtccgcaggctcggcgtccaggaatgtatcctgctggtgacacaaagaatcaccaagtatcccgtgctagtggagcggattatccagaacaccgaggccgggaccgaggactatgaagatcttacccaggcactgaaccttataaaggacataatctcacaggtggacgcaaaggtatctgagtgtgagaaaggccaacgactgagggaaatcgcaggtaagatggacctcaaatcttctagtaagttaaaaaacggactgactttccgcaaagaggatatgctccagcgtcaactgcatctggagggcatgctctgctggaaaaccacatctggcaggttgaaggacattcttgctatcctgcttaccgatgtactattgctgcttcaagaaaaagaccagaagtatgtgtttgcctctgttgactccaagccacctgtcatttcccttcagaaactgatcgtacgtgaggtagctaacgaagaaaaagcaatgttcctgatctccgcatctttacaaggccccgagatgtacgagatctacacttcttccaaagaggacaggaacgcttggatggcccacattcagagagctgttgaaagctgtcctgacgaggaagagggccctttctcactaccggaggaggagaggaaggtagtcgaagcaagggccaccagactccgagatttccaggaacgcttgtccatgaaggatcagctcattgcccaaagcctgttggagaagcagcagatatatttggagatggccgaaatgggcgggctcgaggacctcccccagccaagggggctgttcaggggaggggacccctctgaaactctacagggtgagttgatactgaagtcagccatgtccgagattgaaggtatccagagtctgatctgtcgccagttagggagcgccaacggtcaggccgaagatggtggatcaagtacagggcctccccgtagagcagaaactttcgccggatacgattgcacaaacagccccactaagaatggatcctttaaaaaaaaggtcagctcaacagaccctaggcccagagactggagaggaccaccaaactcacctgacctaaaactctccgactccgacatcccagggtcgagtgaagagtctcctcaggtcgtggaggctccaggtactgagagtgaccctagattgcctacggtgctggagagcgaactggttcagaggatccagactcttagccagctgcttctgaacctgcaagccgtcattgcacatcaagactcctacgttgaaactcagcgcgctgccatacaagaaagggaaaaacagttccgcttacagtctactaggggcaacctgctcctagaacaggagcgccaaaggaacttcgaaaaacaaagggaggagagagcggctcttgagaagctccaatctcagctgcgccatgaacaacagcgctgggagagagagcggcagtggcaacatcaggaactggagagagccggcgcacgacttcaagaacgagaaggcgaggcacgacagctgcgtgagcggctcgagcaggaacgagcagagttagagagacagcgacaagcctatcagcatgacctggagcgtttaagggaggctcaaagggctgttgagcgagagcgggaacggttagaattgcttcgtcgcttaaaaaaacaaaacaccgctcctggagcactgccgcctgatactttagctgaggctcagccaccctctcatcccccttctttcaatggggaaggcctagagggaccccgcgtgagcatgctcccttctggggtaggccccgagtatgcagagaggcccgaagtcgctcgaagagactcagctcccaccgaaaacagactggctaaatctgatgtcccaatacagttgctgtccgcgaccaatcagtttcagagacaggctgctgtgcagcaacaaatccccactaagttagccgccagcactaaagggggaaaagataagggaggcaaaagcaggggcagtcagaggtgggagtcctcagcatctttcgatcttaagcagcagctgctgctgaataagcttatgggtaaggacgagtctacaagccggaaccgccgcagcttgtcaccaatcctaccaggtcgccacagtcctgcaccgccaccggatccgggctttcccgcccccagccccccgcccgccgactcaccttccgagggcttctcactcaaggccggaggaactgccctcctcccagggcccccggctccgtctcctctccccgcaactccattgtctgcgaaggaggacgcctccaaagaagacgtgatattcttctag

SEQ ID NO: 24058 - DNA, 1674 bp, synthetic construct
  source 1..1674: mol_type = other DNA; note = Synthetic coding sequence
atggacagcaccgtgcccagcgccctggagctgccccagcggctggccctgaatcctcgggagtcacctcgctcccccgaagaggaggagcctcatttgctgtccagccttgccgctgtccagactctcgcctcagtcataagaccttgttatggtccacacggaaggcaaaagttcctcgtcaccatgaagggagagactgtttgtacaggctgcgccactgccatcctgagagcactcgaactggaacacccagccgcgtggcttcttagagaggcgggccagacacaggcagaaaactccggcgacggtacagcctttgtggtgctcttaaccgaagcattgctggagcaagctgaacagcttttgaaggctggcctcccaagaccccagctccgcgaggcatacgcgacagcaaccgcagaggttctcgcgactttgccttcattagcaatccagagcttgggcccacttgaagacccctcgtgggcactgcatagtgtcatgaacacacacaccctctcaccaatggatcacctaaccaagctcgtggcacatgcatgctgggctatcaaggagctggatggctcattcaaacccgaacgcgtgggtgtttgtgccctgccgggcgggacactggaagactcctgtctgcttcccggcttggccatttcaggaaaactatgtgggcagatggctacagtcctctccggagctcgagtggcactcttcgcttgtccattcggaccagcacaccccaatgccccagcgacagcacgactgtcttcacctgcagacctggcgcagttttctaaagggtcagatcagctgctagagaaacaggtgggccagctggcagctgctggcattaatgttgcagttgtcctgggagaggtcgatgaggaaacattgactctggcagacaagtacggaatagtcgttatacaggcccgcagttggatggaaattatctacctgagcgaggtcctcgacacaccacttctgcctcgtctgctccctccgcagcgccccggaaaatgccagagggtttacaggcaggagcttggagatggcttggcagttgtgtttgagtgggagtgtacaggtacaccagctctgacggtggtcctcagaggcgccacaacccaagggcttcgcagcgcagaacaggccgtgtaccacggaattgacgcttatttccagctgtgtcaggacccccgcctgattcctggagcaggcgccacagagatggcccttgcaaagatgttaagtgataaagggtcccgcttagagggcccctctggacccgcgttcttggcgtttgcttgggccctgaaatatctgccaaaaacactggctgaaaatgccggactcgccgtctcggacgtcatggccgagatgagtggagtccaccaaggagggaacctactcatgggagtgggaactgagggaatcattaatgtagcccaagagggggtgtgggatacactgattgtgaaggcccagggcttccgggcggttgccgaagtggtcctccaactcgttaccgtcgacgagattgtcgtcgctaaaaagagccccacccatcaagaaatctggaatccagattctaaaaagaccaagaaacacccgcccccagtggaaaccaagaagattcttgggctcaataattag

SEQ ID NO: 24059 - DNA, 939 bp, synthetic construct
  source 1..939: mol_type = other DNA; note = Synthetic coding sequence
atgacccggagcctgttcaagggcaacttctggagcgccgacatcctttccacaattggttatgacaatatcatacagcacctgaataacggcaggaagaactgtaaagagttcgaagatttcctgaaagaacgcgcagcaatcgaggaacgttacggcaaagatctgctgaacctgagtagaaaaaagccatgtggccagtccgaaatcaacacactgaaacgcgcgctggaagtgttcaagcagcaggtcgacaatgtcgcacaatgtcacattcagctagctcagagcctgcgggaagaggctcggaaaatggaggaattccgggagaaacagaagctccagagaaagaagacagagttgataatggatgccattcataaacagaagtcacttcaattcaagaaaacaatggatgcaaagaagaattatgagcagaagtgtcgggataaagacgaagccgagcaggccgtaagtcggtctgccaacctggttaatccaaagcagcaagagaagttgttcgtaaagctggcgacctctaaaactgctgtggaggactccgacaaggcttacatgctccatatcggaacccttgacaaggtgcgagaggagtggcagtctgagcacatcaaggcatgtgaagctttcgaggcgcaggagtgtgaacggataaacttctttaggaacgcactctggctgcacgtcaaccagcttagccagcagtgtgtgacgtctgatgagcacccttcctgtatgcgaatatctaccccaccaagacgtatgcaaagccagcaggagcgtcttcagggcctcacctggcagggggaggacccttcacagttcctcaaggcgcatcagatgattcccatcacactgtggctaatgactacagtctgcagtatttccaagatcaacgagactagggccttcagtggctag

SEQ ID NO: 24060 - DNA, 3693 bp, synthetic construct
  source 1..3693: mol_type = other DNA; note = Synthetic coding sequence
atgccccggaagggcacccagcccagcaccgcccggcggcgggaggagggccccccaccgccctctcccgacggggcgagctcggatgccgagcctgagccaccctccggcagaaccgaaagtccggcaacagccgctgagaccgcttctgaagagctggacaatagatctttggaagaaatcctgaacagcatcccgcctcccccccctcccgctatgacaaacgaggctggagccccccgtcttatgattacacacatagtaaatcagaattttaaaagctacgccggcgagaagattcttgggccttttcacaagagattctcttgcatcatcggcccaaacgggtcaggcaagagcaacgtgatcgactcaatgcttttcgttttcggataccgagcccagaagatcagatctaagaagctcagcgtgcttattcataattccgatgagcacaaggacatacagtcctgcactgtcgaggtacattttcaaaagattattgataaggagggggacgattacgaggtaatccctaattcaaacttttatgtgagcaggacagcttgcagggataacacgagcgtataccacatctctggcaaaaaaaagacgttcaaggacgttggcaatttactcagaagccacggaatcgacctggaccacaacagattcttaattctccagggagaggtagagcagatcgccatgatgaagccgaagggccagaccgaacacgacgaaggaatgcttgagtatctggaagatataatcggatgcgggaggctaaatgaacccattaaggtgttgtgcagaagagtggaaattttaaacgagcacaggggagagaagctgaaccgcgttaaaatggtggagaaagagaaagacgcactagagggcgaaaaaaatattgcaatagagtttctcactctggaaaacgagattttcagaaaaaagaaccacgtctgccagtactacatatatgagcttcaaaaacggatagcagagatggaaacgcaaaaagaaaagatacatgaggatacaaaagaaatcaacgagaagtcaaacattctgtctaacgaaatgaaagctaaaaataaagatgttaaagacaccgagaagaagttgaacaagataaccaaatttattgaggagaataaagagaagttcactcagttagacctagaagatgttcaagtgagagagaaactcaagcacgcaacctcaaaagccaagaagttggaaaaacagctgcagaaagataaagaaaaggtcgaagagtttaaatccattccagctaagagcaacaacataattaatgaaaccactacaaggaataatgccctcgagaaggagaaggaaaaggaggagaagaagctcaaggaagtaatggatagtctgaaacaggaaacgcagggactccagaaggagaaggagagccgggagaaagaactgatgggttttagtaagtccgtcaacgaagccaggtcaaagatggacgttgctcagtccgagttggacatttatctgagtcgtcataataccgctgtgagccaactgaccaaggccaaagaggcgttgatagctgcgtctgaaactttgaaggaaagaaaagctgctatacgtgatatagagggaaaactcccccaaaccgaacaggagcttaaggagaaggaaaaggaactccaaaagctaacgcaggaagagaccaactttaagtccctagtgcacgatctcttccagaaagttgaggaggcgaaaagctccctcgccatgaatcgatcaaggggcaaggttctggacgcgatcatccaggaaaagaaaagtggcagaattcctggcatttacggtaggttaggagatttaggggcgatcgacgaaaaatatgatgtagccatcagctcttgttgtcatgctctcgactatatcgtcgttgacagcatcgatattgcgcaggagtgtgtcaatttcctgaagaggcagaacatcggagttgccacttttatcggactagacaagatggctgtctgggcaaaaaagatgacggagatccagacccctgagaatacaccgagattattcgaccttgtgaaagtgaaggatgagaagatcagacaggccttttatttcgccctgcgagatacactcgtggctgataatctggatcaagccactcgagttgcctaccagaaagatcgccgctggcgggtcgtgactctccagggacagattatagagcaaagtggaaccatgaccggcggaggatctaaagtgatgaaagggaggatgggctcatccctcgtgatcgagatcagcgaagaggaggtgaacaaaatggagtcgcagctgcaaaatgatagcaagaaagcaatgcagattcaagagcaaaaagtacagctggaagaaagagtagttaagctgcggcatagcgagcgggaaatgcggaacaccctcgagaaatttacagcttcgatccagcggctcattgagcaagaggaatatctcaacgtgcaggtgaaggagttggaggcgaatgtcctggctactgcccccgacaaaaagaagcaaaaactgctggaggaaaatgtgagcgcttttaagaccgagtatgatgcggttgcagagaaggccggtaaagtggaggcggaagtaaaaagattgcataataccatagttgagatcaataatcataagctcaaggcgcaacaggataagttagataagattaataaacagctggatgaatgcgcgtcagccataacaaaggcccaggtcgccattaaaactgctgatcggaatttgcagaaggctcaggatagcgtgctccgaacggagaaggagataaaggacaccgagaaggaggtggatgacttaaccgcagagctcaaaagcttggaggataaggcagcagaagtggtaaagaacacaaacgccgcggaaataagtaaaatatcgctccatccaatcgaggacaatccaatcgaggagatatcagtactttctccagaagatctggaggctatcaagaacccagatagcatcacaaatcagattgctctgctggaagcgcggtgtcatgaaatgaaacctaacttaggtgctatcgctgagtataaaaaaaaagaagagctttaccttcagcgcgtggccgaattggataagattacttatgagcgtgacagctttaggcaagcttacgaagaccttcgaaaacagcgactcaatgagttcatggctgggttctacataataactaataagctgaaggagaattaccaaatgctaaccctgggaggagatgccgaacttgagctggtggacagcctcgatcccttctctgaaggaataatgttctctgtccgccctcccaagaaatcatggaagaaaatcttcaacctttctgggggcgaaaagactctcagttctctagctctagtcttcgctttacatcattacaagccaacaccactctacttcatggatgagatcgacgcggcactggattttaagaacgtctcgattgttgctttctatatatacgagcaaacaaaaaatgcacagtttatcattatctcattgagaaacaacatgttcgaaatctctgaccggttgattggtatttacaagacctacaacataacaaagtctgtggccgtcaaccctaaggaaatcgcaagcaaggggctgtgctag

SEQ ID NO: 24061 - DNA, 2661 bp, synthetic construct
  source 1..2661: mol_type = other DNA; note = Synthetic coding sequence
atggagctgcggtgcggcggcctgctgttcagcagccggttcgactcgggcaacctagctcatgtcgaaaaggtggagtccctctcatctgatggtgagggggttggcgggggggcatctgccctcacctcaggaatcgcgtcttcccctgattatgagtttaatgtttggacccgccccgactgcgcggaaaccgagttcgaaaacgggaacaggtcatggttttatttttctgttaggggcgggatgccaggaaagctgattaaaatcaacattatgaacatgaacaagcagtctaaactctactcacaggggatggcgcccttcgtgcgaaccctcccaacgcgcccaaggtgggaacggattcgtgatcgccccactttcgagatgactgagacgcaatttgtgctcagcttcgtacatcggttcgtagagggaagaggcgcaacgacattcttcgctttttgctacccgttcagctacagtgattgccaggagttactcaaccagctcgaccagcgcttcccggagaatcatcccacacactccagcccattggacacgatatattaccacagagaactactgtgttattctcttgatgggttgagggtcgatttgttgactattacatcctgccatggcctaagagaggaccgcgagcctagacttgaacagctcttccccgacaccagtacgcctaggccatttaggttcgctggaaaacgaatcttctttctgtcatctagagtgcacccgggagagacacccagcagctttgtcttcaacggtttcctggatttcattctgagacctgacgacccacgggcccagacactaagacgcttgtttgttttcaaattgatccctatgctaaaccctgacggcgtcgtgagagggcactatcgtaccgacagcaggggtgtcaatctgaaccgccaatacttaaagccggacgctgtcctacaccctgcaatctatggggctaaggcagtgctgctgtatcatcacgttcatagcaggctgaattcccagtcaagcagtgagcatcagccgtccagttgtctgccacccgacgctccggtctctgaccttgagaaagctaataacctgcaaaatgaggctcagtgtggccactctgctgaccgacacaatgccgaagcttggaagcaaacagagccggccgaacagaagcttaactctgtgtggattatgccccagcagtccgccggcttggaagagtccgctcctgacactattccacctaaggagtccggggtagcttattatgtcgatctgcatggtcatgcatctaagagggggtgctttatgtacggaaactcttttagtgatgaaagcacccaggttgaaaatatgttatacccaaagctaatcagtttaaatagtgcccactttgactttcaagggtgtaactttagcgaaaagaacatgtatgcacgcgatcggagagatggccagtccaaggaagggtccggccgagtcgcgatctacaaagcttccgggattatccattcttatactttggagtgcaactataatacaggccgatccgtgaattccattccagcagcatgccatgacaacgggagggctagccctcctcccccgcctgctttccctagccgttacactgtggagctgtttgagcaggttggtcgtgctatggcaatagctgcgttagatatggccgaatgtaacccctggccccgaattgtcctgagtgagcacagctctttaactaacctccgcgcttggatgttaaagcatgtgaggaattctcgtggactgagcagcaccctaaacgtgggagtaaataagaagcgtgggttgcggacaccaccaaaatcacacaacggactgcctgtatcgtgttctgagaacaccctcagtcgggcaagatctttttcaaccgggacaagtgccggcggttcatctagcagccagcagaacagcccccaaatgaaaaacagcccttcttttcctttccacggaagcaggcctgccgggttacctggcctgggtagtagcacccagaaagtaacacacagagtcctgggtcccgtcagggagcctcgatcccaggacagaagacgtcagcagcagcctcttaaccatcggcccgctggttccctggccccttcccccgctccaacctcctcaggacctgcaagtagtcataaactgggtagctgtctgttgcctgattcttttaatatccccggtagctcatgttctttactttccagcggagacaagccagaggccgttatggtgatcggcaaaggccttttggggaccggagcaaggatgccatgcattaagaccagactacaagcaaggcctagactgggacgcggctccccacccacgcggcgcggaatgaaagggtcgtccggaccgacgtccccgaccccacgcacgagagagtcatcagagctggagctcggatcttgcagtgcaacccccggtctcccccaggcccgcccccctcggccccgttcggcccccgccttttctccaatatcttgttccctgtctgatagtccttcttggaattgctactccagggggcccctgggacagcccgaagtgtgttttgttcccaaaagccctcctttgacagtctcccctcgagtttag

SEQ ID NO: 24062 - DNA, 4221 bp, synthetic construct
  source 1..4221: mol_type = other DNA; note = Synthetic coding sequence
atgtggagcctgaccgccagcgagggcgagagcaccaccgcccacttcttcttaggcgcgggagacgaagggctgggtacacgggggatcgggatgaggccagaagagagtgatagcgagctcctggaagatgaagaggatgaggttcctccggaaccccaaatcattgtcggtatctgtgccatgaccaaaaaaagtaagtctaagccgatgacacaaatactggaaaggctgtgcagatttgattatctcaccgtagtgatactcggtgaagatgtgattctgaatgagccagttgaaaactggccctcttgtcattgccttattagcttccatagcaaagggtttccactggacaaagctgtggcttattcgaaactgcggaacccgttcctgatcaacgacctggcaatgcaatattatatacaggacagacgcgaagtgtacaggattttacaggaagagggaatcgacctgccacgttatgcagtcttaaatagagatcctgcccggccagaggaatgcaacttgatcgaaggcgaagaccaggttgaagtgaatggtgctgtgtttcccaagccttttgtggagaaacccgtcagtgctgaggatcataacgtatatatttattatccttcatctgcaggtggtggaagtcagaggctcttcagaaagatcggcagcagaagctcagtgtattccccagagtctagtgttcggaagacgggctcctacatctacgaggagttcatgcccaccgatggcacagacgtcaaagtgtatacagtgggcccagactatgcccacgctgaggcaaggaagtcccctgcgctggacgggaaggtggagcgtgactccgagggtaaggaaatcagatatcctgtaatgttgacggcgatggagaaactggtggcacggaaagtgtgcgtggctttcaagcagaccgtctgcggctttgacttgttgagagccaatggccacagttttgtctgtgatgttaatggattcagctttgtgaagaattcaatgaaatattacgacgattgtgctaagatcctcggaaacactatcatgcgcgaattggctcctcagttccagataccttggagcattcccaccgaagctgaggacatcccaatcgtaccaactacatctggcaccatgatggagctccggtgcgtgatcgctatcattcggcacggcgatcgaaccccaaagcagaaaatgaagatggaagtcaagcacccgcggttctttgctctgttcgagaaacatggcggctacaagactggcaagctgaagttgaaaaggccagagcagttacaggaggtgctcgacataactcgacttttgctcgcagagctggagaaggaacctggtggtgagattgaagaaaagaccggtaaacttgaacagctgaagagcgtcctggagatgtatggacatttcagcggcatcaaccgcaaggtacagctgacatattacccacacggagtgaaggcaagcaatgagggccaagacccgcaacgcgaaacactcgcacctagcctcctgctagtgctaaagtggggaggcgaactcactcccgctggtcgcgttcaggcagaggaactggggcgcgcctttagatgcatgtatccgggaggccagggcgattatgccggcttccccggttgtggcctacttagattacacagcacatttcgacacgacttaaaaatctacgcctctgatgagggccgtgtgcagatgacagcagcggctttcgctaagggactcttggcgcttgagggcgagctgaccccgatactggtccagatggtcaagagcgcaaacatgaacgggttgctggactccgatggcgattctctctcctcttgccagcaccgcgttaaggcgcgtctgcatcatatcctgcagcaagacgcaccttttggccccgaggactatgatcagcttgctcctacaagatctacctctctccttaatagcatgactatcattcagaaccctgttaaggtgtgtgaccaagtgtttgcactcatagaaaatcttacgcaccagatcagagaacggatgcaggatccacggagcgtggatctgcaactgtatcacagtgaaactctggagttgatgttacaaaggtggagcaaactggaacgcgactttcggcagaaatcaggccgatacgatattagcaagatccctgacatatatgactgcgtaaaatatgacgtccagcataatggatctctgggacttcagggcaccgccgaactgctccgcctgtcaaaagctctcgccgatgttgtaattccgcaggaatatggcatctctcgagaggaaaagctagaaatcgccgttggcttttgcctgcccttattgaggaaaattctgctggacttgcagaggacacacgaggacgagtcagtgaataagctgcatcccctgtattctagaggagttttgagtcccggcaggcacgttcgcactcgcctatacttcaccagtgagagtcacgtacactctctgctcagtgttttccgctatggaggtctgctggatgagacacaggacgcgcagtggcaaagggctcttgattacctgtctgctatttcagagcttaattacatgacacagatcgtaataatgttatatgaagacaatactcaggaccctttgagtgaggaaagattccacgttgagctgcactttagcccaggggtcaagggtgttgaggaggagggttccgcccctgctggctgtgggttccgccctgccagtagcgagaacgaggaaatgaaaaccaatcagggaagtatggagaacctgtgtccaggcaaagctagtgatgaacctgatcgagcactccagacatctccacagccgcctgagggccctggtcttccgcgacggtcccctttgatccgtaataggaaggccgggtctatggaggtcttgtctgagacttcgtcgtctcggcccggagggtatagattattctcttcttcacggccacctacggagatgaagcaaagtggcctcggattcgaaggctgcagcatggtaccaacgatatatccgcttgagactttgcacaacgcactgtccctaagacaagtctccgaattcctgagtcgggtgtgtcagcgacatactgatgcccaggcacaggcctccgccgccctgttcgacagcatgcacagctctcaggctagtgataatccattttcccctcctcgcaccctgcactctcccccactgcagctgcagcagcggagcgaaaaacccccatggctggaaactcgattttgccatgtaggtcaagcagggctcgagctgctcacgagttctgacctgccagctagcgcctcacaaagtgcaggaattaccggggtttcccataggactcagccggatagcagtgggccaagttccacggtaagctccgccgggcctagcagcccgactacagtggatgggaacagtcaattcggattttctgatcaacccagcctcaactctcacgtggcagaggagcaccaggggcttggactgctgcaggaaacgcccggatctggggcccaagagttgtccatcgaaggagagcaggagctcttcgaaccaaatcaaagccctcaggtgccccccatggaaacctcccagccatacgaggaggtctcgcaaccttgccaagaggtgcctgatatttcacagccttgccaggacatctccgaggcattatctcaaccgtgtcagaaagtcccagatataagccaacaatgtcaggagaatcacgacaatgggaaccacacatgccaagaggtcccccatatatcacaaccatgtcagaaatcctcacaactctgtcaaaaagtcagcgaagaggtgtgccagctatgtctggaaaattctgaagaggtgtcacagccgtgccagggcgtgtccgttgaagtgggcaagctggtgcacaagtttcatgttggagtgggctccctggtgcaggagactctggtagaagtggggtcgccagccgaagaaatacctgaggaagttattcagccctaccaggagttttcagtggaggtgggccgcctggcccaagagacaagtgctattaacctgctgagccaggggatcccagaaatagacaagccgtcgcaggaatttcccgaggaaatcgacctccaagcccaggaagtgcccgaagagataaactag

SEQ ID NO: 24063 - DNA, 1308 bp, synthetic construct
  source 1..1308: mol_type = other DNA; note = Synthetic coding sequence
atgggcgacctggagctgctgctgcccggcgaggccgaggtgctggtgcgggggctccgctcttttcccctccgcgagatgggcagtgagggctggaatcagcagcacgaaaatctcgaaaagctgaatatgcaggccatcctggacgcgactgtaagtcagggagaaccgattcaggagctgctggtgacgcacgggaaagtaccaaccctggtagaagaacttatcgcagtcgagatgtggaaacaaaaggtgtttcctgtgttttgcagagtcgaggatttcaagccgcagaacaccttccctatttatatggtagtgcaccatgaagcctctatcattaatttgcttgagacagtattttttcataaggaagtgtgtgaatctgccgaagatactgtactggatctggttgactactgccatagaaaattgactttgctggtcgcccagtccgggtgtggaggcccacctgagggtgaaggctcacaagactctaaccccatgcaggagctccagaagcaggccgaactcatggaatttgaaattgctctcaaagcactgtccgtactgagatatattaccgattgcgtggacagacagtggagtgtttcacaacctccccaattggcccatctgaagcgcatacagagactccacccggtttgttggtttctatctcctggcaagctgcagcagttcgagggatctagatggcacacagtggctcccagcgaacagcagaagctgagcaagctagatggacaagtttggatcgcgctgtacaatttactgctcagccccgaagctcaagcccgctattgcctgacgagcttcgccaaaggcaggttgctgaagttgcgcgcatttctaaccgatactttacttgatcaacttccaaacttggcccatttgcagtcatttctcgcccatctcacactgactgagacccaacccccaaaaaaagacctggtcctagagcaaatacctgagatttgggaacggctagagcgtgaaaacagggggaaatggcaggcaatagctaagcatcaactacagcacgtgttctcccctagcgagcaggatctgcgcttgcaggccagacgatgggctgagacctaccgcctggatgtgctggaggcagttgcgccagaacgcccccggtgtgcatactgctccgcagaggcatccaagcggtgtagccgatgtcagaatgagtggtattgttgtagggagtgccaggttaagcactgggaaaaacacgggaagacttgcgtgttggccgctcagggggacagagccaaatag

SEQ ID NO: 24064 - DNA, 1377 bp, synthetic construct
  source 1..1377: mol_type = other DNA; note = Synthetic coding sequence
atgaacgaggccatggccaccgacagcccccggcggcccagccggtgcaccgggggcgtggtcgtacgcccacaggccgtgaccgagcaaagctatatggaatctgttgtcaccttcctgcaggatgttgttcctcaggtttattgttgtggcgacaatatccagtcatacaccgccacagtcatttcagcagccaaaacactgaagagcgggttaaccatggtcgggaaagttgtcacacagctaaccggaactctgcctagcggtgttacagaggatgatgtcgccatccactcaaactctcgtcgctctcctctggtgcctggtatcattacagtcattgacacagaaactgtgggtgaagggcaagtgctggtgtctgaggactcagacagcgatggtatcgtcgctcattttcctgctcacgaaaagccagtgtgttgcatggcctttaatactagcggtatgctgctggtgacgacggacactctcgggcacgacttccacgtgttccagattctaacccatccttggagctctagccagtgcgctgtccatcacctgtacacgctgcaccggggggaaaccgaggctaaggttcaggacatctgtttctcgcacgactgtcgctgggtggtggtgagcaccctgcggggtacctcacacgtgttcccgattaacccgtatggcggccaaccctgtgtcaggacacatatgagtccaagggttgtgaatagaatgagcaggtttcagaaaagcgccgggttagaagagatagagcaggagctcactagcaagcagggaggacggtgctcacccgtcccgggcctatcgtcctcaccttcaggctctccccttcatggcaaattgaactcacaggactcatacaacaacttcaccaataacaatccaggaaatccacgcctctcgccccttccatccctcatggtggtaatgccactagcccagattaagcagcctatgaccttaggcaccattactaagaggacgggtaaagtgaagccacctccccagatttcgcctagcaagagtatgggaggggagttttgtgttgccgcaatctttggtacaagccgtagctggtttgcaaataacgccggcctgaagcgagaaaaggatcagtctaagcaggtcgtagtagagtccctgtatatcatctcctgttacggaactcttgtcgaacatatgatggaaccacagccactgaacgggatgaactgtagtcatcgcctgatgcagactaccctctgctcctccctgcagatgcagtactctatcattagttcttgtctactggcatggtttcctctagaagttctgggccctctgctggatatggggctgacgacggtctag

SEQ ID NO: 24065 - DNA, 309 bp, synthetic construct
  source 1..309: mol_type = other DNA; note = Synthetic coding sequence
atgcgggccagcccctgcatcagccagcccgccgccagctggcacccccggccctccgccctccggccaactgctggatcgggtccggatacaagaactcccggcacggtggaagatggctcagccccatgcccggcattcagatctcctgccgtgagcccctgtggagaagagccttgttgcttccagatctcaccggctgaagaaactctggaattaggacgtcttgtgtcacccggatgccacaaatccagtgcccctcaggaacggcggctggatccaagggccaggtgcgttgtccatatctag

SEQ ID NO: 24066 - DNA, 4227 bp, synthetic construct
  source 1..4227: mol_type = other DNA; note = Synthetic coding sequence
atgtggagcctgaccgccagcgagggcgagagcaccaccgcccactttttcctgggcgcaggggatgagggtctgggcacccggggcattgggatgaggccggaggagtcggacagcgagcttctggaggacgaagaggatgaggtccctccagaaccccagatcatcgtgggaatttgtgccatgacaaagaagagtaagagcaagcccatgacccagatattagaacggctgtgtaggttcgattacctcactgtggtgattctcggggaggacgttatactgaacgaacccgtagaaaattggccatcttgccactgtctgattagctttcatagcaaggggttcccactagataaggctgttgcgtattctaagcttagaaaccccttcctcatcaatgacttagctatgcagtactacatacaagataggcgggaggtttacaggattctgcaagaagaaggcatcgatctaccccgttacgctgtgctcaatagagacccagccaggccggaggagtgcaaccttattgagggagaagatcaggtcgaggtaaatggcgccgtatttcctaagccgtttgtggaaaagcctgtgtccgcagaggatcacaatgtgtacatctattatccatcatcagctgggggaggatctcagcgcctttttagaaagattggttctaggtcaagcgtgtactctccagaaagctctgtgcgcaagactggatcctatatatatgaggaattcatgcctacagacggcactgatgtgaaagtctatactgttggcccagattatgcgcatgccgaggcaagaaagagtcctgcccttgacggcaaggtcgagagagattcagaggggaaggaaatccgttatccggtcatgctgacagccatggagaagcttgtcgcgcgcaaagtttgcgtggcatttaaacagaccgtttgtggcttcgatctcctgcgggccaacggacattctttcgtgtgcgacgtgaacgggttcagtttcgtcaagaatagcatgaaatattacgatgactgcgcaaagatattgggcaataccatcatgagggagctggccccacaattccagataccctggtccatcccgaccgaagctgaggacatcccaatcgtaccaacaacctccggcaccatgatggagctccggtgcgtgattgcaattataaggcatggcgaccggacacccaagcagaaaatgaaaatggaagtcaagcacccaaggttcttcgctttatttgagaagcacggggggtacaagaccggtaagctgaagttgaaaaggccagagcagttacaggaggttctggatattacacggctgctgctggccgaactcgagaaggagccaggtggcgagatcgaagagaagacgggtaaattggaacagttgaaatctgtgctcgaaatgtacgggcatttttctggaattaatcgcaaagtgcagctaacttattatccacatggcgtgaaggctagtaatgaaggccaagacccacagcgggagactctggcccccagcctgctcttggtgctgaaatggggaggcgaactgactccagccggtagagtccaggccgaggaactgggacgtgcgttcagatgcatgtatccaggtggccagggggactacgcagggtttcctggttgcggacttctacgattgcactctaccttccggcacgatctgaaaatatacgcctctgacgaggggcgggtacaaatgacggctgcagcatttgctaagggtctgctcgccttagaaggagagctaacaccaatcctggtccaaatggtcaaaagtgcaaatatgaatggactcctcgactcagacggtgactccctgtcatcttgtcagcatagagtcaaggcaagactccaccacatcctgcagcaggacgcccccttcgggccggaggactacgaccagctcgcccccacaaggtctacatccttgttaaattctatgactattatccagaatcctgtaaaagtatgcgaccaagtgtttgcactcatcgagaacctgactcaccagatcagagagcgcatgcaagatccaaggtcagtagacctgcaactctaccattcagaaactttagagctgatgcttcaacggtggtccaaattggaacgggactttcgacaaaagtccggccgatatgacatcagtaagattcccgacatctatgactgcgtcaaatatgatgtacaacataatggctccttaggtcttcagggcacggctgaactgcttagactgagtaaagcattagcagatgttgtcatcccgcaagaatacggaataagcagggaagagaaattggagattgccgtgggcttctgtcttccactcctcagaaaaattctgctggatctgcaacgcactcacgaagatgaaagcgtcaataagctgcacccgctttatagcaggggcgttcttagccctgggcggcatgttcggacacgcctgtactttacgagcgaaagtcacgtgcacagccttcttagtgttttccgatacgggggcctcctggacgaaacccaggacgcacagtggcagcgtgccctggactaccttagtgccatctctgaactgaactacatgacccagatcgtgatcatgttatatgaagacaacacccaggatccactgtctgaggagcgcttccacgtagaactgcacttttccccaggcgtgaaaggcgtcgaggaggagggaagtgcaccagctggttgtggttttcgtccagccagcagcgaaaatgaggagatgaagactaaccaaggctccatggaaaatctatgcccaggcaaggcatcagatgagcccgaccgagcccttcagacaagccctcagccacctgagggacccggactaccgcgtaggagtcctttgattcgaaatcgcaaggccggaagcatggaggttctctcagagacatcttcctctcggcccggcgggtacaggctgttttcatcctctcgacccccaactgagatgaagcaaagtggcctgggatcacagtgcaccggcttattctcaactaccgtccttggaggcagctccagtgccccgaatctgcaagattatgcaaggtctcacggcaagaagctcccccccgcttccctaaaacaccgcgacggtttcgaggggtgttccatggtgccaactatatacccgctggagacgctgcataatgccttaagccttaggcaagtgtccgagttcctgtctcgcgtttgtcagcgccatacagacgcccaagcacaagcctccgccgctttattcgattccatgcactcatcccaggcatctgacaatcctttctcaccccctcgaactctgcattccccacccctccaactgcagcagcggagtgaaaaaccgccttggtactcttccggacccagctccactgtaagcagcgctggtccctcaagccccaccacagtggacggaaacagccagttcgggttctccgaccagcctagtctgaacagccacgtcgcagaagagcaccaaggccttggcctgctgcaggagactccggggagcggtgctcaggaactgagcatcgagggtgagcaggaactgtttgagcccaaccaatccccccaggtccccccgatggagacgtcccagccctacgaggaggtgtctcaaccctgccaggaggttccagacataagccagccctgtcaggacattagcgaggcacttagtcagccctgtcagaaggtgcctgatatatcacagcagtgtcaggagaatcacgacaacggcaatcacacatgccaagaggtcccccacatctctcaaccctgtcaaaaatcttcccagctctgtcaaaaggtaagtgaggaggtgtgtcagttatgcctggagaatagcgaggaggttagccagccttgccagggtgtttctgtggaggttggaaaactcgtgcacaaatttcacgtaggcgtaggatccttggtacaggaaaccttagtggaagtcggcagcccagccgaggagattcccgaggaggttatccaaccataccaggaatttagtgtcgaggtgggaaggctcgcccaggagacgtcagctataaatctactatcacagggaatccctgaaattgataagccttcacaggaattccccgaggagatcgatctgcaggcccaggaggtcccggaggagataaactag

SEQ ID NO: 24067 - DNA, 2994 bp, synthetic construct
  source 1..2994: mol_type = other DNA; note = Synthetic coding sequence
cggcccccccccgccggcccccaggcccccgagggcgcccgggccggatcccgacccgtacagctcttggctttgctgagctcctggtgtgaggagctcggcagactgttactgctgcgacaccagaaaagcaggcagtccgatccccctggtaagctgccgatgcagccacccttgagtagcatgagttctatgaaacctacactgtctcattccgatggatcgtttccgtatgatagcgtgccctggcagcaaaataccaatcagccccccgggtcactatcagtggtgactaccgtttggggggtcacgaatacatcacagtcacaggtacttggaaaccctatggccaatgccaataacccgatgaaccccggaggcaatcctatggcttcaggcatgacaacctccaaccctggactgaacagcccccaattcgccggacaacaacagcagttctccgcaaaggccggcccagcccagccctacatccagcagtctatgtacggtagaccgaactatcctggatcaggcggttttggcgctagttaccctggcgggccaaatgcacccgctggaatgggtataccgcctcacacacgcccaccagctgattttactcaaccagccgcggctgccgccgccgccgcagtggctgcggcagccgctactgcaactgcaacagcaactgccacagtcgccgctctgcaggagactcagaataaggacattaaccagtacggtccgatgggaccgactcaagcctacaactcacagtttatgaatcagcccggccctaggggccctgcaagcatgggaggctccatgaacccggctagcatggcagccgggatgacccctagcgggatgagcgggccgccgatggggatgaaccaacctagaccccctggcatcagcccctttggtactcatggtcagcggatgccccagcaaacttacccgggccccagaccacaatctctgcccattcagaatattaaaaggccctatcctggcgagcccaattacgggaatcagcagtacggccctaactcccagttcccaacacaacctggtcagtacccagcccctaatcccccaagacccctgacctctccaaattatccaggacagcggatgcccagccagccgtcctcgggtcagtatcccccccctactgtcaatatgggacagtattataagcccgaacagtttaacggacaaaacaataccttctcaggttcctcctactctaactacagccaggggaacgtaaaccggcctccacgtcccgtgcccgtcgccaattacccacactcacctgtacctggaaatcccactccaccgatgaccccaggctcaagcattccaccctacctaagcccatctcaggatgtgaaaccgcccttcccacccgatatcaaacctaacatgtccgcccttccgcctcctcccgccaatcacaatgatgaattacggttaacgttccccgttagagacggagtggtcctggaacctttccggctcgaacacaatctcgcagttagtaaccatgtttttcacttacgacctacagtgcatcagaccttaatgtggcggtctgaccttgagttgcaatttaagtgctaccaccacgaagataggcaaatgaacacgaactggcccgcgagcgtgcaggtgagcgtgaatgctactcccctaacaatcgagagaggtgacaacaagaccagtcataagcccctgcacctcaaacacgtgtgccagcctggacggaacacaatccaaataacggtgacagcatgttgttgctcacatctcttcgttctgcagctggtgcatcgcccctctgtgcggtctgtactccaggggcttctcaaaaagcgactgctgccagcagagcactgcataacgaagattaaaaggaacttcagtagcgtggccgcctcatccggcaacaccacacttaacggcgaggatggcgtggaacagacagcaataaaagtgagcctcaaatgtccgattactttcagaaggatccagctgcccgcccgcgggcacgactgcaaacatgtgcagtgcttcgatctggagagttatctgcagcttaattgcgagagaggtacctggaggtgtccagtctgtaacaagacagctttgctagaggggctggaagtagaccagtacatgtggggcattttaaatgccattcagcattctgagtttgaggaggtaaccatcgacccgacctgttcctggagacccgtgcccatcaagtcggacctgcacataaaggatgatcccgacggaattccctcgaaacgttttaaaaccatgtcgccctcccagatgatcatgcctaatgttatggagatgatcgctgcactgggacctgggccctcgccctatccactgccccctccccccggcggtaccaattctaatgactattcctcccagggtaacaattaccagggtcacgggaactttgattttcctcatggcaatcctgggggcacaagcatgaatgatttcatgcatggtcccccccaattgagccatcctcccgatatgcctaacaatatggcggcgctggagaaaccacttagtcacccgatgcaggagaccatgccgcacgcgggatcttctgaccagccgcaccccagtatccaacagggcctgcacgtcccccacccctcttctcagtccgggcccccactccaccacagcggtgcccctcctcctcctccctcccagcctcctaggcagcccccgcaagccgcaccgagttcacacccccactcagacctgacattcaatcctagctccgctctcgagggacaagctggtgcacagggggcctctgatatgcctgagccgtccttggaccttctgcctgagctgactaacccggacgagctgctctcctatctcgacccaccagatctgcctagtaactccaacgacgacctcttatctctttttgagaacaactag

SEQ ID NO: 24068 - DNA, 3405 bp, synthetic construct
  source 1..3405: mol_type = other DNA; note = Synthetic coding sequence
atgggcaaggagcaggagctgctggaggccgcccggaccggccacttgcctgccgtcgagaagctcttgagcggaaagcgtctgagcagtggtttcggtggtggcgggggcggtggtagtggtggtggaggtgggggctcaggggggggcggaggcggtctgggatcatcatcccaccccctgagcagcctactatctatgtggcgcggccctaatgtcaattgtgtagatagcacaggatacacccccctacaccatgctgccctcaacgggcataaggatgtagtcgaggtactcctcagaaatgatgccctgaccaatgtggctgatagtaaaggctgctatccactccacctggccgcatggaaaggagatgcacagatcgtgcggttgcttatccaccaaggcccttcacacacacgagtaaatgaacaaaacaatgacaatgagaccgcgctgcactgcgcggcacagtacggtcatacagaagtagtgaaagtgctgctcgaggagctgaccgaccctactatgaggaataataagttcgaaacacccttggatttggccgcactgtatgggcgactggaggtcgtgaagatgctgttaaacgctcatccgaacctgctgtcttgtaatactaaaaagcacacgcctctgcaccttgccgctcggaatggccacaaggcggtggtacaggtcttgttggacgctggcatggactcaaactatcagactgagatgggcagcgccttgcacgaagcagctctctttgggaaaaccgacgtggtccaaattctattagccgccggtacagatgtcaatatcaaagacaatcatggtctcaccgctctcgacaccgtgagggaactaccttcccaaaagtctcagcagatcgcagcactaattgaggaccacatgacaggcaaaaggtctacaaaggaggtggacaaaactcctccaccgcaaccaccactcatttcaagcatggactctattagtcaaaaatctcaaggggatgtggagaaggctgtgaccgagcttattatcgacttcgatgcgaacgccgaagaggaaggcccatacgaggcactgtacaacgctatcagctgccatagtctggattcgatggctagtggacgctccagcgaccaggattcgacaaataaagaggctgaagccgccggtgtcaagcccgctggagtccgacctcgtgaaaggcccccgcccccagctaaaccaccacccgatgaggaggaggaggatcacatcgataaaaaatacttccccttaacagccagtgaagtgctgtctatgcgccctaggattcacggctctgcggccagagaggaggatgaacacccgtacgagctgctgctcaccgccgaaactaaaaaggtagttctggtggacgggaagacaaaagaccataggcggtccagctcttctcgcagccaggatagtgcagaagggcaggacggacaagtgcccgagcagttttccggtctgctccatgggtcttctcccgtgtgtgaggtcgggcaggatcctttccagcttctgtgcaccgccggccagtctcatcccgacgggtctccgcaacagggtgcgtgccacaaggccagcatgcagttggaagagacaggggtgcatgcccctggtgcttcacagccctccgccctagaccagtcaaaacgggtcggatacctgacgggactcccgactactaattccagatctcatcccgaaaccttgactcatacggcatcacctcaccctggtggtgctgaagagggcgatcgctctggtgccaggagccgcgccccacctactagtaaacccaaggccgaactgaaactctctagatcgctcagcaaatctgacagcgatctactgacatgttctcctaccgaggatgcaactatgggctctcgatctgaaagcctgtctaattgttctattgggaaaaaacgacttgagaaatctcccagcttcgcttccgagtgggatgagatcgaaaagatcatgtcttccattggcgaggggatagacttctcccaggaacgtcaaaaaatttctggcctgcggacgctggagcaaagtgtgggagaatggcttgaatcaattgggctccagcagtatgaaagcaagttgctgctcaacgggttcgacgacgtgcacttcctcggctccaacgtgatggaggagcaggacctgagagatatcggcatcagcgatcctcaacacagaagaaagctcctgcaagctgctcggagtctccctaaggtcaaagccttgggctacgatggcaacagcccgccctctgtaccatcatggctcgattctcttggactgcaagattacgtgcatagtttcctcagctcggggtattcctccatagacactgtaaagaatctgtgggaactggaactcgtgaacgtgctcaaggtccagctccttgggcatcgcaaaaggattatcgcatcattggctgaccgcccatacgaggaaccaccgcagaagcccccccggttcagtcaactccggtgtcaggaccttcttagccaaacatccagtcctcttagtcagaatgattcctgcaccggcaggtcagcagacttactgctgccccccggcgacaccggtcggcgcaggcacgacagcttacatgacccagccgccccctctagagctgaacgcttccgaatccaagaagagcaccgagaagccaagctcaccctgcgaccaccatcactcgccgccccatatgctcctgtgcagagttggcagcaccagcctgaaaagttgatctttgagtcttgcggatatgaggccaactacttgggtagtatgctgatcaaagatctgaggggaaccgaatcgactcaggacgcctgcgcaaagatgaggaagagcactgagcatatgaaaaagataccgacaataatcctaagcataacttacaagggagtcaaatttattgacgcgtcaaacaaaaatgtgatagctgagcacgaaataaggaatatctcctgcgccgctcaggaccccgaagatttgtgcacattcgcttatataaccaaagatttacagacctctcatcattactgtcacgtttttagtacagtggatgtcaaccttacctatgagattattctcactttaggacaagcgttcgaagtggcctatcagctcgcacttcaagcccagaagtcccgcgccaccggggctagcgctgcagagatgattgagactaagtcttccaagcctgtacctaagccaagagtcggggtgcgcaagagcgctttagagcctccagatatggaccaagacgcccagagccacgcaagcgtgagctgggttgtagatcctaaaccagactcaaaaaggtccttgtccacgaattag

SEQ ID NO: 24069 - DNA, 3099 bp, synthetic construct
  source 1..3099: mol_type = other DNA; note = Synthetic coding sequence
atggaggccgccgccgccgtggtggccgccgaggccgaggtggagaacgaggacggtgactcctcatgcggggacgtttgcttcatggataaaggcctgcagtctatctccgagctgtccctggattccactttacatgctgttaacctgcattgtaacaatatttcaaaaatcgaggcgattgaccatatttggaacctgcagcacctggatctctcttctaaccagatttcccgtattgaaggactaaataccttgactaagctgtgcacactgaacctgtcgtgtaatttaataaccaaggttgaaggcctggaagagctcatcaatctaacccgcctaaacgtctcttataatcacatagatgacctgagcggccttatcccactacacggcatcaaacataagctgagatatattgacctacattcaaaccgcatagactcaattcatcacttgctgcagtgtatggtcggacttcatttcttgactaacttaatcctggagaaggacggtgatgataaccctgtttgtagacttcccggctatcgcgccgttatacttcagacactccctcagttgcgcatcctggactgcaagaatatttttggcgaaccagtgaatttgacggaaatcaattcttctcagctccagtgtttagaagggttgctggataaccttgtgagttctgacagcccactgaatattagtgaggatgaaattattgatcgcatgcccgtgatcacagcgcccatagatgagctggttcctttggaacaatttgcctcgacccctagcgacgcagtactgacaagctttatgtctgtctgtcagtctagcgaacccgagaaaaataatcatgaaaacgacttgcagaatgagataaaactgcagaaattagacgaccagatacttcaactgttaaacgaaacaagcaactccattgacaacgtgctggagaaggacccacgtcccaaacgggatacagatatcacaagcgagagtgattacggcaaccgcaaagagtgcaaccgtaaggtgccccgcagaagtaaaataccgtatgatgcaaaaacaattcaaaccattaagcatcacaacaaaaactacaatagttttgtgtcatgtaacaggaaaatgaagcctccttacctgaaggaactctacgtgtcatcttccttggctaattgcccgatgctccaggaatcagaaaagccaaaaaccgaaatcataaaagtggaccagtctcactcagaagacaacacataccagtccctggtcgagcaactggatcaggaacgagagaagcgatggcgtgctgaacaggctgaaaataaactcatggattatatcgatgagctgcataaacatgctaacgagaaagaagatattcacagtctggctctgctgaccacagaccgtcttaaagagattatcttcagagagagaaatagcaaaggacaacttgaagttatggttcacaaattgcaaaatgaaattaagaaactcaccgttgagcttatgaaggccaaggaccagcaggaagatcaccttaagcacctacgaacgctagaaaagacacttgaaaaaatggaacggcagaaacggcagcagcaggcagcccagatcaggctcatccaggaggtcgagctgaaagcgtccgccgccgatcgggaaatctacctacttagaacctccctccaccgcgaaagagaacaggcacagcagctccatcaattactcgccttgaaagagcaggagcataggaaggagttggaaacccgcgaattctttacggacgctgactttcaggatgccctcgccaaagagatcgcgaaagaggaaaagaaacatgagcagatgatcaaagagtatcaagagaagatcgacgttctgtcacagcagtatatggacctcgaaaatgaatttagaatagctctgacagtcgaggcccggagattccaggacgtcaaagatggattcgagaatgtggctacagagctggccaaaagcaagcatgccctgatttgggcacaaaggaaggaaaacgaatcctctagcctcatcaaagatctgacttgcatggtaaaggagcagaaaacgaagcttgccgaggtgagtaaacttaaacaggagacagctgccaatctgcagaaccagataaatacactggaaatcctgatagaagatgataagcagaaatccatccagattgaacttttaaagcacgagaaggtgcagttaatatccgagctggcagctaaagaatccttaatttttggcttgcgcactgaacgcaaggtgtggggtcatgagcttgctcagcaggggtcttccctggctcaaaaccgagggaaactggaggcccaaatagaaagcttgagtcgagagaatgagtgcctgcggaagacgaatgaaagcgactctgacgcattgcggatcaaatgtaagattatcgacgatcagactgagaccatcagaaaattgaaggattgtcttcaggagaaggacgagcatatcaagcgtctccaggaaaagattactgaaattgagaagtgcacacaggagcagctggacgagaaatcttcccagctcgatgaggtgctagagaagctcgaacggcataacgagcggaaagaaaagctgaagcagcaactgaaggggaaggaagttgaactggaggaaattagaaaagcctactccactctgaacaggaaatggcacgataagggagaattactgtgccatctagaaacacaggtcaaagaggtgaaagaaaaattcgaaaacaaggagaagaaactgaaagccgagcgcgataagtccatagagcttcaaaaaaatgctatggaaaaactccactccatggacgatgcattcaaacggcaggtggacgcgatcgttgaggcccatcaggccgaaatcgcccagcttgctaatgaaaagcagaagtgtattgactcagccaacttgaaagtacaccagatagaaaaagagatgcgagagctcttagaggagacatgcaaaaacaagaaaacaatggaggcaaagatcaagcagctggcattcgctctgaatgagattcagcaggacatgtag

SEQ ID NO: 24070 - DNA, 219 bp, synthetic construct
  source 1..219: mol_type = other DNA; note = Synthetic coding sequence
atgagctaccagcagcagcagtgcaagcagccctgccagcccccccccgtgtgccctactccaaaatgtcctgagccatgcccacctcccaagtgccccgaaccatgtccctctcccaagtgtccacagccctgtcctcctcagcagtgccagcagaagtatccccccgtcacccctagtcctccttgccaacctaagtgccctcccaaatcaaaatag

SEQ ID NO: 24071 - DNA, 888 bp, synthetic construct
  source 1..888: mol_type = other DNA; note = Synthetic coding sequence
atggagctgatccaggacaccagccggccccccctggagtacgtgaagggagtgcccctgataaaatactttgctgaggccctcggtccactccagtccttccaagctaggccagatgacctgttaattaatacttatcccaagtctggcactacctgggttagccaaatcctcgatatgatataccaggggggtgatcttgaaaagtgcaacagagcgccaatttacgtcagagtcccttttctcgaagttaatgatcccggagaaccaagcggactggaaacattgaaggacaccccacctcctcgtctgatcaagtctcacctgcccctggctctcttaccccaaactctgctggaccaaaaggtgaaggtagtctacgtcgcgaggaaccccaaagacgtcgcggtgtcctattatcactttcataggatggagaaggcacacccagagcctggaacatgggactcgtttttggaaaaattcatggcaggcgaggtgtcctacggaagctggtatcagcacgttcaggagtggtgggaactgtctaggacacatccagtcttgtacctgttttacgaagatatgaaagaaaaccccaaaagggagatccagaagatcttagagttcgtgggacgttcgcttccagaagagactatggatttcatggtgcaacatacctcatttaaggaaatgaagaagaatccgatgacgaattatactacggttccccaggagctgatggatcacagtattagcccgtttatgagaaagggcatggcgggtgattggaagacaaccttcactgtcgcacagaacgagcggtttgacgccgattacgcggaaaagatggctggttgcagcctgtccttccgtagcgagttgtag

SEQ ID NO: 24072 - DNA, 1491 bp, synthetic construct
  source 1..1491: mol_type = other DNA; note = Synthetic coding sequence
atgaagctgggcaagaagcccatgtacaagcccgtggacccctactcccgcatgcaatctacatataattataatatgagaggcggagcctaccccccccgatatttctacccattccctgtgccgccgcttctgtaccaagtcgagctctccgtggggggacagcagttcaatggcaaagggaagaccagacaggccgccaaacacgatgccgcagccaaagcattacggatcttgcaaaatgagccgcttccggagaggctcgaggtgaacggaagagagtcagaagaggagaacctcaataaatccgagattagccaggtgttcgagatcgctctcaaaagaaatcttccagtcaattttgaagtggccagggaatccggtccacctcacatgaaaaactttgtgacgaaagtttcggtgggagaatttgtgggtgagggcgaggggaaaagcaaaaagatctccaaaaagaatgcagcaatcgccgtgctggaggaactgaagaagctgccacctctcccggctgtggaacgggtgaaaccccgcatcaagaagaaaacgaaacccattgtgaagccacagacttctccagagtacgggcagggcattaatcctatctccaggctcgcacagattcagcaggcgaaaaaggagaaggaacctgagtacacattgttgacggaacgaggcctgcccaggagacgtgaattcgtgatgcaagtgaaggtgggaaatcatactgcagaaggaactggaacgaacaaaaaagtcgccaagcgaaacgccgcagagaacatgttagaaattttgggtttcaaagtgcctcaagcccagcccacaaaacctgccctgaaatcagaagaaaaaacacctattaagaaacccggggacggcagaaaagtgacctttttcgagccgggctcaggcgacgaaaatggcacgtctaataaagaggacgagttccgcatgccatacctatcccaccagcagctgccggctggcatactacccatggtcccggaggtggcccaggctgttggggtgtctcagggtcatcatactaaggatttcaccagggccgcgcctaatcccgctaaagccaccgttacagccatgatcgcaagagaactgttgtacggaggcacgagcccaacagccgaaaccatactcaagaataacatctcttcaggccacgttccccatggccccttaactcggccttccgaacagcttgattacttgtctagggtccaaggcttccaggtggagtataaggatttccccaaaaataacaagaacgagtttgtgagcctgatcaactgtagctcccagcctcccttgatttcccatggtatcgggaaggacgtggaaagctgtcacgacatggctgcgcttaacatccttaagctgctcagcgagcttgatcagcagtcgacagagatgcccaggaccgggaacggcccaatgtccgtgtgcggccgttgctag

SEQ ID NO: 24073 - DNA, 1575 bp, synthetic construct
  source 1..1575: mol_type = other DNA; note = Synthetic coding sequence
atgagcagctgcgtgagcagccagcccagcagcaaccgggccgcccctcaagatgaattgggcggcaggggctcatcatccatccatctgggaatggagagctttattgttgtaacggaatgtgagcccggctgtgcagtggacctcgggcttgccagagataggcccttggaggccgatggacaggaagtccccctcgacacctcaggtagtcaggcaaggcctcacctgtcaggacgcaaactgtctctacaggaaagaagtcagggaggtttggctgcgggcggaagtctagatatgaacgggaggtgtatctgcccgagcctcccatatagcccagtttcctcaccccagagttccccgcggctgccccggcgtcctacagttgagtcgcaccacgtgtcaattaccggtatgcaggactgcgtccagctaaaccaatataccctgaaggacgagataggcaagggttcttacggagtggtcaaattggcctacaatgaaaatgacaatacatattacgccatgaaagtcctttccaaaaagaagcttattcgacaggctgggttcccgcggaggcccccaccccggggcactcgacctgcgccaggggggtgcatccagccacgtggtcctatcgaacaggtctaccaggagattgccatcctgaagaagctggatcatcctaacgtggtgaagctggtggaggtgttggatgaccccaatgaagaccacttatatatggtattcgagctggtcaatcagggacccgttatggaggtgcccacactcaagccgctgtcagaggatcaagcccgattttattttcaagaccttatcaagggcatagagtatcttcactaccagaagataatccatcgcgacattaagccaagcaatttgcttgtcggggaggacgggcacattaaaatcgctgatttcggagtgagcaacgaattcaagggcagcgatgcactgctcagcaatactgtggggacccccgcttttatggccccagaaagcctatctgaaactagaaaaatattctctgggaaggccctggatgtgtgggctatgggcgttactctgtactgcttcgtgttcggccaatgccctttcatggatgagcgaataatgtgtctgcacagcaagatcaagagtcaggccttggagtttcctgaccagcctgacatcgctgaagatctgaaagaccttatcacccgcatgctggataagaaccccgaatctcggatcgttgtccctgaaattaaactccatccatgggtgacccgccacggcgccgaaccattaccttccgaagacgagaactgtacgttggtggaagtaactgaggaggaggtggagaattctgtcaaacatattccgtctttggccaccgtgatcctggtgaagacaatgattaggaaacgctcatttggcaatcctttcgagggcagccgcagggaggaacggagtctgtctgcgcctggcaatctgctcaccaagcagggatcagaggataatctgcaaggcaccgatcccccacccgtgggcgaggaggaggttctgttgtag

SEQ ID NO: 24074 - DNA, 1902 bp, synthetic construct
  source 1..1902: mol_type = other DNA; note = Synthetic coding sequence
atgaaggccatcaagaagagcctgaccgaggaggagtacctgtacctggatttctctcaccaaaccgaaggctgtatcttccccctgcacacgtcggttaccttatttctacttagttactgtgattgcaagattttcaaaatttgtctcgtggtcacaaaggaagtgtcaagagatagctcgctgctgagggacgatctcattcaggatgtggagatccagatcatctcacggcaagagctgccacccatcgtgcagaattgctgcctaccagcagtggtggaacgcagcgataatttttgtcgggccggtttagctgtggttctgcggcatatcatccagaagtcatatgaggcggatcctctgaagaaagagctgctggagctactggggtttaaaaaaacttgtctcaaggcctgtgccgaggtgtcacagtggacccggctgtgcgaactgaccatacctcttgccatcgagaatttccttcgtgagtcttccgaccaaccaccaaccatccccgttgaaatcttacaacttgaaaagaagttgtccgaacctgtccgggtccacaatgatgataagctgcgcagacaaaagctgaagcaacagaaggctgacggcgtgggcccacctctcaccaagggcaaagcaaagagcaaggtgcacacccaggaaacgagtgaagggctggattcaagcagcaagtcactagaactaaaggttgccttcagcaagctgacagtacaggaggaacccgccactaccaaccgggaaccgagtcacattcgcaaggctaaagcctccgacttgccacccctagaacacgtgtttgccgaggggctgtatttcacgttggctgacattgtcttgttgccttgcatccaccatttcctagtgataattagtcggaaattttctgagaagctcgtcgagttccccctacttgcgagttggtatcagaggattcaggaagttcccggagttaagacagcagcctctaagtgtgggattcaattcctccacctcccaaagctgctaactacaagtaccgaacagcaccctaacctgtgtgaggttccaggtgttgaggaacagtctgatccactgtttatcggggggccccgacccactatggcgaaactcatggagaaggggatcgaagtgatgttcagcccccacccgtgccctacctggaccctggactggaatgtgttgccagccgcagtgagtccaaaagaggggaaaatgtcctccgatagagctctgcgcaaacaacaacagcttaacaatttggtctacgtggtgacaaatcaggccaaacctggggacagaattgtcgacttctgctcaggtggcggccacgtggggatcgtcttggctcacatgctgccctcttgtcaggtgacgctcattgagaacaaggaattaagtctgatacgagcgaagaaacgaagcgacgagctggggctgagtaacatttggtttatacaggccaacatggagtacttcacgggaatgttcaacatcggagtcgccctgcacgcatgcggagtcgccaccgatatggtgatcgagcactgtataaagacgcgagcaagctttgttacttgcccctgttgttacggtttcatccagaacacaagcaaatttaattttcctaaatccgagcagtttaaaaagaccctctcttataaggagcatatgattctctgccggttcgccgatcagaccgctgtgcagctgccgcctcagaggcgtctgattggtaaacagtgcatgtgtttggtggacttggatagggctagagccgccgaagagtgtggatatagcgtgcaggtaatttccatggagcccgaatcatgttctcctaagaataatatgatagtcggagtccccatctag

SEQ ID NO: 24075 - DNA, 519 bp, synthetic construct
  source 1..519: mol_type = other DNA; note = Synthetic coding sequence
atgagcagcggcaactaccagcagagcgaggccctgagcaagcccaccttcagcgaagagcaggcctccgccctggttgaatctgtcttcggccttaaagtctcaaaggtaaggcccctgccctcctatgatgaccagaattttcatgtatacgtgtccaaaacgaaagacggtcccactgagtacgttctaaaaatcagtaacactaaggcgagtaaaaatccagatttgatagaagtgcagaaccatataatcatgttcctgaaggccgcagggttccccaccgcttccgtgtgtcacactaagggggataatactgccagtctggttagcgtagactcaggcagtgagatcaaaagctacttggtgcgccttttgacatacctgcccggacggcctattgctgagcttcccgtctctccacagcttttgtacgaaatcggtaagctcgctgccaagttggacaaaaccctgcaagagggtaagcctcgtgtgacccctttgctggcaaaaaactag

SEQ ID NO: 24076 - DNA, 2937 bp, synthetic construct
  source 1..2937: mol_type = other DNA; note = Synthetic coding sequence
atgggctggaagcccagcgaggcccggggccagagccagagcttccaagcctcaggtctgcaaccacgatccctgaaggctgctagacgggctaccggcaggcccgaccgaagcagggccgctcgcccaactatggacccctccgcccatcggagccgggctgctccgccaaacatggatccagatccgcaagcgggggtccaggtcggtatgagggtcgtgaggggtgtagactggaaatggggacagcaggatgggggagagggcggcgtgggcaccgtggtcgaactggggagacacgggtccccttcgacacccgatagaaccgtggtggtgcagtgggaccagggtacaagaaccaactacagggcaggctatcaaggcgcacatgacctgttactgtatgacaatgcgcagattggagtgagacacccgaatatcatatgtgattgctgcaagaaacacggactgaggggaatgaggtggaaatgtcgagtctgcctggattacgatctttgtacacaatgctatatgcataacaagcacgagttggcgcacgcattcgaccggtatgaaacggcccacagccgcccagtgactctgagcccacgccagggtctgcccaggattcctttaagagggatttttcaaggagctaaggtcgtgcgcgggccagattgggagtggggctcccaggacggaggagaaggcaaaccagggcgcgttgttgacattagaggatgggacgtggaaacgggccggtccgttgcatccgtcacttgggctgatggaacaacgaacgtctatagggtgggccacaaagggaaggtggatttgaagtgtgtgggcgaggcggctggaggtttttattataaggaccatctcccacggctaggtaagccagccgagcttcagagaagggtgtctgccgattcacaaccatttcagcacggggataaagtgaagtgcctgctcgatactgacgtcctccgcgagatgcaggaagggcatggcgggtggaaccctcggatggcggaatttataggccagactggaactgttcatagaatcaccgacaggggggatgtgcgcgtccagttcaaccatgagacccgctggactttccacccgggtgctctgactaaagccctcggccgcgtaggcaaagttgtgaaagtgttcggtgatggaaacctgcgggtggctgtggcaggccagcgctggactttcagtccctcttgcctggtagcctaccgccctgaagaagatgccaaccttgatgtagctgaacgggcccgagagaataaatcctctttgagtgtagctctggataaactaagggctcagaagagtgatcccgagcatccaggacgcctggtggtcgaggttgcccttggaaatgctgcaagagctttagacctgcttaggaggcggcctgagcaagttgacacaaaaaatcaggggcggaccgcactccaggtggcagcttacttggggcaagtggagctcattcgcctgctgcttcaggcacgagctggggtggacctccccgatgacgaagggaacactgcactccattatgcagctctgggaaaccaacccgaggcaactcgcgtacttctatcagccggctgccgcgccgacgccattaacagcactcagagcaccgcactccacgtcgcagtccagcgagggttcctggaggtggtgcgggctctgtgcgagcggggatgcgacgtgaacctccctgacgctcactccgatacacctctgcacagtgctatttcggcgggcaccggcgcctctgggatcgttgaagttctgaccgaagtccccaatatcgacgttactgctaccaattcccaaggcttcacactgctgcatcacgcttcccttaaaggtcatgctctcgccgtcaggaagattctggcccgggctcggcaattggtcgacgcaaaaaaggaggacgggttcaccgcgctgcacctggccgccctgaacaaccatagagaggtggctcagattctcatcagagagggcagatgcgatgttaacgtgcgaaaccgtaagttacagtctccactacatctggccgtgcaacaagcccacgtcggactcgtgcctctactggtcgatgctggctgcagcgttaacgctgaagacgaggagggggataccgccctccacgtggccttgcagcggcaccagctcctgcctctagtggctgatggcgccgggggagaccctggacccctgcagctactgtctagacttcaggccagcgggctgcctgggagcgcagaactgaccgtgggcgctgctgttgcctgtttcctggctctcgagggcgccgacgtgtcatacacgaaccacaggggtaggagcccactggacctcgccgcagaaggccgggttctgaaggccctccagggatgtgcccagcgctttcgggagagacaagccggtgggggagcagccccagggccccggcaaactctgggcacccccaatactgtgacaaacttgcacgtgggcgctgcacctggaccagaggcagccgagtgcctggtgtgttctgagctggccctcctcgttctgtttagcccttgtcagcatagaactgtgtgcgaagagtgcgcgcgacgaatgaagaagtgtatccgatgccaggtggttgtgtccaagaaactccggccagatggaagcgaagttgctagcgcagccccagcccctggcccccccaggcagctcgtggaggagctgcagtcaaggtaccgccagatggaggaaaggattacctgcccaatctgcattgattcccatatcagacttgtgtttcagtgtggccacggcgcttgcgccccatgtggaagtgctcttagtgcatgcccaatatgcaggcaaccaatacgcgacaggatccagatcttcgtgtag

SEQ ID NO: 24077 - DNA, 1074 bp, synthetic construct
  source 1..1074: mol_type = other DNA; note = Synthetic coding sequence
atgggcggcgccgtgagcgccggcgaggacaacgacgacctgatcgacaatctcaaagaggctcaatacatccgaaccgaacgagtggaacaggcattccgagccatcgaccgcggtgattactatcttgagggatatagagataacgcctataaagatctcgcttggaaacacggcaacatccacctttcagccccgtgcatctatagtgaagttatggaagcactgaagttgcagcccggcctgtcctttttgaacttaggcagcgggactggctatttgtcaacaatggtcggcctgatcctgggtcccttcgggataaatcacggcattgagctccatagcgatgtggttgagtacgctaaagaaaaactcgagagctttatcaagaacagtgatagtttcgacaaatttgaattctgtgaaccagcattcgtggtgggcaactgtctgcaaatcgcctcggactctcatcagtacgacaggatttattgcggtgcaggggtccaaaaagatcatgagaattacatgaagatccttctgaaggtgggggggattctggtgatgcctatcgaagatcagctcacgcagataatgcgcacaggacagaatacttgggaaagcaaaaacatcctggccgtcagctttgcgccactcgtccaaccctctaagaacgacaacggcaagcccgattcggtcgggctgcccccctgcgccgtcagaaaccttcaggatcttgcaaggatctatatccggaggaccctccgcaacttcataaacgatgagatgcaggccaaggggattccccagcgggcgccccccaagaggaagcggaagagagtgaaacagcggattaatacctatgtgtttgtgggcaatcagctgatacctcagccactcgattccgaagaggatgagaagatggaggaggataataaggaggaagaggagaaggaccacaacgaagctatgaagccagaagagccgccccagaatctgttgcgggaaaaaattatgaagctgcccctgccagagtctttgaaagcctatttaacgtattttcgggataagtag

SEQ ID NO: 24078 - DNA, 633 bp, synthetic construct
  source 1..633: mol_type = other DNA; note = Synthetic coding sequence
atgagctgccccaactactgcagcggcaacagcaacagcggcagcttgcgaacgagtagacacattcccctgacgtctatcgatttgtgtcctactagtgtgagctgcggcgatgtcctgtacttgcctacgagtagtcaggaccacacttgggtcacagacaattgtcaagagacatgtggggagccaacttcttgccagcccgttcattgtgagaccggtaatctcgagacatcgtgtggcagtagtacagcttactacgttcctcggccctgtcaggggagttcctttctgcccgcatcctttttctcgtcaagttgtctgccagtgtcgtgcagaccccagcggtatgtaagcagcgggtgcagacctcttcgccctcttttaaactcgtatcagcctatcggagactgtgtgcccaatgcttatcgcccccagttttgtctaagtaagtcctgccagccccagaatctcctcacctctgggtgtcagccctcttcttgcttggcttaccggcctcagtccctgcacgtagtaagtagctcactgcggcctctggggcctctgttttccgggtgccaacctttaacacatgtttttagcacttgccgtccttcttgctcagggctgtag

SEQ ID NO: 24079 - DNA, 606 bp, synthetic construct
  source 1..606: mol_type = other DNA; note = Synthetic coding sequence
atggccagcggcgacgacagccccatcttcgaggacgacgagagccccccttactcccttgaaaagatgactgacttggtagctgtgtgggatgtagccctgagcgacggagtacataaaatcgagtttgagcacggtaccaccagcggtaagagggtcgtgtatgtcgatggaaaagaggagattagaaaggagtggatgttcaaactggttggaaaagaaacgttttatgtgggcgccgcaaaaaccaaagcaacgattaacattgacgccataagcggttttgcctacgaatacaccctggagataaacggtaaatccttaaaaaagtacatggaagatagatcaaagacgactaatacttgggttctgcatatggatggtgaaaactttaggattgtattggaaaaagatgccatggacgtgtggtgcaatggaaagaaactcgagacagctggcgagttcgtggatgatggcacagagacccactttagcattggcaaccatgactgttacattaaggcagtctcttccggcaagagaaaggaggggatcatacacaccctaatcgttgataacagggagatccctgagatcgcaagctag

SEQ ID NO: 24080 - DNA, 3390 bp, synthetic construct
  source 1..3390: mol_type = other DNA; note = Synthetic coding sequence
atgcccgccacccggaagcccatgcggtacggccacaccgagggccacactgaagtctgctttgatgatagcgggagttttatcgtaacttgtggtagcgacggagatgtgcgtatctgggaagacctggacgatgacgacccaaaattcatcaatgtgggcgagaaagcttatagctgtgctcttaagtcaggtaaactcgtcacagctgtatcgaataatacaattcaggtgcacacatttcctgagggagtcccagacgggattcttacgaggttcaccacgaatgcgaatcacgtagtgttcaacggagacggtaccaagattgcggccggctcctccgattttctggtgaagatcgtcgacgttatggattcgagccagcagaaaaccttccgagggcatgatgcacccgtgttgtcactgtccttcgacccaaaggatatatttctcgcgagcgcctcttgtgatgggagcgtgagggtttggcagatttcagatcaaacctgcgctattagctggcctctattgcagaaatgtaacgacgtgattaacgctaaatcaatttgccgcctggcttggcagccaaagtctggaaagctgctggcaattcctgtggagaagtcagtaaaactgtacaggcgcgagagctggtcccaccagtttgatctatccgataactttattagtcagacgctaaatatcgtaacatggagtccatgcggccagtatctcgctgctggctccattaatggtctcattatcgtgtggaatgtggagaccaaagattgcatggaacgcgtgaaacacgaaaaaggttatgccatatgcgggctggcttggcaccctacatgcggccgtatttcctacacagacgctgagggaaacctggggctgctggaaaacgtgtgcgacccatctggcaaaaccagctcatctaaagtgagttccagggtagaaaaagattataacgacctgttcgacggagatgatatgtcaaacgcaggcgacttcctcaacgacaacgctgtggagatccccagctttagcaaaggtataattaacgatgatgaggacgatgaagacctcatgatggctagcggaaggcctcggcagagaagtcatattctggaggatgacgagaactccgtcgacattagtatgctcaaaacaggtagctcattactgaaagaggaggaggaggatggccaggaggggtctatacacaacctgcctcttgtgacctcgcagcgcccattttacgacggcccaatgcccaccccgcgacaaaaaccattccagtcaggttcaacacccctccatctaactcacaggttcatggtgtggaactctatcggaatcattagatgttataacgacgaacaagacaacgctatagatgtcgaatttcatgatactagcattcaccacgctactcacctttctaacaccctaaattatactatcgctgatctctcacacgaagcaattctgctggcttgtgagtccacggatgaattagcatctaaactgcattgccttcacttctcaagctgggactcatctaaggagtggattattgacctcccccagaatgaagacatagaggccatatgcttaggccaggggtgggccgccgctgctacgtccgcactactgctgcgtttgttcactatcggcggcgtccagaaggaggtcttcagtctggccggcccggtcgtgtctatggcagggcacggagaacaactcttcatagtatatcaccgtggaacagggttcgatggcgatcagtgcttgggggtccaactgctcgaactgggaaaaaaaaaaaaacaaatcctgcacggagatccactaccactgacccggaaaagttacctcgcttggatcgggttcagcgccgaaggtaccccctgctacgtggactctgagggcattgtgcggatgcttaatcggggattagggaatacttggacaccaatttgtaacaccagagaacactgtaaaggcaagtccgaccactattgggtggtgggcattcacgaaaatcctcagcaattgcggtgtattccatgtaaggggagcaggttcccacctactctcccaaggccggctgtggccatcctgagcttcaaacttccttattgccagatcgctactgaaaaaggccagatggaggagcaattctggcggtccgtgatctttcacaatcacctcgattatcttgctaagaatggttacgaatacgaggaatcaactaaaaaccaggcaacgaaagagcagcaggagctcctgatgaaaatgctagctctgagttgcaaactcgaacgggagtttaggtgcgttgaactggccgatctgatgacccagaatgctgttaatttagcgataaagtacgcttcccgttcccgaaagttgatcctggctcagaagctcagcgagctcgcagtggagaaggcagccgaattgacagctacccaggtggaggaggaggaggaagaagaggactttcgtaaaaaactaaatgcaggatattccaataccgctacggagtggtcccagcccaggttccgaaatcaagttgaagaggatgccgaagacagtggagaggcagacgatgaggagaagcccgagattcacaaacctggtcagaactccttcagtaagtctacaaatagctctgacgtttccgctaagtccggagccgttactttcagctctcaggggagagttaatccctttaaagttagcgcatcatccaaagaacctgccatgtctatgaactccgcaagatctacaaatattttggacaacatggggaaatcctctaaaaaatctactgccctctctagaactaccaacaacgaaaagtcccccataattaaacccttgataccgaagccgaaaccaaaacaggccagtgctgccagttacttccagaagaggaattcacagacaaataagacagaagaggttaaggaagagaacctgaagaatgtgctcagtgagactccagcgatctgccctcctcagaacacagagaaccagcgccctaagacaggtttccaaatgtggctcgaagagaatcggtccaatatcttgagcgataatccagatttctcagatgaggccgatatcataaaagaggggatgattcgcttccgcgtactgagtaccgaggaaaggaaggtgtgggcaaacaaggccaagggagaaactgcttcagaggggacagaagccaaaaagagaaagagggtggtagacgagtcggatgaaacagagaatcaggaagagaaagcgaaagagaacctgaatctgagtaaaaaacagaaacccttagactttagcacaaaccaaaaactgtccgcttttgctttcaaacaggagtag

SEQ ID NO: 24081 - DNA, 1476 bp, synthetic construct
  source 1..1476: mol_type = other DNA; note = Synthetic coding sequence
agcggcagcagccacagcttccccggcagcctggaggtgaccgccctcatgactacttggtcctcactgcagggatctcatgtctctaaacgtgctcttgcctatgcgctggtcgttacaaactgccaggaacggattcagcattggaaaaaggtggataacgattacaacgcgctgagggaaagactcagtaccttacctgacaagctcagttacaatatcatggtgccattcggcccgttcgccttcatgccagggaaactcgtgcataccaatgaagtgaccgtgctccttggtgataactggtttgcgaaatgctctgcaaaacaggctgtgggcttggtcgagcatcggaaggagcacgtgagaaaaacgatcgatgatctcaagaaagtgatgaagaacttcgaatctcgcgtcgaattcactgaggacctacaaaagatgtccgatgccgctggcgatattgtggatataagggaggaaatcaagtgtgacttcgagtttaaggcaaagcaccgcattgcacataagccccactcaaagcctaaaacaagcgatatttttgaagccgacattgcaaatgatgtgaagtccaaggacctgctggctgacaaggagctgtgggcccgcctggaagaactggaacggcaggaggaactcctgggtgagctggattccaagccagacaccgtcatcgcaaacggcgaggacactacgtcgagcgaagaggaaaaggaagacagaaacacaaatgttaatgccatgcatcaagtaaccgactcacataccccatgtcataaggacgtcgcatcatctgaacctttttccggccaggttaactcacagttgaattgtagcgtgaatgggtcctcctcttatcattctgatgatgatgatgatgacgacgatgatgacgatgatgacaacatcgatgacgacgacggggacaacgaccatgaggctcttggtgtaggagacaacagcatccctactatctacttctctcacaccgtagagcccaagcgggtccggattaatacaggcaaaaataccactctcaaattttctgaaaaaaaggaggaagcaaagagaaaacgcaagaacagtactggaagtggacactccgctcaggagctacccaccatcaggacacctgcagatatttatagggcctttgtcgatgttgtcaacggggaatatgtgcctcggaaatccatcctcaagtcccgctcaagggagaacagcgtctgctccgacacatcagagtccagcgccgcagagttcgatgatcgaaggggagtgcttcgcagtatttcctgtgaggaagcaacatgttccgacacttctgagagtatactggaagaagagccccaagaaaatcaaaagaaacttctgcctttaagtgttactcctgaagttctacgcctggtggggtactccagaaatctggcacccttgaatgtgattctttag

SEQ ID NO: 24082 - DNA, 981 bp, synthetic construct
  source 1..981: mol_type = other DNA; note = Synthetic coding sequence
atgctgctgagcaagttcggcagcctggcccacctgtgcggccccggtggcgtggaccacctgcctgtaaagatcctgcagccggccaaagcagacaaggaaagcttcgagaaagcctaccaggtaggtgctgtattaggcagtggcggctttggcacagtgtacgcggggtcacgcatcgctgatggccttcccgtggccgttaaacatgtagttaaggagcgtgtgaccgaatggggatccctcggaggcgctactgtgcctctcgaggtcgttctccttagaaaagtaggggcagctggcggggctaggggtgtgataagacttctggactggttcgagcggcctgacggctttctcctggtcttggagagaccggagcctgctcaggacctgttcgattttatcacagaacggggtgctctggatgagcctctggcccgcagattctttgctcaggtcctagccgccgttcgtcattgccacagctgcggggttgtccaccgagatataaaagacgagaacctactggtcgatctgaggtccggcgaacttaagctaatcgactttggtagcggcgccctcctgaaagacacagtgtataccgacttcgacggcacacgggtttactcccctcccgagtggatcaggtaccatagataccatggcagaagtgccacagtgtggtcattaggggtgttgctatatgacatggtgtgtggcgatatccctttcgaacaggacgaagaaatcctgagggggaggttgttattccgaagaagagtatctccagagtgccaacagttgattcggtggtgtctctccctccggccgtctgaaagacccagcttggatcaaatcgctgcccacccttggatgctgggcgcggatggtggtgtgcctgagagttgcgacctcagactttgtaccctggatccagatgatgtggctagcacgacatcctcgtctgagtcactgtag

SEQ ID NO: 24083 - DNA, 2880 bp, synthetic construct
  source 1..2880: mol_type = other DNA; note = Synthetic coding sequence
atggccgccagcaccggctacgtgcggctgtggggcgccgcccggtgctgggtgctgcggagacctatgctggccgccgccgggggacgtgtgccaaccgcggccggcgcctggctcttgcggggccagcggacctgcgatgccagtccaccttgggccctttggggcagggggcctgctatcggcggccagtggaggggattttgggaggccagttcacgcggagggggggccttctcgggaggcgaagatgcatctgagggcggcgctgaagaaggggcgggtggagctgggggttcagccggggcaggcgaaggccccgtcatcacagccctaactccaatgacaattccagacgttttcccccatctcccacttatcgctattactcgaaatccagtcttcccccggttcattaagatcatcgaggtaaaaaataagaagctggttgaacttctaagacgcaaggtgaggctcgcccagccatatgtgggagttttcctgaagcgtgacgactccaatgaaagcgatgtggtcgagagtctggacgaaatataccacaccgggacctttgcacagatccatgagatgcaggatcttggcgacaaactgcgcatgatcgtgatgggccaccgacgggtgcatatatccaggcaactcgaagtggaaccagaggagccggaggcagagaacaagcacaaaccacgtaggaagagtaagcgcggtaagaaagaggccgaggacgagctgtccgcacgacacccagcagagctcgccatggagcctacaccagagttgccagcggaagttctcatggtggaagtcgagaatgtggtccatgaagactttcaggtgacggaggaggtcaaagcccttactgccgagattgtcaagacaatcagggatatcatcgcactgaatccactttatagagaatctgtgttgcagatgatgcaggctggccagcgggtggtggacaaccctatatacctaagcgatatgggagcagctttaaccggagctgaatctcacgagctgcaggatgtgctcgaagaaacaaatatcccgaaaaggctgtacaaggcactcagcttgttgaagaaagagtttgaactttctaagctgcagcaaagactggggcgagaagtggaggagaagattaagcagacacatcggaaatacctacttcaggagcaactgaagatcattaagaaggaacttggactggaaaaggacgataaggatgccatcgaggaaaagttccgggagcgcttgaaggaactcgttgtccccaagcatgtgatggatgtcgtagacgaagagctatccaagctaggtctgctagacaatcactccagtgaatttaatgttactcggaattatctggattggctgacctcaatcccatgggggaaatacagtaacgagaatctggacctcgccagggcgcaggcggtattggaggaggatcactatgggatggaggacgtgaagaagcgcatcctcgaattcatcgcagtgtctcagcttcggggatcgacccagggtaaaattctgtgcttttatggaccccctggcgttggcaagaccagcatcgcgcgcagtatcgctagagcgctgaatcgagagtactttcgattcagtgtcggtggcatgactgacgtcgctgaaatcaagggccaccggagaacttacgtgggagccatgccaggtaaaattatccagtgtctaaaaaaaacaaaaaccgagaacccactgatcctcattgacgaagtggataagatcggaaggggttatcaaggagatccttcaagcgcccttctcgaacttctggatcccgagcagaacgccaacttcctggatcattacttggacgtgcccgtggatctgtcgaaagtgcttttcatatgtaccgcgaatgtgacagataccattccagaacctctgcgtgatcggatggagatgattaacgtgagtggatatgtggcccaggaaaagctggccatcgctgagagatatttggtgcctcaggcaagagcgctctgcggcctggacgagtcaaaggccaaactctcttccgacgtgcttacgctcctgattaagcagtactgtcgggagtctggagtgaggaatctccagaagcaggtggagaaggtactcaggaaatctgcctacaagatcgtctcaggcgaagcagagtccgttgaggtgaccccagaaaatctgcaggatttcgttggcaagcccgtctttactgtggagaggatgtatgatgtgaccccgcccggtgtggtcatggggctcgcctggacagctatggggggaagcactttgttcgtggaaacctcattgcgtagaccccaggataaggatgctaaaggcgacaaagatggatccctggaggttacaggacagctgggtgaagtcatgaaggaatccgcccgaatagcatatacattcgcacgtgcattccttatgcagcacgcgccagcaaacgactacctcgttactagtcacattcacctgcacgttcccgagggtgccactcccaaagatggaccaagtgctgggtgcacaattgttacggcgctgctgtctcttgccatgggcaggcccgtacggcagaaccttgcgatgacaggagaagtttcactgaccggcaaaattcttcctgtaggcggcattaaggaaaaaaccattgcagctaaacgggcaggcgtgacttgtatcgttctcccagctgagaataagaaagacttttacgacctcgctgcgtttatcactgagggattggaggtgcacttcgtcgaacactacagagagattttcgacatagcgttccccgacgagcaggctgaggctctagcagtggaaagatag

SEQ ID NO: 24084 - DNA, 1203 bp, synthetic construct
  source 1..1203: mol_type = other DNA; note = Synthetic coding sequence
atgaaccccgccagcgcccccccccccctgcccccccccggccagcaggttattcacgtgacgcaggacctggatacagatctggaagcgcttttcaatagcgttatgaatcccaagccgtcctcttggaggaagaaaatcctgcccgagtcatttttcaaagagccagatagtggatcacatagcaggcaatcctctactgatagtagcgggggacatccaggccctaggctcgctggtggcgcccaacatgttcgctcgcacagttcgcctgcctctttgcagcttggtactggcgcaggcgcagccggctctcccgcacagcagcacgcgcacctgcggcaacagagctacgacgtgacagacgagttgccactgccacctggatgggagatgacattcactgcaacgggacagaggtactttctgaaccacatcgagaaaatcacaacgtggcaggatccaaggaaagctatgaatcaaccgttgaaccatatgaacctgcatcctgcagtgtcgtctaccccagtgccgcagcgtagcatggctgtcagccagcccaacctcgtaatgaaccatcagcatcagcagcagatggctccaagtaccctgtctcagcagaatcaccccacacaaaatccaccagctgggctcatgtccatgcccaatgccctcaccacccagcagcagcagcaacagaagttacgtcttcagcgcattcaaatggaacgggaaaggattagaatgaggcaggaggagctgatgcgccaggaagctgcactgtgccggcaactgcctatggaggcggaaacattggcaccagtgcaagctgccgtgaatccacccactatgacaccggacatgcgcagcattacaaacaactccagcgacccttttcttaacgggggaccctatcattccagagaacaaagcacagactctggcctcgggctcggctgttacagcgtcccaactaccccagaagatttcctttccaacgtggatgaaatggataccggggagaacgcggggcaaactcctatgaacatcaacccacagcagactaggttccccgattttcttgactgccttccggggacaaacgttgacctggggaccttggaatcagaggacctgatacctctgtttaatgacgtggagagtgcccttaataagagcgagccttttctcacttggctttag

SEQ ID NO: 24085 - DNA, 2625 bp, synthetic construct
  source 1..2625: mol_type = other DNA; note = Synthetic coding sequence
atggaggtgctgcgggagaaggtggaggaggaggaggaggccgagcgggaagaggctgcagagtgggcagagtgggcacggatggaaaagatgatgcggccggtcgaggtgcgcaaggaggagattaccttaaagcaggaaacgctcagagatctcgagaagaaactcagcgaaatccagatcaccgtgagcgccgagctgcccgcattcactaaagatactattgacatcagcaagctgccaataagttataagactaatacgcccaaggaggaacatttgctgcaagtagctgacaatttctctcggcagtattctcacttgtgccccgatagggtccctttatttttgcacccattaaatgaatgcgaggttcctaaattcgtgagcactactctcaggccaacactcatgccataccctgagctgtataactgggattcatgcgcgcagttcgtgtcagactttcttacaatggtccccctacccgaccctctgaaaccccctagtcacctttatagctcaaccactgtgcttaagtatcaaaaaggaaattgtttcgacttcagcactctgctgtgctcgatgctgatcggcagtggctacgacgcttactgcgtgaacggttacggctcccttgacctgtgtcacatggatctgacccgggaagtttgcccccttaccgtgaagccaaaagagaccatcaagaaggaggagaaggttctgcccaaaaaatacacaattaagccgccaagggatctgtgtagccgatttgagcaggaacaagaggtgaaaaagcaacaggagattagagcccaggagaagaagcgcctacgtgaggaagaggagaggctcatggaagcagagaaagcgaaacccgatgcactgcatggtttgcgggtgcattcttgggttctggtgttgtccgggaaaagagaggtgcccgagaacttttttatcgatcccttcacaggccactcttattccactcaagatgagcatttcctgggtatcgagtcactctggaaccataaaaactactggattaacatgcaagactgctggaactgctgcaaggatctgatattcgatcttggcgaccccgtgcgctgggagtatatgctgttgggtaccgacaaaagccagcttagtctgaccgaggaggacgactccggaattaacgacgaggatgacgtcgaaaacctggggaaggaggacgaagacaagtcctttgacatgccgcatagctgggtagagcagatcgagattagccccgaggcattcgaaaccaggtgtcccaacggcaaaaaagtgatacagtataagagggcaaagctcgagaaatgggccccttatctaaactccaatgggctagtgtctcgcctcaccacctatgaggacctgcagtgcacaaatatcctggagattaaagagtggtatcagaaccgtgaggacatgcttgaactcaagcatattaataagacgaccgaccttaagaccgactatttcaaacccgggcatccccaggcattgagagttcattcttacaaaagtatgcagccagaaatggaccgcgtgattgaattttacgagactgcccgggtcgatggtctgatgaagcgggaggaaacccccagaacaatgaccgaatattatcagggacggcccgactttttatcttatcgccacgccagctttgggccaagagtaaagaaactgactctgagctcggctgagtctaatccaagacccatcgtcaaaatcaccgagagattcttccgtaatccggcaaagcctgcagaagaggacgtggccgaaagggtgttccttgttgccgaagaaaggattcaactgcggtaccactgtagggaggatcatataacagcatccaaaagagagttcctcagacggaccgaggtcgatagtaaggggaataaaatcatcatgactcccgatatgtgcattagcttcgaggtggagccaatggagcacacgaaaaagctgttgtaccagtacgaagccatgatgcacctgaagcgggaggagaagttgagtagacaccaggtttgggaatcagagttagaagtgttagaaatactgaaacttagggaggaggaggaagccgcacataccttaactatttcaatctacgacactaaacggaacgaaaaaagcaaagagtacagggaggcaatggaacgcatgatgcatgaggagcatctgaggcaggtggagacacaattggattacctcgctccttttctcgcccagctcccgcccggagaaaaactgacttgctggcaagccgtgaggctgaaagatgagtgtttatccgactttaaacagagactaattaacaaagcaaatttaatccaggcccgcttcgagaaggagacccaggagctccaaaagaagcagcagtggtatcaggagaaccaagtcaccctgacccctgaggatgaagatttgtacttatcctactgttcccaggccatgttcaggattagaatcctcgagcagcggttgaacagacataaggagttggcccccctgaaatatctagcactagaagagaagctttacaaggatccaaggctcggcgagctccaaaagatattcgcatag

SEQ ID NO: 24086 - DNA, 1851 bp, synthetic construct
  source 1..1851: mol_type = other DNA; note = Synthetic coding sequence
atggacgtgatgctggagaactactgccacctgatcagcgtgggctgtcatatgaccaaacctgacgtgatcctaaagctagagcggggggaggagccctggacctcgtttgcagggcatacatgtcttgaagaaaactggaaagccgaagacttcttggtcaagttcaaagagcaccaggagaagtattctcgctcggtggtatctatcaatcacaaaaagctcgttaaagaaaaatctaagatctatgaaaagactttcacattgggaaaaaatccagtcaactcaaagaacctgccgcctgaatatgacactcacggtcgtattctgaaaaatgtgtccgaactgattattagcaatctgaaccctgccaggaaacgactcagtgaatacaacggttatggcaaaagccttctgtcaaccaagcaggaaacgacccaccccgaagtgaagtctcacaaccagtcagcgagagccttctcccataatgaggttctgatgcagtaccagaaaactgaaacacctgcacagagctttggctacaatgactgcgaaaaatcttttctccaaaggggagggctgatcacacatagtagaccatataagggtgaaaaccctagcgtgtataataagaagcgccgggccacaaacatcgaaaaaaagcacacatgtaatgagtgcggaaaatcgttttgtcgtaaatccgtactgattctgcatcaaggaatccatagcgaagaaaagccatatcagtgtcatcagtgcggtaatgcatttagaagaaagagttacctaattgatcatcagcgcactcatacaggggagaagccatttgtgtgcaacgagtgtggaaagagtttcaggctgaaaactgccctgactgatcatcagagaacccacacaggggagaaatcgtacgagtgtttgcagtgccgcaacgcatttaggctcaagagccatttgatccggcatcagcgcacacacacaggtgaaaagccttacgaatgcaacgactgtggaaaatctttccggcagaagacaaccctatcactccaccagaggattcataccggcgaaaaaccatatatctgtaaagaatgtggaaagtcttttcaccagaaagcgaatttgaccgtgcaccagagaacacatacaggcgaaaaaccttatatctgcaatgagtgtggtaaatccttctcccaaaagacgacactcgctctccacgaaaagacacataatgaagaaaagccttacatttgttcggagtgtggaaagtcttttaggcagaaaactaccctggtggctcatcagaggactcataccggggagaagagctacgaatgtccacattgtgggaaggcttttaggatgaagtcctacttaatagaccaccaccggactcacacaggggaaaagccctacgagtgcaacgaatgtggaaaatccttcagccagaaaactaatttgaacctgcatcagcggatccatacaggggaaaaaccctatgtctgcaacgagtgtgggaagagcttccgtcagaaggcaacactgactgtacatcagaaaattcatacaggccagaaatcctatgagtgccctcagtgtggcaaggcttttagccggaagtcatacctgatacatcaccagagaacgcacactggcgaaaagccttataaatgctccgagtgcggaaagtgtttccgacagaaaaccaacctcattgtgcaccaacggacccacaccggagaaaagccatatgtttgcaatgagtgtggcaagtctttctcatacaaaaggaacctcattgtgcatcagcggactcacaaaggcgagaatattgagatgcagtag

SEQ ID NO: 24087 - DNA, 441 bp, synthetic construct
  source 1..441: mol_type = other DNA; note = Synthetic coding sequence
atgtgccacaccagctgcagcagcggctgccagcccgcctgctgcgccccgagcccttgtcagcccgcttgctgtgtgcctagctcctgccaagcgtcctgctgcgtgcctgtgggctgtcaaagcagtgtttgtgtcccggtctctttcaaaccagcagtgtgtctgccagtgagttgccagtcctccgtctgcgtacctatgtccttcaagtccgcggtctgtgtgcctgtgagctgtcagagctcggtgtgcgtccccgtctcttgtagacctatcgtctgcgcagctccttcctgccagtcttcgctctgcgtgcccgttagctgccgccccgtggtgtacgccgctccaagttgccaatcaagcggttgttgccagcctagctgcacaagtgtgttatgccgacccatctcttactccattagctcttgttgttag

SEQ ID NO: 24088 - DNA, 1257 bp, synthetic construct
  source 1..1257: mol_type = other DNA; note = Synthetic coding sequence
atgcgggagtgcatcagcatccacgtgggccaggccggcgtgcagatcggtaatgcttgttgggagctgtactgcttggagcatggcattcagcctgatggacaaatgccctcggacaagaccattggtggtggagatgactcttttaatacatttttcagtgaaacaggtgcaggaaaacatgtcccgcgtgccgtcttcgtggatttggaaccaacggtggtggacgaagtaaggaccgggacctataggcagctgtttcacccggagcagcttattactgggaaagaagatgcggctaataactacgcccgtgggcattatacgattggtaaagaaatcgtggatttagtgctagaccgtatccgtaaattggccgatctttgcacagggttgcagggatttctgatcttccactccttcggaggcgggaccgggtcaggcttcgcctccctcctaatggaaagactctccgtagattatggaaaaaagagcaaactcgagttcgccatttatcctgcaccacaggtatctacagctgtggtggagccgtacaattcaatcctgaccacacatactacgctagaacattcggattgtgccttcatggtcgacaatgaggccatctacgatatatgcagaaggaacttagatattgagcggcccacgtacactaatctgaaccgcctcatagggcagattgtgagctctattaccgcgtcccttaggttcgatggggcactaaacgtggacctcactgagttccagacaaacttagtgccatatccaagaattcactttcctttggctacctacgccccagtcattagtgctgaaaaggcatatcacgaacagctttctgtagccgagattactaacgcgtgctttgagccagctaaccaaatggtgaaatgcgatccacggcacggaaaatacatggcctgttgcatgctgtataggggtgatgtggttccgaaagatgtgaacgcggctattgctactattaagacaaaacgcacaattcagttcgtggactggtgtccaaccgggttcaaggtcggcattaattaccagccacccaccgtggttcctggcggtgatctggctaaagtgcagagagccgtatgtatgctctcaaatacaaccgcaatagccgaagcatgggcaagactggatctggccgcgctggaaaaagattacgaagaggttggagtcgatagtgtggaggctgaggcggaggaaggtgaggagtactag

SEQ ID NO: 24089 - DNA, 3351 bp, synthetic construct
  source 1..3351: mol_type = other DNA; note = Synthetic coding sequence
atgtacggcagcgcccggagcgtgggcaaggtggagcccagcagccaatcaccaggaagatctccaaggctccctcgaagcccaagactgggtcataggaggaccaacagcacaggaggatccagcggatctagcgtcggggggggctccggtaagacactctctatggaaaatattcagtccttgaacgccgcttatgccacctcaggccctatgtatctgtccgatcatgaaaatgtcggcagtgagacgcccaagtcaactatgacgctcggtcgtagtggcggacgactgccctatggcgtcaggatgactgcaatggggtccagcccgaacatagcatcttctggagtcgcctctgacaccatagccttcggagaacaccacctaccacctgtgagtatggccagcaccgtgccacattctctcaggcaagcaagggacaataccatcatggacctgcaaactcagctgaaggaggtgctgcgcgaaaacgatctactgagaaaggacgtggaggtcaaggaatccaaactgagctcaagcatgaactctataaagacattttggtcacctgaactgaaaaaagagagggccctcaggaaggatgaggcctccaagatcactatatggaaggagcaataccgagtagtgcaggaagagaaccagcatatgcagatgacaattcaggcactgcaggatgagttgagaatccaacgggacctgaaccaattattccagcaggacagctcgtcgcgcaccggagagccctgcgtcgccgaactgaccgaagaaaacttccaacgcctgcatgccgaacatgagcgacaggcaaaagagctgtttctgctgcgcaagactctggaggagatggaacttcggatcgaaactcagaagcaaaccctgaacgcaagagatgagagtatcaagaagcttttggaaatgctgcaaagcaagggactaagcgccaaggctactgaggaggatcacgagcggacacgccggcttgcagaggcagagatgcacgtgcatcatctggagagcctactcgagcagaaagaaaaagagaattccatgcttcgtgaggaaatgcacaggcgattcgagaatgctccagactccgctaagacaaaagcgctccagactgtcattgagatgaaggactcgaaaattagctccatggagcgagggctgcgggatctggaggaggagattcagatgctaaaatccaatggcgccctctccacggaggaaagggaagaagaaatgaagcaaatggaggtatatcggagccacagcaaattcatgaagaataaggtggagcaacttaaagaagagctgagcagcaaagaagcgcagtgggaggaactgaagaagaaggcagcaggactgcaggctgaaattggccaggtgaagcaggaactctcgaggaaagatacggaactgctggccctgcagacgaagctggaaactctgaccaatcagttttctgactccaagcagcatatcgaggtgctgaaagagtcgttaactgccaaggaacagagagccgccatcctgcagacggaagtggacgctctgagactgaggctggaggaaaaagaaaccatgcttaacaagaagacgaagcagatccaggacatggccgaggaaaagggcacccaggcaggagagatccacgacctgaaggacatgctggacgtgaaagagcggaaggtaaatgtgctccagaagaaaattgagaatttgcaagaacagctccgtgacaaggaaaagcagatgtcttccctgaaagagcgcgttaagagtctccaagctgacaccactaatacggatacagccctcacaacgcttgaggaagcgctggccgagaaggaaagaaccatcgagagactcaaagaacagagggacagagacgaaagggagaagcaggaggagatcgataattataaaaaggacttaaaagacctgaaggaaaaggtgagtctgctgcagggtgatctcagtgaaaaggaggcttctctgctcgatctgaaggagcatgctagctcattagccagttccggcttgaagaaagatagcagactgaaaacactggagatcgctctcgagcaaaagaaggaagagtgccttaaaatggagtcgcagctgaaaaaggctcacgaggcagccctcgaagcacgggcatctcctgagatgtccgatcgaatacaacatctggagcgtgagatcaccagatataaggacgagagttcaaaggcacaagccgaggttgaccggcttctagagattcttaaggaggtcgagaatgaaaagaatgataaggataaaaagatcgcggaactcgagaggcaggtgaaagatcagaataagaaagtggccaatcttaagcataaagagcaggtggagaagaagaagtccgcccagatgcttgaggaggcgaggcgcagagaggacaatttgaatgactcctcccagcagttacaagattcactgcggaaaaaggatgaccgcattgaagaactcgaagaggccctgagagaatcggtccaaatcacggccgagagggaaatggttctggcgcaggaggagtccgcacggactaatgccgaaaaacaagtggaagagcttctaatggccatggaaaaggtgaagcaggagttggagtccatgaaagcgaagttgtccagcacacaacagagcttggctgagaaagaaacacatctcacaaatctgcgagcagaaagacgaaagcacctggaagaagtattggagatgaagcaagaggctctccttgccgccatcagtgagaaagatgcaaacatcgcccttctggaactgtcgagctctaagaagaagacacaggaggaggtcgcagccctaaagcgagaaaaggacagactggtgcagcagctcaaacagcaaactcagaaccggatgaagttgatggctgacaactacgaagacgatcacttcaaaagtagccattccaaccagactaatcacaagccgagtcccgaccagatcattcaaccgctgctcgagcttgatcaaaacaggagcaaattgaaactatatattgggcatctaaccactctctgtcacgaccgggatccgctcatcctccgtggactgacacctccggcgtcttacaacctcgatgatgatcaggcagcatgggagaacgagttgcagaaaatgactcgtgggcagctgcaggatgagctggagaagggagagcgcgataatgctgaattacaggagtttgcgaatgcaatcctgcaacagattgctgatcattgtcctgacatcttagagcaggttgtgaatgcgcttgaagaaagctcatag

SEQ ID NO: 24090 - DNA, 3075 bp, synthetic construct
  source 1..3075: mol_type = other DNA; note = Synthetic coding sequence
atgaacttcatcaaggacaacagccgggccctgatccagcggatgggcatgaccgtgattaagcagatcacagatgacctgtttgtatggaacgtgcttaatagggaggaagttaatattatttgctgtgaaaaagttgaacaggatgcagcaagaggcataatccatatgattttaaaaaaaggctcagagtcatgcaacctatttctgaagtccctgaaggagtggaactaccctctgttccaggatctgaatggccagagtctgttccatcagacttctgagggcgacctcgatgacctggcccaagatctaaaagacttataccacacccccagtttcctgaatttctatcctctgggtgaggatatcgatatcatcttcaatctgaagagcaccttcacagagcccgtgttgtggcgtaaggatcagcatcaccatagggtggaacagctgaccctcaatgggctgctgcaagcgttgcagtctccttgtatcatcgagggcgaatccggaaagggcaaaagcaccctcctgcagcgcattgccatgctttggggctctgggaagtgcaaggcactcaccaagtttaaatttgtgttctttctgaggctaagtcgggcccaaggcggcttatttgagacgctgtgcgatcaactgctggatatccctggcacaattaggaaacagacgtttatggccatgctgttgaaattgcgccaaagggttttgtttcttctagacgggtataatgagttcaaaccacagaactgccccgagatcgaggccttaatcaaagagaaccacagattcaaaaatatggttattgtgactacgactactgagtgcctgcgccacattcgacagtttggggccctgacagctgaagtgggcgatatgaccgaagatagtgctcaagcactcatcagggaggttctgatcaaggagctggcggaggggctgttgctgcagatacagaaatcacgttgtctgcgtaacctgatgaagacacctctctttgtggtaattacttgcgccattcagatgggggaaagtgagttccactcacatacccagaccactctgtttcacactttctacgatctcctgatccagaaaaataaacataaacataagggggttgcggcaagcgattttattagatctttagaccattgcggcgaccttgccttggaaggagttttttctcacaagttcgactttgagctgcaggacgtgtcatccgtgaacgaagacgtgctcctgacaactggattgctatgtaagtatacagcccaacggttcaagccaaagtacaagttctttcataaaagcttccaggaatatactgccggtcgtcggcttagctctttgcttactagtcatgaacctgaagaggttacaaaagggaatgggtacctccaaaaaatggtatccatctccgacattaccagtacctatagctcactcttgagatatacatgcggcagttcagtggaagccactcgcgcagtcatgaaacacctggccgctgtttaccagcatggctgtttactgggtctgtccattgcgaaacgacctctgtggcgccaagaatcactgcagtctgttaaaaacaccacggaacaggagatattaaaagccataaatatcaattcctttgtggagtgtggtatccatttgtatcaggaatcaacgtccaagtcagcactgtcccaggagtttgaggccttctttcaaggtaagtcactgtacatcaactccggcaatattcctgactatctcttcgacttttttgagcatctaccgaactgcgcttcagccttggacttcattaagctcgacttctacggaggtgccatggcatcctgggagaaagccgcagaggacacaggaggcatacacatggaagaagctccggaaacatacatcccctcccgtgccgtctccttgtttttcaattggaagcaggaatttcggacattggaggtaactctacgcgacttcagcaagctgaataaacaggatatccggtacctgggaaagattttcagtagtgcaacttcacttaggctgcaaattaagagatgtgcgggtgtggccggatccctctccctggtcttgtcaacatgcaagaatatttattcgttgatggtggaagcctctcccctcacaattgaggacgagcgtcatataactagcgtgacgaacctgaagactctctcaatccacgatctccagaaccagagactgccaggtggacttactgacagccttggaaacctcaaaaacctgacaaagctcattatggacaatatcaagatgaacgaagaggatgcaattaagctcgctgaggggctcaaaaacctgaagaagatgtgtctcttccatcttacacaccttagtgacattggcgagggtatggactacatcgtcaaatctctttctagcgaaccttgcgacttggaggaaatccaactggtttcatgttgtctgtcagcaaacgcagtgaaaattttagctcagaacctgcacaacctcgtgaaactgtctatcctggatttgagtgagaactacctggagaaagacggtaatgaggctctgcacgaactgatcgatcggatgaatgtgctagaacaactgacagccctcatgttgccatggggatgtgacgtccagggatccctatcttcccttctcaaacatctggaggaagtaccacaactcgttaagctcgggcttaagaattggcggctgacagataccgagatccggattcttggtgctttttttggaaagaatcctttgaaaaattttcagcagctcaacctagccgggaatcgcgtcagctcagatgggtggctggctttcatgggcgttttcgagaatttaaagcagctcgtatttttcgacttctcaactaaagaattcctgcccgaccctgccttagtcaggaagctcagtcaggtcttatcaaagctaaccttcctgcaagaggcccgactggttggttggcagtttgacgacgacgatctttctgtgattacgggcgccttcaagctcgtcaccgcctag

SEQ ID NO: 24091 - DNA, 1065 bp, synthetic construct
  source 1..1065: mol_type = other DNA; note = Synthetic coding sequence
atggccgagagccccaccgaggaggccgccaccgccggcgccggcgctgcggggcccggggcgagctccgtggctggcgtcgtgggagtgtcaggctctggcggcggttttggccctcctttcctccctgacgtctgggctgcagccgctgccgcggggggcgcgggggggccaggttccggtctggcccctctccccggactgccgcccagcgcggcggcacatggcgcagccctgctgagtcactgggatccaactctatcaagcgattgggacggggagcgtaccgcccctcagtgtttgcttagaatcaaacgtgatatcatgtcaatctacaaagagccgccaccaggcatgttcgttgtccccgacacagtggacatgacaaagatccacgccctgattacagggcctttcgataccccctacgaagggggttttttcctatttgtgtttcgctgcccccccgactacccgatccacccgccccgggtgaaactcatgaccaccggcaacaacacagtaagattcaacccaaacttctatcgtaacgggaaggtctgcctgtctatcctgggcacgtggaccggccccgcctggagcccagcccaaagcatttctagtgttctgatcagcattcagtctcttatgacagagaacccataccataatgaaccagggttcgagcaggagcgccaccccggcgatagtaagaactacaatgagtgtatcagacacgagaccatccgcgtcgccgtctgtgacatgatggaaggaaagtgtccctgtccggaacctttgcgtggtgtgatggagaaaagctttctggagtactatgacttttatgaggtggcctgcaaggaccggttacacttgcaaggtcaaacaatgcaggaccccttcggggaaaagaggggccactttgattaccaatctctactaatgcgactgggcctaattcgacagaaggtcttagagaggcttcacaatgaaaatgcagagatggacagcgattcttccagttctggcactgagacggatcttcatgggtcactgagagtttag

SEQ ID NO: 24092 - DNA, 2487 bp, synthetic construct
  source 1..2487: mol_type = other DNA; note = Synthetic coding sequence
atggacagcgaggccttccagagcgcccgggacttcctggacatgaacttccaatcattggcgatgaagcacatggacctcaagcaaatggagcttgacactgcagctgccaaagtagacgaacttaccaaacagctggagtcgctgtggtccgactctcccgctcccccggggcctcaagccggccccccctcaagacctcccaggtactcaagctcatcaatacccgagccttttgggtctcgaggtagcccccgtaaagccgcaaccgacggcgctgatacaccctttggcaggtccgaatcagcccccaccctgcacccatatagcccactgtcacctaaaggcagaccaagtagcccgaggacccccctctacctgcagcctgatgcgtacggatccctcgatagggccacgtctcctaggccgcgggcctttgacggagccgggtcttcactgggccgggccccctctcctaggccagggcctggccctctgcggcagcagggaccacctactccgtttgacttccttggccgcgccggttctccgcggggttcccctttagcggagggacctcaggccttctttcccgaacgggggccttcacctcggcccccggccactgcctatgacgctcccgcgagtgccttcggttcctcccttctgggctctgggggatctgcattcgccccccctcttagagctcaggatgacctgacgttgagacgccgcccaccaaaggcatggaacgagtcagacctggacgtggcctatgaaaagaagcctagccaaacagcatcatatgagcggttagatgtctttgcaaggccggccagcccctcccttcaattgctgccttggagggaaagcagccttgatggcctgggtggtaccgggaaggacaaccttactagcgccacgctgccccgaaattacaaggtgtctccacttgcctccgaccgacgctctgacgctggctcttataggcgatctctggggtccgccggtccatctggaactttaccccggagctggcaacccgtaagccgaataccaatgcccccctctagcccacagcctaggggtgccccccgtcagaggcccatccctctaagtatgatttttaaactccagaacgctttctgggaacatggagctagcagagcgatgctgccaggtagccccctgttcacgcgggccccaccaccaaaacttcaacctcagcctcaaccacagccccagccacagtctcagccccagccccaattgccgccccagcctcagacacagcctcagacccctactcccgccccccaacatccacaacagacttggccaccagtgaatgaaggcccccctaaacctcctaccgaactggaaccggagcccgaaattgaagggctgttgacacctgtgctggaagcaggagacgtggatgaaggtccagtggctcgcccattaagtccgacccgtctgcagccagcgttaccacccgaggctcagtcagtgcctgagcttgaggaagtcgcaagggttttggctgaaatccccaggccactgaaaaggaggggttcgatggagcaagcgccagccgtcgcgttgccaccaacccacaaaaaacagtaccagcagatcatttctagattattccacagacatggaggaccaggcccaggcggacccgagcccgaactgtcgcctatcactgaaggcagcgaggcgagggcgggcccaccagcgccagcccccccagccccaattccaccccccgcgccctctcagtcctcaccgccggaacaaccccagagtatggaaatgaggtcggttctgaggaaggctggatcccctagaaaggctaggagagctagactcaatcccctggtcctgctgctcgacgcagccctgaccggcgagctcgaagtggtgcagcaagccgtgaaagagatgaacgatccatcccaaccaaatgaagaaggcataacagcccttcataacgcaatctgtggcgctaattacagtattgtggacttcctcatcacagctggggccaacgtgaacagtccagacagccatgggtggacccctttgcattgtgctgcctcctgcaatgacactgtcatttgcatggctttagtccagcatggagctgccatttttgctaccactctcagtgacggtgccacagcttttgagaagtgtgatccttatagagagggttatgccgactgcgcgacttatctggccgatgtggagcagagtatgggactgatgaacagcggcgcagtttacgccctctgggattactctgcggagtttggcgacgaactttcctttagagagggcgagtccgtgacagttctgcgtagagatggcccagaagaaactgattggtggtgggccgcactgcatggtcaggaggggtacgtgccacgtaactatttcggtttattccctagagtgaagccgcagcggagtaaggtgtag

SEQ ID NO: 24093 - DNA, 1131 bp, synthetic construct
  source 1..1131: mol_type = other DNA; note = Synthetic coding sequence
atggtggtggaggtggacagcatgcccgccgccagcagcgtgaagaagccttttgggttgcggtcgaagatggggaagtggtgctgccgttgttttccctgctgtagggagtccgggaaaagcaacgttggaaccagcggggaccatgacgattctgctatgaaaacattgcggtctaagatggggaagtggtgccgccactgctttccatgctgccggggatcaggcaaatcaaacgtgggcgcgagcggcgatcacgatgattcagcaatgaagacactcagaaataaaatgggaaaatggtgttgtcattgcttcccctgctgcaggggctcctccaaaagtaaagtgggtgcctggggcgattatgacgattctgcttttatggaaccaaggtaccatgtcagaggtgaagaccttgacaaactgcacagagccgcctggtggggaaaggtgcccagaaaagacctgattgttatgctcagagacacggacgtcaataaacaggacaagcaaaaacgaactgcactgcatcttgcttcagctaatgggaattctgaagtggtcaagctgctgctggacaggaggtgccaactgaatgtccttgacaacaagaaacgaaccgccctgatcaaggctgttcagtgccaggaggacgagtgcgccctcatgttgctagagcatggtactgaccccaatattcctgacgagtatggtaacaccaccctccactatgcaatttataacgaagataagctgatggctaaggccttgctgctgtacggagccgatattgaaagcaagaacaagcacggtctgaccccgctccttttgggtgtacatgagcaaaagcagcaagttgtcaagttcctgattaagaaaaaggctaaccttaatgcgttggataggtacggaaggactgccctcatccttgcagtttgttgcgggtctgctagcatcgtaagcctattattagagcagaacatcgacgtgtcttctcaggatctttcaggccagaccgccagggagtacgcagtcagctcccatcaccatgtaatctgccagctgttgtccgactacaaggaaaaacagatgttgaagatctcaagtgagaatagtaatccggggtag

SEQ ID NO: 24094 - DNA, 765 bp, synthetic construct
  source 1..765: mol_type = other DNA; note = Synthetic coding sequence
atgcccgccagcttccccatgctgcggtgcgcccggagcccctgctggaccgtctgttggagtccttggtgccgtgcactgcctgacggtagatgtagttgcctcagctcccccccgtctccactcggacccactcgggaccctgtggccacgttcctggagacctgtcgcgaaccaggcagtcagcctgctggccccgccagcctcagggctgagtaccttccacccagcgttgctagcataaaggttagtgcagagctgctccgagctgccctgaaggacggtcactctggggtgccactttgttgtgctacattgcaatggctgttggcagagaacgctgctgtagatgtcgtgagggctcgggctttaagtagtattcagggggtcgccccagacggtgctaatgtacacttaatcgtgagagaagtcgctatgacagatctttgtcccgccggacccattcaggcagttgagatccaggtggagagcagttccctcgcggacatatgcagggcacaccacgccgtcgtcggtcgcatgcaaaccatggtcaccgaacaggctacccagggctcttccgccccagacctgcgagttcagtatctgcgtcagatacatgccaatcatgaaactcttctaagggaagttcagacgttacgcgatagattgtgcaccgaagacgaagccagttcttgcgcaactgctcagcgtctactccaggtttatcgtcagctgaggcatcctagcctgattctgctgtag

SEQ ID NO: 24095 - DNA, 2046 bp, synthetic construct
  source 1..2046: mol_type = other DNA; note = Synthetic coding sequence
atgtgcggcatcttcgcctacctgaactaccacgtgccccggaccaggagggagatactggaaacattgattaagggcctccagaggttggagtaccgaggatacgattcagccggtgtcggcttcgacggagggaacgacaaggactgggaggccaatgcctgcaaaattcagctcatcaagaaaaaggggaaagtgaaggccctcgatgaggaagttcacaaacagcaggacatggatttagatattgagttcgacgttcatctcgggattgctcacaccagatgggcaacgcacggggagccatctcctgtcaacagtcacccccagcgatcagacaaaaataacgagttcattgtgatccacaatgggataatcactaattacaaagacctgaaaaaattcttagaaagcaaaggatacgattttgaatctgaaaccgacaccgaaacgatcgctaaactcgtaaaatatatgtatgacaatagggaatcccaggatacttccttcacaacgctagtggaaagggtgattcagcagctggaaggcgcgtttgctctggtttttaaatccgtgcattttcctggtcaagctgttgggactcggcgcggtagccctctgctaattggcgtccgctctgagcacaaactgtcaactgatcacattccaatcctctacaggacaggaaaggataaaaagggatcttgtaacctatctcgagtggatagcaccacctgcctgttcccagtggaagagaaagctgtcgagtattactttgcttctgacgcaagcgcagtgatcgagcacacaaatagagtgattttcttggaagatgatgatgttgctgctgtggttgacggccgactgagcattcatcggattaaacgcacagccggcgatcaccccggacgtgccgtacaaacattgcagatggaattgcagcaaatcatgaaaggcaatttttcaagcttcatgcagaaggagatctttgagcagccagagagtgttgttaatacaatgcgcggccgggtgaacttcgatgattatactgtcaacctgggaggcctgaaagaccacatcaaggaaattcagcgctgccgcagactcatcctgattgcctgcggaacctcataccacgcaggagtggctactcggcaggtcctagaggagcttaccgaactacctgtcatggttgagctggccagcgatttcctcgataggaatactccagtttttcgcgacgacgtttgcttctttctgagccagtcaggtgaaaccgccgataccctgatggggctgcggtactgtaaggagcgtggcgccctgactgtcggcattacaaatacagtgggctcgtcaatatctcgggagacagattgcggagtgcatatcaatgccggcccagagattggtgtggcctcaaccaaggcctatacgtcacagttcgtgtctttagtgatgttcgccttgatgatgtgtgatgatcgtatatccatgcaagagcgacggaaagagattatgctcgggctgaagagattgcctgacctcatcaaagaagtcctttctatggatgatgaaatccagaaactggccacagaactctatcatcagaaaagcgtcctgattatgggcagaggttaccactacgcaacatgtctggagggcgccctgaagatcaaagaaatcacctacatgcactccgagggcatcctggcgggcgaattgaaacatgggcccctggctctggttgataaattgatgcccgtaattatgattattatgcgggaccacacctatgcgaagtgtcagaacgcgcttcagcaggttgtggcccgtcagggcaggcctgtagtcatttgtgacaaggaggacaccgagactattaagaacaccaagcggacgatcaaggtgcctcactcagtggattgtctccaaggcattttgagcgtgatccccctccaattattagccttccatctggcagttctgaggggttacgatgtagacttcccgaggaacctggctaagagcgtgacagtggagtag

SEQ ID NO: 24096 - DNA, 498 bp, synthetic construct
  source 1..498: mol_type = other DNA; note = Synthetic coding sequence
atggaggacctgttcgagaccttccaggacgagatgggcttcagcaacatggaagacgacgggcccgaggaggaggaacgcgtggctgaaccccaggcaaatttcaataccccacaggcccttcgttttgaggagctactggccaacctactgaacgaacaacaccagatcgctaaagaattatttgagcagctcaagatgaagaagccctcggctaaacaacaaaaggaggtcgagaaggtcaagccacaatgtaaagaggtacaccagactctgatcctggaccccgcacaaagaaagcggctccagcagcagatgcaacagcacgtacagctactgacccagattcacctgctggctacttgtaacccgaaccttaaccccgaggcatccagcacccgcatttgcctgagctgggagccattgctgaaggccccatccccctttacaatttctactactccgtcgtttaggccttgttcaaatccagttacctag

SEQ ID NO: 24097 - DNA, 633 bp, synthetic construct
  source 1..633: mol_type = other DNA; note = Synthetic coding sequence
atggccgccagcgtggagcagcgggagggcaccatccaggtgcagggacaggctctgttctttcgggaggctctgcccggaagtgggcaggcacggttctccgtgttacttcttcacgggattcggttctcttcagagacttggcaaaatctagggaccctgcacagactggcccaggctggatatagggccgtcgctatcgatctgccgggcctcgggcacagcaaagaagccgctgcgcccgcacctatcggagagcttgcacccgggtcttttctggcagcagtggttgacgcgctggagttgggaccgccagtggttattagtccctctttgtccggtatgtactctttgcccttcctgactgcacccggctcccaactccccggctttgtacctgtggctcccatctgtactgataagatcaatgccgctaattacgctagcgtgaagacccctgccctgatcgtgtacggggatcaggaccctatgggccaaacctcttttgaacacctaaaacaacttccaaatcatagagtgctgatcatgaaaggcgccgggcatccatgctacttagacaaacccgaagaatggcacaccggacttctggactttcttcagggcttacaatag

SEQ ID NO: 24098 - DNA, 1248 bp, synthetic construct
  source 1..1248: mol_type = other DNA; note = Synthetic coding sequence
atgcgggccgccgacagcggcagctgggagcgggtgcggcagctggccgctcagggggagcctgcccccagttgtggggccggtgctggacccgcgcgaccgcctggacccgccgcttgcgaacagtgcgtagatgcggcaggccctggagacaggccaagagcaggggtgccaagagttcgggcagacggcgactgtagccagcctgtgctgctgagggaggaggtgtcccgtttgcaggaggaagttcacctactgagacagatgaaggagatgctagcgaaggatctcgaggaaagccaaggtggcaaatcttccgaggtgctgtcggccacagaattaagagtacagctggcacagaaggaacaggagttggcgcgcgcgaaagaagccctacaggccatgaaggccgatagaaaaaggctaaagggggagaagactgatctggtgtcacagatgcagcagttatacgctaccctggagtcgcgtgaggagcagctgcgggattttatacgaaattacgaacagcatagaaaggaaagtgaagacgccgtgaaggccctcgccaaagaaaaagacttattggagagagaaaagtgggaactccggcgccaggcaaaagaggcgacagaccacgcaacggcccttaggagtcagctagatcttaaagataatcgcatgaaggagctcgaagcagagttggctatggccaaacagagtctcgccacgctgacaaaagatgtgcctaaacgccactccctggcgatgccgggagagactgtactgaatggcaaccaggaatgggtcgtccaggccgatctacctctgacagccgccatccgccagagccagcagaccctgtaccatagtcaccctccgcacccagctgatagacaagccgtgcgggtttccccgtgtcactctagacagccctctgtcatcagcgacgcctccgccgcggagggggaccggagctcgaccccaagtgacattaattctcctcgtcaccggactcactctctttgtaatggtgacagtcctggtcctgttcagaagaatcttcacaatcccatcgtgcagtcacttgaggatctggaggaccagaagagaaagaaaaagaaggagaaaatgggattcggaagcatttctagggtgtttgccagaggaaaacagaggaagagcctggatcccgggttgttcgacggcactgctccagactattatatcgaggaagacgctgattggtag

SEQ ID NO: 24099 - DNA, 693 bp, synthetic construct
  source 1..693: mol_type = other DNA; note = Synthetic coding sequence
atggaggccgccgagaccgaggccgaggccgccgccctggaggtgctggccgaggttgctgggatcctcgaacccgtgggattgcaggaggaggccgaactgccggccaagatccttgtggagtttgtggtggacagccagaagaaggacaagctgctttgctcgcagctgcaggtcgcggatttcctccagaatatcctggctcaagaagatacagccaaggggttagaccccctcgcatctgaagatacctcacggcagaaagccatagccgccaaagaacaatggaaagagttgaaggcaacatatcgggagcacgtggaggccatcaagatcggcttgaccaaggccctaacccagatggaagaggctcagcggaagaggacccagctgagagaggccttcgaacagctgcaagccaaaaaacagatggcaatggaaaagagaagggcagtgcagaatcagtggcagttgcagcaggagaaacacctccaacacctggcagaggtgagtgctgaagggaaacttctcttccctgaggccgaggcggaagcagaaaatctgcccgatgataagcctcaacagcccacgcgcccccaagaacagagcacgggtgacaccatgggacgggatccaggagtttcattcaaggctgtcggacttcagccggcaggggacgtaaatttaccgtag

SEQ ID NO: 24100 - DNA, 2547 bp, synthetic construct
  source 1..2547: mol_type = other DNA; note = Synthetic coding sequence
atgcaggccgaggccgccgactggttcagcagcatgcccttccagaagcacgtgtactaccctctggctagcgggcccgaaggaccagacgtcgcagtagcagccgcggccgcgggtgcggcctccatggcttgcgccccaccgagcgctgcaagcggccccttgcctttctttcagttccgaccaagactcgaatccgtggactggcgccgactcagtgctattgacgtggataaagttgctggggcagtggacgtgcttactttacaggaaaatatcatgaacatcaccttctgtaaactggaggacgaaaaatgcccacattgtcaaagtggtgtagacccggtgctgctgaaacttatccgactcgcccagttcacaatcgagtacctactacattcacaggaatttcttacatcgcagttgcacactttggaggagagactgaggcttagtcactgtgatggcgagcagtccaaaaagctgctcactaaacaggctggagaaatcaagactctgaaggaggaatgcaaacggcggaagaaaatgatttctacgcagcagttgatgatagaagccaaagccaactattatcagtgccatttttgcgataaggccttcatgaaccaggcttttttgcagtctcatattcagagacgacacacagaggaaaactcacactttgaatatcagaaaaatgcacagatagaaaagctgaggagtgaaatcgtcgtgctgaaggaagagctccagctcacgcggtctgaattagaggcggctcaccatgcatccgccgtgcgcttcagtaaagagtacgagatgcaaaagacaaaggaggaggattttctcaaactatttgatcgctggaaagaggaagagaaggagaaacttgtggatgagatggagaaggttaaggaaatgtttatgaaagagttcaaggagctaacatcaaagaacagcgcgctcgagtatcagctaagcgagatacagaagtctaatatgcaaattaagagtaatattgggacattaaaggacgcacacgagtttaaagaggaccgcagtccatacccacaagatttccacaatgtaatgcaattgctggactctcaagagtccaaatggactgcccgcgtacaggccatccatcaagagcataagaaagaaaaaggtaggctcctgagtcatattgagaaactcagaacaagtatgatcgatgacctgaatgcctccaatgtgttttataaaaagcgcattgaggagctgggccagcggctgcaggaacagaacgaactcattatcacccagaggcagcagattaaagatttcacatgtaatccactgaacagcatttcagaacccaaagtaaacgcccccgcactgcatacgttggagacaaagtcttccctgcccatggttcacgaacaggctttttccagccatatcctggagcccatcgaggaactgtcagaagaggaaaaaggccgtgagaatgagcagaaactcaataataacaagatgcacctccggaaagctctgaaatccaactcttcactgacaaagggtctgcgaactatggtggagcagaatttgatggagaagctggagactctgggaatcaatgccgatattaggggaatatctagcgaccagcttcaccgcgtgctgaagagtgtggagtctgagcgccataagcaagagcgggagatcccgaattttcaccagatcagagaatttttggaacatcaggtttcctgtaagattgaagagaaggcactcctgtcaagcgatcagtgtagcgtatctcaaatggataccttgtccactggtgaagtgcccaagatgatccaacttccctcaaagaatcgtcagctcatccgccagaaagctgtgtcaaccgaccgaacctccgtcccaaaaatcaaaaagaacgtgatggaagatccgtttccccgcaagtcctccaccatcactacacctcctttcagctccgaagaagaacaggaggacgacgacctgataagggcgtatgcttctccaggccctttacccgtaccacccccccagaataaagggtctttcgggaaaaacactgtgaaatctgatgctgacggcactgaggggtctgagattgaggacaccgatgacagcccaaagcctgccggggtggcggtgaaaacacctacggaaaaagtggagaagatgtttccacaccgaaaaaatgtgaacaagccggtggggggcacaaacgtccctgaaatgtttattaaaaaggaggaattacaggagctcaagtgcgcggacgtcgaggacgaagattgggatatcagcagtcttgaggaggagattagcttggggaagaaatctggtaaagagcagaaagaacccccacctgccaaaaatgaaccacatttcgcccatgtactcaacgcatggggagcctttaatcccaaaggacccaagggcgaagggttacaagaaaatgaaagcagcacccttaaatcaagccttgtgaccgtcactgactggtccgacaccagtgatgtttag

SEQ ID NO: 24101 - DNA, 1185 bp, synthetic construct
  source 1..1185: mol_type = other DNA; note = Synthetic coding sequence
atggtggtggaggtggacagcatgcccgccgccagcagcgtgaagaagccattcggcctgagaagtaaaatgggcaagtggtgttgccgctgcttcccatgctgtcgcgagagtggcaaaagtaatgtcgggaccagcggggatcatgacgactcggcaatgaagaccctgcgttctaagatggggaagtggtgccgccactgtttcccttgctgcagggggtcaggtaaatccaacgtgggggccagtggcgaccacgatgattcagctatgaaaacccttcggaacaagatgggcaagtggtgctgtcattgttttccctgctgcagggggagtagtaaaagcaaagtcggggcttggggagattacgatgacagtgccttcatggagccccggtaccatgtccggggcgaggacttggataagctgcaccgagctgcttggtgggggaaagtccctcgcaaagatctgattgtgatgctacgcgataccgacgtgaataagcaagacaagcagaagcgaacggccttacatctggcaagcgcaaacggaaactccgaagtggtgaaattactgcttgatcgtcgttgccagctgaatgtccttgataacaaaaaaaggacagctctgataaaagtgtgctcctcacagctatatcagcacgaagccgtccagtgccaagaggatgagtgcgccctcatgctgctggagcatgggaccgatcctaacatcccagatgaatacgggaacacgacactgcattatgctatctataacgaagacaaattaatggctaaggccctgctgctttacggtgcggatatcgaaagcaaaaacaaacatgggctgacccccttactgctgggcgtgcacgagcaaaaacagcaagtggtaaagttcctgatcaagaaaaaagcaaatcttaatgcacttgataggtacggccgcacagctctaatccttgccgtgtgctgtgggagtgcgtcaatagtgtctctgcttctcgagcagaatatcgatgtgagctcacaagatctttctggccagacagcccgagaatatgccgtctcatcccatcaccacgtgatctgccagttgctgtcggattacaaagaaaagcagatgctcaaaatctcatcggaaaattcgaatcccgagaacgtcagtcgcacaagaaataaatag

SEQ ID NO: 24102 - DNA, 1308 bp, synthetic construct
  source 1..1308: mol_type = other DNA; note = Synthetic coding sequence
atggcccccttcggccggaacctgctgaagacccggcacaagaaccggtctccaactaaggacatggactccgaagagaaggagattgtggtgtgggtgtgccaggaggaaaaacttgtctgcgggcttactaagcgtaccaccagcgctgacgtgatacaagcccttctggaggagcatgaggccacctttggtgagaagcgcttcctcttgggcaagccttccgactactgtataattgaaaagtggcgtgggagcgaacgggtcctgccacctcttacccgcatcttaaagttgtggaaagcatggggtgatgaacagcctaatatgcagttcgtcttggtcaaggctgacgctttcctacccgtaccactgtggcgcactgctgaggctaagttggttcaaaacacagagaagctctgggaactgtcacccgctaattacatgaaaaccctccctcccgataagcaaaaaaggatcgtccggaagacattcagaaagctcgctaaaattaagcaggacactgtgtcccacgatcgcgataacatggagacactagtgcacctcataatctcccaggaccacaccattcaccagcaggtcaagcgaatgaaggagctggatctggagatagagaagtgcgaggcgaaatttcatttagatagagtggagaacgatggagaaaattatgtgcaggacgcgtatctgatgccctccttttcagaggtggagcagaatctcgaccttcagtacgaggagaatcagacgctggaggacctaagtgagtccgatggtatcgagcagctggaagaacggctgaaatactacaggatcctgattgacaaactgtccgccgaaatagagaaggaggtcaagtcagtgtgcatcgacattaatgaggacgccgagggagaggccgcatccgaactggaaagcagtaacttggaatcagtgaaatgcgatcttgaaaaatcgatgaaagccggactcaagatccattcacacctgtcaggtattcagaaggaaataaaatactcagactctcttctgcaaatgaaagcgaaggaatacgaattgctggctaaggaatttaacagtttacacatctctaacaaggacggatgtcagctcaaagagaaccgtgcaaaggagtctgaggttccttcgagcaatggcgaaattccacccttcactcagagggtgttcagtaattatacaaacgacacggattccgataccggcatcagctccaaccactcacaggacagcgaaacgacggtcggagacgtcgtgcttctcagtacatag

SEQ ID NO: 24103 - DNA, 1644 bp, synthetic construct
  source 1..1644: mol_type = other DNA; note = Synthetic coding sequence
atggccggcaccaagaacaagacccgggcccaggccaagaccgagaagaaagccgcaatacaggctaaggcgggagctgagcgagaggccacaggcgtggtgagacccgtggccaagacgcgggccaaagccaaagccaaaaccggctcaaagaccgacgctgtcgctgagatgaaagccgtgagtaaaaataaagtagtggcggaaacgaaggaaggggctctgagtgagcccaagactcttggcaaagccatgggcgattttacacctaaggcaggcaacgaaagtactagctctacgtgtaagaatgaggccggcaccgatgcctggttctgggctggcgaagaggccaccatcaactcatggttctggaatggcgaagaagccgggaacagcttcagcacaaaaaacgacaaacccgagatcggcgctcaggtctgcgctgaggagctcgaaccagcagcaggtgcagactgtaagcctcgctctggtgcagaagaggaggaggaggagaacgtgatcggcaattggttctgggagggagacgatacctctttcgacccgaatccaaaaccagtatcacggattgtgaaaccacagcccgtctatgaaatcaatgaaaaaaatcgcccaaaagactggagtgaagtgaccatctggcccaacgcccccgccgtgacacccgctgtgttgggcttccgtagtcaggctccgagcgaggcatcaccaccgagttatatcgtcctcgcaagtgctgaagaaaacgcttgcagcctgcccgtcgcaactgcttgccgtcctagtcgcaatacgcggagttgcagccagcctattcctgagtgccggtttgacagcgacccctgtatccagactatcgatgaaattcgcaggcaaatacgaattcgagaggttaacggaataaagccctttgcttgtccgtgtaaaatggagtgctacatggatagcgaggagtttgagaagctggtgagcctgctcaaatcaactactgatcccttgatacacaaaatagcgcgaattgcgatgggcgttcacaatgtccacccattcgcccaggaattcatcaatgaagttggagtagtcaccctaattgagtctcttttgagttttcccagtcccgagatgcgcaagaagactgtaattacacttaatcctccgtccggggatgagcgccaacgcaaaattgaactccatgtcaagcatatgtgtaaagagacaatgagcttccctctgaattcgcccggccagcagtcaggtctcaagatcctgggacagctcaccaccgacttcgtccaccattatatcgtcgccaactattttagcgaactgtttcacctgcttagttctggaaattgtaaaacccggaatcttgttttgaagttgctcctgaatatgagcgaaaaccccacagctgccagagatatgattaatatgaaggctcttgctgctctcaagttgatctttaatcagaaagaagcaaaggccaacctcgtttccggggttgctatcttcattaacattaaagagcacatcagaaagggctccatcgtggttgtagaccatctgtcttataatacccttatggccatttttcgtgaggtaaaagaaatcattgaaaccatgtag

SEQ ID NO: 24104 - DNA, 1362 bp, synthetic construct
  source 1..1362: mol_type = other DNA; note = Synthetic coding sequence
atggcccggaaggtggtgagccggaagcggaaggcccccgccagcccaggagccgggagtgacgcccagggcccacagttcgggtgggatcactcgttgcataagcgcaaacgtctgccccccgtgaaaagatcgcttgtctattacctgaaaaacagggaggtccgattacaaaacgagacttcctactcacgcgtgctgcacggatacgcggcacagcagctcccatcactcctcaaggagcgagaattccacctcggcaccctgaataaggttttcgctagtcagtggttaaaccatcgacaagtagtgtgtggaaccaagtgtaacaccctgtttgtggtcgacgtgcagactagccaaatcaccaagatccctattctgaaggatagggagcctggcggagtcactcagcagggctgcggaatacatgcgatcgagctcaatccaagccgtacactgctggctacaggcggcgataatcctaactcactggccatctaccgactccccaccttagatcccgtatgcgtgggcgacgacggacacaaagattggatttttagtatcgcgtggatttccgacactatggcagtttctggttcgcgggacggctccatgggcctatgggaggtcaccgatgatgtgctgactaagagcgatgcaaggcataatgtctcacgggtgcctgtctacgctcatatcacccacaaggcactgaaagatataccgaaagaagacaccaaccctgacaactgtaaagtgcgagctttggccttcaacaacaagaataaggagctgggagctgtatccctcgatgggtattttcatctctggaaggcagagaatacacttagcaagctgctctctactaaattgccatattgtcgcgaaaacgtctgcttggcatatggtagtgagtggagcgtgtatgctgtaggcagtcaggcccatgtgtccttcctggatcccaggcagcctagctataatgtgaagtccgtatgctcccgtgagcggggctccggaattagaagcgtctcattctacgagcatattattaccgtcggcacaggccaggggtctctattattttacgacattagggcccagagattcctggaagagaggctgtccgcttgttacggaagcaaacccaggctcgcaggcgagaacctgaagctgacaaccggcaagggctggctaaatcacgatgaaacctggaggaactatttctcagatatcgactttttccccaatgccgtttatacccactgctacgatagctctggaaccaagctttttgttgcggggggacccctaccctcgggactgcacggtaactatgcgggcttgtggagctag

SEQ ID NO: 24105 - DNA, 2439 bp, synthetic construct
  source 1..2439: mol_type = other DNA; note = Synthetic coding sequence
atggaggccttccaggagctgcggaagcccagcgcccggctggagtgtgaccattgttcctttcgaggcaccgactacgagaacgttcagatccacatggggactatacatcccgaattctgtgatgaaatggacgccggaggccttgggaaaatgattttctaccagaagtccgctaaactttttcattgtcataagtgcttttttacatccaagatgtactctaatgtgtactaccacatcacttctaaacatgcatctcctgacaaatggaacgataagcccaagaaccagctgaacaaggagacagacccagtcaaatcccctccattgcctgaacaccagaagataccctgcaactctgctgagcctaagtctatccctgctctgtctatggagactcagaagctcggatccgtcctcagtccggagagtccaaagcccacccctctgaccccattagaacctcaaaagcccggatccgtagtcagcccagagctccagactccactgcccagtccggagccctctaaacccgcgagcgttagcagcccggagccccccaaatccgtgccagtgtgcgaaagtcagaaactagctcctgtgcccagcccagaaccccagaaacctgcaccagtatccccagaatccgtaaaggccacactctctaaccctaagccacagaagcagtcccatttcccagaaacactcgggcctccaagtgcttcctcacctgagagccccgtgctggctgcctcccctgagccctgggggccaagtcccgctgcaagcccggaaagtcggaaaagtgcccgcactacaagtcccgagccacgaaagcctagccccagcgagtcccctgaaccgtggaaacctttcccggctgtgtcacctgagccccgacgccccgcacccgccgttagccccggaagctggaagccaggacctccagggtctcctcgcccgtggaagagtaacccatccgcatcctccggtccatggaagccggctaagcccgcacccagcgtttcacccggtccatggaaacccatccctagtgtgagccctggaccctggaaacccacacctagcgtatcctcagctagttggaaatcgagcagtgttagtccatcgagttggaaaagcccccctgccagccccgagagctggaagtcgggccctcctgagctgaggaagacagcccctactttaagccccgaacactggaaggccgtgccacccgtatctcccgaactcagaaagccaggtccgccactttcacctgagattcggtcccccgcgggatcacctgaactccggaaacccagcggaagcccagacctgtggaaactctcccctgatcagagaaaaacttcccccgccagtctggacttccctgaatcccaaaaaagttcgcgagggggcagtcctgacctgtggaagtcgtcctttttcattgaaccccagaagcccgtcttcccagagaccaggaagcccgggcccagcggaccctcggagtcacccaaagctgcatcagatatatggaagcctgtgttatccatagatactgaacctaggaaaccggccttgtttccagagcccgcaaagacagcacctcctgcttcgccggaggcaaggaagcgcgctctctttccagaacctcggaagcatgctctcttccctgaattgcccaagtccgccctattctccgagtcacagaaagcagtggagcttggggatgagctgcagattgacgctatcgacgaccagaaatgtgacatcctggtgcaggaggagctgctggcatcgccaaaaaaacttttggaggataccctttttccttcttctaagaagctgaagaaagataatcaggaaagctcagacgccgagcttagttcttctgagtacattaagaccgatctcgacgctatggatattaaggggcaggagagcagcagtgaccaggaacaagtcgatgtggaaagcattgattttagtaaagagaacaaaatggacatgacaagtcctgaacagagtcggaatgtcctgcagtttactgaagaaaaggaggcctttatctcagaggaggagattgctaaatacatgaaaaggggcaagggcaaatactactgcaaaatctgttgttgcagagcgatgaagaagggcgcagtgctccaccacttagtgaataagcacaatgtgcacagcccatataagtgcaccatttgcggaaaggcgtttctgctcgagagtctactcaagaaccacgttgcagctcacgggcagtcgttgctcaaatgtcccagatgcaatttcgaatccaattttccgagaggttttaagaaacatctgacacactgtcaatctcgccacaatgaagaggctaacaagaagcttatggaggctttggagccaccccttgaggagcagcagatctag

SEQ ID NO: 24106 - DNA, 1974 bp, synthetic construct
  source 1..1974: mol_type = other DNA; note = Synthetic coding sequence
atggacgagcaggaggccctgaacagcatcatgaacgacctggtggctttgcagatgaaccgccggcataggatgccaggctatgaaaccatgaaaaacaaggacacaggccatagtaatcgtcaaaaaaaacacaactctagctcaagcgcactgctcaattcccccaccgttactaccagttcatgtgctggagcttcagagaagaaaaaatttcttagtgacgtccggattaaatttgaacacaacggagaacggaggataattgccttcagccggccggttaaatacgaagacgtagagcacaaagtcacgactgtttttggtcagccactggacctgcattacatgaacaacgagctctccattctgctcaagaatcaggacgatcttgataaagcaatcgacatcctcgaccggagtagttccatgaagagcttaaggattttactcctcagccaggacaggaatcacaattcaagctctccacattccggagttagtagacaagtgaggattaaggcttcccagagcgcgggcgatattaacacaatctaccagccacctgaaccaaggagcagacacctgagcgtgtcctcccagaatcccggacgtagctcccccccccccggatacgtgcctgagcgccaacagcatatcgccaggcagggatcctacaccagcattaattctgagggggagtttattcccgagaccagtgagcaatgcatgctggatccactttccagtgcagagaactctctgtcagggagttgtcagagcctggaccggagcgccgattcaccatccttccggaagagtcggatgtccagagcccagtcatttcccgacaaccgccaggaatattcagacagggaaacccagctgtacgataaaggcgtcaagggcgggacataccctcgccggtaccatgtcagtgttcaccataaggactatagtgacggtcgcaggacattcccacgaatccgcagacatcaagggaatttgtttaccctcgtgccatctagccgaagtctctccacaaacggggagaatatggggctagccgtgcagtacctggacccaaggggtcgcttacggagcgctgactctgagaatgcactgagtgtgcaggagcggaatgtgcctaccaagtcacctagcgctcctattaattggagaaggggtaaattgctaggccagggcgccttcggcagagtctacttgtgctatgatgttgacaccgggcgggaactcgctagtaagcaggtgcaattcgatcctgactctccggaaaccagtaaggaggtctccgctctagaatgcgaaattcagcttctcaaaaatctgcagcacgaacgcattgtccagtattatggctgccttagggatcgagccgaaaaaacactgaccatctttatggaatacatgcctggggggagcgtcaaggaccagctgaaggcctatggcgctctgactgagtcggtgacccgtaaatacactaggcaaattctagagggcatgtcttatctgcactccaacatgattgtgcatcgcgatatcaaaggggcaaatattttgcgagattccgcaggcaatgttaagctgggcgattttggggccagtaaaagactccaaactatttgcatgtcgggcacagggatgaggtcagtgacaggcaccccctactggatgtcacctgaagtgatttcaggagagggttatggtcgaaaggcagacgtgtggagcctgggttgcactgtcgtggaaatgctgaccgaaaaacccccatgggccgagtatgaagccatggcagctatctttaagatcgccacacagcctactaacccccaactgcctagccatatctcagagcacgggcgtgatttcctgcggagaatattcgtggaggcccggcaacgcccgtcggcggaagaactccttactcaccacttcgcccagcttatgtactag

SEQ ID NO: 24107 - DNA, 2547 bp, synthetic construct
  source 1..2547: mol_type = other DNA; note = Synthetic coding sequence
atgcaggccgaggccgccgactggttcagcagcatgcccttccagaagcacgtgtattaccccttggcaagcggccccgagggacccgatgttgccgtggccgccgccgctgctggagcggcttccatggcctgcgcgcctcccagtgctgcttcaggccctctacctttcttccagttccgtcctagacttgaatcagttgattggaggaggctctcggcaatcgacgtggataaagtggctggagcggtcgatgtcctcactctgcaggaaaacataatgaacattacgttttgtaagttggaagatgagaagtgtccgcattgccaatccggggtagatcctgtgctccttaagctcatcaggctggcccagttcactatcgagtacttgctccactctcaagagtttctcactagtcaactacatactttggaggagcggctgaggctctctcactgcgacggcgagcaatccaaaaaacttctgaccaagcaggccggggagataaagacactcaaggaggaatgtaagaggaggaaaaaaatgatcagcacgcagcaactgatgatcgaagcaaaggcaaattattaccagtgtcatttctgtgacaaagcatttatgaaccaggcgttcctgcagtcccacatacagcggcggcataccgaggaaaatagtcactttgagtatcagaagaacgcgcaaatcgaaaagctgaggtctgaaatcgtggtccttaaagaagagctgcagctgacgcggtctgaattggaagccgcacaccacgcttccgctgtgcgttttagcaaggagtacgagatgcagaagacaaaagaagaggactttctcaaattatttgatcgctggaaggaagaggagaaagagaagctggtggacgagatggaaaaagtgaaagagatgtttatgaaggagtttaaggagctgacaagcaagaattcggccctggagtatcagctatccgaaatacagaaaagtaacatgcagatcaagtctaacattggcacccttaaggatgcccacgagttcaaggaggaccggtcaccctacccccaggatttccacaacgtaatgcaactgctggattcccaggagtccaagtggactgcacgagtccaagcgattcatcaagaacataagaaggagaaaggaagactattatctcatatcgagaaactacgcactagcatgattgatgatttaaatgccagcaatgttttctataaaaagagaattgaagaactagggcagaggttacaagagcagaacgaactgatcattacccagcgtcagcaaattaaggatttcacctgcaaccctctcaattccatctctgagccaaaggtgaatgcacccgccttacatacactcgaaaccaaaagctctctacccatggttcacgagcaggcattctcctcgcacatcctggaaccaatcgaggagttatctgaagaggagaagggcagggagaacgagcaaaaactgaacaataacaaaatgcatctgcggaaagctttaaaatctaattcatcactgacgaaaggactgcgcaccatggtcgagcagaatttgatggagaagctcgaaaccctgggaattaacgccgatataagaggaatttcgagcgatcagctacacagagtacttaaaagtgtcgaatccgagagacacaagcaggaaagagagattccaaacttccaccagattcgcgagtttcttgagcaccaggtgagttgcaaaatcgaagagaaggctttgttatcaagtgatcagtgcagcgtttctcaaatggatactctgtctaccggcgaagtgcctaagatgatccagctgccaagtaagaatcgccagcttattagacagaaggcggttagtacagaccggaccagcgttcccaaaataaagaagaatgtgatggaagatccatttccccgaaagagctcaacgatcactacacctccatttagttcggaggaggaacaagaggatgacgatctgattagagcttatgcctctccgggacccttgcctgtgccccccccccagaacaagggtagcttcggcaaaaacacggtgaaatccgatgccgacggcaccgaggggtctgagatagaggatacagacgattccccaaaacccgctggagttgctgttaaaacccccacagagaaggtggagaagatgtttcctcataggaaaaacgttaataaacccgttgggggaaccaacgttcccgaaatgtttatcaaaaaggaggagcttcaggagttgaaatgcgccgacgtcgaggatgaggattgggatatatcgagcctcgaggaggaaatttccctaggaaaaaaaagcgggaaagagcaaaaggagcctccgcccgcgaagaatgaaccccatttcgctcacgtcctgaatgcttggggggcattcaatcccaaaggccctaagggagagggtctgcaagagaacgaaagtagtactctgaaaagcagccttgtaactgttactgactggagcgacacctctgatgtttag

SEQ ID NO: 24108 - DNA, 4074 bp, synthetic construct
  source 1..4074: mol_type = other DNA; note = Synthetic coding sequence
atggccgacaccgacctgttcatggagtgcgaggaggaggagctggagccctggcagaagatatccgatgtgatcgaggattcggttgtagaagactacaactccgtggataaaactacgacagcaggcaaccccttagtgcagcagggagggcagcccctgattctcacccagaaccccgcaccagggctagggaccatggtgacgcaacctgtactgcgtccagtgcaagtcatgcagaacgctaaccacgtgacttcttctccggtcgcaagccaaccaattttcatcactactcaggggtttccagtccggaacgtgcggccagtgcagaacgccatgaaccaggtgggaatcgtgctaaatgtgcaacagggacaaactgtgagaccaattactctcgtgcccgcccccgggacgcaattcgttaaacctactgtgggcgtaccccaagtcttcagtcaaatgactcctgttcgacccgggtcaactatgcctgtgagacccacgacaaacacttttaccaccgtgattccagccacattgaccattaggtccaccgtcccacagtctcagagtcagcagaccaaatcaacaccgtcaacctctacaacaccaaccgcaacccagccaacatctctagggcagctcgccgtgcagtcgccaggccagtccaatcaaacgactaatccaaaacttgccccttcattcccatccccccctgcagtgagtattgcaagcttcgtgacagtcaagcgccccggggtgacaggtgagaactccaatgaagtggccaagctggtgaatacactgaatactataccctctcttggacagagtccagggcctgtcgtggtgtctaataatagctccgcgcacggctctcaacggacctcaggtcctgaaagctctatgaaagtaacaagttctattcccgtgtttgatttgcaagacggaggacgcaaaatctgtcccaggtgcaatgcacagttccgggttaccgaggcccttcggggtcacatgtgttattgctgccctgaaatggtcgaataccaaaagaaaggtaagtcgctggatagtgagccctcagtgccttcagccgccaaaccccccagcccagaaaaaactgctccagtcgctagtacacctagctctactcccattcccgctctgagtccccctactaaggtacctgaacctaacgaaaacgtgggagacgctgtgcagacaaaactgatcatgctggtggatgacttttactacggtcgggatgggggaaaagtcgctcagctgaccaactttccaaaggttgcaaccagcttcagatgtccacattgcaccaaaaggctaaagaataatatcagattcatgaaccacatgaagcaccatgttgagctggatcagcagaatggggaggtcgacggacatactatatgtcaacactgttacaggcaatttagtacccccttccaactgcaatgtcatctagaaaatgtacacagcccttacgagtcaactaccaagtgtaaaatctgtgagtgggccttcgagagcgagcccctgttcctgcagcatatgaaggacacccataagcccggagagatgccctacgtatgtcaagtttgccaataccgctcttccttatattctgaagtggacgttcattttcggatgattcatgaagacacccggcatctgctctgtccttactgtctaaaagtatttaagaatggaaatgctttccagcaacattatatgcggcatcaaaagagaaacgtgtaccactgtaacaagtgcaggctgcaattcttgttcgctaaggacaaaatcgagcataaactccagcatcataagacattcaggaagcctaaacagttagagggactaaaacccggtaccaaggtgacaatacgggcatctcgcggccagccaagaaccgtccctgtctccagcaacgataccccaccatcagcattacaagaggctgccccgctgacgagtagcatggatccactgcccgtgtttctgtatccacctgtgcagagaagcatccagaagagagccgtccggaagatgagcgtgatgggaagacaaacctgtttggaatgcagcttcgagatccccgattttcccaaccactttcctacctatgttcactgcagcctttgtcgctacagcacttgctgcagtcgcgcatatgccaaccacatgatcaataaccatgtgccaagaaagtcacctaaatatctcgccctcttcaaaaattcggttagtgggattaagttggcctgtacttcctgcactttcgtgacatctgtcggcgatgctatggctaagcatctggtcttcaatccttcccaccgatcttcatccattctgccccgtgggcttacatggatcgcgcattcccggcatgggcagactcgcgatcgggtccacgatcggaacgtgaaaaatatgtaccctcctccatccttcccgaccaacaaggccgccacagtaaagagcgctggcgccacccctgcagagcctgaggagctgctgaccccactggcccccgctcttcctagcccagccagcacagccacacccccgccaacccccacacaccctcaagcccttgctctgccacccctcgccacagagggagctgaatgtctcaacgtcgacgatcaagatgaggggtcgccagtgacacaagagcctgaactagcctccggcggggggggatccgggggcgtgggaaagaaggagcagctgtctgtgaagaaactgagggtagtacttttcgcactgtgctgtaacacagaacaggccgccgagcatttccgaaatccccagcggaggatcagacggtggttgcgaagatttcaggcttcccagggtgagaatctggaaggcaagtatttgtcattcgaggctgaggagaagttggctgagtgggtattgacacaacgggaacagcagctccccgtgaatgaagagacactgtttcaaaaggctacgaaaattggtcggtccctcgaaggcggctttaagatctcttacgagtgggcagtcagatttatgctgagacaccatcttactccacacgcaaggcgggcagtggctcataccctaccaaaagatgtcgccgagaatgccggactcttcatagattttgtacagaggcagattcacaatcaagacctgcctttgagtatgattgtggctatagatgagatatctctgtttcttgacactgaggtgctgagcagcgatgacaggaaggaaaacgctttgcagacagtcggcaccggggagccttggtgcgacgtggtgctcgcaattcttgccgacggcacagtcttgcccaccctggtgttttatcgtgggcagatggatcagccagccaatatgcctgacagcattttgttggaggctaaggagtccggttattctgatgacgaaataatggaattatggtctaccagagtgtggcaaaagcacacagcttgccagaggagtaaagggatgctcgtgatggattgccaccggacccatctgtctgaggaagttcttgccatgctgagcgcgtcttcaacgctacctgcagtcgttcctgcgggttgctcctctaagattcagcctctagatgtctgcattaagcggaccgtgaaaaacttcctgcataagaagtggaaggaacaagcccgagagatggctgataccgcctgcgactctgacgtcctgctccagctcgtcctggtgtggctgggggaagttctgggcgtgattggtgactgtccagaactggtgcagaggtcctttctggttgcatctgtcctgcctgggccagacggcaacatcaattcaccaacccggaacgcagacatgcaagaggaactcattgcaagcctggaagagcagctcaagctctctggcgagcactccgagagttccacacctaggcctcgcagcagccctgaagaaacaattgagccagaaagcctccaccagctgttcgagggtgaatcagaaacagagtccttttacggctttgaagaggccgatctggacctgatggaaatttag

SEQ ID NO: 24109 - DNA, 2904 bp, synthetic construct
  source 1..2904: mol_type = other DNA; note = Synthetic coding sequence
atgggccccggccagcccgccagcacctgcgtgcacctggccccccggactcagctggacggaaggagtgacccaaaggtgttgcagacgcaaaaccagctgcagttcaaccgcaatgtgcccacccacagctccaacctcgcgatccgctatagttgcccccacgctattcgcattgaaaaactgaaacatagctataatgagagctaccactgtaaagacgccgactgtagagtaggtcccgacctgggctcatctgtcagtttttctgtgatttcgcaggagcgattgtcttacgccgttcatctggccaggcgtgatgtcaagcgccgccaattcgaaaagcatatcaaggaacaccaccttcgtagccaaccccagtcaagtcaaaagtgtggtcacacgaagtacaaaattcccgatcacagagtggagcgcaaagagagtaagtcacaggcggcgtgtcagtgttctcatcaaccttcaaaagtggaaatctcatcctccggagcaaaggtatacctgtactcgtcgcaccctggtcagagtgacctgaccgttccaaattctccacctacccacgatcccggccttcagcctcatccacggatcggggaccacaaaaatatttctgaacagaaaagcctgctagaagtgcagcgcttacagaaagaactctcttcctgtattcacaaaatcgaagaggtcaccaaaaaggaccggctggaggaagctctggatcccgatgaggagcggcgtatacgaatacggcgtcaagaacaagctgccaggtccgcaaggatgttatacgtgcttcagcagcaggtgaaagaaatacaggaagaactcgacaaactgtcaccccacaaaataaagcatacaaagaaaagctgggcaatgagcaaactcgcggctgctcaccgcggcgccatacgcgccttgcagatgtttgttactcagttcaccgacagaggggaacatcccctgccagcccgatgtaaagagcttgggtcccttattcggcagctatctctctgctctgtcaagctagacgctgatccaagcgtgccggatgtagtgatcgacatcctgcagcagatagaggcattggagagccttctagagaagaagctttcgcctaagaaggtgaagaagtgctttagcgagatccggagtagattccctatcggcagccagaaggccctggagcgctggccttccacttcccccaagggtgagagacgacccctgactgcaaaagatacctttcctcaggaaacttcaagaccatcagtggcaaagcagcttctggctgacaaatatcagcctgatacagagctccctgaaacccaacggctgcaaagcgagctggatgtgttggacgctgatatcgttctcgaggaaggccctttcatcctggaccagtctgcctcgttcaaagatgaagtgttggccgtggccaaaaccaaggctggcaaaaaaaagccagtaactgaaaacgtgccttttaggaagaaggatacccttgcacctgctaggcagcaaggcctgaggaaagcagaaaggggacgccaatctcaacctcatagcaaatcacgggtgcagcagacgaccgtcagcagtaggctcaagatgaaccgtcagcctgttaaagataggaaagcgccgtggatcccaccgaaccctacatctccccccgctagcccaaaatgtgcggcatggctaaaggttaagacatctccccgcgacgcaacaaaggagccactccagcaggaagacccccaggaagagagtcatctgacaggcgctgtcgagcacgaggccgcacgcctggcttggctggacgccgagaccagcaaacggctgaaggaattggaggagttgaaggctaaagaaattgattctatgcagaagcaacgactcgactggttggatgctgagacttcccggaggacaaaggagctgaacgaactcaaagctgaggaaatgtatcgactacagcaattgagcgttagtgccacccatctggctgacaaggtggaagaggccgtcttagaccgcctaaaacctctactggtgaaagcacaaagggttaatagcacaacagaggccaatatccacctgaaagacggctcctcagtgaacacagccaaggcccaaccagcccaggaggtggccgcagtcgattttgagagcaataatatcaggcagctcgacgactttctcgaggactgcgcgtccgagctgtgggctgtgacgcacgctaaaatactgggaagcgagacacttgctaccgtggaggacagcaaggacagcccagacctggagatcatgatgaggcggatggaggaaatggagaaatatcaggagtcagtgcgccagaggtataataagatagcctacgctgaccccaggctgtggatgcaggaagagaacaacgaccagaaaataagcgccatatcagaaaaacccctaagcccacacccaatccgaatcactaagacagtggatcgtaaggatccagccgtgaatataatgctggaacggccttgcaatggaaatagtctggacgaatctgtcggcaccgaagagggctctgagaagagggaggccccgcttctgtctttggccgaggatagccagcaaaaagaaggacgggcgcccctctttgtcccaccggggatgcagcatagtattggagattattgctccagattcgaacagtatctgcgtataattagccatgaggcagtaggttcatttaacccctggctgatcgctgaatcattttctgaggagctggtggacgaggctctgggcgccgtggcagcagaactgcaggatatgtgtgaggattatgccgaagccgtgttcacatcggaatttctggaagccgcaacgtag

SEQ ID NO: 24110 - DNA, 6840 bp, synthetic construct
  source 1..6840: mol_type = other DNA; note = Synthetic coding sequence
atgtaccggagcagcgcccggagcagcgtgagcagccaccggcccaaggacgatggaggcggcgggcccaggagcgggaggtcctctggttcatcatctgggcccgccaggcgatcaagcccacccccacccccatcgggttctagctctaggactcctgccagaaggcccagaagcccaagtggccatcgaggccgacgagcgtcacctagtcctcccaggggccggcgtgtgtccccttctcctccacgcgcacggagaggcagcccatctcctcccaggggaaggagactttttccgcccggtccagctggattccgcggctcctcccggggcgagtccagagctgactatgcgagagacggccggggtgaccaccctggggacagcgggtcaaggaggaggagcccaggcctgtgctccgattctctcgagaagagcctacgtattacggttgggaatgaccatttctgcgtgtcgacacctgagaggcgaaggttgagcgaccggctgggcagccccgtagataatctcgaagacatggatcgggacgacctgaccgacgacagtgtgttcacgcggtcaagccaatgctctcgaggactggagaggtacatatctcaagaggaaggcccactctccccctttctcggtcagttggatgaagattacaggacgaaagaaaccttcctgcacagatctgactatagtccgcatattagctgtcatgacgagttattgcgcggcacagaaaggaatcgggaaaaattgaagggttactctatccgctctgaggagaggtcccgagaggcgaaaagaccaagatacgatgatacagtgaagattaacagtatgggtggagatcatccttcttttacgagcggcactcgtaactatcgccagcggagaagaagccccagcccccgctttcttgatcctgaatttagagaactcgatctggctaggcgtaaacgggaggaagaggaggaacggtccagatctctgtcgcaagagctcgtcggcgtcgatgggggcggaactgggtgcagcataccagggttgagtggagttttgaccgcctcagagccaggctactctctgcaccgtcctgaggaggtgtcagtgatgcccaagaagtcaattttgaaaaagcgtattgaggtagacatcatggaaccctctatgcagttggagagcttttcctcctcaaccagttcaagtcaagatcatcctctctactccggccatcccagcctccctttatctggggcaatagcagcgttcgcttctgagattgagaataagggcaccatggtggagaccgcgctgaaagagcctcaggggaatctatatcagtgggggcccctaccagggatcccaaaggataactcccctttacgagagaaattcggtagttttctgtgccataaggataacctggacctcaaggctgaaggccccgaacggcacacggacttcctcttgccgcacgaaagggcttcccaagacggatctggctttagcagaatcctctccatgttggcagactccacaagcacccaagagaaaaggcgcaggagcttccccgacattgaggatgaggagaagttcctatatggagacgaagaagaggacctcaaggctgaaagcgttcctaagcccctcgggtcatccgaatctgaggtgatgagacagaaagccagttccctcccttccagtgctccggccgtcaagttggagtcactcgaggagaccaatccagaatatgcaaagattcacgatctgctgaagacgattggattagatatcggagttgctgagattagccaactcgccgcccgcacgcaagagcgactgcacggaaagaagccgtcactccgctcatctgctgaccggagatcttcagtggatcgatacttcagcgccgaccactgcagttctgtggatcaccgcttttccgccgacaggtgcagcagcgtggatcattgcttttccgcagacagacggtcgtctgatccccacaggctagagagcagggaggctcatcatagcaatactcactcaccagaggtgagccatccccatcccccttcacccgtggacccttatctcctcaccaaaaattcccccccattcctcaagtccgaccacccagtcggtcatatttctggaccagaggtggtaggctctggcttccaatctagcgtcgctgtgcggtgtatgttgccctctgcaccatcggcccccatccgtttgccacatacagccgctctaagtcagttccacatgcctcgtgcctctcaattcgccgctgctaggataccccctaactatcaaggcccagccatcccacctgctagctttgacgcataccgccactacatggcttatgcagcctctcgttggccgatgtacccaacgagtcagccctctaatcaccccgtgcccgagccacatagaatcatgcctatcaccaaacaggctacaagatcccgccctaatctacgcgtcatccctaccgtgacgcccgacaaaccaaagcagaaggagtcgcttcgcggcagcatcccagcagcacaagtcccagtgcaagtctcaattccctccttaatcagatataatcccgaaaagatcagcgatgagaaaaatcgggccagccagaagcagaaggtgattgaagagcgggaaaagctgaagaacgatcgggaagcccgtcaaaagaagatgtattacctgcgcacggaactggaacggctccacaagcaacagggggagatgctgcgaaaaaagcgcagggaaaaagacggtcacaaagatccactgcttgtggaagttagccggctccaggataatatcatgaaggacatcgccgagctccgccaggaagcggaggaagcagaaaagaaacagagcgagctggacaaagtcgcacagattcttggcattaacatttttgataaatctcagaagtcactcagcgatagcagagagccaaccgagaaaccaggcaaagccgaaaaatcaaagagcccagagaaagtaagcagcttctctaatagttcctcaaacaaagagagcaaagtgaacaatgaaaaattccgtacgaaaagccctaagcccgccgagagtccgcagtctgccaccaagcaattggaccagccaaccgcagcctacgaatattacgatgcggggaaccactggtgcaaggactgcaacactatctgcggcaccatgttcgacttctttacccacatgcacaataaaaagcatacccagacacttgacccttacaacaggccatgggcatcaaaaacacagtctgaggccaaacaagacgctatcaagagaactgataagatcacagttccagctaaggggagtgaattcctagtaccaatcagcggtttttactgccagctgtgtgaagagttcctcggggacccgattagtggggagcaacacgtcaaggggcaccagcacaacgagaaatataaaaagtacgtggacgagaaccccctgtatgaagagcgtagaaatctcgaccggcaggctggacttgccgtggtgttggagacggagcggcggaggcagtccgagctcaagcggaaattgtccgaaaaacctaaagaagaaaaaaaggaaaaaaaagccaaggcagtaaaggaggtcaaggaggatgataaggttagcgaaaagttggaggatcaattatcagaggggaggaactccccagagaaggctgaaaataagcgtaatacaggaattaagctccagctgaaggaagaggtgaaaaaggagtcccctacctcgagttctttcggcaagtttagctggaagaaaccagagaaagaggaggagaaaagcagtttggtgacgccatcaatttccaaagaagaaatcctagaatcgtccaaagacaaggaggacggtaaaacggaagcaggcaaggcgaaaccaattaaaatcaagttgtcgggcaagaccgtggttgcccacacctccccgtggatgccagtagttactacttcaacccaaacaaaaatccggcccaatctacctataccctccacagtgctccggaagtcttgtagcgccaccatgagcaaaccagccccactgaatacttttctgtcgatcaaatcgtctggtacaactgccaaacctctgccagtggtcaaagaaagttccgccgatttattgctcccgccagacattattagtaaagcgttcggaggggaggaagtgattctgaaaggatccccagaggagaaagtggttcttgccgaaaaatctgagccctcccacctgccagagcaaattctcccaccccctcctccccctcctcccccacctcctccccccccacccgtgattccccatcccgccgctccttctgccgctcaggctaatgcaattttggcgcccgtgaaatctaacccagtcgtctcccagacactttcgccagggttcgttgggcccaacatcctgaatcccgttctgcccgtagctataatggcctctgcacaacccgcagccatccctagcgatgaaaccgctcccggagtgtccgagtctgacagggatcagaccttgtttagcgtccttgtacggccccctccccctctgagcagtgtgttctccgaacaggctaagaaactggaaaagaggaattcatgcctggccactgcaaacgccaaagatctgtacgatatattttattcctcaggggggaaaggggcaccagagacaaagggcgcgcccgaaaccaaactgtctgggggccccttggctaacggagagaactctaatctttcccgcacaaagtcctctgatacttcatccacttcgcccctgaattcatccgcctcacaagaggaactccaccaggacgagggcctggtggctgcgcccatcgtttcaaactctgagaaacctatagcgaagacattggtagccttaggtaaatggtccgtggttgagcatgtcggacctaaatcaactggctctacctatggtttcctgcagcctctgacccgactatgccagagtaggccttatgaaaccataacgcccaaaactgacaccctcgccatctggacctcctccagcttccagagtgacaccagcagagacatttcccccgagaagagcgaactggatctgggtgagcctggcccccctggcgttgaacccccaccacagcttctcgacatccagtgcaaagaatctcagaagctggtcgaaatccatctccgtgaaagcgtcaatcaggacaaggagtcacaagagctgaggaagagtgaagattgcagagaaagcgagatagagacaaacactgagttgaaagaacgcgtcaaagaacttagtgaggggattgtggacgaaggagtgagcacctccataggccctcattcaatcgacgacagtaatttgaatcacggtaataggtacatgtgggagggggaagtaaaacagccgaacctcttaatgatcgataaggaagcagaacagtcgaacaagcttatgactggaagtgagacaccctccaaggtggtgatcaagctgagtccacaagcgtgcagctttacaaaagccaagttagactcgtttctcagcgaagccagatctctgctcaacccacaggacacccccgtgaagatttcagctcctgagctgctccttcactctcctgctcgctctgcgatgtgtcttacagggagtcctcaggagcaaggtgtgtctgtggtgagcgaagagggtctcgaaaactccgctcctgagtcagcaagtagaacatccagatatcgctcccttaagctcaaacgggagcgatctaaggacttccaggtgaaaaaaatctacgaactcgccgtgtgggatgagaataagaagcgaccagagacctgggagtcacccgaaaaacctaagaccgaagccctggagttacaggatgttcatcctgagttgacagtgactattgaatcaaaggcactggaggactttgaagccaccgacctgaaggttgaggagttgaccgcactgggaaatctgggtgatatgccagtggatttctgcaccacacgagtgagtcccgcccaccgatccccgacggtgctttgtcagaaggtatgcgaggagaactcagtaagtcctatcgggtgcaactcctccgatcctgctgatttcgaacctattccaagctttagtggctttcctctcgatagcccaaagacactggtactcgacttcgagactgaaggggagcggaattcccccaaccctaggagcgtgaggatcccgagtccaaatattctcaaaactggtctaacagaaaacgtagacagaggactggggggtctagagggcacacaccaagcccttgacctgctggccggcggaatgatgccagaagaggttaaggagtcctctcaattggataaacaagaatctctgggtttagaattgaaaacaattaatagtgccggcctcggccctagcccctgcctgcccgacctcgttgattttgtcacacgcacgtctggcgttcagaaagataaattgtgctcacctctctctgaaccaggggacccgagtaaatgcagttctctggagctgggacccctgcagctggagatatctaacgccagtacaaccgaagtggcaatcttacaggttgatgatgacagcggtgacccccttaacctggtcaaggcacccgtttccagatcccccccacgggagcaggtgatcgaggataatatggtgccgcagggcatgcctgagcaggagactaccgtgggtgccatccaggaccacactgagtcctctgttcacaactag

SEQ ID NO: 24111 - DNA, 1932 bp, synthetic construct
  source 1..1932: mol_type = other DNA; note = Synthetic coding sequence
atgggccaggagagcagcaagcccgtgtggcccaaccccaccggcggatatcaatcaaataccggaagaaggtacggtcgccgacatgcatatgtcagttttcgacccccaacctctcagcgtgaaagaatagcttcccagcgaaaaaccaacagtgaagtccctatgcaccgatcggctccatcgcagacaacgaaacggtctaggtctcctttctcaacgacgagacgctcctgggacgattctgaatcatctggcacaaacctcaacatcgacaatgaggactacagtaggtatccccctagggaataccgtgcttccgggtcccgccggggcatggcctacggacacatcgactcatacggagcagacgactcagaggaggaaggagccggtcctgtggagcgtcccccagtgaggggaaagacaggcaaattcaaagacgacaagttgtacgaccctgaaaaaggcgctaggagcctggccggcccaccccctcacttttcttctttcagccgcgacgtgagggaagaacgtgataaacttgacccagttcccgcggcacgttgctcagctagccgggccgacttccttccccagtctagcgttgcttcacagtcgtcctctgagggaaagcttgccaccaagggagacagttccgagcgggagaggagagaacagaacctccctgcacggccttcccgagctccggtgagcatatgcggaggtggagagaatacctcaaagtctgctgaagaaccggttgtgcgcccgaaaatcagaaacttggcttctccgaattgtgtgaagccaaaaattttcttcgataccgacgatgacgatgatatgccccactcaacgtctcgctggagggacaccgcgaacgataacgagggccacagtgacggactggccagaagaggtaggggtgagagctctagcggctacccagaacctaaatacccagaagataaaagggaagcaaggtccgatcaagtaaagccagaaaaagtgccacgacggcggaggacaatggcagatcctgatttctggacacactccgatgactattacaaatattgcgacgaggactcagatagcgacaaggagtggattgcagccctgaggaggaaataccggagccgggagcagacgctgtccagcagcggagagtcatgggagactctgcctggtaaagaggagcgtgagcctccccaggctaaggtgtctgcatcaaccgggacctcacccggccctggggcatctgctagcgcgggcgcaggtgctggcgcatccgctgggagcaatggttccaattatctcgaggaagtaagagagccctccctacaggaagagcaagcctcactggaagaaggtgaaattccatggttgcagtaccacgagaatgactcatcgtcggagggcgacaatgactctggccacgaattgatgcagcccggagtgtttatgctggacggcaacaacaatttggaggacgactcgtccgtgtccgaagatctggaggtcgattggtctctctttgatggttttgccgatggacttggggtggctgaggcaatctcgtatgtggatccccagtttcttacctatatggccctcgaggagcgtctcgcccaggccatggaaaccgctctagctcaccttgaatctctggcagtcgatgtcgaggtggccaacccaccagcttcaaaggaaagcatagatgctctgccagaaattttagtcactgaggatcacggcgctgtggggcaagagatgtgctgtcctatatgctgctccgaatatgtaaaaggagaggtagccaccgagcttccgtgtcaccactatttccataagccatgtgtctctatttggctgcagaaaagtggcacatgccctgtgtgcagatgtatgttcccgccgccattgtag

SEQ ID NO: 24112 - DNA, 1113 bp, synthetic construct
  source 1..1113: mol_type = other DNA; note = Synthetic coding sequence
atgcccaccgagaccctgcagaccggcagcatggtgaagcccgtgtcacccgccggaacattcaccagtgccgtacctctccggattcttaacaaggggccagactatttcagaagacaagctgaacccaatcccaaacgtctgtccgccgtagaaagactcgaggctgacaaagcaaaatatgtgaaatcacaggaagtaatcaatgctaagcaggaaccagttaagcctgccgtgctggctaagccacccgtgtgtccagcggctaaaagagcactcgggtcaccgacacttaaggtgttcggtaatcatgccaagaccgaaagtggggtccaacgcgaaaatctgaagctggagattctcaagaatatcatcaactcctctgaaggtagcagctccggaagcggccataagcattcaagtcggaactggcctccgcataggtctgaagcgacagatctgcaccggcacagttttgccgaatcgctgaaggtatatccgacccaggggcgccgctctccccaggagggcggctcccacgtcgggcgccgtctactggagcagtccgccgagtcgttcctacatgtgtctcactcttcatccgatattaggaaagtaacctcggtcaagcccctgaaagccattccatgctcgagcagcgctccaccgttgccccctaagcctaaaattgctgccatcgccagtatgaagtctccagaggcagacccagtggaaccggcttgtggggtgtctcgtcgacccagcctacagagatctaagtccgatttgagtgaccgctatttccgcgtagatgccgacgtcgaaaggttttttaattattgtggactcgatccagaggaactggagaacttagggatggagaacttcgccagagccaactcagacatcatctctctaaattttagatctgcctcgatgatcagcagcgactgtgagcagtctcaagactctaacagtgacctacgaaatgatgatagtgccaacgacagggtgccctatgggatctccgctattgagcgtaatgcgcggatcatcaaatggctctattccattaagcaagcacgcgagtcccagaaggtgagtcacgtctag

SEQ ID NO: 24113 - DNA, 3126 bp, synthetic construct
  source 1..3126: mol_type = other DNA; note = Synthetic coding sequence
atggccgccgccgccgccgccggcgccgccagcggcctgcccggcccggtggcccaggggctgaaagaggctctcgttgatactttgactgggattcttagccctgtgcaggaagtgagagcagctgctgaagagcaaatcaaagtgctggaggtcaccgaggagttcggagttcaccttgcagagctcacagttgacccccaaggcgcacttgcgatccggcagctggccagtgtgatcctgaagcagtacgttgaaactcattggtgcgcacagagcgagaaatttcgacctcccgagaccactgaacgggctaaaatcgtcataagagagctcctgcccaatggcctccgcgaatctattagcaaggtgcggagcagtgtcgcatatgccgttagtgcaatagcccattgggattggcctgaagcttggccccagctctttaacctgctcatggagatgctggtctcaggcgacctcaatgcagtacatggagctatgcgggttctgacggagttcacaagagaggtgacagatacgcagatgccattggtggcccccgtgatcctacccgaaatgtacaagatattcaccatggctgaggtgtatggtattagaactcgctcccgggctgtggagattttcaccacctgtgcacatatgatttgtaacatggaggagctcgagaagggtgcggccaaggttctcatattcccagtcgttcagcaattcacagaagccttcgtccaagcgttgcagatccctgacggccctacgagtgatagtggttttaaaatggaggtgctgaaggcagtgaccgccctcgtgaaaaactttccaaaacacatggtgtcctcaatgcagcagatcctgcctatcgtttggaataccctaaccgagtccgccgccttctacgtcagaacagaagtgaattatacggaagaggtggaagaccccgtggacagcgatggtgaagttttgggctttgagaacctggtcttttccatcttcgaattcgtgcacgcacttttggagaattccaaatttaaaagtaccgttaagaaggctttgcccgagctcatttactacattattctgtacatgcagattaccgaggagcagatcaaggtctggaccgctaacccccagcaattcgtcgaggatgaggacgacgatacgttcagctacacggtgcgaatagcggcccaggatttgctgttagccgtagcaaccgattttcagaacgaaagcgctgcggctctagcggcggcggcgaccagacatttgcaggaagccgaacagacaaaaaattcaggcacagaacactggtggaaaatacacgaggcctgcatgctcgcccttggctcagtgaaggctatcattactgacagcgtcaagaacggccgtatccatttcgacatgcatgggttcctgacaaatgttattttggccgacttaaacctgagtgtgtccccgttccttctgggacgcgccctgtgggccgctagcagattcacagtggccatgagtcccgagctgatacagcagttcctgcaagccacagtgagcggactgcacgagacccagcctccgtcagtgcggattagcgctgtccgggctatttggggttactgtgatcaactgaaggttagtgaatcaactcatgtgttgcagcctttcctgccatccatcttggatggcctcattcatctggcagcgcagttctcatcggaagtactcaatctcgtgatggagacactgtgcatcgtctgtaccgtggatcccgaattcaccgcctctatggagtcgaaaatttgcccatttaccattgcaatttttctgaagtattccaatgatcccgtggtcgcttcgctggcgcaggacatcttcaaggaactcagccagattgaagcttgtcagggtcctatgcagatgagactgatccccaccttggttagcattatgcaggctccagcagacaagatccctgctggcctgtgcgccaccgctatagacattctcacaaccgttgtccgtaacacaaagccaccgctctcacaactgttgatctgtcaggccttccctgccgtcgcacagtgcacattgcatactgatgataatgcgactatgcaaaatggaggcgaatgcttgcgggcgtatgtgtccgttaccctcgagcaggtcgctcaatggcacgacgagcagggccacaacggcctgtggtacgtgatgcaggtcgtgtcccagctcttagaccctcggacaagcgagttcacagcagccttcgtgggcagactcgtttcgaccttaatctcaaaggcgggtcgtgaacttggcgagaaccttgatcagatcctccgcgctattctgtccaagatgcagcaggccgaaaccctctctgtaatgcagagtctcatcatggtttttgcacacttagtgcacactcaacttgagcctctgttggaattcttatgttctctaccggggcctacgggaaagccagccttggagtttgtcatggctgagtggacaagccgccaacacctgttttatgggcagtacgagggaaaggtcagctccgtggcactgtgcaaactgctgcagcatgggattaatgcggatgataagcgattgcaggacattagagtgaaaggcgaggagatttactccatggacgaaggcatccgaacaagatcaaagagcgcgaaaaaccccgaacggtggacaaacattcctcttctcgtgaagattttgaagcttattatcaatgagctcagtaatgtcatggaagcaaatgcagcgagacaagcaacacccgccgaatggtcacaggacgactctaatgatatgtgggaagaccaggaggaggaagaagaggaggaggaagacggactggctgggcaacttctttcagacatactcgccacctctaagtacgaggaagattattacgaggacgacgaggaggacgaccccgacgctctgaaagatcccctctaccagattgatttacaggcgtacctcacagatttcctgtgtcagttcgctcagcagccttgctacattatgtttagtggccacctgaacgacaatgagcggcgcgttctgcaaacgatcggaatttag

SEQ ID NO: 24114 - DNA, 156 bp, synthetic construct
  source 1..156: mol_type = other DNA; note = Synthetic coding sequence
atgagcagccacaagaccttccggatcaagcggttcctggccaagaaacagaagcagaacagacccattccccagtggattagaatgaagaccggaaataaaatccgctacaattcaaaaaggagacactggcgccggacaaagctcggactgtag

SEQ ID NO: 24115 - DNA, 3627 bp, synthetic construct
  source 1..3627: mol_type = other DNA; note = Synthetic coding sequence
atggacagcctgcccgacgagttcttcgtgcggcaccccgccgtggaagaccagaggaaggaagaaactgaaaataagctggagaagtcttccggccagctgaacaagcaggagaacgatattcccaccgaccttgtgccagtgaatctcttgttggaagttaagaagctgttgaacgccattaacaccctgcctaaaggggtcgttccacacattaaaaaatttctgcaagaggacttctcctttcagacaatgcagcgggaggtagctgccaacagccagaacggcgaagaaattgttcccgcattgaccctgcgattcctcatcacacaactcgaagctgctctgcggaatatacaggccggcaattatactgcccaccagatcaacatcgggtactacttgaccctcctattcctgtacggggtcgccctcactgagaggggcaagaaagaagactacacagaggcagagaataagtttctggtgatgaagatgatgatacaggaaaatgaaatttgtgaaaactttatgagcctggtgtactttggtcgaggtcttctgagatgcgcccagaagcggtacaacggtggacttctggagttccataagagtttgcaagaaattggcgacaaaaacgaccactggttcgatatcgacccgactgaggacgaggacttgcctaccaccttcaaggacctgctcaataacttcatcaagaccaccgagtctaatataatgaaacagaccatttgcagttatctagattgtgagaggtcatgtgaggcggacattctgaagaacacctcatacaagggatttttccagctcatgtgctccaaatcttgttgcgtgtacttccataaaatctgttggaagaaattcaagaatctgaagtatccgggtgaaaatgaccagagcttttcaggtaagaagtgtctgaaagagggctgcaccggggatatggtgaggatgctgcaatgtgatgtccccggtatcgtgaaaatactgtttgaagtcgtgcggaaggatgaatacattaccattgagaacttgggggcctcataccggaagctcatctcacttaagataaccgacacagatatcaggccgaagatctccctgaagttcaataccaaagacgagatgcccatatttaagctcgattacaattacttttaccatctcttgcacatcatcatcatctccggcacagacattgtacggcaaatcttcgacgaggccatgccacctccattactcaaaaaggagctactgatccacaaaaatgtgctggaatcctattataatcatctttggactaaccatcctttgggcggcagttggcacttactgtaccccccaaataaggaattgccccaatccaagcagttcgatctgtgtctgctactggccctcataaagcacctcaacgtattccccgcgcctaaaaaagggtggaacatggaaccgccttcgtcagatatcagcaaatccgccgacatactgaggctatgtaaatatcgagacatcctgctgtctgagattctgatgaacggcctaacggagtctcagttcaatagtatctggaaaaaagtgtctgatatcctgctgcggctcggtatgatgcaagaagacatcgacaaggtcaaagagaatcccatagagaatatctccctggactaccaccagctgagtgtgtacctcggcatccccgtgcccgagatcatccaacgaatgttgagctgctaccagcagggaatcgctctgcaatccataaccggatcccagcgcattgagatcgaggaactgcagaacgaggaagaggaactgtcaccaccgctcatggagtataacattaatgtcaaatcccaccccgagatacaatttgcagaaattaataaggacggaaccagcatcccctctgaatcctccaccgaaagtctaaaagatctgcaggaggtcaaaagtaagcagaggaaaaaaaagaagacaaagaacaagaaaaacaaggattccaaagaagaccaggtcccctatgtcgtggagaaggaagagcaattgagaaaggaacaggcaaatcctcacagtgtaagtagacttattaaagatgacgcatcagacgttcaggaagattccgcaatggaggacaaattctactctttggacgagctgcacattctggacatgatcgagcaaggttcagcaggaaaggtgactactgactacggggaaaccgaaaaggagcgtctcgcaaggcaacggcagctgtacaagttgcattatcagtgcgaagactttaagagacagctgagaactgttacctttcgttggcaggagaaccagatgcagatcaaaaaaaaggacaaaatcattgcatcccttaatcagcaagtggccttcggcatcaacaaagtgtccaagttgcagagacagatccatgcaaaagataatgaaatcaagaacctcaaagagcagctgtccatgaaaaggagccaatgggaaatggagaaacataacctagaatcaacgatgaagacttacgtcagcaagctcaatgccgaaacctcacgcgctttgacggctgaggtgtattttctgcaatgccgacgtgattttggcttgctccatcttgaacaaaccgagaaagaatgcctgaatcagctggcccgtgttacccacatggcagccagcaatcttgaaagcctccaactaaaagccgctgtcgacagctggaacgctatagtggcagatgtgcggaacaaaattgctttcctgaggacacagtacaatgagcagatcaacaaagttaaacagggttttgccttgagcacactgccacccgtgcagttacctcccccacctccgtcccctgaaatccttatgcagcaatttcttggcagaccattggttaaggagtccttcttccgccccatcctcacagtgccccaaatgcccgcagtgtgccctggggtcgtatccgctactggacagcccagggccccactcatgactggtattgcatgggccctcccagctccagtcggcgatgccgtgccgccatcagccggactccggtcggacccctctatcatgaactgggaaaggatcactgatcggctgaagaccgcatttccgcagcagactcggaaggaactgactgactttttaagaaaactgaaagacgcgtacggcaagagcctgagtgagctgacctttgacgaaattgtctgcaaaattagccaatttatcgaccccaagaagagccagtctcaggggaaatctgtctccaatgtgaattgcgtgtccccatcacattctccgagccaacctgatgcagcccagcctcctaaaccagcctggcggcctctcacttcccagggcccagccacttgggaaggtgcctcgaacccagatgaagaagaagaggaagaggagccatgtgtgatctgccacgagaatttgagccctgaaaatctaagcgttctgccctgcgcacacaaatttcatgcccagtgcattcgcccatggctcatgcaacaggggacctgccccacttgccggttacatgtgctgctgccagaggagttccccggccatcctagtcggcagcttcctaagatatag

SEQ ID NO: 24116 - DNA, 996 bp, synthetic construct
  source 1..996: mol_type = other DNA; note = Synthetic coding sequence
atgagccggcagctgagccgggcccggcccgccaccgtgctgggcgctatggagatgggtcggcggatggatgccccaacctccgcagcagtcactcgtgccttcttagagcgcggtcataccgagatcgataccgccttcgtatatagcgaagggcaatcagaaaccatcttggggggccttggcctgcgcctcggcggttcggactgccgggtgaaaatcgatacaaaagccataccactgttcggtaacagcctcaaaccagattccctgaggtttcagctggaaacctccttgaaaagattgcagtgccccagggtcgacctgttctacctccacatgcccgatcacagtacccctgttgaagagacactccgggcctgccaccaactacaccaggagggcaagtttgttgagctgggtttgagtaactatgcagcctgggaagtagctgaaatttgtacgctctgcaagagtaatgggtggatcctcccgacagtgtaccaggggatgtacaatgctattacccgacaggttgaaactgaactgtttccatgcctgcggcactttggcctgcggttctacgctttcaatccactggccggtggcctgctcactggcaagtataagtacgaggataagaatggcaaacagcctgtaggaaggttttttggcaacacatgggctgaaatgtacagaaatcggtactggaaggagcatcacttcgagggcattgccctggtcgagaaggctctacaggccgcctacggcgcgtccgccccgtctatgacctctgcgaccctgcggtggatgtaccaccactcccaactgcagggagcccacggggacgccgttatactcgggatgagttccttggaacaactggagcaaaatctggcagccgctgaggagggtcctctagaacctgcagttgttgatgcatttaatcaagcatggcacctggtaacccatgaatgtccaaactacttccgctag

SEQ ID NO: 24117 - DNA, 1131 bp, synthetic construct
  source 1..1131: mol_type = other DNA; note = Synthetic coding sequence
atgagccccgaggtggccctgaaccggatcagccccatgctgagccctttcatctccagtgtggtgaggaacggaaaggttgggttggatgccacgaactgtttaaggatcacagacttgaagagtgggtgtacctctttgactcctggccctaattgtgaccgctttaagctccacataccatatgcaggagagaccttaaaatgggacatcatattcaacgcgcagtacccagaactgcctcccgacttcatattcggggaggacgccgagtttctgccagatccttctgctttgcaaaatctggctagctggaacccatcaaaccccgagtgcctgcttctggtcgttaaggagctggttcagcaataccaccagttccagtgttcccgactgagggaatccagccgtctcatgtttgagtaccagaccctgctagaagaaccacagtacggcgagaacatggagatttacgctggcaagaaaaacaactggaccggcgagtttagtgcccgcttcctcctgaagctccccgtagacttttcaaatatccccacatatttgcttaaagacgttaatgaggatccaggagaggatgtcgccctactatccgtctcattcgaggacaccgaagctactcaggtgtatcccaagctctacctttcccccaggattgaacacgcattagggggatcaagtgctctgcacatcccagccttcccaggaggcggatgcctgatcgactatgtccctcaagtctgccacctcctaacgaacaaagtgcagtacgtaatccaaggctaccacaagcggcgcgagtatattgcagccttcctctcacattttggaacaggagtcgtcgaatacgatgcggagggcttcacaaaattaacacttctgctgatgtggaaagatttctgctttctggtccacatagatctgcccctgttctttcctagggaccagcccacactgacctttcagtctgtttatcacttcactaatagcgggcagctgtactctcaagctcagaaaaactacccatacagtcccaggtgggacggcaacgagatggccaaaagggctaagagagagagtaaccgggatggcgaggaatcttcaagcgcgtag

SEQ ID NO: 24118 - DNA, 1881 bp, synthetic construct
  source 1..1881: mol_type = other DNA; note = Synthetic coding sequence
atggacgagcaggaggccctgaacagcatcatgaacgacctggtggcccttcaaatgaacaggcgacacaggatgccaggctacgagactatgaagaataaggatacaggacactctaaccggcagagcgacgtgagaatcaagtttgagcataatggcgagaggcggatcatagcatttagccggcctgtgaaatacgaggacgtggaacacaaggttaccacagtgttcgggcagcccctggacctccattatatgaataacgaactgagcattctgctcaaaaatcaggatgacctggataaagccatagatattctggaccgcagctcctctatgaagtcgctccgcatcctgctcctttctcaggacaggaatcataatagtagcagccctcactcaggtgtatcaagacaagttagaataaaggccagtcagtccgcaggcgatataaacacaatctaccaaccacccgagcccaggagtcggcatctgtcagtgtccagtcaaaaccctggcagatcctcaccaccaccagggtatgtgccggaaagacagcagcatattgctcggcaggggtcatacacaagtattaacagtgagggagagttcatccctgagacctctgaacaatgtatgctggacccgctgtcgagcgcggagaatagccttagcggcagctgccagtcacttgatcgcagcgcggattctccttcattccgcaaaagcaggatgtcacgggcgcagagtttcccagataatcggcaggaatactctgacagggaaacccaactgtatgataaaggagtcaaaggggggacctacccacgccggtatcacgtcagcgtgcaccataaagattattccgatgggcgaaggacttttccccgtatccgccggcaccaggggaacttatttacactggtgccttcctcacgctccctcagcacaaatggggaaaatatggggctggctgtccagtatctcgatcctcggggtcggttgagatcagcagatagcgagaatgctctcagcgtgcaggaacggaacgtccctacaaagagcccttccgcaccaataaactggaggcggggaaagctgctcgggcaaggggcctttgggcgggtatatctgtgttacgacgtggataccggccgggagctagcatccaaacaggtgcagttcgatcctgacagcccagagacttccaaagaagtgtcagctcttgagtgtgagatccagcttctcaaaaatctgcaacacgagcgtattgtacaatactatggctgcctgcgggacagggcagagaaaacactgacaatcttcatggaatacatgcccggagggtcagtcaaggaccagctcaaagcgtacggggcactaacagaatctgttacgcggaaatacacccggcagatcttggagggcatgagttatctccattctaacatgatcgtgcatcgtgatatcaagggagccaatatactgcgcgacagcgccggcaacgtcaaactcggcgattttggagcctccaaaagactccagaccatttgcatgtccggaactggtatgaggtccgttactggcaccccatactggatgagccccgaagtgatttcaggcgagggatatggaagaaaggcagacgtttggagccttgggtgtacggtcgttgagatgttgacggaaaagcctccctgggcggagtacgaggccatggcagcaatattcaaaattgccacccaacctaccaacccccagctgcctagtcatatcagtgaacacggacgcgactttttgaggaggatttttgtggaggccaggcagcgtcctagtgccgaggagctgctaacccaccactttgcccagcttatgtactag

SEQ ID NO: 24119 - DNA, 1701 bp, synthetic construct
  source 1..1701: mol_type = other DNA; note = Synthetic coding sequence
atggacctgcaccgggccgccttcaagatggagaacagcagctacctcccaaatcctctagcttcccccgctctcatggttctggcttcaacggccgaggctagccgtgatgccagtattccatgccaacagccacgtcctttcggcgtgcctgtgtctgttgacaaagacgtgcatataccctttacaaacggttcatacacatttgcctccatgtaccaccgacaggggggcgtgcctggcacctttgcaaacagggatttccccccctcccttctgcacctgcatccacagtttgccccgcccaatctggactgcacccccatctctatgctgaaccattccggggtcggagcttttagacccttcgcctcgacggaagatcgagaaagctaccagtctgccttcaccccagctaaacgcctaaaaaactgccatgacaccgaaagtccccatctccgcttctctgacgcagacggcaaggagtatgacttcgggacacaacttccatcaagtagtccaggtagcctgaaggttgatgatacaggcaaaaagatttttgcggtttctggcctgatctcagatcgggaagccagctcctcccccgaggaccgtaacgatcggtgcaaaaaaaaagccgccgccctgtttgactctcaagcccctatatgtccaatctgccaggtgcttctgagacctagcgaactgcaggagcacatggaacaggagctggagcaattggcccagctgccaagttcaaaaaattcacttctgaaagatgcaatggcaccgggaacgccaaagtccttactgctgtccgcatctattaagagggagggggagtctcctactgcctccccacactccagcgcaacggatgaccttcaccactctgatcgctaccagacattcctccgggtgcgcgccaacagacagaccaggttaaatgctcgaatcggcaaaatgaaacgcaggaagcaggatgagggccagcgagagggttcctgtatggctgaggacgatgccgtggatattgagcacgaaaataacaacagatttgaagagtacgagtggtgtgggcaaaagagaatccgtgcaaccaccttactcgaaggagggtttcgtggatccggatttattatgtgttcaggcaaggagaatcccgactccgatgctgacctggacgtagacggggatgacactttagagtatggcaaacctcagtacactgaggccgatgttatcccttgcaccggcgaggagccgggcgaggctaaggagcgagaggctcttagaggggccgttctaaacggtggaccgccatccacacgaattaccccagagtttagtaagtgggccagtgatgagatgccttccacttcgaacggagagagctctaaacaggaagctatgcagaagacgtgtaaaaactccgacattgagaagattacagaggattctgccgttaccactttcgaggctcttaaagccagggtccgggagctcgagaggcagctgtcccggggagacaggtataaatgcctgatttgcatggatagctatagtatgccactgaccagcattcaatgttggcatgtgcactgcgaggaatgttggctcaggacactgggagccaagaaactctgcccgcaatgtaacacaatcaccgctcctggcgatctgcggcgtatctacttgtag

SEQ ID NO: 24120 - DNA, 456 bp, synthetic construct
  source 1..456: mol_type = other DNA; note = Synthetic coding sequence
atggagggctgcgtgagcaacctgatggtgtgcaacctggcctacagcgggaaacttgaggagttgaaggaatccattcttgctgacaagtcgctggcgactagaacagaccaagactctaggacagccctgcattgggcctgctctgccggccacactgagatagtcgaatttctgctgcaactgggggtaccggtcaatgacaaagacgacgcaggctggtctccactgcatattgccgcctctgcaggacgcgatgagattgttaaggctctgctcggcaagggggctcaggtcaacgcagtgaatcaaaacggttgcacacctttacactatgctgcgagcaagaatagacatgagatcgcagttatgcttttagaaggcggagcaaaccccgacgccaaggaccactacgaggcgacagctatgcatagggccgccgctaaggacacgtag

SEQ ID NO: 24121 - DNA, 2220 bp, synthetic construct
  source 1..2220: mol_type = other DNA; note = Synthetic coding sequence
atgggcttcagcaacatggaggacgacggccccgaggaggaggagcgggttgctgaaccccaagctaattttaatacaccccaggcactgaggtttgaagaacttctggctaatctgctgaacgagcaacaccagattgcaaaggaactttttgagcagctgaaaatgaaaaagccttccgcaaagcagcagaaggaggtcgagaaggtgaagccgcagtgcaaggaggtacatcagaccctgatcttagaccctgcccagagaaaacgcttacaacagcagatgcagcagcacgtgcagctgcttacgcagattcacctgttggcaacatgtaatcccaacctcaacccagaggcctcgtctacgcggatctgtctcaaggagttaggaacatttgcacaatcaagtattgcactgcaccatcagtacaacccgaaattccagaccctgttccagccctgcaatctgatgggagccatgcagcttattgaagatttctctacccatgtcagcattgattgctccccccacaaaacagtcaaaaagacagccaacgaattcccatgtttacccaaacaggtcgcatggatactggctacgagcaaagtatttatgtacccagaactgctgcctgtctgctctctcaaagctaagaatccccaggataaaattctcttcactaaggctgaggacaacctgctggctctggggctgaagcattttgaagggactgagttcctcaaccccctcatttccaagtacctacttacgtgcaaaacagctcggcagttaacagtccggatcaagaatctcaatatgaatcgcgcaccggacaatattatcaaattctataagaaaaccaaacagctgccagttctgggcaagtgttgtgaggaaatacaaccccaccaatggaagccaccgattgagagggaagaacatcgtctgccattttggttgaaggccagtttgccctcaatccaggaggaactacgtcatatggctgacggagcacgcgaggtcggcaacatgaccgggacgactgagatcaattccgaccaggggctggaaaaggacaattccgaactgggctccgaaactcggtatccgctactgctgcccaagggagtggtgcttaagcttaagcccgtcgccgaccggtttccaaagaaggcctggagacagaagcggtctagtgtgttaaagccattactgatccagccaagtcccagcttgcagccgtcctttaacccaggcaagacaccggcacagagcacacattctgaggcaccccccagcaaaatggtgttgaggatcccacaccccattcaacccgcaactgtgttacagacagtacctggcgtcccaccgctcggtgtatccggcggagagagctttgagtctccagcagcactgcctgccatgccaccagaggcaagaacatcttttccattgtccgagtcacagactttgctatctagcgctcctgtgccaaaggtcatgatgccgtcacccgcatcctctatgtttcgcaagccatatgtgcggaggcgaccatctaagcgcaggggggctcgcgcctttcgctgtattaaaccagctcctgtgattcatccggcttctgttatcttcaccgtgccagccaccaccgttaagattgtatcgcttggcggaggctgcaacatgatccaacctgtgaacgccgctgtggcacaaagcccacagaccatccccatcgcaacactactagtcaatccaacaagctttccctgcccattgaatcagcccctcgtggcttcgtcagtgtcccccctgattgtgtcggggaacagtgtgaatcttcctatcccatcgacaccagaagataaggctcatatgaacgtggacatagcctgtgccgtcgcggacggggaaaatgcatttcagggcctggaacctaagttggaaccacaggagctttcccctctctccgctaccgtattccctaaggttgagcattcccctggacccccgcctgtggacaagcaatgtcaagaggggttgtccgaaaacagtgcctaccgatggactgtcgtcaaaacagaagaagggcgccaggcactggagcccttgccacagggaattcaggagtcactcaacaatagtagcccaggcgatctggaggaagttgtaaaaatggaaccggaggacgccacagaggaaattagcgggtttctctag

SEQ ID NO: 24122 - DNA, 1692 bp, synthetic construct
  source 1..1692: mol_type = other DNA; note = Synthetic coding sequence
atgagccggcccagcagccgggccatctacctgcaccggaaggagtactcccaaaaccttacttccgagcctacgctcctgcaacaccgagtggagcacttgatgacatgcaaacagggttcccaacgcgtccagggcccagaagacgctttgcagaagctgttcgagatggacgcccagggcagagtctggtctcaggatttgattctgcaggtgagggacgggtggctgcagctgctggacatcgaaacaaaggaagaattggacagttacagactggatagcattcaagccatgaacgtggccctaaatacttgttcatacaactcaattctgagcattaccgtacaggagcctgggctgccaggcactagcaccctgttgttccagtgccaggaagtaggcgccgagcggctgaagacctcactgcagaaggcactggaggaagagttagagcagcggccccggctcggtgggttgcaacccgggcaagaccgatggcggggacccgctatggaacggcctctgcctatggagcaggccaggtacttagagcctggaattccccccgaacaaccacatcagcggaccctagaacattccctacctcctagcccccgaccactgcctagacatacgtccgctcgagagccctcagcctttacattacccccaccgagaagatcttcgagcccagaggatccggagcgagacgaggaggttctgaaccacgtcctgcgcgacatcgagctttttatgggtaaacttgagaaggcccaagcgaaaacttcccgaaagaaaaagtttgggaaaaagaataaggatcagggagggctgacacaagcccagtatatagactgctttcaaaagattaaacactccttcaacctcctgggtaggctggctacctggctgaaggaaacaagcgccccagaacttgtccacatcctgttcaagtccctgaatttcatcctagcccgctgccccgaagctggtcttgcagctcaggttatctcccccctcctgacacctaaggccatcaatttactacagagctgcctgtccccgccagaatctaatctgtggatgggtctgggacctgcctggacgacttccagggccgactggaccggcgatgaaccactaccataccagcccaccttcagtgatgactggcagctgccggagccctcatctcaggccccgttaggttatcaagatcccgtctcgctgagacccagtagtccaaagcctgcccagccagccctcaagatgcaggtactgtacgaattcgaagctcgcaatcccagagagcttacggtcgttcagggggagaagctggaagtcctggatcactccaagcgctggtggttagtgaagaacgaggccgggaggtcgggctatatcccttccaacatcctagaaccactgcagcccggcacccccggtacccagggccagagtccaagtcgggttccaatgcttaggctttctagtagaccagaagaagtcacggattggctgcaagccgaaaatttttctacagccacagtgaggacactcggaagcctaactgggtcccagctgcttcgtatacgacctggagagctgcagatgctgtgccctcaggaagcgccaagaatattatcccgcctggaggcagtccgtaggatgctcggcattagcccttag

SEQ ID NO: 24123 - DNA, 525 bp, synthetic construct
  source 1..525: mol_type = other DNA; note = Synthetic coding sequence
atgacctgctgccagaccagcttctgcggctaccccagcttcagcatcagtggaacttgcggctcttcatgttgtcaaccatcttgttgcgagacgtcttgttgccagccacggagctgtcagacttcattttgcgggtttccttccttttctaccagcggaacctgttcttcatcttgttgtcagccctcatgctgtgagacttcatgttgccagcccagctgttgtgaaacttcctgttgtcagcccagctgttgtcagatcagctcctgtgggacgggctgtgggatcgggggagggattagctatgggcaggagggttcgagtggcgcggtctccactcgcatccggtggtgccgaccagactccagggtggagggtacatatttgcccccgtgttgcgtggtttcatgcacaccaccctcatgctgtcagcttcaccacgcccaggccagctgctgtcgaccctcttattgcggtcaatcatgttgcagacccgtttgttgttgcgagccgacttgctag

SEQ ID NO: 24124 - DNA, 1173 bp, synthetic construct
  source 1..1173: mol_type = other DNA; note = Synthetic coding sequence
atgcggggcgaccggggccggggccggggcggccggttcggcagcaggggaggacccgggggcggctttcgccccttcgtgccgcatattccatttgatttttatttgtgtgaaatggcctttccccgcgtgaagcctgcacccgatgaaaccagcttctctgaggcgctgctaaaaaggaatcaggatctggcccctaactccgccgagcaggctagcattcttagtcttgtgacaaagatcaacaacgtgatcgataacttgattgttgcgccaggcacttttgaggtgcagatcgaagaggtgaggcaggtgggaagttataagaaagggaccatgactaccgggcacaacgttgctgatctcgtcgttatcctgaagatcctccccacgctcgaggcagttgccgccttgggaaacaaagtagtcgaaagccttcgggcacaggatcccagtgaagtgctcacaatgctgacaaacgaaacaggatttgagatcagctcctcagatgcgacagtgaagattctgatcacaaccgttcctccaaatctgcgaaagctggaccctgagttacatctggatattaaggtgctccagtccgccctagctgccattcgacacgcgcgctggtttgaagagaacgcttcccagtcgaccgtaaaggtgctgatacgcctgctgaaggacctgcgtatccggttcccgggattcgagcctcttacgccttggatcctcgatctcctcggccactatgctgtcatgaacaatcccactcgccaacccctcgcactcaacgtagcttacaggaggtgcctccaaattctggccgccggtttatttttgcccggttctgtggggataaccgatccctgtgaatcgggaaactttagagtgcacacagtgatgacacttgaacagcaggacatggtctgttatacagcgcagaccttggtgcgcattctcagccatgggggattcaggaaaatccttggacaggagggcgacgcaagttacctggcaagcgagatttctacttgggatggagtgatcgtcactcctagcgaaaaagcctatgagaagccacctgagaagaaggagggcgaggaagaagaggaaaacactgaagagcctccccagggggaagaggaagagtcaatggaaacgcaggaatag

SEQ ID NO: 24125 - DNA, 3606 bp, synthetic construct
  source 1..3606: mol_type = other DNA; note = Synthetic coding sequence
atgccccggggcgaggcccccggccccggccggcggggcgccaaggatgaagctctgggcgaagaatcgggggagcgttggtcaccggagttccatctgcagaggaagttggcagactctagccattccgaacaacaggacagaaacagggtgtctgaggaactgatcatggtcgtacaggaaatgaagaaatacttcccttcagaaagacggaacaaaccttcaaccttggatgctttgaattatgctctgcgttgcgtgcattccgtgcaggcaaacagcgaattctttcagattctgtcccaaaacggagctcctcaggctgacgtttctatgtactctctggaggagcttgcaacaatagcaagcgaacacacctctaaaaacacagatactttcgtggccgtgttttctttcctctccggtcgccttgtgcacatttcagaacaggctgccctgattttaaatagaaagaaggatgtattggcctcatcacatttcgtagatctcctggcccctcaagatatgagggtgttttacgcccatacggcccgagcccagctaccgttctggaacaactggacgcagcgcgcagcccgctacgagtgcgcccctgtgaagccttttttctgccgcattaggggaggggaagacaggaaacaggaaaagtgccattccccatttcgtatcattccctacctcattcacgtccatcatccggcccaaccagagctggagtccgagccatgttgccttacagttgtagagaaaattcattcaggctacgaggctccccggattcccgtaaataagcgcatttttacgaccacacacacccctggctgtgtcttccttgaggtcgacgagaaagctgtgcctcttttgggctacctgccccaggacctgataggcacttccatcctctcctatctgcaccctgaggaccgctccctaatggttgcaatccaccagaaagtcctgaagtatgcaggccacccacccttcgagcactcaccgattagattctgcacccagaatggcgattacattattctggatagcagctggtcttctttcgttaacccttggtcccgcaaaatctcatttataattggacgtcacaaagttcgcacttctcccctaaatgaggacgttttcgcgactaagattaaaaaaatgaacgataatgataaagatattactgaactgcaagagcagatatataaactgctgctgcagccagtccatgtgagtgtgagtagtggctacggaagtctcggatcaagcggcagccaggagcagcttgtgtcaatcgcctctagctccgaggctagcggccacagagtcgaggagacaaaagcggaacagatgactttacagcaggtgtatgcttccgtgaacaagataaagaatctagggcagcagttgtacatcgagagcatgaccaagagttcctttaaacccgtgacaggcacccggacggaaccaaacggaggtggggagtgcaaaacttttacgtcctttcatcaaacactcaaaaataatagtgtctatacagagccatgcgaggatctcagaaatgacgaacactcccccagttatcaacagattaactgtatcgatagcgtgattagatacctcaaatcctataatattcccgcgcttaagcggaagtgcataagctgcaccaacaccacgagctcctcttcggaagaggacaaacaaaaccataaagcagacgatgtgcaagccctccaagccggccttcaaattcccgccatcccgaaatcggaaatgcctactaatgggcgatcaatcgacacagggggtggcgccccccagattctgagcacagccatgctttccctgggcagtggtatcagccaatgcggttactcaagtactatagtccacgtgcctcccccggagacagcaagggacgctaccctcttttgcgaaccatggactctcaacatgcagcctgcccccttaacctctgaagagttcaaacacgtgggcctcacggcggcggtgctctcagcgcacactcaaaaggaggagcagaactacgtggacaagttccgcgaaaagattctatcatcaccttattctagctacttacaacaggagtccagatctaaagcaaagtatagttactttcaaggggattccacatccaagcaaactaggagcgcaggatgccgtaaagggaagcataagcggaaaaaacttccagaacccccagacagttcatcatctaacacagggtccggcccccgtaggggcgcccatcaaaacgctcagccttgctgcccatctgcggcaagctccccccatacctcaagccccacgttccctccagccgcaatggtgcccagtcaggccccatatctcgtacctgcattcccattacctgccgctacaagtcccggccgagagtatgccgcgcccggcaccgccccagagggcttgcatgggctgccactctcagaagggcttcagccctaccctgcattcccattcccttacctcgatactttcatgacagttttcctgcccgaccctcctgtctgccctcttttgtcccctagcttcttgccgtgcccgtttctaggggccacagccagctccgcaatttccccgtccatgagcagcgctatgtcacctacgctggacccccctccctctgttacgtcccagaggcgcgaggaggaaaaatgggaggcacagagcgaggggcacccattcatcaccagccgctcttctagcccgttacagctgaacttgctccaagaagaaatgccaaggccaagcgagagtcccgatcaaatgcgcaggaacacatgccctcaaactgagtactgcgttaccggaaataatggcagtgagagcagtcctgccaccacaggggccctatctacagggagtccaccacgggagaatccctctcatcccaccgcctccgctctgtctaccggcagcccacccatgaaaaacccaagccatccaacggccagcgctctctcaacaggttcaccaccgatgaaaaaccccagtcaccctaccgcatccactctgtcgatgggccttcctcccagtaggactcctagccaccctacagccactgtactgtcaaccggtagtcccccatcggagagtccctcccggaccgggagcgccgcaagcggttcttccgacagcagcatttatctcacaagttcagtctattcaagcaagatctcacagaacggacagcagagccaagacgtgcagaagaaggagacattcccgaacgttgccgaagaacccatttggagaatgatccgccagacacccgaacgcatcctgatgacctaccaggtgccggaacgcgtgaaggaggtggtgttgaaggaggacctggaaaagctggagagcatgaggcagcaacagccccagttctctcacggtcaaaaggaagagctcgcaaaggtgtataactggattcagagccagactgtaacccaggagattgatattcaggcctgcgtgacctgtgagaacgaagattccgccgacggtgccgccacttcatgcgggcaagtcttagtggaagattcgtgttag

SEQ ID NO: 24126 - DNA, 1296 bp, synthetic construct
  source 1..1296: mol_type = other DNA; note = Synthetic coding sequence
atgagcgaccagatcaagttcatcatggacagcctgaacaaggagccctttcggaaaaattataacctgatcaccttcgactctctcgagcccatgcaactgctgcaggtcttgtcagatgtcctggccgaaatagaccctaagcaactggtggatattcgcgaggaaatgccagagcaaaccgcaaaacgtatgcttagccttctaggaatccttaaatataaaccatctggaaacgcgacagatatgtcaacattcagacaggggctcgtaatcggaagtaaaccagtaatctatccggttctgcattggttgttgcaacgcacaaacgagttaaagaaaagagcataccttgcgaggttcttgatcaaattggaggtaccctctgaattcctccaggacgaaaccgttgcagacactaacaaacaatatgaggagctcatggaagcgtttaagactctgcataaagagtatgaacagttgaagatttctggattctcaactgcggaaatacgaaaagacatctccgcaatggaggaggagaaagaccagcttattaaacgggttgagcacctgaaaaagcgtgtggaaactgcgcaaaatcaccagtggatgctaaaaattgctaggcagctgagagtggagaaagaacgtgaagagtacctggcccagcaaaagcaggaacagaaaaatcagctgttccacgccgttcagaggcttcaaagagtccagaatcagctcaaatcaatgaggcaagctgcagccgatgccaaacccgagagcctcatgaagcgcctggaggaggaaataaagtttaacctctacatggtcactgaaaagttccccaaagagctcgagaacaagaagaaggagctgcactttcttcaaaaggtggtctctgaacctgctatgggtcatagtgatctcctcgagctggaatccaagattaatgagattaacacagaaattaaccagctaatcgaaaagaagatgatgcggaacgaacccatcgaaggcaagctgtcactgtatcggcaacaggccagtataatctcacgtaagaaggaagcaaaagccgaagagctccaggaggcaaaggagaagctcgctagcctggagagggaagcatccgtgaaaaggaatcagacacgcgaattcgacggcacggaagtattaaaaggggatgagcggcaggatcttacgctgtcacctcggctggaatgcggaggcgtgatcatggcctactgcagtttaaagctcctcggcagcagtgatcccccgacaagcgcgtcctag

SEQ ID NO: 24127 - DNA, 1119 bp, synthetic construct
  source 1..1119: mol_type = other DNA; note = Synthetic coding sequence
atggccagcagcgccagcgcccggacccccgccggcaagcgggtgatcaaccaagaagagcttagacggctgatgaaagagaagcaacgcttgtctacttcaaggaagcgtattgaatccccatttgcaaagtacaaccggctgggacaactctcctgtgctctctgcaataccccggtgaaaagcgaattactctggcagacccacgtgctggggaagcagcatagggaaaaggtggctgagctcaaaggcgcaaaagaagcgagccagggcagcagtgcctcttcagcaccacattcggtcaaaagaaaagcccctgatgcagacgaccaggacgtcaaaagggctaaggctactctcgtaccccaggtacaacccagtacatctgcttggaccacaaactttgacaagattggcaaagaatttatcagggccacccctagcaaaccttccggcttaagtctgctccccgattacgaagatgaggaagaagaagaagaagaagaagagggggatggcgaacgcaaaagaggggatgccagcaagcctttaagcgacgcgcagggcaaggaacactcagtaagtagcagcagagaggttactagctcagtgctgccgaacgatttttttagcaccaaccctccaaaggcaccaataattccccacagtggctccatcgagaaggctgaaattcacgaaaaggtggtggagaggagggagaataccgcggaggccctcccagagggattttttgatgacccggaggttgacgcccgcgttagaaaggttgatgctcctaaggaccagatggataaggagtgggatgagtttcaaaaagctatgcgacaggtaaatactattagtgaagcaattgtggcagaagaagacgaagagggtagactggatcggcagattggtgaaattgatgagcaaattgaatgttacaggagggttgagaagttacggaacagacaggacgagataaaaaacaagctgaaagaaatcctgaccatcaaagaactgcagaaaaaagaggaagagaacgcagactccgatgatgaaggggagctgcaggacttgctttctcaggattggcgcgttaagggggctcttctgtag

SEQ ID NO: 24128 - DNA, 1782 bp, synthetic construct
  source 1..1782: mol_type = other DNA; note = Synthetic coding sequence
atgagccggcccagcagccgggccatctacctgcaccggaaggagtactcccagaacctcaccagtgagccaactctgctgcagcacagagtagagcacctgatgacgtgtaaacagggttctcagcgggttcagggccccgaagatgccttacagaaattgttcgagatggatgcccagggtagggtttggagccaggatctgatcctgcaagtgcgcgacggctggctacagttgttagacatcgaaactaaagaggagctggactcttatagactagactcaattcaggcaatgaacgtggccctgaacacatgcagctacaattccatcctgtcaataacagtccaggaaccagggctcccaggaacctctacgctgttgttccaatgccaggaggttggggcagaaagacttaagaccagtctacagaaagctctcgaggaagaactcgaacagcgcccgcgcctggggggactgcaaccaggtcaggaccgctggcgcggtccggccatggagcgccccctccccatggagcaggccaggtatctcgaacccggaattcctccagagcagcctcatcagaggactcttgagcactccctccctccctcccctaggcccttacctagacacacctctgctagagagcctagcgctttcaccctgccaccccctcggcgttcaagttcacccgaagaccctgagcgcgacgaagaagtcttaaaccacgtcctgcgggacatcgagctgtttatggggaaactggaaaaagcccaagcaaagacctcgaggaagaagaagttcggaaaaaagaacaaggatcaaggtggcctcacccaggcccagtatatagactgtttccagaagattaagcacagcttcaacctcctcggaaggctagcgacttggctgaaagaaacgtcagcacctgagctcgtccacatcctgtttaagagcctgaatttcatcttggctcggtgtcccgaggctggactggccgctcaggttattagtcctctgcttacaccaaaagctattaatctgctccagtcttgcctgagtccccctgagagcaatctctggatggggcttggtcccgcctggactactagcagagccgattggactggagatgaacccctcccatatcaacctacctttagcgatgactggcagctgcccgaacccagctctcaggcaccactgggctatcaggaccccgtctcattgagacgagggtcccacagattaggttccacctcacactttcctcaagaaaagacacacaatcatgatccccagccaggggatcctaactcgagaccgtcaagcccaaagcctgctcagcccgcgctgaagatgcaggtgctctacgagtttgaggcacgtaatccacgagagctgaccgtggtgcagggggaaaagctggaggttttagatcactccaaacgatggtggctggtcaagaacgaggcagggagaagtgggtacatcccaagcaatatcctcgaaccgcttcaacccggcacacccgggacgcagggacagagtcctagtcgcgtccccatgcttcgtctgagctccaggccagaggaggtgacagattggctgcaggccgaaaatttctctacggccaccgtaaggaccctgggcagtcttacaggcagtcaactactgcgcatcagaccgggggaactgcagatgctgtgcccccaggaggcaccgagaattcttagtcgacttgaagccgtgcggcggatgcttgggatttccccctag

SEQ ID NO: 24129 - DNA, 1050 bp, synthetic construct
  source 1..1050: mol_type = other DNA; note = Synthetic coding sequence
atgaagctgaccagcgagaagctgcccaagaaccccttctacgcctctgttagccagtatgcggcaaaaaatcagaagtttttccagtggaagaaggagaaaaccgaaagcgattacacgcatgctaatctggtggacaaagccttgcaacttctcaaagaaaggattcttaaaggcgatacactggcctattttctccgcggccaactttatttcgaggagggttggtatgaggaagccttggaacagtttgaagaaattaaggaaaaagaccatcaggctacctatcagctgggagtgatgtactacgacggcctcgggactaccctcgatgccgaaaagggagtggactatatgaagaagatcttagattcaccgtgtcctaaagccaggcacctgaaatttgcagcagcatataatttgggcagggcctactatgagggaaaaggcgttaagcgctccaatgaagaggctgaaaggttgtggttgattgcagcggataatggaaatccaaaggcatccgtcaaagcgcagtccatgttgggtttatattattccactaaggaacccaaggagctcgagaaggccttttattggcactctgaggcgtgtggtaatggaaacctcgaatctcagggcgcactgggcctcatgtacctttacgggcagggaatacgacaggacacggaagcagctcttcaatgtcttagggaggcggcagaacggggaaatgtgtacgcacaagggaacctggtggagtattattataaaatgaagttcttcactaagtgtgtcgccttctctaagcgcatcgcagattatgatgaggtgcacgacatccccatgatcgctcaggtgaccgattgccttcctgagttcattggccggggaatggcgatggcttcgttttatcacgcacggtgtctgcaactgggcctgggaattaccagagatgaaacaaccgccaaacactactacagtaaagcctgtcgcctgaacccagcactggccgacgagctgcatagtctgctgataagacagcggatctag

SEQ ID NO: 24130 - DNA, 1236 bp, synthetic construct
  source 1..1236: mol_type = other DNA; note = Synthetic coding sequence
atgggcctgaagaagatgaagggcctgagctacgacgaggccttcgccatggccaacgatcccttagaggggttccatgaggtgaacctggcaagtcccacatccccagacctgcttggagtttatgaaagtggcactcaggagcaaactacgtccccttctgtcatctaccgaccacatcctagcgcactgagtagcgtccccattcaggcgaacgctctggacgtaagcgaacttccaacacagcccgtatatagcagccctcggaggttgaattgtgccgagattagctctatatcctttcatgtaactgaccctgccccatgtagcacatctggcgtgactgccgggctgaccaagctgactactaggaaagacaactacaacgccgaacgagaattcctccaaggcgcgacaattactgaggcatgtgacggttccgacgacatctttgggttatctactgacagcctgtctaggctccgatcaccatctgttctggaagtgagggagaagggatatgaaagactcaaggaggagctggcaaaggcacagagagaactgaagctgaaggatgaggaatgcgagcggctcagtaaggttcgagaccagctgggccaggagttggaggagctgaccgcatccctattcgaggaggcccacaagatggttcgagaagctaatattaaacaggccacggccgagaagcagctgaaggaggcgcaggggaagatagacgtgctccaggcagaagtcgcagcccttaaaactctggtgctcagttcaagccctacatcgccaactcaggaaccactccccggtggaaaaactccatttaaaaaggggcacaccagaaacaagagcactagttccgccatgagtgggtcacaccaggatctgagtgtgattcaacctatagtgaaggactgcaaggaagccgatctgtccctgtataacgagttccgcctttggaaggacgagcccaccatggacagaacctgtccattcctggataaaatttaccaagaagacatattcccttgcctcaccttttctaagtcggagctggcaagcgcagttctggaagctgtagagaataacacactctcaatcgagcctgtgggtttgcagcctatcaggtttgtcaaggccagcgctgtggaatgtgggggacccaaatccctcctgtacgtgacattcttacatacctttgacaccttctcaagagattcttag

SEQ ID NO: 24131 - DNA, 2148 bp, synthetic construct
  source 1..2148: mol_type = other DNA; note = Synthetic coding sequence
atgttcggccggaagcggagcgtgagcttcggcggcttcggctggattgataagactatgctagcatcgctcaaagtaaagaagcaggaactcgcaaacagttcggatgccaccctaccagatcgccctcttagcccaccattgacagcacctccaaccatgaagtcctcggagttcttcgagatgcttgagaaaatgcaagacgactacattccgtacccgtcaatagatgaagtggtcgagaagggtggcccatacccgcaggtgatcctgccccagttcggggggtattggatcgaagaccccgaaaacgtgggcacacctacatcgctgggatctagcatatgtgaggaggaggaggaggataacttgagccctaacaccttcggatacaaattggagtgtaaaggggaagcacgagcgtatagacggcatttcctgggaaaagaccacctcaacttctactgcaccggatcctcgttaggtaatctgatcctttccgtaaaatgcgaggaagccgagggcatcgagtatctgagggtgattctgcggtctaagctaaaaaccgttcatgagagaattccccttgccgggctgagtaagcttccatccgtgccacagattgccaaggctttctgcgacgatgctgtgggcctgcgatttaaccctgtgctgtatcccaaagcctcccaaatgatcgtgagctacgacgaacacgaagtcaacaatacgtttaagtttggtgttatatatcagaaggcccgacagactttggaagaagagctgtttggcaataatgaggaatcacctgctttcaaagaattccttgatctgttgggagatactattactctccaggattttaaggggtttcgcggcggcttagatgtgacacatggacaaaccggagtcgaaagtgtatacacaacatttagagacagggagattatgtttcatgtttccactaagctcccattcacagatggcgatgctcaacagctgcaacggaagcggcatataggtaacgacattgtggctatcatattccaggaagaaaacacaccattcgttcctgatatgatcgcctctaacttcctgcacgcttatattgtggtccaggttgagacccccggcacagagacgccttcctataaagtgtcagtcaccgcacgcgaagacgtgcctacatttggacctccactgccctcaccaccagtattccagaagggccctgaatttcgggaatttctgcttaccaaattaactaacgccgaaaacgcttgctgtaagtccgacaaatttgccaagctagaggatcggacacgagcggcactgctcgacaatctccacgatgaacttcatgcccatacacaagcaatgctggggctcggaccagaggaggacaagttcgaaaatggtggccacggcggattcctggaaagcttcaaacgggccatacgcgtgcggtctcactcgatggagacaatggtgggaggacagaaaaagtctcattccggaggcattccagggagtctcagtggcgggatctcacacaactccatggaggtgacaaagaccaccttttccccacctgtcgtcgccgctaccgtcaagaaccaatcaagatcacccatcaagaggcgatccggacttttccctaggctacacaccgggagtgaaggccagggggactctcgcgcccggtgtgacagcactagcagcactcctaaaactcctgatggtgggcattcgtctcaggagatcaaatccgagacatctagtaacccaagttctccagagatctgtcctaacaaagagaaaccctttatgaaactgaaagagaatggcagggctatctcccgctcttccagcagcactagttctgtatccagcactgctggtgagggtgaagcgatggaagaaggggactcaggaggcagccagccatcgacgacaagtccctttaagcaagaggtgttcgtctattcgcctagtccaagctctgagtccccatccctgggcgccgccgcgactcccattatcatgagccggtccccaacagacgcaaaatccagaaactcaccccgatccaatctcaaatttaggtttgataaactctctcatgcatcctcgggagctgggcattag

SEQ ID NO: 24132 - DNA, 2271 bp, synthetic construct
  source 1..2271: mol_type = other DNA; note = Synthetic coding sequence
atggaggaggagctgaagtgccccgtgtgcggcagcctgttccgggagcctattattctgccttgctcacacaacgtctgcctgccatgtgctaggacaatcgcagtgcagacccctgacggtgagcagcacttgccgcaacctcttctgctgtcccggggaagtgggcttcaggcaggagccgccgccgcagctagtcttgaacatgatgccgctgctggacctgcatgtggcggcgccggggggagcgccgcgggtgggctgggcggaggcgcaggcggcggaggagatcacgcagacaagttatctctgtactcagagactgattcaggctatggcagctacaccccttctttgaagagcccaaatggcgtcagagttctgccaatggtgcctgctcccccagggtcttcagcggcagcggcaagaggggctgcttgtagctccctgagctctagttctagcagcataacctgtcctcagtgtcatcggtcagcttccctcgatcaccgaggcctccgcggttttcagcggaataggctcttggaggctatagtgcagcgctatcaacaaggaaggggtgcagtccccggcacatccgcggcagctgctgtcgctatctgtcaattatgcgatagaaccccgccagaaccggctgctactctatgcgaacagtgtgacgttctttattgttcagcctgccaactgaagtgtcatccgtcacgaggaccttttgccaaacacagacttgtgcagccccccccgccgcccccgccgcccgcagaggcagcaagcggacctactggcacggcacagggtgcgcccagcggcggtggcggatgcaagtctcccgggggtgctggcgctggggccacaggcggatcgacggcaagaaaattcccaacttgccctgagcacgagatggagaactattccatgtactgtgtctcctgccgcactccagtgtgctatctgtgcttggaagagggccggcacgcgaagcacgaagtaaagccccttggggccatgtggaagcagcacaaggcccagctttcccaggccctcaacggagtgtcggacaaggctaaggaagcaaaggagttcttggtccagttgaagaatatcctgcagcagatacaggagaacggcctggattacgaggcctgcttggtggcccaatgcgatgctctagtggatgctctcacacggcagaaagccaaactgcttacaaaggtgaccaaagagcgtgagcataaactgaaaatggtgtgggaccaaatcaatcactgcacgctgaagcttcggcagtcaacgggcctcatggaatactgtctggaggttatcaaagagaacgatccgtcaggcttcttacagataagcgacgctctgatcaagagggtccaggtttcgcaagagcaatgggttaagggggccttggagcctaaagtatccgccgaattcgacctgacgctggactcagagccgctattacaggctatccatcagctcgacttcatccagatgaagtgccgagtacctcccgtccccctgcttcaactcgagaagtgctgtacaagaaataatagcgtcaccctggcgtggaggatgccccctttcactcactctccagtggacggatatattctggagcttgacgacggggcgggcggccagttccgagaggtttacgtcgggaaggagactttgtgtacaatagacggcctgcacttcaatagtacctacaatgccagggttaaagccttcaacagtagcggcgtaggaccttactcgaagacggttgtcctccagactagtgatgtggcctggtttacattcgaccccaacagcggacacagggacatcattctctccaacgataaccaaaccgcaacttgcagtagctatgacgaccgggtggttttgggcacagctgcattttctaagggcgtccattactgggagctgcacgtggaccgctatgacaaccacccagaccctgctttcggcgtggcacgcgcttccgtggtcaaagatatgatgctgggtaaggatgacaaagcctgggccatgtacgtggacaacaataggtcgtggtttatgcattgtaacagtcacacaaacagaacggagggaggcgtgtgtaaaggcgcgaccgttggcgtgctgttggacctaaataagcacaccttaacatttttcattaatggccagcagcaggggcctaccgcattcagccatgaggtccagccctccgtgacaagcttgttctag

SEQ ID NO: 24133 - DNA, 2352 bp, synthetic construct
  source 1..2352: mol_type = other DNA; note = Synthetic coding sequence
atggaggaggagctgaagtgccccgtgtgcggcagcctgttccgggagccgatcattctgccctgtagtcacaatgtgtgtttgccctgtgcccggactattgcggtccaaacaccagacggcgagcagcatctgccccagcctctgctgcttagccgaggctcgggtctgcaggcaggcgccgcagcggcagcttcactcgagcacgacgctgctgcaggtccagcttgcggaggcgccggggggtctgctgccggtggtttgggcgggggcgctggcgggggtggcgatcacgccgacaagctgagcctatatagcgagacagatagcgggtacggctcatataccccctccctgaagtcccctaatggcgtcagagtactgcctatggtgccagccccacccggcagctctgccgccgctgcccgcggggcagcctgcagtagcctttcctcttcctcatccagcatcacgtgtccgcagtgtcatcgttcagctagcttggaccaccgcgggctccggggcttccaacggaaccgcctgctggaagctattgtgcagaggtaccaacaaggcagaggtgccgttcccggcacttcagccgccgcggcagtcgccatttgtcaactttgtgatcgcactccgcccgagccggccgcaactctctgcgagcagtgtgacgtgctctattgcagtgcctgtcagcttaaatgccatccgtcacggggcccattcgccaaacaccggctggtgcaacctcctccaccccctcctccccccgctgaggccgcaagcggccccaccggaaccgcccagggggcgccgtcagggggcggaggttgcaaatccccgggaggcgccggcgcaggcgccactgggggatctaccgcccggaagtttcctacttgtccagaacatgagatggaaaactacagcatgtactgtgtctcttgcaggacaccagtctgttatctctgcttggaggaaggccgccatgccaaacatgaggtcaagcctctgggcgctatgtggaagcagcacaaagcccagcttagtcaggccctaaacggggtctctgataaagccaaagaggccaaagagtttcttgtgcagctgaagaacattctgcagcagatacaggagaatggcctggattatgaggcgtgcttggtggcacagtgtgatgcgctcgtggacgccctgacgagacagaaagcgaagctcctgacaaaggtgaccaaggaacgcgagcacaaactgaagatggtgtgggaccaaatcaaccactgtactctgaagctccggcagtcaacaggcctcatggaatactgtctggaggtgattaaagaaaatgatccctccggcttcttacagatcagcgatgcactcatcaagcgggtccaggtgagtcaagagcagtgggtaaagggtgccctggagcctaaagtgagtgctgaatttgatcttacacttgacagcgaaccactgcttcaagctatccatcagttggatttcattcagatgaaatgtcgcgtccctccggtgcctttactacagctggagaaatgttgcacgcgtaacaattctgtcacattggcatggaggatgcctccttttactcactctcccgtggacggctacattctcgaactcgatgatggagctggtggccagttccgggaggtgtatgtagggaaggaaacgttatgtactatcgatgggttacattttaacagcacatataacgcaagagtaaaagcattcaacagcagcggggtcggtccttattctaagacagtagttctccagacaagcgacgtggcttggttcacgtttgaccctaattccgggcaccgagacatcatactgtcgaatgacaatcagaccgccacatgctcttcatacgatgacagagttgtgctggggaccgcggctttctctaagggagtccattactgggaactgcacgtagatagatacgataaccaccccgaccccgcttttggcgtcgctagagcctctgtagtgaaggacatgatgctggggaaagacgataaagcctgggcaatgtatgtggacaataacaggtcatggtttatgcactgcaattcacataccaatcgtacggaaggcggagtttgcaagggcgctacagtcggtgttctgctcgatctcaataagcatacgctgacatttttcattaacggacagcaacaagggcccaccgccttttcacacgtggacggggtcttcatgccagctcttagtctgaatcggaacgtccaagttaccctacataccggcctcgaggttccgactaacctcggcaggcccaagctgtcaggcaactag

SEQ ID NO: 24134 - DNA, 471 bp, synthetic construct
  source 1..471: mol_type = other DNA; note = Synthetic coding sequence
atggtgcccgtgttcaccagcagcgccctgcccgtgaaggacgtggaggacaagcccgagcagcagactcgaacccgggaaacggacaagagcccaacgagcacagaaccaagacagcagcctagtgctctgttcgcccgagggaaccggaaagccgtcaagtcaccccagcgttcatcatccaagatcaaagagaataagcatccatttgccttgtacggttggggagaaaaacagacagacactggatctcaaaaaactcacaacgtatgcgcctctgcacccgtccatgagattcacgagtccgccctcagagctaagaaccgcaggcaagtagagaagcgcaaactggtcgctcaaaggcagagggctcacagcgtggacgttgaaaagaataggaaaatgaaggcgtcatccagtgaaaatccttggatgaccgagtacatgagatgctactccgcccgagcctag

SEQ ID NO: 24135 - DNA, 813 bp, synthetic construct
  source 1..813: mol_type = other DNA; note = Synthetic coding sequence
atgagccccggcagcggcgtgaagagcgagtacatgaagcggtaccaggaacctagatgggaagagtacggcccatgttatcgcgagctgctgcactatagacttggacgtcgcttacttgagcaggcccacgccccatggctgtgggacgactggggtccagcaggtagcagtgaggactcagcatccagtgaatcatcaggggccgggggtcccgccccacggtgtgcaccaccatcacctcccccccctgttgaaccagccactcaggaggaggccgaaaggcgtgctcgcggggccccggaagaacaggatgctgaggccggcgacgcagaggccgaagacgctgaagatgctgccctgcccgccctcccggtcaaagatgtagaggataagcctgagcagcagacccgcactcgggagacagacaagagccccacatctacagagccccgccaacagccatcagctctgttcgcccgcggaaaccggaaggctgttaagagtccccagcgttccagcagcaaaatcaaagagaataagcatccattcgcactctacgggtggggagaaaagcagacggacaccggttcccagaagacacataacgtgtgtgcctcagctcccgtccatgaaatccacgaatctgcactgagggctaagaacagacggcaggtggagaaaagaaaactggtcgctcagagacagagggctcactctgtggacgtggagaaaaacaggaagatgaaggcaagcagttcggaaaacccttggatgactgagtacatgaggtgctactccgcccgtgcatag

SEQ ID NO: 24136 - DNA, 1158 bp, synthetic construct
  source 1..1158: mol_type = other DNA; note = Synthetic coding sequence
atggccgcccccgacctgagcaccaacctgcaggaggaggccacctgtgccatatgtctcgactacttcaccgatcccgtcatgacggattgcggccataacttctgccgggagtgtatccgtcgctgctggggacagccagagggcccttacgcatgcccagagtgtagagagttgagcccacaacggaacctgaggcctaacaggcccctggccaagatggctgagatggccagacgtctgcatccaccatcccccgtcccgcagggcgtgtgcccagcacaccgggaaccgttggctgcgttttgtggtgatgagttgaggctcctgtgcgccgcttgtgaacgcagtggcgaacattgggcccacagagtaaggcccctccaagacgccgctgaagatctgaaagccaagcttgaaaagtcattggagcatctgaggaaacagatgcaggacgcgctgctgttccaggcccaggcggacgagacttgcgtgctgtggcagaagatggtggagtcacagcgacagaatgtgctcggagaattcgagcggctacgcaggctattagctgaggaagaacagcagttgctgcagcgtctcgaggaggaggaactcgaagtgctgcctcgcttaagagagggggccgcacacctagggcagcagtctgctcaccttgcggagttaattgccgaactggaggggcggtgccaactcccagccctgggtttactgcaggatatcaaggatgctttgcggcgcgtacaggatgtcaagctccaaccccctgaggttgtgcctatggagttacgaaccgtgtgtagggttcccggtttagtagaaacactgaggagattcagaggcaggtgcggagggcctcgctggggtgatgattcacggcgaggtcccgctaaagatttgggctcacagcccagagtcctctgtcctgcgactgcttcttccaaattgactgtttcctggtggtgggtggttggaaagacgagtagcgcccatacttcagatatttcatgcgttggaatatttacaccaaacaacagcagcacctctgggaacgaactgggtatccagggctttcattccgcgctgaaccgcatagcctcagcagatactaccggcgtgtccaccgacccaacagactag

SEQ ID NO: 24137 - DNA, 1251 bp, synthetic construct
  source 1..1251: mol_type = other DNA; note = Synthetic coding sequence
atgcccctgtacaacgacagcttccacgagatcagccacaagggccggcggcatactttagtcctgaagtccatccagagagcggacgctgggatcgtgagggcgagcagcctgaaggtgtctacttccgcccggttagaagtgcgggtgaagcccgtcgtgttccttaaggcccttgacgatctcagcgcggaggagcgaggcacattggctctgcagtgcgaagtgtcagatcccgaggcacacgttgtttggaggaaggacggtgtgcaactggggcccagcgacaagtacgattttctgcacaccgccggaaccagagggcttgtggtgcacgatgtctctcccgaggacgctgggttgtacacttgccacgtgggatcagaggagactagagcacgggtgcgtgtccacgacctccacgtcgggatcaccaagcgtttgaagacaatggaagttctcgaaggagagagttgttccttcgaatgtgtgcttagccatgagtccgcatctgatccagcgatgtggaccgttggaggcaaaaccgtcggttcctccagccgctttcaggctactaggcaaggcagaaaatacattctggtggtgcgggaagctgccccgagtgacgccggggaggtagtattttctgtgcggggcctgacaagtaaggccagcttgatcgtgcgggagaggccagctgcaatcattaaacctctagaagaccagtgggtggcccccggcgaagatgtggagctgcgttgtgagctctctcgtgcaggcactcccgtgcattggttgaaggacagaaaagccataaggaagagccagaagtatgatgtagtatgtgaaggcacaatggccatgctggttatccgcggagcttctctgaaagatgccggtgagtatacatgcgaggttgaggcatcaaagtcaacagcgtcattgcacgtcgaagaaaaggctaattgttttaccgaggaattgaccaacttgcaggtcgaggagaaaggaactgctgtgttcacttgcaagacagagcaccccgcggcaaccgtgacctggagaaagggtcttctcgaactcagggcctccgggaagcaccaaccgagccaagagggcctaacccttcgcctgacaatttctgccttggagaaagcggactctgacacatatacgtgtgacatcgggcaggcccagagtagagcgcagttgctcgtgcaaggggaagctgctaagtgcgcacgcgcctag

SEQ ID NO: 24138 - DNA, 2130 bp, synthetic construct
  source 1..2130: mol_type = other DNA; note = Synthetic coding sequence
atggagaagcaccggggcgtgctggagtgccaggtgagccgggcctcagctcaggtgagatggtttaaaggaagccaggaacttcaaccggggcccaaatatgagctggttagtgatggtttgtatagaaagttgattatctctgacgtgcatgcagaggacgaagatacctacacctgcgatgccggcgacgtgaagacaagcgctcagtttttcgttgaggagcagagtattactatcgtcaggggtcttcaggatgtgacggtcatggaaccagcccccgcatggttcgagtgtgagacttcaatcccttcagtccgccctcccaaatggttgttagggaaaaccgtcttacaggcgggcgggaacgttggtctcgaacaagagggcactgtgcatcgcctaatgctgagaaggacctgtagcacaatgacgggtcctgtgcactttactgtaggaaagtctcggtcaagcgcacgactggtggtgagcgacatccccgtggttctcactagacccctggagccaaagacaggcagggagttacagtcggtggtgctgtcatgtgatttcagacctgctcccaaggccgttcagtggtataaggacgacacacctctgtctccctccgagaagtttaaaatgtctctggaggggcagatggctgaactacgcattcttcgcttgatgccggccgatgctggcgtgtatagatgccaggcaggcagtgcacattcatccacagaagttactgtggaagcaagggaagtgaccgttaccggaccccttcaggacgcggaggcgacagaggagggctgggcttctttcagttgcgaactctcacatgaggacgaggaggtcgagtggagtcttaatgggatgccactttataacgattcttttcacgaaattagccacaaaggcaggaggcacactctcgtgctgaagtccatccagcgagcggatgctggaatcgtccgcgcaagctccttgaaagtctccacctccgcacggttagaagtgagggtcaagccggtcgtatttcttaaggctctcgacgacctctctgcagaggaaagaggcacgctcgctctccagtgtgaggtgtccgatcccgaggcacatgtggtgtggaggaaagacggggttcagctgggcccatcagataagtatgatttcctgcacacggcgggcacccggggcctcgtagtccacgacgtgtctcctgaggatgccggtctctatacatgtcacgtaggaagcgaggagaccagggcacgagttcgggtgcacgatctgcacgttggcattaccaagagactcaaaaccatggaagtactggagggagagtcttgcagctttgagtgtgtgctctcgcacgaatcggctagtgacccagccatgtggactgttggaggaaagaccgtgggctcctcctctaggtttcaggctaccaggcagggcaggaagtatattctggtggtacgagaagccgccccctccgatgcgggcgaagttgtcttctcagttagagggctgacatcaaaggccagtctgatcgtgcgcgagcggcccgccgcaattatcaaacctctggaagatcaatgggttgcccctggggaggacgtggagctcaggtgtgagctcagtagagccggcacccccgtgcactggttaaaggacaggaaggccattcggaagtctcagaaatatgacgtggtttgtgaggggaccatggctatgctcgtgattcgcggcgcaagtctgaaagatgccggcgagtacacatgcgaagtcgaagctagtaaatctacggccagtctccacgtcgaggaaaaggcaaattgcttcacggaggagctgaccaacttacaagttgaagagaaagggactgcggtcttcacctgtaaaacagagcatcctgccgccacagtgacttggaggaagggactccttgaattgcgggctagtggcaagcatcaaccctcgcaagagggtttaaccctgagactgacgatttccgcacttgaaaaggctgattcggacacctacacttgcgacatcggccaggcgcagtcgcgcgcccaactcctggtacagggtgaggcagccaagtgtgcacgggcctag

SEQ ID NO: 24139 - DNA, 16809 bp, synthetic construct
  source 1..16809: mol_type = other DNA; note = Synthetic coding sequence
atgctggtgatccggggcgccagcctgaaggacgccggcgagtacacatgcgaagtcgaggcaagcaagtcgaccgcctcgctccatgtagaggagaaagcaaattgttttaccgaagagttaactaatctgcaggtggaagagaagggcactgccgtctttacatgcaagaccgagcatcctgcggccaccgttacctggaggaaaggactgttggagcttcgagcctcgggaaagcaccaaccaagccaggaaggtctgaccttgcgactaaccatctccgccctggagaaagcggacagtgatacatacacttgcgacataggtcaggcgcagagccgagcccagctccttgtgcaaggccggcgggtccacataatcgaagacctcgaagacgtagatgtgcaggagggaagttccgctaccttcaggtgccgtatttcccctgctaattacgagcccgtgcattggttcctggataaaacacccctgcacgccaacgaacttaatgagattgatgcccagcctggtggttatcatgtcctgaccctgaggcagcttgcactgaaagattctggaaccatttattttgaggctggtgatcagcgcgcctctgctgctttgcgcgtcaccgagaagccttcagtcttcagcagagagctcaccgatgcaaccattacagaaggtgaagacttgacattggtttgcgagacgagtacctgtgatatccccgtgtgctggacaaaagacgggaagactcttcgagggagtgctaggtgccagctaagtcacgaggggcacagagcgcagctactgatcaccggagccacgttacaggacagcgggaggtacaagtgtgaggccggtggagcctgctcgtcaagcatcgtacgggttcacgcccgcccagtccgtttccaggaagctctgaaggatctggaggtgctggagggtggcgcggccacgctcagatgcgtgctttcatccgtggccgcgcctgtaaaatggtgctatggcaataacgtgctccggccaggagacaagtattcactgcgccaggagggagcaatgcttgaattggtagtgcggaatctcagaccgcaggactccggcagatattcatgtagtttcggcgaccagacgacaagcgccacccttacagttactgctctgcccgcccaatttattgggaaactcagaaacaaggaggccaccgagggggccacagccaccctgcgctgcgaactgtccaaggctgcgccggtggaatggcggaagggatcggagacactgcgggatggcgacaggtattgcctacggcaagatggagccatgtgtgagctgcagattagaggccttgcgatggtcgatgcggctgagtattcttgtgtgtgcggcgaggaaagaacttctgcatccctgacaatccgccccatgcccgctcactttatcggacgcctgaggcaccaggagtccatcgaaggagccacagctacgttgagatgcgagctgtctaaggccgccccagtcgaatggcgaaaagggcgcgagtctctgagggatggggatcgacatagcctgaggcaagatggcgccgtttgcgaactacaaatctgcggcctggccgtagcagacgccggtgaatactcatgtgtatgcggagaggaaagaactagcgccacccttaccgtgaaagctcttcccgcaaaattcactgaaggcctcaggaacgaagaggctgtggagggggccactgccatgctttggtgcgaactttccaaagtggctccggtagagtggcgcaagggcccagaaaacctccgagatggggataggtatatcctgaggcaggagggaactaggtgtgaattacagatctgcggtctggctatggccgacgctggggaatatctttgtgtctgtgggcaggaacgcactagcgccaccctgaccatcagagcactcccggctcggttcattgaggacgtgaaaaaccaggaggctagggagggggcaaccgccgtcctgcaatgcgaattaaattcagccgcccccgtagagtggagaaaagggtctgaaaccctgcgcgacggagataggtatagcctgcgacaggacggcaccaagtgtgaactgcagatccggggattagcgatggcagatactggagagtattcatgcgtgtgtggacaagaacggacatccgcaatgctcacagttcgggcattaccaattaagttcaccgaaggtctgcgaaatgaagaggcgacagagggcgcgaccgctgtgctacggtgtgaactatctaaaatggccccggttgagtggtggaaaggccacgagacgttgcgggacggggacagacactccctcagacaggacggtgcacggtgcgaactgcagataaggggtctcgtggctgaagacgccggcgagtacctgtgcatgtgcggtaaggagcgaacttccgctatgctaacggtgcgggccatgccgtctaaatttattgaagggctccgcaacgaagaagcaaccgagggcgacactgccactctctggtgcgagctctcaaaagctgctcccgtcgagtggcggaagggacatgagaccctgcgcgatggtgacaggcattccctgcgacaagatgggagtcgctgcgaactccagattagaggactggcagtggtcgatgctggcgagtacagctgcgtctgtggtcaagagcgcacaagtgccaccctcactgtccgtgcactccctgctcgtttcattgaggacgtgaaaaaccaggaggcccgcgaaggtgcgacggccgtgctccagtgcgaactgagtaaagccgcaccagtcgagtggagaaaaggctcagagacactcaggggaggcgaccgctattcgctaagacaggatgggactaggtgcgagctccagattcatgggttgagcgttgctgataccggggagtatagctgtgtgtgcgggcaggagcggacatcagcaacactcacagtcagagctctgcctgcgcgctttacacaagacctgaaaaccaaggaggcatccgagggggctaccgctacgcttcaatgtgagctgtccaaggtcgccccagtggagtggaagaagggtccagagactcttagggacggcggtcgctacagcctaaagcaagatggtacacggtgcgagctgcagatccacgacctctccgtggctgacgccggcgagtactcttgcatgtgcggccaggagaggacaagcgctaccctgacagtgagggctttgccggcccgttttactgaggggcttcggaatgaggaagcaatggagggggctaccgctactctccagtgtgagctatctaaggctgccccagtggagtggcgaaaaggtctcgaggctctgcgtgatggcgataagtattctctgcgccaggatggtgctgtttgcgagctgcaaatccacgggctggccatggccgacaacggggtttatagttgcgtgtgcggacaggaacgcacatctgccacgctcacagtacgtgccctccctgcccgcttcattgaagatatgcgcaatcaaaaggcgacagaaggtgctactgtcacattacagtgtaagttgcgtaaggccgcgccagttgagtggcgcaaaggtccgaacaccctcaaagacggcgaccgttattctctgaagcaggatggtacctcatgtgagctccagatcagaggcttggtgatcgccgacgccggcgaatacagttgcatttgtgagcaagaacgaacgtcagccacactgacagtacgtgccctgccagctagatttatcgaagacgtgcggaatcacgaggccacagagggagcaaccgcagttcttcagtgtgagttgtccaaggccgctccagtcgagtggcgaaagggcagtgagacccttcgcgacggggatagatactcgctgcgtcaagatggcaccagatgcgaattgcagatcaggggcttggcggtagaggacaccggcgaatatctgtgcgtttgcggacaggagaggacctccgctactcttactgttcgcgccctgccggccagattcatagacaacatgactaaccaggaagccagagagggtgccaccgcaaccctgcactgtgaactgagtaaggtcgccccggttgagtggagaaaagggccggaaacgctcagggacggggacagacattccctacgtcaggatggtacaaggtgcgagctgcagatccgcgggctctcagtcgccgacgccggagagtacagttgtgtttgtggacaggaacgtacctcggccaccttaactatccgcgaagccacagagggggctacagccatgctccagtgtgagctgtccaaagttgctccagtggagtggcgaaaggggcctgaaaccctgagagacggcgataggtacaatctgcgacaggacgggaccaggtgtgaattacaaatccatgggctgtccgtggccgatacaggggagtattcctgcgtatgtggacaagagaaaacatccgccacattaacagtgaaagcgccacagcccgtgtttagggagccactgcagtccctgcaggcagaagagggctctactgctaccctgcaatgcgaactctccgagccaaccgccactgttgtctggtcgaaggggggattgcaacttcaggccaacggccgtagggaaccacgactccaaggatgcacggccgagttagttcttcaggatctgcaaagggaagatactggcgaatacacatgcacctgcggaagtcaggcaacgtctgctacgctgacggtcacagccgcgcccgtgcgcttcttaagggagctccagcatcaagaggttgacgagggaggcaccgcccacctgtgttgcgaactgagtcgcgcgggagcaagtgttgaatggcgaaaggggtctctccagctgttcccttgtgcgaagtaccaaatggtccaagatggagccgccgcagagctcctagtccgtggagtggagcaggaggatgctggggattacacctgcgatacaggtcacactcagtccatggcatctttgtccgttagagtaccgcggcccaaatttaaaacaaggctgcaatcacttgagcaggagactggggacattgctcgactttgctgccagcttagcgatgccgagagtggagcggtcgttcaatggctgaaagaaggtgttgaattgcacgcaggaccaaagtacgagatgagaagccaaggagctacccgcgagctgctcattcatcagctcgaagcaaaagacacgggggagtacgcttgtgtcaccgggggccaaaaaacagctgcctcactcagggtgacagagccagaagtaaccatagtgcgtggcctagtggacgctgaagtgacagcagacgaggatgtggagttctcttgcgaagtgagtcgcgctggtgccacaggggtgcagtggtgtttgcagggattgccgctccagtcaaacgaagtaacagaggtggcagtaagagacggccgaatccatactttgaggcttaagggcgttacacctgaggacgcaggaaccgtgagttttcacttgggtaatcacgccagttccgcccagcttacagtccgtgcaccggaagtcactatactggagcccctgcaggacgtccagttgagcgaaggccaggacgccagcttccaatgccgcctttcaagagcatctggccaggaagccaggtgggcactgggtggcgtgccactgcaggcaaacgagatgaatgacataactgttgagcaagggacactccatttgcttaccctgcacaaggttaccctagaagacgctggtaccgtgtctttccacgtggggacatgctcctccgaggcccagcttaaagtgacggccaagaatactgtagtgcggggccttgagaatgtcgaggccttggaggggggcgaagcattgttcgagtgtcaattgtcgcagccagaggtcgctgcacatacctggctgctcgacgatgagccagtgcacactagtgagaatgccgaagtggtgttttttgagaatggactgagacacctgctgttgctgaagaatctcaggccacaggattcttgtcgcgtaaccttcctagccggggacatggtcaccagtgcatttctcacggtcagaggttggaggctggagatcctggaaccacttaaaaatgccgctgtgagggccggggcccaggcgtgcttcacttgcaccctgagcgaagccgtccctgtaggggaggcatcgtggtacattaatggagctgccgtgcaaccagacgactccgactggacggtgaccgccgacggcagccaccacgcactcttgctgcgttcggcccagccacatcatgctggtgaggtgacctttgcttgtagagatgcagtggcgagcgctagactcaccgtgcttggcctgcctgaccctcccgaggacgctgaagtggtggcacgttcgtcccacacagtgacgctcagttgggcggcccccatgtcggatggcggcggcggcctttgcggctatcgggtggaagtaaaagaaggggctactgggcaatggcgcctgtgtcatgaactggtacctggccccgagtgtgtggtggacggcctggcgccaggtgaaacttatcggttccgcgtggccgcagttggtccagttggggcgggcgagccagtacacctgccacaaaccgtccggctcgctgaaccgcccaaaccggtacccccacagccttccgcccccgagtcacggcaggttgcggccggggaggacgtttctctcgagctcgaagtcgtggcagaagccggagaagttatctggcacaagggtatggagcgcattcagcctggcggtagatttgaggtagtgtctcagggccgccagcagatgcttgttattaagggcttcactgctgaagaccagggtgagtatcattgcgggcttgctcagggtagtatctgccccgcagccgctacttttcaggtggcactgtcgccagcgtctgtcgacgaggcaccacagccttccctacccccagaagcggcacaggagggagacttgcacctgctgtgggaggcactcgcgagaaaacgccgtatgagccgtgagcccacgcttgactcgattagcgaactgccagaggaagacggccggtctcagcgattaccgcaagaagccgaggaggtggcccctgatttgagtgaggggtacagtacagccgatgaactggcccgcactggcgacgcagatctcagtcacacctcgtcagacgacgaatcccgggctggcacacccagcctggtcacttacctgaaaaaggctggcaggcccggaacaagccctttggcttctaaggttggtgcccctgctgctccatctgtgaagccccagcagcaacaggagcccttggctgctgtgcgccctccactgggcgatctatcaaccaaggatcttggggacccttctatggataaagctgccgtcaagattcaagccgcttttaagggctacaaagtacgcaaagaaatgaagcagcaggaaggaccaatgttctcccatacgttcggcgacaccgaggcacaggtaggtgatgctctgagattagagtgcgtggtcgctagcaaggccgatgtgcgggcaaggtggctaaaggatggtgtcgaactcacagatgggcggcaccaccacatcgaccaactgggcgacggtacatgttccctgttgattaccggattagatagagccgatgcggggtgctacacgtgtcaggtatcaaacaagtttggtcaggtgactcatagtgcatgtgtcgtggtttctggctcagaatcagaggccgagtctagctctggaggcgagctggacgacgctttccgaagggccgcacgtaggctccacagactctttagaacgaagagtccggccgaggtgagtgacgaggagttattcttatctgccgacgaaggaccggcagagccagaagaaccagcagactggcaaacatacagagaggatgagcacttcatctgcatccgcttcgaggctttgaccgaggcacggcaggccgtaacaaggttccaggagatgttcgcaaccctcggcattggagtcgagatcaagctggtcgaacaaggtccaaggcgtgtcgaaatgtgtatctcgaaagaaacacccgcgcccgtggttcctccggagccgcttccatcactcctgacgagcgacgctgcccctgtcttcctgacagaattgcagaaccaggaagtacaggacggatatcccgtcagcttcgactgtgtggtcacaggtcaacctatgcctagcgtgcggtggtttaaagatggtaagctactggaggaggatgatcattacatgatcaacgaggaccaacaaggaggccaccaactgataatcacagccgtagtgccagccgacatgggcgtttatcgatgcctcgcggaaaattctatgggtgtttcctctacaaaggcagagctgagggtcgaccttacttctacagactacgacactgccgctgatgcaaccgaaagttctagctacttctccgcgcaagggtatctctcctcacgagaacaggagggtactgagtctactaccgacgagggacagctgcctcaggtggtggaggagcttcgtgacctccaggtggctccaggaactagactcgctaagttccagctcaaagtcaaggggtatcccgccccccgactgtactggtttaaggatggccagccactgacagccagtgcccatatacgtatgacagacaagaaaattttacacacccttgagataatatccgtgactcgtgaagatagcggacagtatgctgcctacatatctaatgctatgggggccgcctacagcagcgccagattgctggtccgcgggccggacgaacctgaagaaaagcccgcctcagacgtccatgaacagctggtgccgccgcgcatgctcgaacggttcacccccaaaaaagtaaagaagggaagctctattaccttttcggtgaaggtggagggaagaccagtacctaccgtccattggctacgggaggaggcggaacggggcgtattgtggattggcccagacactcctggatataccgttgccagctcagcacagcagcatagtttagtgttgctcgatgtgggcagacaacaccagggcacatatacttgtatcgcctcaaacgccgccggtcaagccctgtgttccgctagcctgcatgtgagcggcctgcccaaagtggaggaacaggagaaggtgaaggaggcactcatctcaacctttctacaagggaccactcaggcaatatcagctcaaggtctcgagacggcgtcctttgcagacctggggggccagagaaaagaagagcctctcgccgcgaaggaagctcttggccacctatcgctggccgaggtgggaactgaagaattcttgcagaaactcacatcccagatcactgagatggtgtcagccaagattactcaggctaaattgcaggtccctggcggggactcagacgaagactccaagactccctctgcgtccccgcgtcatggcaggtctagaccaagttcctcaatccaggagtcgtcatctgagtctgaggacggagacgcaaggggagaaatatttgacatttacgtagtgactgcagactacctccccctgggcgcagaacaggatgctatcacactaagggaaggacagtatgttgaagttctcgacgccgcccatcccctacgctggttggtccgaaccaagcctaccaaatcaagcccatcaagacagggttgggtctctcctgcatatcttgaccgccggcttaagttgagtccagagtggggcgcagccgaggcccccgagttcccaggagaggccgtgtccgaggatgagtacaaagcacggctgtcatcagtcatccaggagctgctgagtagtgaacaggcctttgtagaagaactgcagttcctccagtcccaccatcttcagcatctggaaaggtgcccccacgtcccgatcgccgtagccggccagaaggctgtcatctttcgcaacgtgcgggatattgggcgctttcattccagctttctgcaggagcttcagcaatgcgataccgacgacgatgttgctatgtgttttatcaagaaccaggcagcgtttgaacagtacctggagtttctggtggggagagttcaggccgagagtgtggtggtatctacagccatccaagaattctataagaaatatgccgaggaagccctgttagccggggatcccagccaaccccccccacctcctttgcagcattatctggaacaacccgtggagcgggtccagcgttaccaagccctcctgaaagagctgattcgaaataaagcaagaaaccgccagaattgtgcactgcttgagcaagcctacgccgtcgtgagtgcactgcctcagcgcgccgagaacaagctgcacgtgtcgctgatggagaactatcctggcaccctgcaggcacttggcgagcccatccgccagggccattttatcgtgtgggagggagcacccggcgccaggatgccctggaagggccacaatcgtcacgtgtttttgtttaggaaccacctagtgatttgtaaaccacggcgcgattcccggaccgatactgtttcatacgtatttagaaatatgatgaaactgtcctctattgatcttaacgaccaggtggagggagacgaccgtgctttcgaggtctggcaagagcgagaggacagtgtacgtaagtatctcctgcaggctcggactgccattataaagtcctcttgggtgaaggaaatttgtgggatccagcagcgattggccttacccgtttggcgtcccccagactttgaggaagaacttgccgactgtacagcagagctgggagagacagtaaagctcgcctgccgcgtcaccggaacccctaaacctgtcatcagctggtataaagatggaaaggcggttcaggtggatccccaccacatacttatcgaggatcccgatggttcctgcgccctgattctggacagcttgaccggagtggatagtgggcagtatatgtgtttcgctgcctctgctgccggaaattgtagcaccttaggtaagattctcgtccaggtgcctcccaggtttgttaataaagtccgggcttcacctttcgtcgagggtgaggacgcccagtttacctgcacaattgagggagcaccttatccccagatccgctggtacaaggatggggctcttctgactacaggtaataaattccagaccctgagcgagcctaggtctggcctgttggttctggtgatcagggccgctagtaaggaggatctgggcctctatgaatgcgaattagtgaaccgcctgggcagcgccagggcctccgccgagctcaggattcagtcacccatgctccaggcccaggagcagtgccaccgcgaacagctggttgctgcggtagaggataccaccctcgagcgcgccgaccaggaagtgacatccgtgcttaagagactgttgggacctaaagccccaggtcctagcaccggtgacctgactggcccaggaccatgccctcgaggggcacccgccctgcaggagaccgggtctcagccacctgtcacggggacatccgaagcccctgccgttccacccagggtgccgcagcccctgctccacgaggggccagagcaagaacccgaggccattgccagggcacaggaatggactgtccctatcagaatggagggcgctgcatggcccggcgcaggcaccggcgagctgctatgggatgtacatagccacgtggtgcgggaaacaacccagagaacgtacacataccaggcgatcgacacacatactgccagaccaccgtctatgcaggttactatagaagatgtgcaggcccagacaggggggacagctcaatttgaggcaatcattgagggagacccgcaacccagcgtgacttggtacaaggacagtgttcagctcgtggatagcacccgtctctcacagcagcaggagggcacaacatacagtctagttctgagacacgtcgcatctaaggacgccggagtgtatacatgcttagctcaaaatactggaggccaggttctgtgtaaggctgagctcctggtgctcggtggggacaatgaaccagattctgagaagcagtcccaccgccgaaagctgcattccttttatgaagtcaaggaggaaataggtcgcggagttttcggctttgtaaaacgagtgcagcataagggcaacaagatactatgcgccgcaaagtttatccccctcagaagcaggactcgtgcccaggcataccgagaaagagatattctcgcagctctatcccatccactggtgaccggccttttggatcaatttgagactcgcaagactcttatactgattctggagctatgctcgtctgaagaactgttggacaggctgtatagaaagggtgtggtcacagaggcagaagtaaaggtgtacattcagcagctggtagaaggcctacactacctgcacagccatggtgtcctccatctcgacatcaaaccatccaatatcctaatggtgcatcccgccagagaggacatcaagatctgtgactttggcttcgctcaaaatatcactcccgctgagctccaattctcccagtacggaagtccagaattcgttagtccggagatcattcagcagaaccccgtctcggaagcctcagatatctgggcaatgggggttatcagttacttgtcactgacttgtagtagtccctttgccggggagtctgatagggcaaccttgttaaatgtcctagaagggagagtttcgtggtcctccccgatggctgcgcacttgtccgaggatgcaaaggacttcattaaggctaccctgcagcgggcaccccaagcccggccgtctgccgcccagtgcctctcacacccttggtttctgaagagcatgccggcggaggaagcccactttataaacaccaagcagttgaagttcctgttggcccgctcaaggtggcagaggagtctgatgtcttacaagagcatcctggtgatgaggagtatcccagaactcttacgtgggcctcccgatagtcctagcctgggtgtggctagacacctgtgcagagatacaggaggcagcagctcttcaagttcatcctccgataacgagttagcgccgtttgccagggccaaatcactgcctcccagccccgtgacacacagccccctcttgcacccccggggcttcctgcggccatccgcttcactgccagaagaggccgaagcgtctgaaaggagtacggaagcaccagcccccccagcctcgccggagggggccggacctcctgctgcccagggctgcgtaccccgccatagcgtcattagatccctcttttaccaccaggccggcgagtctcccgaacacggagccttggcccccggctccagacggcacccagcgcgaaggagacacctgcttaaaggaggttacatcgcgggggctcttcctggcctgagggaacctctgatggagcatagggtgctcgaggaggaagccgctcgcgaggagcaggcgacattgctggctaaggcaccaagtttcgagacagcactccggctgcccgcctccgggacccacctcgcccctggacatagccacagccttgaacacgattccccatctacacctcgcccctcctcagaagcctgtggcgaagcccagcggctgccctctgcaccatcgggaggtgccccgatacgggacatgggacatccacagggttctaaacagctccccagcaccggcggtcacccagggacagctcaaccagagcgtcctagtcccgacagtccttggggacagcctgctccattctgtcatccgaaacaggggtctgctccccaggaagggtgcagtccccaccccgccgtggctccttgtccacccggatctttcccaccgggcagttgtaaggaagctccgctcgtcccatccagcccgtttttaggtcagccccaggcgcctcctgcgccggctaaggctagtcctcccctggatagcaaaatggggcctggggacatcagccttcccggcagaccaaagcctggcccatgctcctctccaggttctgcctctcaagcctcaagcagccaggtgagctctctgagggtggggtcatcccaggttggtaccgaacccggcccaagtcttgatgctgagggctggacacaggaggctgaagacctctctgattcaacacccaccctgcagagacctcaggaacaggctaccatgcgcaagttcagcctaggtggcaggggtggctacgctggcgtggccggatatggaacttttgccttcgggggtgatgccggcgggatgctgggtcagggccctatgtgggcacggattgcttgggcggtcagtcagtcagaggaggaagaacaggaggaggcccgtgccgaatcccagtccgaggaacagcaggaggcgcgagcagaatcacctttacctcaagtcagcgctcgcccggtccccgaagtgggaagggccccgactcggtcttcccccgagcctacaccctgggaggacatcggacaagtgagccttgttcagatcagagacctatcaggggacgctgaggctgccgataccatttctttagatatcagtgaagtagaccctgcatatctgaacctatcagatttgtacgacatcaagtacctccctttcgaatttatgatctttcggaaagttcccaagtccgctcagccggagcctcctagcccaatggcagaggaagagctggccgaattccccgagcccacttggccctggcccggcgaactggggccgcacgccggactagaaattacggaagaatccgaagacgtcgatgccctcctggctgaggcggcagtgggcagaaaaagaaagtggagctccccctccaggtcgttgttccatttccctggtaggcacttgcccctggatgagccagcagaactgggcttacgagagagggtgaaggctagcgttgaacatataagccggatactgaagggtcgacccgagggtctggagaaggaaggccccccacgcaagaagccgggactcgcgtccttccggctgagcgggctgaaaagttgggacagagctcccaccttcttacgcgaactcagcgacgagaccgttgtgctgggccaaagcgtgactctggcctgtcaagtgtcagcacagcccgccgctcaggccacttggtcgaaagacggggctccactcgaaagttcatcacgcgttttgatttctgccaccctgaaaaacttccaacttttgaccattctggtagtagtggccgaggacctaggcgtgtacacatgttccgtttcaaatgcgctgggaactgtgacgaccacaggggtgcttcgcaaagccgaaagacctagcagcagtccctgcccagacatcggcgaagtttacgctgacggcgtactcttagtctggaaacctgtggagtcgtatgggcctgtgacatacatcgtccagtgcagtcttgagggcgggagttggactaccctcgcctctgatatttttgattgctgttacctgacctcaaagctatccagaggaggaacttatacatttcggaccgcatgtgtctccaaggccggcatgggcccttattcttcccccagtgagcaggtattactgggagggccgtcccaccttgcaagtgaagaggagtctcaaggccgaagcgcccagccccttcctagcaccaaaaccttcgcatttcagacccagatccagagaggcaggttttcagttgtgagacagtgctgggaaaaagcctccggacgtgccctggccgcaaaaatcataccctaccaccctaaggacaagacagctgtgctgcgggaatacgaagcactcaaaggcttgagacatccccatttagcccaactccatgctgcctacctgtctcctagacatttggtgttgatccttgaactgtgcagcggtcccgagctcctaccctgtctggctgagcgagcctcctattcagaatctgaagtaaaggactacttgtggcaaatgctgagtgcgacccaatatctccataaccagcatatactgcatctagacctcaggagcgagaacatgatcatcacagaatataacctgctgaaagtggtggacttgggtaacgctcaatcactctcacaggagaaggtccttccaagtgataaatttaaagactaccttgaaaccatggctccagaactgcttgaaggccaaggcgctgtgccacaaaccgatatatgggcaattggggtgaccgcttttatcatgttgagcgcggaatatcccgtatcttcggaaggcgctagagatctgcagcgcgggcttcgtaagggactggttcgcctgagcagatgctacgctgggctctccgggggcgctgttgcctttttgcgttccaccctgtgcgcccaaccgtggggacgtccctgcgcaagtagctgcctgcagtgtccttggctgacggaggagggcccagcatgcagccgccctgcgccagtaaccttcccgactgctagattaagagtgtttgtgagaaatagagaaaaacgtagagccttgctgtacaaaagacacaatctcgcacaagtgcggtag

SEQ ID NO: 24140 - DNA, 11220 bp, synthetic construct
  source 1..11220: mol_type = other DNA; note = Synthetic coding sequence
atgctggtgatccggggcgccagcctgaaggacgccggcgagtacacgtgtgaagtggaagcttccaagagcacagcgtctcttcacgtggaggaaaaagcgaactgtttcaccgaggagcttaccaatctgcaggtcgaagagaaggggactgccgttttcacctgtaagacagagcaccctgcagcaacagtcacctggaggaagggacttctggagctaagggcatccggcaaacaccagccctcacaagaaggattgacactgcggctgactattagcgcgctggagaaagccgacagtgatacatacacctgtgacatcgggcaggcccagagccgcgcgcagctcctagtacaggggcggcgagtgcatatcatagaagatctggaggatgtcgatgtccaggaaggaagctctgcaacattccgttgccggattagtccagccaactacgaacccgtgcactggtttctggataagacacctctgcacgctaatgagctcaatgagattgacgcccagcctgggggatatcacgtgctgacactgcgccagttagctcttaaggactctggcactatttacttcgaggctggagatcagcgcgccagcgctgccctgcgcgttaccgagaaaccatccgtattctcgcgggagctgaccgacgccactataaccgaaggtgaggacctgacgctcgtgtgcgagacatctacctgtgacataccagtgtgctggactaaggatggaaagacactgcggggctcagcgaggtgccaactgtcccatgaggggcatcgggctcagctgctgataacgggcgctacactccaggattcgggccgctataagtgtgaggcaggaggagcctgttccagtagcattgtccgagttcacgctaggccagttaggttccaggaagccctaaaagatttggaggtgctcgaaggcggagcagctaccctgcgttgcgtgctgtcttctgtcgcagctcccgtaaaatggtgctacgggaataacgtgcttaggcccggggataaatactcactgagacaggagggggcgatgctagagttagtggtcaggaaccttcgtccacaggattcagggcgctatagctgctccttcggggaccagacaacaagcgccacgctaactgttaccgctctgccagctcagtttattgggaagctgagaaataaggaggccactgaaggggctacagcaacccttagatgtgagcttagcaaggccgcccccgtagagtggagaaagggtagtgaaactttgcgagatggtgaccggtattgcctccggcaggatggagccatgtgcgaattacagatccgggggcttgccatggttgacgccgctgagtatagttgtgtgtgcggcgaggaaaggacttctgcatctctgaccattcgccccatgccggctcactttatcggcagactgagacaccaggagtctattgaaggcgccacagccacgctcagatgcgagttgtctaaggcagcccctgtggaatggcgcaagggtagggaaagcctgcgagatggtgatcgccatagtcttcgccaggacggcgccgtctgcgaactgcagatttgcggtctggcggtagccgacgcaggtgagtacagttgcgtctgtggcgaggagcgtaccagcgcaaccctcaccgtgaaagccctgcccgctaaattcactgagggtctcaggaatgaggaggccgtagagggggccaccgccatgttgtggtgcgagcttagcaaagtggcccctgtcgagtggcggaaggggcctgaaaatctcagagatggcgaccgctacattttacggcaggaaggcacaagatgtgagcttcagatatgcggtcttgctatggctgatgcaggcgaatacctctgcgtgtgcggacaggagaggacctctgccaccctgaccattcgtgctcttcccgcgagatttatcgaagatgtgaaaaaccaagaggcgagggaaggtgctacggcggttttgcagtgcgagctcaattcagcggcccccgtggagtggaggaagggatccgagaccttacgggacggcgacaggtactctctcaggcaggacggaaccaaatgtgaactgcagattagagggctggctatggctgacactggcgagtattcttgcgtgtgtgggcaggagcgcacatccgcaatgttgactgtgagagcccttccaatcaagttcacagaaggcttaaggaatgaggaggccaccgaaggggcgaccgcagtgctgcggtgtgagttatccaaaatggccccagtggagtggtggaagggccatgagacgctgcgggatggcgacaggcattctctgcggcaggacggcgctagatgtgaactgcagatccgtggactggtagccgaggatgccggtgagtacctttgcatgtgcggtaaagagagaacttcagctatgctcacagtgagggctatgccttctaagtttattgagggtctgcgtaacgaagaagctacagagggcgatactgcaaccctatggtgcgagctgagtaaggccgctccagtggaatggcgcaaaggacatgaaactctgcgggatggcgatcgtcactccctaagacaggacgggtctagatgcgagctgcaaatcaggggtctggcagtcgtggatgctggagaatacagctgcgtgtgtgggcaggaaagaaccagcgccactctgaccgtgcgggcccttcccgcacgttttatagaggacgttaaaaatcaggaggcccgcgagggcgctactgccgtgcttcagtgcgagctttcaaaagctgcccccgttgaatggcggaaagggtctgaaaccctgcgcgggggagaccggtatagcctccggcaggacggtacccgatgcgagctgcagattcacggcctgtccgtggccgatacaggagagtattcttgcgtctgtggacaggagaggacaagtgctacactcaccgtaagagcccctcaacccgtcttccgtgaaccactccagagcctgcaagcagaagagggaagcaccgctacccttcagtgcgagctgtcagagcccacagctactgtagtgtggtctaaagggggcctgcaattgcaggcaaacggccggcgggaacccagattgcaggggtgtaccgccgagttagtcctgcaagatctgcagagagaagataccggcgagtatacatgtacttgtggcagccaagccacaagtgcaacgctcaccgtgaccgctgcccctgttcgttttctgcgcgagctgcagcaccaagaggtcgacgaaggcggaacagctcatttgtgttgtgagttatctcgggcaggggccagtgtagagtggagaaaaggctcactccagctttttccttgtgccaaataccaaatggtgcaggacggcgccgccgccgaacttctcgtgcggggggtggagcaagaagacgctggagattacacttgtgatacaggacacacgcaatccatggctagcctttccgttagagttcctaggccaaagtttaaaactaggcttcagagtctggaacaagagaccggtgatatcgcgcgactgtgctgccagctgtctgacgctgaatccggggcggtggtacaatggcttaaggaaggggttgagctccacgccggccctaagtacgagatgcgatcccagggcgccaccagggaattactgatacatcagctcgaagctaaagatacaggcgaatatgcttgtgtcactggaggacagaagactgctgcctcgctccgtgtgactgagccagaggtaacaattgttcgcgggctcgttgatgccgaggttaccgcagatgaggacgttgagttctcatgcgaagtgtcccgcgcaggcgccaccggcgtccagtggtgccttcaaggactgccattgcaatccaacgaggtgaccgaggtagcagtgagggacgggagaatccacacgctgagactgaaaggcgttacacctgaagacgctggcacagttagtttccacctgggcaaccatgcatcttctgcccagctcactgtgcgcgcgcctgaggtaacgatccttgagccactccaggatgtgcagctcagcgaaggtcaggacgcgtcttttcagtgtcgtttaagcagggccagcggtcaggaggcgcggtgggccttaggaggggtccccctgcaagcaaatgagatgaatgacataactgtggaacagggcactctgcatttactcacactgcataaggtgactcttgaggatgcgggtaccgtgagcttccacgtcggcacatgcagctctgaggcgcaactcaaggtcacagccaagaacacggtggtcaggggattggaaaatgtggaagcactggaggggggggaggcattgttcgagtgccagttgagccagccagaggtcgccgcacacacctggctgctggatgatgaaccggtccatacaagtgagaacgcagaggtcgtcttttttgagaacggactacggcatctgttgctgttgaaaaatttgcggcctcaggacagctgcagagtgactttcctggcaggggatatggtcacgagcgctttcctgactgttaggggttggagacttgaaatcctggagcccctcaagaatgccgcagtgcgggctggagcacaggcatgttttacatgtactctttccgaagcagtgcctgtaggggaagcttcctggtacataaacggtgccgcagttcaaccagacgattcagactggacagtgaccgccgacggttcccaccatgctctcctgctgcgctccgcccagcctcatcacgcaggcgaggtcaccttcgcctgtcgcgacgcagtcgcatcagcacgcctaactgtcctgggactccctgatccccctgaggacgctgaggtggtggctaggtcgagccacacagtaacactgagctgggccgcaccgatgtccgacggcggtgggggcctgtgtggttaccgggtggaggtcaaagaaggcgcaacgggacagtggcgcctgtgtcacgaactcgtgcccggcccggagtgcgttgtcgacgggctggcccccggggagacttatcgctttagggtcgcggccgtaggcccagttggggccggagagccggtgcatttgcctcagaccgttcgtttggctgagccacccaaaccggtaccgccccagccgtctgcacccgaatcacgccaagtcgccgccggggaagacgtgtccctggaattggaggtagtagcggaagcaggcgaagtcatttggcacaaagggatggaacgcatccagcccggagggagatttgaggttgtgagccagggcagacaacaaatgcttgtaataaagggcttcacagctgaagaccagggcgaatatcactgcggccttgcccaaggatctatttgccccgccgcggctacctttcaggtggctcttagcccagcatcagtggacgaagcgccccaacccagtctgcctccggaggccgcacaggagggagacctgcacctgctatgggaggctctggcgcggaaaagacggatgtcacgggaacccactcttgattccatcagtgagctccctgaagaagatgggcgtagccagagactccctcaagaggcagaagaagtggcccccgacctgagcgaggggtactctacagccgacgaattggctcgaaccggggacgccgacctgagtcacacctcctcagacgacgagtcacgtgccggaacaccgtctctggtgacatacctcaaaaaagctggcaggccagggactagtcccctcgcatccaaagtgggggcccccgccgcacccagtgttaaaccccagcagcagcaagagccactcgcagccgtgcgcccacccctcggagacctatccacaaaggacctgggggacccttcgatggataaagccgcagttaaaatccaagcagcattcaaaggctacaaggtgcggaaagagatgaaacagcaggagggtcccatgtttagccacacttttggggatactgaagcacaagtcggcgatgctctgaggctagagtgcgtggttgcttctaaggctgacgtccgggctcgttggctcaaagacggagtggaacttactgatggccgtcaccaccacattgaccagctgggggacggaacttgttccttactgattaccgggctagacagagctgatgccggctgttacacttgtcaggtgtcaaacaagttcggtcaggtaacgcactcagcctgtgtagtcgtctcagggagcgagagcgaagccgagtcctcatccggcggagaactagatgacgcattcagaagagctgctcggcggctacaccgtctgtttcgaactaagtctccagccgaagtctcggacgaggaattgtttttatccgccgatgaaggcccagctgagcctgaagaacctgccgattggcagacttatagagaagacgagcactttatctgtattagattcgaggccctcacggaagccaggcaggcagtcacacggttccaggagatgttcgcgacactgggcatcggcgtcgagattaaattggtcgagcaaggacctcggcgagtggagatgtgtatttcgaaagagacccctgcacccgtggtccctcctgagccgctccccagtctgctgacaagtgacgcggcacctgtttttttaaccgagttacagaatcaggaagtacaagatggctacccagtctcctttgactgcgtggtgacagggcagcctatgccttcagtgcggtggtttaaggatggcaagttgctcgaagaggatgatcattatatgataaatgaggatcaacagggcggacatcaactcataatcaccgccgtcgttcccgctgacatgggagtatacagatgcctggccgaaaacagtatgggcgtatctagtaccaaagcagagttacgcgtggacctgactagtaccgactacgacacagccgccgatgccaccgagtcaagcagttatttcagcgcgcaagggtatctcagcagccgggaacaggaggggacagagagtacaacggatgagggccagctgccccaggtggtagaggagctgagggaccttcaggttgctccagggacaagactagctaaatttcagctgaaggtgaaggggtatccagcccctcgtctgtattggtttaaagacgggcagccactgaccgccagcgcacacattcggatgaccgataagaagatcctgcatacgttagaaatcatttcggtaactcgtgaggatagcgggcaatacgcagcctatatctccaatgccatgggggccgcatacagctcggccagacttttggtgagaggcccggacgagccagaagaaaaacccgccagcgacgtgcacgaacagttggtgccaccaagaatgctagagcggtttacaccaaagaaagtaaagaaaggtagtagtatcaccttcagtgtgaaggtggagggtcgtccggtgcccaccgttcactggctacgcgaggaggcggagaggggcgtgctgtggatcgggcccgacacaccaggatacaccgtggcttcctcggcacagcagcacagcttagttctcctggacgttggacggcagcatcaggggacctatacatgcattgcatcaaacgccgccggtcaagctctgtgcagtgcgtctctgcacgtctcaggactccccaaggtcgaagaacaagaaaaagtgaaagaggctctcattagcactttcctgcaggggactactcaggccatcagtgcacaggggctggaaacagccagcttcgctgatctgggcggccagcggaaggaggagccgctggcagccaaagaggctcttggtcatttgagtctggccgaggttggcactgaagaatttttacagaagctcacttcccagattacagagatggtgtctgccaaaatcacccaggcgaaactgcaagttcctggtggggactccgacgaggacagcaaaaccccaagtgccagcccccgacatggccgcagtcggccatcctcaagcatacaggaaagtagtagtgaatctgaggatggtgacgcccggggagagattttcgacatttacgtagttaccgctgactaccttcctctgggcgccgaacaggacgcaataaccctccgcgagggccaatacgtggaggtgttggacgccgcccacccccttcgatggctggtgcggacaaaacctacgaaaagctccccgtcacggcagggctgggtctccccagcataccttgaccggcggctgaagctgtcaccagagtggggcgccgctgaggcccctgaattcccaggggaagcagtttctgaagatgagtataaggcccgccttagctccgtcatccaggagcttctctctagtgagcaagctttcgttgaggagctgcagttcctccagtcccaccacctacaacatctggaacggtgcccacatgtccccatcgcagtggcgggccaaaaagctgtgatctttcgtaacgtgcgtgacatcgggcgcttccacagctcatttcttcaggaactgcagcagtgcgatacggacgacgatgtcgccatgtgtttcattaagaaccaggcagcgtttgaacagtatttggaatttctggtggggagagtacaagcagagtccgtcgtggtgtctactgctatccaggaattctacaaaaagtatgccgaggaagcgctcctagcaggcgaccccagtcagccaccccctccccctctgcaacattacctggaacaaccagtcgagagagttcagcgttaccaagcgctcttgaaggagctcatacggaataaggctagaaaccggcagaattgcgcgttacttgagcaagcttacgccgtggtgagcgccctgccccaaagagccgagaacaagctccacgtgtccctgatggaaaattaccccggcacgcttcaagcacttggggagcccatcaggcaaggccatttcatcgtgtgggagggagccccaggcgcgcgcatgccttggaagggacataaccggcatgtgttccttttccggaatcacctggtcatatgcaaacctcgaagggattctagaactgatacagtctcctacgtcttcaggaacatgatgaaactgagctccatcgacctgaacgatcaagtggaaggcgatgatcgggccttcgaagtgtggcaggaacgcgaggatagcgtgcggaagtacctcctccaggcgcgaaccgctattattaaatccagctgggttaaggagatatgcggcattcaacagcggctggctcttcccgtttggagaccacccgatttcgaggaagagctcgcggactgtacagccgaactgggggagaccgtgaaacttgcatgtagagttacaggaacacccaaaccagttattagctggtacaaggatggcaaggccgtgcaggtggatccccatcatatcctcatcgaggaccctgacggatcctgtgcactcatactggattcactcaccggcgtagactccggtcaatatatgtgcttcgccgcatcagccgctggaaattgtagcaccctcgggaagatcctggttcaggtcccaccacgcttcgttaacaaagtgagagcctccccttttgtggagggggaggacgcacagttcacctgcactatcgagggagccccctaccctcagattcgatggtacaaagatggtgctctgctcaccactggaaacaaattccaaactctgtcagagcccaggagcgggctgcttgttctggtcataagagccgcatccaaagaggacctgggtctctatgagtgcgaactcgtgaaccggctgggttctgcccgagcatcagctgagctgcgcatccagagcccaatgctccaggcacaagaacaatgccatcgagaacaattagtggccgctgtcgaggtgaccgaacaagagaccaaggtacctaagaaaacagtcataattgaagagactatcacaaccgtcgtcaaaagccccagaggacagagaagaagcccgagcaagtcaccctcccggtcaccttctcgatgtagtgcttccccgctccgccctggactgttggcccccgacctgctctatctcccaggtgcaggccagccgaggcggccagaggccgagccgggacagaagcccgtagtacctacactgtacgttaccgaggccgaagcacatagccctgctctcccaggactttctgggccgcaaccgaaatgggtcgaggttgaagagaccatagaagtgcgagtgaagaagatgggtccacagggcgtgtcacccacaaccgaggtacctaggtccagttctgggcatctgttcaccctgccaggggccactccggggggcgatcctaactccaacaatagcaataacaagcttctggcacaggaggcttgggcacaggggacagccatggtaggtgtgcgggagccactcgtgtttagagttgatgcccgcggatctgtggactgggccgcctctggcatgggaagtctggaggaggaaggcacaatggaggaggccggagaagaggagggagaagatggtgacgcgtttgtaacggaggagagtcaggatacccattctctgggagacagagaccctaaaatccttacacacaacgggagaatgcttacactggcagacctggaagattatgtgccaggagaaggggagactttccattgcggggggcctggcccaggagcgcccgatgatcctccttgcgaggtgtctgtgattcagcgggagataggcgagccaaccgtagggcagcccgttctgctgtctgtgggtcatgccctgggtcccaggggacccctgggcctgtttcggccggagcctcgcggtgcttcaccccctgggccacaggttcgcagcctcgagggtactagcttcctactccgcgaggcgccagcccgccctgttggtagcgccccctggacacagtctttctgcactcggatcagacgttccgcagattcagggcagtctagctttaccaccgagctgtctacccagacggtgaattttggaaccgtcggtgagaccgttacgctccacatatgccctgatcgagacggagacgaagctgcgcagccctag

SEQ ID NO: 24141 - DNA, 1071 bp, synthetic construct
  source 1..1071: mol_type = other DNA; note = Synthetic coding sequence
atggccaccgccgccctgctgcggggcgccacccccggccggggcgggcccgtctggagatggaggttgagagcagcaccccgctgtagactggcacattcgtcctgtagcccaggcggggaccctaccgcaggagcagcctgggcctgcttcagattagacggtagaaccctgttaagagttcgcggcccggatgcagccccatttctgcttggactgttaaccaacgaactccctctgccttcccctgcagcggcaggcgcaccaccggcagcacgggctggctacgcccattttttaaacgtgcaaggtagaaccctttacgatgtgatactctacggtctgcaagaacactccgaggtatccggttttctccttgaatgcgactcatctgtgcagggggcccttcagaagcacctggcactttacaggatcagacggaaagtgaccgtcgagcctcatcctgagctgcgagtctgggctgtcttaccaagttcgcccgaagcctgcggcgcggcttccttacaggagcgggccggcgccgctgccattctcatcagagacccaaggacagcgcgtatgggctggaggctcctcacgcaggacgaggggccagctctggttcccggaggaaggctgggagatttgtgggattaccatcaacatcggtacctccagggcgtcccagagggagttagggaccttccaccaggtgtggccctgcctctcgagtctaaccttgctttcatgaatggcgtctctttcactaaaggctgctacattggtcaggaactgactgcgcgcacccaccacatgggagtgatacggaaacgactgtttcccgtccgctttctggaccccctgccaactagcggcatcactccaggtgctaccgtgcttacagcttctggccagactgtcggcaaattcagagctggtcagggcaacgtgggtctggccctgctctggtccgagaagatcaaagggcctttacacattcgtgcaagtgagggtgcccaggtggccttagccgcgtcagtgcctgactggtggccaacagtgagtaaatag

SEQ ID NO: 24142 - DNA, 1395 bp, synthetic construct
  source 1..1395: mol_type = other DNA; note = Synthetic coding sequence
atgcgggccgcccggcggggcctgcactgcgccggcgccgagcggccccgcaggcgcggccggttgtgggacagtagcggcgtcccccagcgacagaagaggcctggcccatggcggacccagactcaggagcagatgtcccgcgatgtttgcatccatacttggccctgcacatactacttggagccgaaacgccggtgggtgaccggccaactcagcttgacttcgctgagcctcagattcatgaccgacagcaccggcgagattctagtttcatttcctcttagctcaatagttgagatcaagaaagaggctagccatttcatcttcagcagtatcacaattctggagaagggacacgcaaagcattggttttcaagcctgagaccatcaagaaacgttgtatttagtataattgagcatttttggcgggaacttctgcttagtcagccaggggccgtagcagacgccagcgtccctcgcacacggggagaggaactcacgggactcatggccggcagccaaaaacgcttggaagacaccgcacgggttctgcatcaccaaggccaacaactggactccgtgatgcggggtctcgataaaatggaatcagaccttgaagtcgctgatcgcctgctcaccgaactcgagtcacccgcatggtggccgtttagtagcaaactgtggaaaactcctccagaaaccaagccgcgagaagatgttagcatgaccagttgtgagccctttggaaaggagggcatcttaatcaaaatacccgcagttatatctcacagaaccgagtcccacgtgaaaccaggaaggttaactgtgctggtatcgggcctagagattcacgactcatcctcactcctcatgcatcgatttgagcgggaggatgtggatgacattaaggtgcactcaccatacgaaatcagcatcaggcaaagattcattggcaagccagacatggcttaccgactgatctcagctaaaatgcccgaagtcatccctatcctcgaagtccagttcagcaagaaaatggaattgctggaagacgctctggtgttgaggagcgcccgaactagttcgcctgcggagaaaagctgttcagtgtggcacgccgcatccggattaatgggtaggacccttcacagggagcctcccgccggggatcaggagggtactgcactccatcttcagacctccctgccagcactcagtgaggcggatactcaggaactgacacaaattctgcgtaggatgaaaggcctggccctcgaggcagaatccgagttagagaggcaagatgaggctctcgacggagtcgccgccgccgtagatcgcgccacattgaccattgacaaacacaataggcgtatgaagcggctcacctag

SEQ ID NO: 24143 - DNA, 669 bp, synthetic construct
  source 1..669: mol_type = other DNA; note = Synthetic coding sequence
atgaccagctgcgagcccttcggcaaggagggcatcctgatcaagatcccagccgtgatttctcacagaacagaatcacatgtgaaacctggccggttgaccgtgctcgtatcagggcttgagatccacgactcctcctccctcctaatgcaccggtttgagcgtgaagatgtcgacgacatcaaggtgcactccccatacgagatcagcattaggcagaggtttatcgggaagcccgacatggcgtaccgactgatttccgcaaagatgccggaggtcatccccatcctggaagtccagtttagtaagaaaatggagcttctggaagatgcgctggtactgcgaagcgccaggacaagctctcctgctgagaagtcatgctccgtgtggcatgctgctagcgggctgatgggtcgaaccttgcacagggaacctcccgccggggatcaagagggcaccgcactccacttgcaaacctccctgcctgcattgtcagaggccgatacccaggaattgacccagattctgagacgcatgaaaggcttagcactagaagctgagagtgagctcgaaagacaggacgaggccctcgacggagtggccgcggctgtagatagggccaccctcactattgacaagcataacaggcgcatgaagcggcttacctag

SEQ ID NO: 24144 - DNA, 201 bp, synthetic construct
  source 1..201: mol_type = other DNA; note = Synthetic coding sequence
atgccccagtaccagacctgggaggagttcagccgggccgccgagaagctgtacctagccgacccaatgaaagctagggtagtgttaaaataccgccattccgacgggaatctctgcgtaaaggtcactgacgacctagtacaatggcatctgaactattgcaccctcagacatggcatcgctggtgggctggagacttag

SEQ ID NO: 24145 - DNA, 249 bp, synthetic construct
  source 1..249: mol_type = other DNA; note = Synthetic coding sequence
atgccccagtaccagacctgggaggagttcagccgggccgccgagaagctctatttggccgaccccatgaaagcaagggtcgttctcaaatatcgccactctgatggaaacctttgtgtcaaggtgaccgatgacttggtccggcaatgcttagccctgctgttgcgcctgcagtgctctgggatgataatcgcccactgcatcctggatctcctcggatctagcggcccactggcctccgcatcttag

SEQ ID NO: 24146 - DNA, 651 bp, synthetic construct
  source 1..651: mol_type = other DNA; note = Synthetic coding sequence
atgcaggccaacggcgccggcggcggcggcggcggcggcggcggcgggggcggtggcggcggaggcggaggcggacaaggacagactccagaattggcctgcctttccgcacagaacggtgaatcttctccatcgagctctagttccgcaggtgatcttgcacacgcgaatggcctccttccctcggccccatctgcggcctctaataactccaacagcctaaacgtgaataacggagtgcccggcggagccgccgcggctagtagcgccactgtcgctgctgcaagcgctaccaccgccgcctcaagtagcctcgccacccccgaattgggcagctccctgaagaaaaagaagcgactctcccagagtgacgaagacgtgatacggctaattggtcagcatcttaacggactgggcctgaatcaaacggtggatctcctgatgcaagagtctggctgtcgactggagcatccgtctgcaacaaagttccggaaccatgtgatggagggcgattgggataaggcagagaacgacttaaacgagttgaagcctctggtgcactccccacacgccattgtagcccagacattttccgaaacttctattaactttttcccactgacggccgctttctgccacgtgcgcggctag

SEQ ID NO: 24147 - DNA, 2340 bp, synthetic construct
  source 1..2340: mol_type = other DNA; note = Synthetic coding sequence
atgcggatcgaggagcggaagagccagcacctgaccggcctgaccgatgaaaaagtgaaagcctacctgtctctgcacccccaggttctggacgaatttgtaagtgagtcagtgtccgctgagaccgtcgagaagtggctgaaaaggaagaataataaaagcgaggacgagtcggccccgaaagaggtcagccgttaccaagacacgaacatgcagggagtggtttacgaactgaacagttatatagagcagcggctagataccggcggcgacaaccagttgttgctttatgagctctcttccataattaagatcgccaccaaggctgatgggtttgcgctgtattttttgggtgagtgcaataactctttgtgtatctttactccccctgggattaaagaaggcaagccccgcctaattccggcgggtccaatcacgcaaggaaccaccgtgagtgcttatgtggctaaaagtcgcaagaccctcttggtcgaggacatcttaggtgatgagagattccccagaggcacaggcctggagagcggtacaagaatccagtccgtgctgtgccttcctatcgtgactgctataggagacctgattggtatcttagagctttaccgccattggggcaaggaagccttttgcctttctcaccaagaagttgcaacagcgaacctcgcatgggcttccgtcgcaatccaccaggtgcaggtgtgccgcggtctggccaaacagaccgagctgaatgattttctcctagacgttagtaaaacgtattttgataatatcgttgcaatagattcccttctcgaacacattatgatctacgctaaaaatctggtcaatgccgaccggtgcgccctgtttcaggtcgatcataagaataaggaactctatagtgacctgttcgacatcggcgaggagaaggagggaaaacccgtgtttaagaagacaaaagagatccgcttctctattgaaaaaggtatcgcagggcaggtggcgcgcaccggggaggtgctgaacatccccgacgcctatgccgaccccaggttcaacagggaagtggatctctatactgggtacacaacaaggaacatactgtgtatgcccattgtgtccaggggctctgtgataggcgtggtccagatggtaaataagatatctggatccgcctttagcaaaacggacgaaaacaattttaagatgttcgcagtgttctgtgccttagcgctacactgcgctaacatgtatcacaggatcagacatagcgaatgtatttacagggtgacaatggagaagctgtcttatcattctatttgcaccagtgaggagtggcagggattgatgcagttcaccttacccgttcgcctgtgtaaagagatcgaacttttccattttgatatcggtcccttcgagaatatgtggcccggtatcttcgtctacatggtgcacagaagttgcggaacaagctgctttgagctggagaagctgtgcaggtttatcatgagtgtgaaaaaaaactacagaagggtaccctatcacaactggaagcacgccgtgactgtggctcactgcatgtacgccatactgcagaataatcacacgctgtttactgacttggagcggaagggtctgcttattgcgtgcttgtgtcacgatctcgatcacagaggtttcagcaattcctacctccagaagttcgatcaccctcttgctgccttatattcaacaagtacaatggaacagcaccacttctctcaaacagtgtcaatattgcaacttgagggacataatattttttcgacattgtcgtcatccgaatatgagcaggttctcgagatcatacgtaaggccataatcgccacagatctggccctttattttgggaacagaaagcagcttgaagagatgtaccaaaccggatccctcaatctgaataatcagagccacagggatagggtgattggtctgatgatgacggcatgtgacctgtgtagtgtcaccaaactgtggccagtgactaagctgacggcgaacgacatttatgctgagttctgggccgaaggcgacgagatgaagaaactcggaatccagcctattccaatgatggatagggataagaaggatgaagtgccccagggtcaactggggttttacaacgctgttgccataccttgttacactacactaactcaaattttaccgcccacagaaccgctccttaaagcctgccgggataatcttagccaatgggagaaggtgattagaggtgaggagacagccacatggatttctagcccatctgtggcacaaaaagccgcagcatccgaggactag

SEQ ID NO: 24148 - DNA, 666 bp, synthetic construct
  source 1..666: mol_type = other DNA; note = Synthetic coding sequence
atggccgccgccagcggcagcgtgctgcagcggtgcatcgtgagccccgctggacgccacagtgcttcccttatttttctccatggatctggagactcgggccagggactcagaatgtggatcaagcaggtgctgaaccaggatctgacattccagcacatcaagatcatctacccaaccgctcctccacgatttaagattacaaatgactgtccagagcacctcgagtctattgacgtgatgtgccaggtgctgactgatctcatcgatgaagaggttaaaagtggaattaagaagaaccggatcctgattgggggattttccatgggcggctgcatggccattcatctggcttacagaaatcaccaggatgtggccggagtgtttgccttgtcctctttcctcaataaggcgtcggccgtgtaccaagcactacaaaaatccaacggtgttttaccggagctgttccagtgccacgggactgccgatgagctagttctgcactcctgggccgaggaaactaattcaatgctgaaaagccttggggtgacaaccaagttccatagctttcctaacgtgtatcatgagctgtctaaaaccgagctggacattctgaagctctggattctgaccaagcttcctggcgaaatggagaaacagaaatag

SEQ ID NO: 24149 - DNA, 714 bp, synthetic construct
  source 1..714: mol_type = other DNA; note = Synthetic coding sequence
atggccgccgccagcggcagcgtgctgcagcggtgcatcgtgagcccagccggccggcatagtgccagcctcattttcctccatgggtctggagacagcggacagggcctgcgaatgtggattaagcaggtgctgaaccaggatctaacattccaacacattaagattatatacccaacagcccctccacgatcatatactcctatgaaagggggaatctcaaatgtctggtttgataggttcaaaatcaccaatgattgtccagaacacctcgaatccattgatgtgatgtgccaagtcctgaccgatctgatcgatgaggaggtcaagagcggaatcaagaagaatcgcatcctgatcggagggttcagtatgggcgggtgtatggcaattcatttagcttatcggaaccatcaggacgtcgccggggtttttgccctgagctctttcctgaataaagcctccgccgtataccaggctctccaaaagtcaaatggagtcttgcctgagcttttccagtgccacgggaccgccgatgagctcgtcctgcacagctgggcagaggagaccaactccatgttaaagtctctcggcgtgacgaccaagttccatagtttccctaacgtttaccatgaactgagtaaaactgaacttgatatcttgaaactatggattctcacaaagctgccaggagaaatggaaaaacagaagtag

SEQ ID NO: 24150 - DNA, 471 bp, synthetic construct
  source 1..471: mol_type = other DNA; note = Synthetic coding sequence
atggagaccgccaaggagatgacccgggagagcctgcccatcaagtgtctcgaggccgtgattttggggatctacctcacgaacggacagcccagcattgaacgttttcccatcagcttcaagacttacttcagcggtaattatttccaccatgttgtccttggcatttactgcaacggccggtacggctccttggggatgagtaggcgtgcagagctcatggacaaaccactgacatttcgcacgctcagcgacctgatctttgacttcgaagatagttataaaaagtacctgcacacggtgaaaaaggtcaaaataggattatacgtgccacacgaaccacattcctttcagcctatcgagtggaagcagctagtgctgaatgttagtaaaatgctgagagccgatatcagaaaggagttagaaaagtatgcgcgcgacatgcgtatgaaaggcttatgttcccattag

SEQ ID NO: 24151 - DNA, 936 bp, synthetic construct
  source 1..936: mol_type = other DNA; note = Synthetic coding sequence
atgaccggcagcgccgccgacacccaccggtgcccccaccccaagggcgctaaaggtacgcggtcacgttctagccacgccagaccggtgtctttggcgaccagtggagggagtgaggaagaggacaaggacggcggggtcctgttccatgtaaacaagtccgggtttccaattgattcccacacatgggagagaatgtggatgcatgtagcaaaggtgcatccaaagggcggtgagatggtgggcgctatccgcaatgccgctttccttgccaagccatcaatcccccaagttcccaactacagattatccatgaccatccctgactggctccaggccattcagaactacatgaaaacgctgcactacctaacgaatggccagccctccatcgagagatttcctatatcctttaagacatacttctctggcaactacttccaccatgtggtcctgggaatatactgcaacggccgttacggcagcctcggaatgtcccgtcgcgccgagctcatggataaacccctgacatttcgcaccctgagcgacctaatcttcgactttgaggacagctacaagaaatatttacatacggtcaagaaggtaaaaattgggttgtacgtgcctcacgagccccactctttccagcctattgaatggaaacagctggtccttaacgtcagcaagatgctgcgggccgacatccgaaaggagctggagaagtatgcccgggatatgcgcatgaaaattctgaagcccgcaagtgcccactcgccgacccaggtcaggagtagaggaaagtccctctctccgcgtcgccgacaagcatctcctccacggcggcttggacggagagaaaagtctcccgctcttcctgaaaagaaagttgcggatctctccaccctcaacgaggtagggtaccaaattcgaatctag

SEQ ID NO: 24152 - DNA, 873 bp, synthetic construct
  source 1..873: mol_type = other DNA; note = Synthetic coding sequence
atgtggatgcacgtggccaaggtgcaccccaagggcggcgagatggtcggcgctatccgcaatgcagcgtttctggccaaaccgagcatcccacaggtgcctaactataggctgagcatgacaattcccgactggctgcaggcaattcagaattacatgaagaccctgcagtacaaccacactggcactcagttttttgagattaggaagatgaggccactctcgggtcttatggagaccgctaaagaaatgacgagggagagcctcccgataaagtgcctcgaggccgttatcctgggtatctatctgacaaacggccagccaagcattgaaagattccctatatcattcaagacctacttctcaggaaattacttccatcacgtggtcctcggcatttactgtaacggccggtacgggagcctcggcatgtcccgacgggccgagctgatggacaagcccttaacgttcagaacgctgagtgatctaattttcgattttgaagattcctataagaaatatctccacactgtaaaaaaggtgaagattggcctctacgtgccacacgagccacactcctttcagccgattgagtggaaacagttagtgctgaatgtttcaaaaatgctgcgggccgatataaggaaagaactggaaaaatacgcccgcgatatgagaatgaaaatcctcaaaccagcctccgctcactctcccacacaggtccgcagtcggggaaaatccctcagtcctcgtcggcgacaggcaagccctccaagacggctaggacgacgagagaaatcacctgctctcccagagaagaaggtcgctgatctcagcacactcaacgaggtgggttatcaaattagaatatag

SEQ ID NO: 24153 - DNA, 756 bp, synthetic construct
  source 1..756: mol_type = other DNA; note = Synthetic coding sequence
atgaccatccccgactggctgcaggccatccagaactacatgaagacactgcagtataatcatacgggaacccagttttttgagatacggaagatgagacccttaagcggcctgatggaaaccgccaaggaaatgaccagagagtccctccctattaagtgtctggaggcagtcatcttgggcatctaccttaccaatggacagccttcaatcgaaagattccccattagtttcaagacatacttcagcggtaattacttccatcatgtggtgctcggaatctattgcaatggacggtacggcagtctgggcatgtcaagacgcgccgaactgatggataagccactgaccttcagaacactgtctgatctgatctttgattttgaagacagttataagaagtatttacacactgtgaagaaagtaaaaattggcttgtacgtgccccatgaacctcattctttccagcccatcgaatggaagcagcttgtccttaatgttagtaagatgctgcgggcggatatccggaaggagcttgagaaatatgcacgagatatgagaatgaaaatactgaagcccgcttccgcacactctcctactcaagtgaggtcccggggtaaatctctgagcccacgacgccgccaagcttcacctcctcgacgactcggaagaagagaaaaaagtcctgctctgcccgagaaaaaggttgctgatttgtccacactgaatgaagtcggatatcagatccggatatag

SEQ ID NO: 24154 - DNA, 873 bp, synthetic construct
  source 1..873: mol_type = other DNA; note = Synthetic coding sequence
atgtggatgcacgtggccaaggtgcaccccaagggcggcgagatggttggcgcgataaggaatgccgccttcttagcgaaaccttctatcccacaggttccgaactatcgcctatctatgactatcccagattggctgcaggcaattcagaattacatgaaaacccttcagtataaccataccggtacccagttctttgagattcggaaaatgcgccccctctccggacttatggagaccgcgaaggaaatgactcgggagtctctccccatcaaatgtctagaggctgtcattctggggatatatctgacaaatggccagccatcaatcgaacgattcccaatcagctttaaaacctatttctccggaaattattttcaccatgtcgtcctgggcatttactgcaacgggcggtatgggagcttagggatgtcacgcagagcggaattgatggacaaacctctgacgttccggacgctgagtgacctcatctttgacttcgaagatagttacaagaagtatctccacacggtaaaaaaggtgaagattggcctttacgtgcctcacgaaccccactcttttcagcccatcgaatggaagcaactggtattgaatgtctccaagatgctgagggccgacattcggaaggaactggaaaagtatgccagggatatgcgcatgaagatcctgaagcctgcgtcggcccacagccccacacaggtcagatcgaggggtaaatctctctccccccggcggaggcaagcctcccctccccgcagattgggtaggcgtgaaaagtcacccgcattacctgagaagaaagtcgccgacctcagcaccctcaatgaagtaggatatcagattaggatctag

SEQ ID NO: 24155 - DNA, 723 bp, synthetic construct
  source 1..723: mol_type = other DNA; note = Synthetic coding sequence
atggccggcagccccgagctggtggtgctggaccccccctgggacaaggagctggcagctggaaccgagagccaggccctggtttcggcgacaccacgtgaggatttccgcgtgcgctgcacgtcaaagcgggccgtcacagagatgctgcaactctgtggacgctttgtgcagaagctcggcgatgcgttgccggaggaaatccgagaacctgccttgcgggacgcacagtggacctttgaatcagctgtccaggagaacattagcatcaatggccaggcctggcaggaagcgagtgacaactgtttcatggactcagacatcaaggtgctcgaggatcagttcgacgaaattatcgtagacatcgccactaaaaggaagcagtatccacgcaaaatcctcgagtgtgttatcaagaccattaaggcaaagcaggaaattctgagcctaccagcactcatcgaacagggtgaagggttttcacaagtactacgtatgcagcccgtgatacatctgcagcggatacaccaggaagtgttctcctcctgtcatcggaagcccgatgccaaacccgaaaactttatcacacagatcgagaccacacctaccgagactgcctccagaaagaccagcgatatggtgctgaagcgaaagcagactaaggactgcccgcagagaaaatggtaccctcttcgccccaagaaaatcaacctggacacatag

SEQ ID NO: 24156 - DNA, 519 bp, synthetic construct
  source 1..519: mol_type = other DNA; note = Synthetic coding sequence
atggccggcagccccgagctggtggtgctggaccccccctgggacaaagaacttgccgcaggtaccgaaagccaggccctggtctccgctacaccaagggaggatttccgagttagatgcacctccaaaagagccgtgacagaaatgctacagttgtgtggcaggtttgtgcagaagctcggggacgccctgcccgaagagatcagggaaccagcacttagagacgcacagtggacattcgaatcggctgttcaggaaaatatctctatcaacggacaggcctggcaggaggcgtcagataactgcttcatggactcagacataaaagtcttggaagaccaatttgacgagatcattgtcgatattgcaacaaagcgcaagcaatacccccgaaagatcctggagtgcgtgatcaaaacaattaaggcgaagcaagagatccttaaacagtaccatcccgtcgtgcatcctttagatctgaagtacgacccagatcctgtcctggcttgcattaattag

SEQ ID NO: 24157 - DNA, 846 bp, synthetic construct
  source 1..846: mol_type = other DNA; note = Synthetic coding sequence
atggccggcagccccgagctggtggtgctggaccccccctgggacaaagagttggcagctggcacagagagccaggcgttggtcagcgcaaccccaagagaagatttccgggtcagatgcacttctaaaagggccgtcactgagatgctgcagctttgcgggagattcgttcagaaactgggagatgccctgcctgaggagatcagagaaccagctcttcgagacgcgcagtggacctttgaaagcgcagtccaggaaaatatttccatcaatggacaagcatggcaggaagcctcggacaattgttttatggactcggacatcaaggtccttgaagatcagttcgatgaaattatagtggatatcgccacaaaacgaaagcagtatcctcggaagattctggagtgcgttatcaaaacaattaaagccaagcaagaaattctgaagcaataccatcctgtggtgcaccctctggatctgaaatacgatcccgaccctgcccctcacatggagaacctcaaatgcagaggggaaactgtcgcaaaggagatcagcgaggctatgaaaagccttcctgcactcatcgagcaaggcgagggtttttctcaagttctgcgcatgcaaccagtcatacacctgcagcggatccaccaagaggtgttctcctcctgccatcggaagcccgacgccaagcccgagaatttcatcacacagatcgagacaacgcctacagaaacagcaagtcgaaagacgagtgacatggtgttaaagagaaaacagacaaaggactgtccccagaggaagtggtaccccttacgcccaaaaaaaattaatctggacacctag

SEQ ID NO: 24158 - DNA, 228 bp, synthetic construct
  source 1..228: mol_type = other DNA; note = Synthetic coding sequence
atggacagcgacatcaaggtgctggaggaccagttcgacgagatcatagtcgatattgcgaccaaacgaaaacagtacccacggaagatccttgagtgtgtaattaagaccattaaggcaaagcaggagatcctgaagcagtaccatccagtagttcatcccctggatttaaaatacgaccctgaccctggagcaaagcccggcggcctggcactgggcgctgtttag

SEQ ID NO: 24159 - DNA, 279 bp, synthetic construct
  source 1..279: mol_type = other DNA; note = Synthetic coding sequence
atggaggactaccaggccgccgaggagaccgccttcgtggtggacgaagtgagcaacatagtgaaggaagccatcgagagtgcgattgggggaaacgcctatcagcacagcaaggtgaaccagtggactaccaacgtggtggagcagaccttatctcagttaactaaactcggtaagccgttcaaatatatcgggaatggcgtactgtttctactgtatctacgggacgggttcttaactttaattcggggtgctagcagcacgcgaaataatagctag

SEQ ID NO: 24160 - DNA, 204 bp, synthetic construct
  source 1..204: mol_type = other DNA; note = Synthetic coding sequence
atgcagaagaacggcgccggcctgcacaccgccagcagctgcttctgggacagttcaaccgatgggatgatttttatccacgtatgcgaagtgcttctctgtgagatctacgattggaaatttcctatcttcgaatgcaacgcatgtctatctcctttcaaaactttcaacaacagacttgctaaggtgttgtgcgtggcttag

SEQ ID NO: 24161 - DNA, 342 bp, synthetic construct
  source 1..342: mol_type = other DNA; note = Synthetic coding sequence
atggaggactaccaggccgccgaggagaccgccttcgtggtggacgaggtttcaaacatagtcaaggaagctatcgagtctgcaatcggaggtaatgcttatcagcattccaaagtgaaccagtggactacgaacgttgttgagcagaccttgagccaactgaccaaactggggaagcctttcaagtatatcgtgacatgtgtgattatgcagaagaatggggcggggttacacacagctagtagctgtttctgggattcctcaaccgacgggtcgtgtacggtgcggtgggaaaacaagaccatgtattgcattgttagtgcgttcggactcagcatatag

SEQ ID NO: 24162 - DNA, 2037 bp, synthetic construct
  source 1..2037: mol_type = other DNA; note = Synthetic coding sequence
atgtacgccgccgtggagcacggccccgtgctgtgcagcgacagcaatattctgtgtttgtcctggaaggggagagtcccaaagagcgaaaaggagaagccggtctgcagaagacggtactacgaggaaggttggttagcaactggaaacgggcgaggcgtggtcggggtcacattcacctcctcccattgcaggagagatagatccacacctcaacgcattaacttcaacttaagaggacataactctgaggtggttttagtgcggtggaacgaaccatatcagaagctggcaacgtgcgatgctgatggcgggatctttgtttggatccagtacgagggacgctggtcggtggaactagttaatgacaggggagcccaagtcagcgactttacctggtcccacgacgggacacaggcactgatcagttacagggacgggttcgttttagtcggaagcgtatctggccaacggcactggagctctgagattaatttagagtcgcagatcacttgcggtatctggacccctgatgaccaacaagtccttttcgggactgccgatggtcaggttatcgttatggactgtcatgggagaatgttggcccatgtactgctacatgaatcagacggagtacttgggatgtcctggaactaccctatattccttgtggaggatagctccgagagcgacaccgactctgatgactacgccccacctcaggacggaccggccgcttatccgatacctgtgcagaatataaaacctctgctgactgtttcttttactagcggcgacattagccttatgaataattatgacgacctcagcccaacagtgattaggtcagggttgaaagaggttgtcgcccagtggtgcacacagggcgatctactggccgtggcaggcatggagcgacaaactcagctcggtgaactgcctaacgggccccttctgaagtctgccatggtgaaattttataatgttcgtggtgagcacatattcacgctggacaccttagtacagaggcctatcatttcgatctgttggggacacagagacagccgattgctcatggcatccggccctgcgctgtatgtggtgcgcgtcgagcacagagtatcgtcattgcagctgttgtgtcagcaggccatagcctctacattaagggaggataaagacgtctcaaaactcacccttcctccaaggctttgcagctacctctccacagcattcatccccacgatcaaacccccaattccggatcctaacaatatgagagatttcgtgagctatccttcagcagggaacgagcgactccattgcacaatgaagcgtactgaggacgatccggaggtgggtggcccatgctataccttgtacctggaatatctcggcggcctcgtccctatcctgaagggccgacgtattagcaagctgcggcccgagttcgtgattatggatcctcggaccgattccaaaccagacgagatctatgggaacagcctaatatctacagttatagacagctgtaactgttccgactcatccgatattgaactctccgatgattgggccgcaaagaaatctcctaagatctctagagctagcaaatcccctaaactaccgcgcatttctattgaggctcggaaaagtccaaagctgcccagagcggcccaggagctctcacgctccccaagactgcctcttaggaaaccgtcagtaggctcaccaagcctaactagacgagagttcccatttgaggacatcacccagcacaattatctggctcaagtgacatctaacatctggggcaccaagttcaagatcgtgggcctggcagccttcctcccgaccaacttgggcgcagtgatctataagaccagtctgctacacctgcagcctcgtcagatgacgatttacctccccgaggttcgcaagatttccatggactacattaacttacccgtattcaacccaaacgtgttcagtgaagatgaagacgacctccctggtgatgccgtgtggacagactag

SEQ ID NO: 24163 - DNA, 4632 bp, synthetic construct
  source 1..4632: mol_type = other DNA; note = Synthetic coding sequence
atgtacgccgccgtggagcacggccccgtgctgtgcagcgacagcaacattttgtgtctgagctggaagggaagggttccgaagtctgagaaggagaagcctgtttgccgccggcgctactacgaagaggggtggctcgcgacaggcaatggtcggggagtcgtgggtgttacattcacctcgtctcactgcagacgcgatcggtccactccccagcgcatcaacttcaacttgcgtgggcacaatagtgaagtggtgctggtacggtggaacgaaccttaccaaaaactcgccacttgtgacgccgatggcggcatcttcgtttggatccaatacgagggccgttggagcgtagaattggtgaacgaccgaggagcccaagtctctgacttcacctggtcacacgatggtacccaggctctgatcagctatcgtgatggatttgtattagtcggcagcgtgtcaggccagcgccattggagctcagaaattaacctcgagagccagatcacctgtggcatatggacacccgatgatcagcaagtactctttggcaccgccgatggccaagtcatcgttatggactgccacggtcgcatgctagcacatgtcctgcttcacgagtctgatggcgtcctcggtatgtcttggaattatcccattttccttgtggaagattcttcggaatcagacacagacagcgatgactacgcgccacctcaggatggtcccgcagcctaccctattcccgtccagaacatcaagcccttactgactgtgagttttacctccggcgacatctcactaatgaataattatgatgacctcagcccaactgtgattcgctcagggcttaaggaggtggtggcacagtggtgcacccaaggtgatttactggccgtggccggaatggagcgccagactcagctgggcgagttgcccaacggtccactgctcaagtcggccatggttaagttctacaatgtgcgcggcgaacatatttttacactcgacacgctggtgcagcgacccattatcagtatttgctggggccacagagatagccgtctgcttatggcctccggtccagcgttgtatgtggtacgcgtggaacaccgtgtgagctccttacagttgttgtgtcaacaagccatcgctagtacactgcgtgaggataaggatgtctctaaactgacactcccaccccggctttgcagctacctgtctaccgcattcatcccaactatcaagccacccattcccgaccccaacaacatgagggattttgtaagctacccaagtgccgggaacgaacggctccactgcacaatgaaaagaactgaggacgatcctgaagtgggcggaccgtgttacaccctctacttggagtacctcggtgggttggttcctatcctcaagggacgccgaattagcaagctccgccccgaattcgtgattatggatccacgcacagattcaaaaccagatgaaatctacggcaacagtcttattagtacagttatcgattcatgtaactgtagcgacagctctgatattgagttatcggacgactgggccgcgaaaaaatcaccaaaaattagcagagctagcaagtctcctaaattgccgaggatctccatcgaggcgaggaagtcaccaaagcttccccgcgcagcccaagagctctcaagaagcccccgtctcccacttcgcaagccttcagtggggagtccatccctgacccgcagagaatttccattcgaagatatcactcaacataactatctcgctcaggtgacaagcaatatttggggaacaaagtttaaaatcgtcggtctggctgcttttttgcccaccaacctgggcgctgtgatttataagacgagcttattgcatctgcagccccggcagatgacaatctatctacccgaagtgcgcaaaataagtatggactacattaatttacccgtgtttaacccaaacgtcttctctgaggacgaggacgacctgcctgtgaccggtgcatcaggagtccctgaaaatagtccgccctgcactgtaaacattcccatcgcaccaatacatagctccgcgcaggccatgtctcccacccagagcattggcctcgtgcagagcctgttggccaaccagaacgtgcagcttgacgtgctcacgaatcaaacgacagctgtgggcactgcggaacatgccggcgattccgccacccagtacccggtttccaacagatattcaaaccccggacaggtgatctttggatccgtggagatgggccgaattattcagaaccctccgcctctcagcctgccgccccccccccagggtccaatgcagttgtcaacggttgggcatggcgaccgtgaccacgagcatctccagaagtccgccaaggctttgcgacccaccccacagctagccgctgagggtgacgccgtcgtttttagcgccccccaggaggtccaggtcaccaagatcaaccccccaccgccatatccgggcacaatcccagcggcccctactactgccgcccctccacccccgctgcctccacctcagcctcccgtggacgtgtgtctcaagaaaggcgatttcagtctgtatcccacatctgtgcattatcagacgcctctgggatatgagaggatcactacattcgattcgtctgggaatgtcgaagaggtctgccgaccacggacgagaatgctatgcagtcaaaatacctacacacttcccggtcctggcagctccgccacgctgagactgactgctacagagaagaaagtaccacaaccgtgcagtagtgcgaccctcaacaggctcaccgtcccgaggtattcaataccaaccggggatcctcctccctacccagagatcgcctcccagctggctcagggacgaggagccgcccagcgatcagacaactcactgatacatgcaacgctgcgccggaacaatagagaagcaacactgaagatggcgcagttggccgacagtccaagggctcccttgcagcccctcgctaaatccaaggggggacctggaggagttgtgactcagctcccagctagacccccccccgctctgtatacctgttctcagtgctctgggacaggaccttcctcccaacctggtgcatcccttgcacatacggcatcagcctcgccacttgcctcccagagcagttatagcctgctgagcccccccgacagcgctagggaccgcaccgattacgtcaactcagcattcacggaggatgaagcacttagccagcactgccaactcgaaaagcctttgagacatcctccgctgcccgaagcagccgtgaccctgaagcggccccccccatatcagtgggatccaatgctgggagaggacgtgtgggtgcctcaggagcgcacagcccagaccagcggccccaaccccctgaagcttagctcactgatgttgagtcagggtcaacaccttgacgtttcacgcttgccctttatctcacccaagagtcccgcctcccccacagctacctttcagacggggtatggaatgggggtgccctatcctggatcctacaacaacccaccactgcccggtgtgcaggctccttgttcccccaaggacgcattgagccctacacaattcgcacagcaggagcccgcggtcgttctccaacctctgtatcccccctccttgtcttattgcacactgcccccgatgtaccctggctcatccacctgctccagcctccagcttccaccagtggcgctacacccttggagttcctactccgcatgcccccccatgcagaaccctcaggggacgttgcccccaaaacctcacctggttgtggagaagcctctggttagccccccacctgcagatctacagtcacacttgggcacagaggttatggtggagactgcagacaacttccaagaagtcctgtcactcacggaatcacctgtccctcaacgcaccgagaaattcgggaaaaaaaatagaaagcggctggactcaagagcagaggaaggcagcgttcaagctattacggaaggcaaggttaagaaggaggctcgcacccttagcgattttaactcacttattagctctccccacctagggcgagaaaagaagaaggtgaagagccagaaagaccagctgaagtcaaaaaaacttaacaagaccaacgagttccaagactcatctgaatctgaacccgagctctttatatcaggcgatgagctcatgaatcagagccaaggaagcaggaaggggtggaaatcgaagcgaagcccacgagccgccggagaactggaagaggctaagtgcagacgggcaagcgagaaagaggatgggagactggggtctcagggctttgtttacgtgatggctaataagcagccactctggaatgaggcaacgcaggtatatcaactcgacttcggagggagggtgactcaggagagcgctaaaaatttccagattgaactcgaaggtcgccaggtcatgcaattcggcaggattgacggtagtgcctacattttggactttcagtaccctttcagcgctgtgcaggcgttcgcagtcgcactggcaaacgtcactcaacgattgaagtag

SEQ ID NO: 24164 - DNA, 3234 bp, synthetic construct
  source 1..3234: mol_type = other DNA; note = Synthetic coding sequence
atggacagcaagatgaagaagatggccgagctgcagctgagcgtggtgtccgatccgaaaaacagaaaggccattgagaatcagattcagcaatgggaacagaacctcgagaaatttcacatggatctcttccgcatgcgctgctacctcgccagtctgcagggtggtgagctgcctaatcctaaaagcctccttgccgcagcatcacgaccatcaaaacttgctctcggacgtttaggaattctcagtgtcagttccttccatgctctcgtgtgtagcagagacgactctgcactgcggaaaagaactctgagtctgactcagcgtgggcggaataagaaaggaatcttcagcagtttaaaggggttggatacgttggctcggaagggtaaggagaagaggccgagcattacccagatcttcgacagttccggatcacacgggttttcaggaacccaactcccacaaaattccagcaacagcagtgaggtggatgagctcctgcatatatacggcagtacagtcgacggtgtccctagagacaacgcttgggaaattcagacctacgtccacttccaggacaaccacggagtgacagttggaattaagcctgagcacagagtggaagacattctgacacttgcctgtaagatgagacagttagagccaagccactacggacttcagctgcgtaaattggtggacgacaatgtggagtactgtatccctgcgccttacgaatacatgcaacaacaggtgtacgatgaaatcgaagtgtttccattaaacgtatacgacgtgcagctgaccaagaccgggtctgtgtgtgacttcgggttcgccgtgacagcccaggttgacgagaggcagcatctgtcacgcatcttcatcagtgatgtgctccctgacggactggcatatggggaggggctccgaaagggaaacgagataatgaccctgaatggagaggctgtgagtgacttggatctcaaacagatggaggccctattcagtgagaagtctgtgggtcttacactcattgctagacctccagacaccaaagcaactctctgtacaagctggtcagattctgacctgtttagtcgggaccaaaagtcactgctgcctccccccaatcagtcacagcttttggaggaatttctggacaacttcaagaagaatactgcgaacgatttctccaacgtgcccgacatcacaactggattaaaacgctcgcagaccgatggcactctggaccaagtctctcatcgggaaaagatggaacaaacattccggagtgcagaacaaataaccgccctgtgcagaagttttaatgactcccaagccaacggcatggagggccctagggagaatcaagatcctcccccccggagcctagcgagacacctgagcgacgcagatagattaagaaaagttatccaagaactggtcgatacagaaaaatcttatgttaaagatttatcttgcctattcgaactgtatctggaaccacttcagaatgagacattcctcacacaagatgaaatggagtccttgtttgggtcactgcctgaaatgttagagtttcagaaggttttcctggaaacgttggaggatggaatttccgcctctagtgacttcaataccttagagaccccctcccaatttaggaagctactttttagtctaggaggttcttttttgtattacgccgatcacttcaagctttattctggtttttgcgcaaatcacataaaggtgcagaaggttctcgagcgcgccaaaactgataaagctttcaaagctttcctagacgctcgaaaccccacgaagcaacattcatctacgttggagagttatctgatcaagcccgtccaacgagtcttaaagtaccctctccttttaaaggaactggttagcctcactgaccaagaatcggaggagcattatcatctgaccgaggcgctaaaggctatggaaaaggtggcttcccatattaatgagatgcaaaagatctatgaagattacggaactgtatttgatcagcttgtggccgaacagagcggaactgaaaaggaggtgacagaactgtccatgggcgagttactgatgcactcaaccgtgagttggttaaatccatttcttagcctcgggaaggcccgtaaagacctggagctgaccgttttcgttttcaagcgagccgttatcctggtgtataaagaaaactgtaaactaaagaaaaaactgcccagcaactcccggcccgcccacaatagcacagacctggatccttttaaatttcggtggcttattccaatttctgctcttcaagtgagactaggcaaccccgccgggacagaaaacaatagcatctgggagttaatccacacaaagagcgagatcgaggggagacctgagaccattttccagttatgttgttccgactccgagtcaaaaactaatatagtaaaagtgatccgctccattcttagagaaaactttcgtagacacataaagtgcgaactacccttggaaaagacatgtaaggaccgactggttccccttaagaatcgagttcctgtgtcagctaaactcgcttcttcacgaagtctcaaagtgctgaaaaactccagttctaacgagtggaccggcgagacagggaagggtactctactggacagcgacgaaggttccctttcttccggcacccagtcatctggatgtcccactgccgagggccggcaagattcgaaaagcacttcacccggcaagtatcctcacccaggcctggcagatttcgccgacaatcttatcaaggaatcagatattctgagcgacgaagacgacgatcataggcagaccgtgaagcagggatcccccacaaaggacatcgagattcagttccagcggctcaggatcagcgaggatccagatgtacaccctgaggctgagcagcagcccggtcctgagagtggcgaaggtcagaaaggaggggaacagcccaaactggtccgtggccacttctgccctattaaaaggaaagccaactccacgaaacgagatcgaggaactcttctgaaggcccagatcaggcaccagtcactagactcacagtccgagaatgccaccatagatctcaacagcgtgctagagcgggagttttcagtacaatcactcacctcagtcgtctctgaagagtgcttctacgagacagagtcacatggcaagtcctag

SEQ ID NO: 24165 - DNA, 579 bp, synthetic construct
  source 1..579: mol_type = other DNA; note = Synthetic coding sequence
atgagccagtgcgcctgcctggaggaggtgcacctgcccaacatcaagcccggagagggcttaggaatgtacatcaaatcaacatacgacggccttcacgtgatcaccgggaccaccgaaaatgtgggctggcaactgaaaaacctggttaaaaagttgcgggagaatccaacaggcgtggtgctactactgaaaaagcggcccacgggttctttcaatttcacccccgctcctctgaaaaacctcaggtggaaaccacctttggtgcagacatcaccccccccagcaacgacacagagccctgagtctacaatggatacttccctgaagaaagaaaagagtgctatcctggacctgtacatccctccacctcccgctgtgccctactcacctagggatgagaacgggtctttcgtgtatggagggtcaagtaaatgcaaacaaccactgcctggaccgaaaggtagcgaatcaccgaactcttttctcgatcaagaatctcggagaagacggttcacaattgcagattctgaccagctgccaggttattcggtggaaacaaatatcctgcccacctag

SEQ ID NO: 24166 - DNA, 1668 bp, synthetic construct
  source 1..1668: mol_type = other DNA; note = Synthetic coding sequence
atggagcccgtgaccaagtggagccccaagcaggtggtggactggactagaggactcgacgactgcctgcagcagtacgtccataaatttgagcgcgaaaaaatcaatggggagcagctgctgcagatttcacaccaagaccttgaggaattaggagtcaccaggatagggcatcaggagctggttctagaagccgtggatctcctttgcgccttaaactatggacttgaaaccgacaacatgaagaatcttgtgcttaaactgagggccagcagtcacaatttgcagaactacatcagcagtcggagaaaaagccccgcatacgacgggaacacatcacgcaaggctccaaatgagtttttaacctctgtggtggagcttatcggcgccgcaaaggctcttctggcctggcttgaccgggccccgttcaccggaattacagactttagcgtgaccaaaaataagattatccagctatgtctagacctcacaactacggtgcagaaagactgtttcgtcgccgagatggaagataaggtgctgaccgttgttaaagtgctgaacggcatctgtgataaaaccatccggagtacgacggacccagtgatgtcccagtgtgcgtgtttggaggaggttcacttgcctaacatcaaaccgggagagggcctgggcatgtacatcaaatcaacttacgatggactgcatgtgatcacaggcaccaccgagaattccccagccgaccgttctcagaaaatccacgctggtgacgaagtgatccaggttaatcaacagaccgtggtgggatggcaattgaagaatttggttaagaaacttcgggaaaacccgaccggagtggtgctgctgctgaaaaaacgccctacaggaagcttcaacttcacgcctgcccccctgaaaaacctgcggtggaagcctccattggtccagacttctcctccccctgctacaacacaatcaccggagagcacaatggacacatctttaaagaaggagaaaagtgccattcttgacctttacattcctccgcctccagccgttccatactctccacgagatgaaaatggttcgttcgtatacggcggctcgtcaaagtgcaaacaacccctccccggaccaaaaggatccgagagccccaactctttcctggaccaggagagccggcgtaggcgttttacaatcgccgatagcgaccagttacccgggtacagtgtggagacaaatatccttccgaccaagatgcgcgagaagacacccagctatggcaagcccaggccgctgagcatgccagcagatggcaattggatgggcatcgtggatccatttgccaggcccaggggacacggcagaaagggagaggatgccttgtgtcgatacttctcaaatgagagaatcccccctattattgaagagtcctcctcccccccctacaggttcagcagacctaccaccgaacggcatcttgtgcggggagccgactatataaggggtagccgctgctacatcaatagtgacttgcattcgtctgccacaatcccattccaggaggagggaacaaaaaaaaaaagcgggtcttctgccaccaagtcttcctcaactgagccaagcctgttggttagttggtttacaaggctgaaactgcttacccactag

SEQ ID NO: 24167 - DNA, 708 bp, synthetic construct
  source 1..708: mol_type = other DNA; note = Synthetic coding sequence
atgcggagccgggtgctgtggggcgccgcccggtggctgtggccccgtcgtgccgttgggccagcaagaagacccctgtcatcaggctctccacctttggaggagttgtttactcgtggcggccctctgcggacatttcttgaaagacaggctgggagcgaagcacaccttaaagtccgcaggcccgaacttcttgcagtgatcaagctactcaacgaaaaggagagagaactccgggagaccgaacacctcctgcatgatgaaaacgaagatttgaggaaactggcggagaacgaaatcaccctgtgtcagaaagaaattactcagctgaagcaccagataatcttactgctggtgccttccgaagaaacggacgaaaacgacctcattctggaggttactgccggagtcgggggaggactgcgacatgcctctgcttcgataggcggatcggaagcatacaggcacatgaaatttgagggcggggttcaccgggtacaaagagttcctaaaacggagaagcagggccgagttcacaccagcaccatgactgttgctatactcccgcaacctaccgaaatcaacctcgttataaatcctaaagaccttcgcattgataccaaaagagcgtctggggcgggcggtcagcacgttaataccacggacagcgctgtcaggatcgtacatctgcctactgattggaaatag

SEQ ID NO: 24168 - DNA, 816 bp, synthetic construct
  source 1..816: mol_type = other DNA; note = Synthetic coding sequence
atgcggagccgggtgctgtggggcgccgcccggtggctgtggcccaggcgcgctgtgggtcccgcacgtcggcccttgtcttctggatctcctcctctggaagaacttttcacgcgaggaggtcccttaagaacatttctcgaacggcaagcgggatccgaagcgcacttaaaggttcgtagaccggagttactggccgtgattaaactcctgaatgagaaggaacgggagttacgggagactgagcacctgctgcatgacgagaatgaggacctaagaaagctagccgagaatgaaataaccctctgtcaaaaggaaattactcaactcaaacaccagatcatattgctcctggtcccgtctgaggaaaccgacgaaaatgacctgatcctggaggtcaccgctggcgtgggagggcaagaagcaatgttatttacttccgaaatcttcgacatgtaccaacagtacgccgcctttaagcgctggcactttgagaccctcgagtattttccttccgaactgggcggactgcgccacgcatccgcatctataggcggcagcgaggcataccgccatatgaaatttgaaggaggtgtccatcgagtccaacgcgtccccaaaaccgaaaaacagggcagggtgcacacatcgacaatgacagtggcaattctcccgcagccaacggaaattaatttagtcatcaatcccaaagacctaaggatagatactaaacgggcaagtggagcaggtggacagcacgtcaacaccacagattcagccgttaggatcgtgcaccttccgacagattggaagtag

SEQ ID NO: 24169 - DNA, 1143 bp, synthetic construct
  source 1..1143: mol_type = other DNA; note = Synthetic coding sequence
atgcggagccgggtgctgtggggcgccgcccggtggctgtggcccagacgcgcagtgggtccggctcggcggcctcttagcagcgggagcccaccattggaggagctcttcacccgtggcggtccattgcgcacctttctcgagcggcaggccggctctgaggcacacttgaaggtgcgccgccccgagctgttagctgtaataaagcttttgaacgagaaggaacgcgaactgcgcgaaacggagcatctactccatgacgagaacgaagacctgcggaaactggccgagaacgaaatcacactgtgccagaaggagattacccagctgaaacatcagatcattttgttgctagtcccatcagaggagactgatgagaacgatttgattcttgaggtaaccgcaggggtcggtggccaggaagccatgctgttcacaagcgagatttttgatatgtatcagcaatatgccgccttcaagcgatggcactttgagactctggaatactttccaagtgagctcggaggtctgagacacgccagcgccagcattggtggctccgaggcctatcgtcatatgaagtttgaaggaggcgtccatagagtgcaaagagtccctaaaaccgaaaagcaaggaagggtccatacctctaccatgactgtggcaatactgccccagcctacggagattaacctcgttatcaacccaaaagatctgcggattgataccaagcgggccagcggggcgggaggccagcacgtaaatacgacagacagcgctgtgcgcattgttcacctgcccaccggcgtggtgagtgagtgccagcaggagaggagccagctgaagaacaaagagctggctatgaccaagctccgggccaaactgtactcaatgcacttagaggaggaaataaacaagcgccagaatgcccggaaaattcaaatcggcagtaagggtcggtctgaaaaaatccgtacctacaatttcccacaaaaccgtgtgaccgatcatcgcataaataagaccctccacgatctggagacgttcatgcagggggattacctcctggacgagttggtgcagtcactgaaagagtatgcagactacgaaagtctcgtcgagatcatcagtcagaaagtgtag

SEQ ID NO: 24170 - DNA, 3561 bp, synthetic construct
  source 1..3561: mol_type = other DNA; note = Synthetic coding sequence
atgtgcgaggtgatgcccaccatcaacgagggcgaccggctgggcccaccccatggtgccgacgccgatgctaacttcgagcagctaatggtgaatatgctggatgagagagagaaactcctggaatccttgagggaaagccaagagactttggcagctacacagtcacggctgcaggacgctatacacgaacgcgatcagttgcagagacatttaaattctgccttaccacaggagtttgcaaccctgacgcgagagctgagcatgtgtcgcgagcagttgctggagcgggaggaggagatatctgagcttaaggcagaacgcaacaacacgaggctcctgttggagcatctggaatgcctcgtgtctagacatgaacgcagcctgaggatgacagttgtgaagcgccaggcgcagtcaccgagcggtgtgtctagcgaggtcgaagtcctgaaggccctcaagtctctgtttgagcaccacaaagctttggacgagaaagtgagagaaaggttacgcgcggcactcgaacgggtgaccacactcgaagaacagttggctggcgctcaccagcaagtgtccgccttacagcagggagccggcgtccgtgatggggcagcggaggaggaaggcacagtagagttggggccaaagcggctgtggaaagaggacacaggacgagtcgaggaactgcaggagttgttggagaagcagaacttcgagctgagtcaagcccgtgagcgattagtaactctcaccacaacagtgacagagcttgaggaagatttgggtactgctcggcgagacttgattaagtctgaggagctttctagcaaacaccagcgcgatctacgtgaggcgttggcgcagaaagaagatatggaggagcggattacaaccctggagaagcgctacctggccgcccagagagaagcaacctctattcatgacctgaatgacaaactcgagaatgagttggctaacaaagaaagcttacacaggcagtgtgaagaaaaagcgaggcacttacaagagttgctagaggtcgcagagcagaagttgcaacagactatgaggaaagctgaaaccctgccagaggtggaagctgagctggcccagaggatcgctgccctaacaaaagccgaagagcgccacggaaatattgaagagcacttgagacagctcgaaggacagcttgaggaaaagaatcaggagctagcgcgcgtgaggcaaagggagaaaatgaatgaggaccataacaaaagactgtccgacaccgtggatagactgctgtcagagagcaacgaacgccttcagctgcatctgaaggagagaatggccgccctggaagagaaaggtcgcctgagcgaagagatcgagaaactgcgccaagaggtcgaccagctgaaggggcgcggagggccttttgtggacggagttcattcacggagtcacatggggtccgctgccgacgtccgcttctcattaggcacaaccactcatgcaccccccggagtccatcgccgctactcagcgctacgcgaagagtcggcaaaagactgggaaacttctcctctgccaggcatgctggcccctgccgccgggcccgccttcgacagtgatcccgaaatttccgatgtcgatgaagacgaacctggggggctagtcggcagtgccgatgtagttagtccatccggacattcagacgcccagactctggctatgatgctgcaagagcagctggatgctataaatgaggaaatcagaatgatccaggaagaaaaggaatctactgagctcagagccgaggagatcgaaactagagtcacatctggttccatggaggctctaaatctcaaacagctcaggaagaggggatcaatcccaacctcactgaccgctttaagtctagcctccgcaagtcctccgctctccggcagatctacccccaagctcacctccaggagtgctgcccaagacttagaccggatgggagtgatgacactgccctcggacctgagaaagcaccgtcgtaagctgctcagtcctgtatcccgagaggaaaaccgtgaggacaaggcaacaatcaagtgtgagacctctcccccgagttcacccaggacgctcaggctggagaaactgggacaccctgcgctcagccaggaggagggcaaaagcgcattggaggaccagggatctaatccgtcgagttccaattcgtcccaggatagtttgcataagggtgccaaaagaaagggcatcaagtctagtatcggtcgtctcttcgggaaaaaagagaaaggccgattgatccagctatccagggatggggctaccggccatgttctattgactgatagcgaattttccatgcaagagcccatggtgccagctaagctgggtactcaggccgagaaagacaggaggcttaaaaagaagcaccaacttctcgaggacgcacgccggaaaggaatgccttttgcacagtgggacggccccacagtggtgtcttggttggaattatgggtcggtatgccggcttggtatgttgccgcatgcagagctaatgttaaatctggggccataatgagcgcactcagcgacacagagatccagcgggagattgggatttctaatgcactacatagacttaaactgcgcctcgccattcaggagatggtgtcgctcacgagcccctctgcaccccccacatcaagaacatcgtcaggcaatgtatgggtgactcatgaggagatggaaactctggagacatccactaaaactgacagcgaggaaggaagttgggcccaaactctcgcctacggagacatgaatcatgaatggatcgggaatgagtggctacccagtctggggcttccacagtacagaagctatttcatggagtgcctcgtagacgcccggatgctcgatcatttgacgaagaaggatctaagagttcacctgaaaatggtagattcgttccataggacctctctgcagtacgggatcatgtgtctgaaaagactcaattacgacagaaaggagttagagaagcgaagggaggagtctcaacatgagataaaagatgtactggtgtggacaaatgaccaggttgtgcactgggtgcagagtattggccttagggactatgctggcaatcttcatgagtctggagttcacggggcattattggcactcgacgaaaactttgatcataataccttagcactcatcttgcagattcccacccagaatacacaggctcggcaagtgatggagcgtgagttcaataacttgctcgccctcggcaccgaccgaaaactagacgatggagacgacaaggttttccggcgtgccccttcttggcgaaaacggttccgcccaagggaacatcacggccgcgggggaatgctttctgctagcgccgagactcttcctgctggcttcagagtgagtactctcggaacattgcaaccaccccccgccccccctaaaaagatcatgcctgaggcccattcacactacctgtacgggcacatgctatccgcatttagagattag

SEQ ID NO: 24171 - DNA, 1803 bp, synthetic construct
  source 1..1803: mol_type = other DNA; note = Synthetic coding sequence
atgagccgggtggccaagtaccggcggcaggtgagcgaggaccccgacattgactcactcctggagaccttgtcacctgaagaaatggaggaattggagaaggaacttgatgtggtagaccctgatgggtcagtgcctgtagggctgagacagaggaatcagactgaaaagcagtccacgggagtgtacaatagagaggcaatgctcaatttttgtgagaaggaaacaaagaagctgatgcagcgcgaaatgtcaatggacgagtccaagcaggtggagacgaagacagacgctaagaatggggaggagaggggacgcgatgcctctaaaaaagcactgggaccacggcgcgactccgatctcgggaaggagcccaagcgcggaggcctgaagaagtccttttcacgtgatagggatgaagctggcggtaagagtggcgagaagccgaaggaggaaaagatcatcaggggcattgacaaaggtagagtccgagctgcagtggacaaaaaggaggcaggaaaggacggccgaggggaagagagagccgtggctacgaagaaggaagaggagaaaaaaggttctgacagaaatactggtctctcacgtgataaggacaagaagagggaggagatgaaggaagttgctaaaaaggaggatgacgagaaggtcaagggcgagaggcgtaataccgacacacggaaagaaggggaaaagatgaaacgcgctggaggtaacacggatatgaagaaggaagatgagaaggtgaaacggggcaccggaaacaccgacactaagaaagatgacgagaaggtaaaaaaaaacgagcctttacacgaaaaggaggccaaggacgatagtaagacaaaaactcccgaaaaacaaactccaagcggccccaccaagccctccgagggacccgccaaggtcgaagaggaggccgccccaagtatctttgatgaaccactggagagggtgaagaataatgacccagagatgaccgaagtgaacgtgaacaactcagattgtattacaaatgagattcttgtgcgattcaccgaggcactggagttcaataccgttgttaagctctttgctctggccaacacacgtgccgatgatcatgtggcgtttgccatcgccatcatgttgaaagcaaataaaacgataacatccctgaacctggactccaatcatattactggtaaggggatcctggccatcttcagggctctgcttcaaaacaacacccttaccgagttaagattccataatcaaagacacatctgcggtggaaaaactgagatggagatagcaaaactcctgaaagagaatacaaccttgctaaaactaggctatcactttgaactggctggacctagaatgacggtcaccaacctcctgtcacgaaacatggacaaacagcgccaaaaacggctgcaagaacagcgtcaggctcaggaggccaagggggagaagaaggacctactcgaagtcccaaaggccggagcggtggcgaaaggttcgccaaaaccatctcctcaaccttcaccaaaaccatccccaaaaaattcaccaaagaagggcggcgcccctgccgcacccccaccaccgcctcctccactggcacctccactcataatggagaacttgaagaattcgctgtcgccggctacgcagaggaagatgggtgacaaagtgttaccagcccaggaaaagaactccagggatcagctgctggcagcgatccggtcctctaatctcaagcaactgaagaaagtcgaagtgccgaagttgctgcagtag

SEQ ID NO: 24172 - DNA, 828 bp, synthetic construct
  source 1..828: mol_type = other DNA; note = Synthetic coding sequence
atgggcacccggctgcccctggtgctgcggcagctgcggcggcccccccagcccccaggcccaccccggaggcttcgcgttccatgtcgtgcctccagtggcggcggcggcggcggtgggggcggacgtgaaggtttactgggtcagagaagacctcaggacgggcaggcccgatcgtcctgctctcccgggggacggacacccgcggcccgtgatagcattgtccgtgaagtgatacagaatagtaaggaggtactgtccctgctgcaggaaaagaacccggcattcaaaccagttctggccatcattcaggccggagatgataatctgatgcaagaaatcaatcagaatctcgctgaggaggccgggctgaacatcacccacatatgtctcccccctgacagctcggaggcagaaattatagacgaaatccttaaaatcaatgaagacactcgagtgcacggattggccctgcagatttctgagaatttgttctcaaataaagtcctcaacgctttgaaacctgagaaagacgtagacggcgttactgatattaacttaggtaagctggtgcgaggcgatgcccacgaatgttttgtctctcccgtggctaaagctgtcattgaactgctggagaaaagcggtgtaaacttggatggaaaaaaaatactggtcgttggggctcacggtagcttagaagctgccctgcagtgtctgttccaacgcaaggggagcatgacaatgagtatacaatggaagaccagacagctgcaaagcaagacagaatctcgctcagtcacaaggttagagtgccgacgagtgatttag

SEQ ID NO: 24173 - DNA, 999 bp, synthetic construct
  source 1..999: mol_type = other DNA; note = Synthetic coding sequence
tgaggccgggagggcctgctgggccagcggcggccccaggacggccaggccaggagcagctgctcccccggtgggcgaactcctgcggcacgagacagtattgtaagagaagtgatccaaaattcaaaggaggtacttagcctgcttcaggaaaaaaaccctgcatttaagccagttctggcaatcatccaggcaggggacgataatctcatgcaggaaattaatcagaatttggctgaagaggccggcctgaacattacccacatttgtctgccacctgactctagcgaggcagaaatcatcgatgagatcctgaaaataaatgaggatacccgcgtgcatgggctggctctacagatttctgagaatttgttttctaataaagtgctgaatgctctgaaacccgagaaggatgttgacggcgtaacggacatcaacttgggaaaactcgtcagaggtgatgcccatgaatgtttcgtctctccagtggccaaggccgtgattgaactactcgaaaaatctgtcggggtcaatttggatggcaaaaaaattttagtggttggggcccacggatcacttgaagccgcattgcagtgcctcttccagcgtaaggggtccatgacgatgtctatccaatggaaaactcgtcagttgcagagtaaactgcatgaggctgatatcgtggtcctcgggtcccctaagcctgaggagattccactgacgtggatccagccaggcaccacagtactcaactgctcccatgattttctgagcgggaaggtggggtgcggatctcctcgcatccactttggaggcctgatcgaggaggacgatgtgatcctgctcgccgcagccctgcggatccagaatatggtgtcctcaggtaggagatggttacgggaacagcagcaccggcgctggcggctccactgtttgaaattacagccactaagccctgtacctagcgacatcgaaatttctcggggccagactccctag

SEQ ID NO: 24174 - DNA, 2937 bp, synthetic construct
  source 1..2937: mol_type = other DNA; note = Synthetic coding sequence
atgggcacccggctgcccctggtgctgcggcagctgcggcggcccccgcagccccccggccctcctcgcagactgcgtgtgccatgtagagcatcgagcggcggtggcggaggtgggggtggcggccgtgaaggacttcttggacagcgccgaccacaggacggacaggcccgcagttcttgctctccgggcgggcgtacacccgccgcaagggactccattgtgagggaagtaattcagaattctaaggaagtcctctctctgcttcaagagaaaaacccagcttttaaacctgtgctagcaattattcaggccggcgacgacaatctgatgcaggaaatcaaccagaatctcgccgaagaagccggactcaacatcacccacatttgcctgcctcctgacagctccgaagctgagataattgacgaaatactaaaaatcaacgaggatacccgtgtgcacggcctcgccctgcagataagcgagaatctctttagtaacaaagttctaaacgccctaaaaccggagaaggatgtagacggggtcacggatataaatttgggaaaactcgtgaggggggacgcacacgaatgctttgtctcaccagtggccaaggctgtcatcgagttactggagaagagcggggtgaatctggacggcaaaaagatcctggtggtgggtgctcacggctcgctcgaggcagctttgcagtgcctgttccaaaggaagggatccatgactatgtctatccagtggaaaacacgccaactgcagagtaaacttcatgaagccgacatcgttgtattggggtcccctaagccggaggagatccccctgacttggatacagcccggaacaaccgtgctaaattgctctcatgattttttgtccgggaaagtggggtgcgggagtcccaggattcactttggcggtctgattgaggaggacgacgttattctgttggccgccgccctcagaatccagaacatggtcagctcgggaagacggtggttgcgtgagcagcaacaccgaaggtggaggctacactgcctcaagcttcagccgctgtcccctgttccctctgatatcgaaatatcaagaggccagacacccaaggctgtggacgtccttgcgaaagagatagggctgctagcggatgaaattgagatctacggaaagagtaaggccaaggttcggctcagcgttttagaaaggttgaaagaccaggctgatggtaaatacgtgctcgtagccggtattacgccaacaccgctaggggaggggaagagtaccgtgactattggtctggtgcaagctcttaccgctcacctgaacgtcaactcctttgcctgtttgcgacaaccttcccaaggtcctacattcggagtgaagggtggagcagcggggggaggatatgcccaggtgatacctatggaggagtttaacttacacctgacaggcgatattcacgctattacggcagcaaataacttgctggccgccgcaatcgataccaggatcctgcacgaaaatacccagaccgacaaagccttgtacaaccgtttggttcctctagtgaacggcgtgagagagttctcagagattcagctggcccggctcaagaaactaggaattaacaagaccgatccctctaccctgactgaagaggaagtctccaaattcgcacgactggatattgatccttccaccatcacctggcagagggtgctggacacaaatgaccgatttctgaggaaaatcactataggccagggtaatactgagaaaggccattacaggcaagcccagtttgatatcgctgtggccagcgagattatggctgtgcttgccctaaccgattctcttgccgatatgaaagcccgattgggcagaatggtcgtagcctcagataaaagcggacaaccagtcactgccgatgatctaggagtaacaggtgctctcacagtgctgatgaaggacgccatcaagcccaatctgatgcaaaccttggaagggaccccggttttcgtgcacgcaggcccctttgccaacatcgcacacgggaacagcagcgtactggctgacaagattgcccttaagttggtgggagaagagggattcgttgtcaccgaagccggtttcggagccgacatcgggatggagaagttcttcaacataaaatgtagggcaagcggtttggtgcctaatgttgtggttctggtggcaaccgtgagggctttaaaaatgcacggcggagggcccagtgtcactgctggggtgcctctcaagaaagaatacacggaggagaacattcagctggtagccgatggctgctgtaatctgcagaagcagatccagatcacccaactgtttggggtgccggtggtggttgcactgaacgtgtttaaaacagacactagggcagaaatcgatctggtctgtgagttagctaagagggctggggccttcgatgcagttccgtgttaccactggtccgtgggagggaagggaagtgtggacctggctcgtgcagtgagagaggctgcgtctaagcggagcagatttcagttcctctacgatgtgcaggtccccattgttgacaagatccgcactatagcccaagccgtttatggtgccaaagacattgagctttcccccgaagcacaagctaaaatcgaccggtacacccagcaaggatttggaaacttgcccatctgcatggctaaaacacacctgtctctctcccaccaaccagataagaaaggcgttcccagagatttcatacttcctatcagtgatgtgcgggccagcatcggggcagggttcatatacccgctcgttggtactatgagcactatgcctgggctgcctacccgtccttgcttttatgatatagatcttgacactgagactgaacaggtcaagggcctcttttag

SEQ ID NO: 24175 - DNA, 408 bp, synthetic construct
  source 1..408: mol_type = other DNA; note = Synthetic coding sequence
atgatccccaacggctacctgatgttcgaggacgagaacttcatcgaatcgagtgtagctaagctaaacgctcttcgaaagtccggtcaattctgcgatgtccggctccaggtgtgtggccacgagatgctggcccatcgagctgttctagcttgttgctcgccctacctgtttgaaatctttaatagtgatagcgaccctcacggcattagccatgtgaaattcgatgacctcaatcctgaagccgtggaggtcctgcttaactatgcctatacagcacagctaaaagccgacaaggaactggttaaagacgtctactcggctgcaaaaaagctgaagatggatcgggtgaagcagcaccttctctacttctgtctccactccacaagcacttcctcccttttatag

SEQ ID NO: 24176 - DNA, 1929 bp, synthetic construct
  source 1..1929: mol_type = other DNA; note = Synthetic coding sequence
atgatccccaacggctacctgatgttcgaggacgagaacttcatcgagagctctgtggctaagctgaacgcgcttagaaaatccggccaattttgtgatgtgcgtcttcaggtctgtgggcacgaaatgctggcgcatcgggctgtgctggcatgctgttccccttacctctttgaaatctttaactccgactcagacccccatggaatttcccacgtaaaattcgacgatctgaaccccgaagccgtggaggtgctgcttaactatgcctataccgcccagttgaaagcggataaggaattagtcaaagatgtgtactctgctgcaaaaaaactgaagatggaccgcgttaagcaagtgtgcggcgactacctgctatctcggatggatgtgaccagttgcatcagttaccgcaatttcgcttcatgtatgggcgacagcaggttgctgaacaaggtcgatgcttatatacaggagcatcttctgcagattagcgaagaggaggaatttctcaaactgccccgtctgaagttggaagtgatgttggaagacaacgtatgtctgccctctaatgggaaactatacacgaaagtgatcaattgggtgcagcgcagcatctgggagaatggcgactcattggaggaactaatggaagaagtgcagacactgtattattctgccgaccataagctgttggacggaaacttgctggatggccaagccgaagtatttgggagcgatgatgatcacattcagttcgtccagaagaagccccctagggagaacggtcacaagcagatttcgagttcatctacaggatgtctgtcatcaccaaatgcaacagtgcaaagtccgaagcatgaatggaaaatagtggcatcagagaagacttcaaacaacacgtacctgtgcctcgctgtattagacggaatcttttgcgtaatttttctgcacggtcgcaacagcccacagagttcacccactagcacgcctaaattgtctaaatctttaagttttgaaatgcaacaggacgagctgattgagaaaccaatgtcaccaatgcaatacgcgagatccggccttggcacagcagagatgaatggcaagctcatagcagccggaggctacaacagggaagagtgcttacggactgtagaatgctataacccccataccgaccactggtcctttctggctcccatgaggaccccacgcgcacggttccagatggctgttttaatgggccagctgtacgtggtgggcggtagcaatggacattctgacgacctatcctgcggagagatgtatgactctaacatcgacgattggatccccgtgccagaactgcgcaccaatcggtgcaatgccggcgtgtgtgcccttaatgggaagctctacattgtggggggttctgacccctacggtcagaaaggactgaaaaactgcgacgtgtttgatcctgtcaccaagctctggacttcttgcgccccattgaatatcaggcgccatcagtccgccgtgtgtgaattgggaggatatctatacatcatcggcggtgccgagagctggaactgcctgaacaccgtggagcggtacaacccggagaataacacctggacgctgatagcacctatgaatgttgcccgccgtggggcgggcgtggcagttctcaacgggaagctgttcgtatgcgggggcttcgatggttctcacgcaattagctgcgtagagatgtacgaccccactcggaacgaatggaagatgatgggcaatatgacttcacccaggtccaatgctggaatcgctaccgtggggaatacaatatatgcagtcggagggtttgacggcaatgagttcctgaacacagttgaggtctacaacctcgagtccaatgagtggagcccgtatactaagatatttcaattctag

SEQ ID NO: 24177 - DNA, 408 bp, synthetic construct
  source 1..408: mol_type = other DNA; note = Synthetic coding sequence
atgagcaagaacaccgtgagcagcgcccggttccggaaggtggacgttgatgagtatgatgagaacaaatttgttgatgaggaagacgggggtgatggtcaagctggtcccgacgagggcgaggtggacagctgtttgcgacaggggaatatgacagctgctttgcaggcagcccttaagaatccccccattaatacaaaaagccaggctgtgaaagatcgggccggtagcatagttctcaaggtgctaattagctttaaagcgaacgatatcgagaaggccgtacagtctttagacaaaaacggcgtcgacctgctgatgaagtacatctataagggatttgaatcgccctctgacaatagttctgccatgctgctgcaatggcacgaaaaagtgcctctggtgtag

SEQ ID NO: 24178 - DNA, 849 bp, synthetic construct
  source 1..849: mol_type = other DNA; note = Synthetic coding sequence
atggccagcagcttcctgcccgccggcgccatcaccggcgacagcggaggcgaactctcatctggagacgattccggggaagtcgagttcccacactctccagaaatcgaagaaacatcatgtctggctgagctgttcgagaaggccgccgcgcacctacagggcttaattcaggtcgctagcagggagcagctgttgtacctgtacgcaaggtacaagcaggtgaaagtcggtaactgtaacacccccaagccatccttcttcgattttgaaggcaaacagaagtgggaagcctggaaagctttaggtgactctagccctagccaggccatgcaagagtatattgccgtggttaaaaagctggacccgggctggaacccccagataccagaaaaaaaaggtaaggaagccaatacaggattcggtggaccggtcattagttccttgtaccatgaagaaaccattcgtgaagaagataagaacatcttcgactactgtagagagaacaacatagaccacatcactaaagctatcaagagtaagaatgtggacgtgaatgtcaaggatgaggaaggaagagcccttctgcactgggcgtgtgatcggggacacaaggagctggtgactgtactgttgcagcatcgcgccgatattaattgccaggataatgagggccagaccgctctgcactatgcctcagcctgcgagtttttggacatcgtggaactgctcctgcagagcggggctgaccccactctccgggaccaggacggctgcctccctgaggaagtcactggttgcaagacggtctctttggttctgcaaagacataccacagggaaggcctag

SEQ ID NO: 24179 - DNA, 9354 bp, synthetic construct
  source 1..9354: mol_type = other DNA; note = Synthetic coding sequence
atgcggagcagcaagagcaaggaggtgcccctgcccaacccccggaactcccagtctaaggacacagtgcaggccgacatcactacgagttgggacgctctctctcaaacgaaggctgcccttaggcacatcgaaaacaaactagaggtggctcctacttccacagcagtctgcgacagtgttatggacacaaagaaatcctctacatcagcaacacgtaagattagcaggaaagacggccggtacctggacgattcgtgggtcaacgctcccatatccaagtcgacgaagagcagaaaggaaaaatcacgcagccctttgcgggccacaacactggagagcaacgtgaaaaagaacaatcgcgtagagttccgggagcctcttgtgtcctaccgagaaattcacggagccccaagtaattttagttccagccatctggaatccaagcacgtttactgcgtggatgtcaatgaggaaaagacagaaagcggtaactggatgattgggtccagggaagagcggaacattcgtagctgcgacttcgagagtagtcaaagcagtgtcatcaacgacacggttgtccgcttccttaacgaccggccagccatcgatgcactgcagaactcagaatgcctcatccgtatgggtgcatccatgcgaacggaagaggagatgcccaacaggactaagggctccgagaataatttaaagttgtccgttaataatatggcccatgatactgaccctaaggctctgcggttgacggactcctctccttcaagcacttctacatctaactcccagcggttggatatcctgaaacggaggcagcacgacgtcaagctggaaaagcttaaagagaggatcagaaagcagtgggagcacagtgaagaaacaaatggcaggggacaaaaactgggtcacattgatcatcctgtcatggtggtgaacgtcgataatagcgtgacagctaaggtaagaaaggtggcaaccgccccacccgctcccgcctacaaaggctttaacccctcggagacgaaaatacgtacccctgacggtaaggtgtggcaggaggcagagtttcaaaacatgtcaagggaactttacagggatctggctctccacttcgccgacgacatttccattaaagagaagcctgccgaaaagtctaaggaaaagaaagtggtgaagcctgtccggaaagtccagaaagtggcgcagctctcgagcactgaatgcagaactggttctagccacctaatctcaacgtcctcgtggagggatggccaaaagttagtcaaaaaaatcctgggacccgcccccagaatggagcccaaagagcaacgcaccgcgtctagcgatcgcggtggtcgagagcgaaccgccaaatctggtggccacattgggagagccgaatctgatcctagactggacgttctgcacaggcatctgcagagaaactcggagaggtcaagaagcaagtccagatccgagaataatattaagaaattagccagttctctgcccgacaacaagcaggaggaaaacacagcacttaataaggatttcttgccgatcgagatcagaggcatattagacgacttgcaactggactcaacagcgcataccgcaaaacaggacacagtggagttgcagaatcagaagagcagtgcccctgtgcacgcaccaaggagccacagcccagtgaagcgcaagcccgataagattacagccaatgaagatccccccgtgatcagcaagcgtagacattacgatacggatgaggtgaggcagtatattgtgagacagcaggaagaacgaaagaggaagcagaacgaggagaagaaggcgcagaaagaagcaacagagcagaagaacaagcgcctgcaggagctatataggaaacagaaagaggcatttaccaaggtgaagaatgtgcccccatcggagccaagcgccactaggcggctccaggaaacctactctaagctgctcctggagaaaaccttgctggaggaacccagccatcagcacgtgacgcaggagacccaggctaaaccaggataccagccatctggcgagagtgataaggaaaataaggtgcaagagagacctccatccgccagtagtagctcagacatgagcctgtcggaacccccacagccgctcgcgcggaaagacctaatggaatctacctggatgcaacccgagcgcttgtctcctcaggtgcaccactcacagcctcagccgttcgctgggaccgctggatccttgctttctcacttgctgagcttggaacacgtgggaatcctgcacaaagatttcgagtccatcctgccaactcgcaaaaatcacaacatggcgtcacgccccctaacattcactccacaaccgtacgtgactagccccgccgcatataccgatgctcttctgaagcccagcgcttcacagtacaagagcaaactcgatcgcattgaggcacttaaggccacagccgcttccctctccagcagaatcgagtctgaagctaaaaagctggccggagcaagcatcaattacggttctgcttggaacactgagtatgatgtgcagcaggccccccaggaggacggaccatggaccaaggccgttacacccccagtgaaagatgacaatgaggatgtgttcagtgcccggattcagaagatgctgggctcctgcgtcagtcacgctacttttgatgacgatctgccaggcgtcgggaacttaagtgagtttaaaaaacttcccgagatgatcaggccacagtctgccattagttccttccgggtccggagtcccggccctaaacccgaaggcctgctcgctcagctgtgtaagagacagacggacagctctagctccgatatgcaggcctgttcacaggacaaggcgaaaatctcactgggttcctctattgacagcgtgagcgagggaccgctcctatctgaaggcagtctgtctgaagaggaaggtgaccaggatggacaaccgctgcttaaggtggccgagattcttaaagagaaagaattttgccccggggagcgtaatagctacgaacctattaaggaattccagaaggaggcggagaagtttctgccacttttcggccatattggtggaacacagagcaaaggaccatgggaggagctcgccaagggctcaccccacagtgtgataaacatcttcaccaaaagctaccaactgtacgggaaaggctttgaggacaaactggatcgggggacgagcacttcccgccccttgaacgccactgctacccccctatctggcgtgtcatatgaagacgattttgtgagcagtccagggaccgggacttcaacggagaagaagagcacactggagccacacagtaccctgtccccccaggaggatcacagcaatcggaaatccgcgtatgaccctagttctgtggatgtgaccagtcaacattcctctggggcacagagcgctgcatcttcccggtcttcaacaagctcaaagggaaagaaaggcaagaaagagaagacagagtggttggatagctttactggcaacgttcagaatagtctgctagacgaagagaaggctgaacgcgggagccaccagggcaagaaaagtgggacctcctcaaagctgtccgttaaggatttcgaacagaccctggacacggatagtactcttgaagacctatctggccatagcgtgagcgtgtcttctgataaagggagatcccagaaaactcctacctcccctctgtccccctcttcccagaaatctttacaattcgatgtcgcaggcacttcttcggagcgaagtaagagctccgtcatgcctcctacaatcaccggcttcaagccgaacgctcctttgacggatctgaatcctgcagccagtcggacaactacagagaatatggccccgatcccaggctccaaacggttttcccctgcaggcctgcatcacaggatggccgccgaactgtcctatctgaacgcgattgaagaaagcgtgaggcagctgtccgacgtagagagagtaagggggatttcactggcacaacaagaaagcgtgtcactggctcagattattaaagcccagcaacagagacatgagcgcgacctcgccctgttaaagttaaaggccgagcaggaagcattagagagtcagcggcagctggaggaaactcgcaacaaggctgctcaggtgcatgctgaatcactgcaacaggttgtacaaagtcagcgggaggttaccgaggttcttcaggaagctacctgcaaaatcgcagctcagcagagcgaaactgcccggttaaccaccgatgctgcccggcagatctgcgaaatggcggaattgacaaggacgcacatttccgatgctgtcgtggcctcaggggctcctctggccatcctgtatgaccaccagcggcagcaccttcctgactttgtgaaacaacttagaactcgtacggagaccgatcgaaaatcccctagcgtgagcctgtcccagtccaaggaaggcactttagattcaaagcaccagaagtactcagcttcctacgatagctacagcgagtctagcggctacaagaaccacgaccgccgcagcagtagcggatcatcccggcaggagtccccctcagtgccctcctgcaaagagaatgaaaagaagctgaatggtgaaaaaatcgaatctagcattgacgagcaggtccagacagccgccgacgactctcttagaagtgattcagtaccgagcctcccggacgaaaaagattccacctctattgccaccgagtacagtttgaaattcgatgaaagcatgactgaggatgagatcgaggaacagagcttccgttctttactgccatctgagagccaccggcgctttaatatggaaaagcggagaggccaccatgacgattccgacgaggaggcaagtccagagaagacaaccttgagtaccgccaaagaattgaacatgccttttagtggcgggcaggatagctttagtaagttcaccatggagatggtgaggcaatatatgaaggaagaagagatgcgcgccgcccaccagtcttcacttttaagacttagagaaaaggcactaaaggagaagactaaggccgagctcgcctggctggagcatcagaaaaagcatcttcgggacaagggagaggatgacaaaatgcctccactacgtaaaaagcaaaggggcctgcttcttcggctccagcaggaaaaagctgagatcaaacgcttgcaagaagcgaacaaggccgcacgcaaggagagacagctgatcctcaagcagcaggaagagattgagaagattagacaaaccacgataaagctccaggaaaagctaaagtccgcaggagagtctaagcttgattctcatagcgacgacgatactaaggataacaaagcgacctcaccaggcccgaccgacttagaaacacgatctccctctcccatcagcatttcaagcagtgagacgtcttctattatgcaaaaattaaagaagatgagaagcaggatggacgagaagttcttgacaaagagggagcaaaaactgatgcagcgccgacagcatgcagaagagctactggagtggaaacggagactcgacgctgaagaggccgagatccgacagatggagaagcaggccttagcggcctgggataaggagctgataaagccaaagacccccaaaaaggagctggaggaccaacgcacagagcaaaaggaaatcgctagcgaagaggaaagcccagtgcctctttacagccatctcaacagcgagtccagtattcctgaagaacttgggagcccagccgtcgagtacgtgcccagtgagagtatcggccaggagcagcctggctcgcccgatcattccatactgacggaggagatgatctgtagccaagagctggaaagcagcacttccccctcgaaacatagcctgcccaaaagctgcacatcagtgtccaaacaggagtcttccaagggctctcacaggacagggggacagtgtcatcttccaatcaagagccaccagcactgttacagctggagcgatgagtcattatcaatgacgcaatcagaaactacaagcgatcagtcagacatcgaggggcgtatccgcgcacttaaagacgagctgcggaagcgcaagtctgtggtcaatcagctcaagaaagaacaaaaaaaacggcagaaagaacggttgaaagctcaggaggcctctctgatcaaacagctggaaagctatgacgagtttattaagaaaactgaggctgagctatctcaagacctggagacctcgcccaccgccaagccccaaattaagaccctgtcctccgcatccgaaaagcctaagattaagccccttactcctctgcaccggtctgagaccgccaagaattggaagtctctgacagagtcagaacggagccggggttcacttgagtcgatcgctgaacatgtggacgcctccttgtctggttcagagaggtctgtttcagagaggtccctgagcgcttatgccaagcgggttaacgagtgggacagcagaactgaggacttccagaccccatcgcccgttctgaggagtagtaggaaaatccgcgaagagtcaggtgacagcctcgagaacgtcccggcgctgcacctgctcaaagagctgaatgccacctcaaggatcctggatatgtccgatggcaaagttggggaaagttctaaaaagtctgagattaaggagattgagtacactaagttaaaaaagtccaaaatcgaggatgcttttagtaaggaggggaagagtgacgtcctgctaaaattagtgctggaacagggcgactcgagtgagatcttgtccaagaaagatctgccacttgatagtgaaaatgtacaaaaagatctggtcggcttggcaattgaaaatctacacaagtccgaggaaatgctcaaagaacggcagtctgaccaggacatgaatcactctcctaatatacagtctggcaaagacatccacgagcagaaaaacaccaaagagaaggatctgagttggtccgagcacctcttcgcgcccaaagagatcccctacagtgaggattttgaggtgtctagttttaagaaggagatttctgccgagctatataaggatgattttgaagtgagttcgctgctgagcctgcgaaaagattctcagagctgcagggacaaacctcagcccatgaggagtagtacctccggagccacatctttcgggtccaatgaagaaattagcgaatgtctgagtgaaaagagcctaagcatccactctaacgtacatagcgacaggctgctggagctgaagtctcctactgagctgatgaaatctaaggagcggtccgacgtagagcacgagcagcaggtcactgagagcccctccctggcctctgtgccgaccgcagacgaactgttcgattttcacataggtgacagggtgctgatcggcaatgtgcagccgggaatattacgatttaaaggagaaacaagttttgcgaaaggtttttgggccggagtggagcttgacaaaccagaagggaacaacaatgggacctacgacggcatagcgtatttcgagtgcaaggaaaaacacgggatcttcgcccccccccagaagataagtcacatccccgaaaattttgacgactacgtcgacataaatgaagacgaggattgctatagtgatgaaagataccagtgctacaatcaggagcagaatgacaccgaaggcccgaaagacagggagaaggacgtgtccgagtacttttatgaaaaatccctgccctcagtgaacgacatcgaggcttcggtgaacaggtccagaagcttaaagattgaaactgataacgtacaggacatctccggagtactggaagcgcatgtgcaccaacaaagctctgtggactcccagataagctccaaagagaacaaggatcttatttccgatgccactgagaaggtgtctatagcagccgaggatgataccctggataacactttttccgaagagttggagaaacagcaacagtttaccgaggaagaagacaatttgtatgccgaagcaagcgagaaactgtgtacgcctctcctggaccttctgacaagagaaaagaatcagctggaggcccagctgaagtcctccctcaacgaagaaaaaaagtctaagcagcagttagagaaaatttctctgctgaccgatagtctgcttaaagtttttgttaaggacaccgttaatcagctgcagcagatcaagaaaactagggacgagaagatccagctgagtaaccaggaactcctcggagacgaccaaaaaaaggtgacccctcaagacctgtcccaaaatgttgaggagcaaagcccatcgatttctgggtgttttttatcctcagaactggaagatgaaaaagaggaaatctccagcccggacatgtgccctcgccccgagtcgcctgttttcggtgcctccgggcaggaggagctggcaaagcggctggccgagcttgagctctctagggagttcctgtcagcattaggagacgatcaggactggttcgatgaagatttcgggctcagcagtagtcacaagatccagaaaaacaaagctgaagaaacaatcgtgccactcatggccgagcccaagagagtgacccagcagccttgtgagaccctcctcgccgttccacacaccgcagaggaggtggagatcctggttcataatgccgcagaggagttgtggaagtggaaggagctagggcatgacctgcactccattagcatcccaaccaaactgctgggttgtgccagcaagggacttgatatcgaaagtacatcgaaaagagtttataagcaggccgtgttcgacctcaccaaagagatattcgaggaaatatttgccgaagaccccaacttgaatcagcctgtctggatgaaaccctgtagaattaattcttcctattttcgtcgcgtaaaaaatcctaataatctggatgagatcaaatctttcattgcgagtgaagttctgaaactgttttcgctcaaaaaggagccaaatcacaaaactgactggcagaaaatgatgaagttcgggcgcaagaaaagggaccgggttgaccacatcctggtgcaggaactgcatgaggaggaggctcagtgggtgaactacgatgaggacgagctatgtgtgaagatgcagcttgccgacggcatttttgaaaccctcattaaggacactattgacgtgcttaaccaaatctcagaaaaacaggggcgtatgctactcgtttag

SEQ ID NO: 24180 - DNA, 2946 bp, synthetic construct
  source 1..2946: mol_type = other DNA; note = Synthetic coding sequence
atgagcgagcaggagcggatccaggagtgcctgcggaaggagatccggtccctgctgatctccaccaaagatgggctcagtccacaggaactagagaaggaatacctgcttatggtcgggaaccacctgcctctacggatactgggatatcgatccaccatggagctggtcttggacatgcccgatgtggtacgggtgtgtccaggggctggggggactgtgatccttaaagcaatcccggacgaatccactaagggtattgccagcctggtggcaaagcagcggagttcccacaagttgaggaacagtatgcacaaagggcggcctagcatctattccgggccccgcagccataggagggtcccttatcgcggacgagtagctccaatcctgccagcagttgttaagtctgagctcaaggacctcttggccctttctccagtgttactgtcagactttgagaaggcattcgcaaagagattcgggaggagcttccagtatatgcagtacggttttctctcaatgttcgaagtcttgaacgccgccagcgatgtgatttcagttgaacaaacacgcgcaggaagcctgctcatgctgaaaaaaagtgtgacagaagagaaaccccgagggtgcccggctggaaagatctttacgcagccattcagaatgaagcagggatcctactccacaggttttcctgtcgctaagccctgtttttcacagcctactagcaacatggagccccccaagcagataatgtctatggaaaaaacctccaaactgaacgtggtggaaacatccagactgaaccacactgaaaaacttaaccagctggagaatacattcaaatcagttatcgcacagatcggtcccggaggcacaatttcgagtgagctgaaacacaagataaagttcgtggtgtccaagttccccgaggggttgttcattagtaaactgctaggcgaatacgaggtcattttcaaagaacaactctccccgaagaaactgggtttccttaacgtaactgaattagtgggggctctatctgacattctccacgtggagttccgtaagggacaccaggatcttctggtctttgatgccgataagaaaccactgccccccgtacagtccgacaaaaaaatcgaggctaaagcttgcgtgagcagtcctccacggaattctctcagcacagcggctgtgaaagaaacagtctggaactgcccgtctaaaaaacaaaaggagcctcagcagaagatttgtaagaaacccaacctggtcgtgaaaccattgcaacttcaggtggaaacaaataagtcagaactgaacctagctatggcgaatcacgatatcccccctgatgccgtcccaaataagaaactgtgccgtttaccaccgctcgatacaagttccctcattggagtgtttgtcgaatatattatttctccaagtcagttctatatccggatctactcgagagactccagtgaactgctcgaggacatgatgattgagatgcggcgctgctattccaatcaactggtcagcgatcggtacgtgatgcctgaatgcttcatccagcccggccatctttgttgcgtacgaatttcggaagataaatggtggtaccgggtgatcatccaccgagtgctcgaaaagcaggaagtcgaagtgttctacccggatttcgggaacatcggcatcgtgcaaaagagcagcttgcgattcctgaaatgttgctacaccaagttacccgcccaggccattccttgttccttagcatgggttagaccagtagaggaacactggacatccaaggcaatccttcaatttcaaaaattatgcggactgaaaccgctggtaggagtggttgatgagtacgtagatggcatattgaacatcttcttgtgtgacacctcctctaatgaagacgtatatttccaccacgtgctcagaacagaaggccacgctatcgtctgcagggaaaacatctctagtaaaggtttctctgagctgaacccactcgccctgtacaccacttcaagtggcggcccagaggatatagtgttaacggaattaggctacccctcccagcagcattacttcaacgaagatagaaagatcagtccacagagtaaagagtcagaattaaggatcctcgatgaaatccccactgggatgccctgtctggagagcgtcacaataggcgatgatatttgggatgagaattggctcccattgcaagccaagatgggtaaaggcggagacgccgccagccatttatttacagcatcactaggggggaaaaaccaatatagctcttgtaaagaaatgccccagaaggattggtgcttctcaaccccaaaggacacttgggatgactcatggcagccttccggactcgttaatggaacaaaggtcgaggttcataaaccagaggtcctcggggcccaggagaagaacactggcacaaaccggacacagaaacaactagatatcaacggctcatccgacagctcaaccctgccaaagctggaggagttttgtacctcattgacccaatctgaacagtcagcagacgggtcccaatctgagcccaacaatagtcagactcaacccaagcaaatccagctgtccactgcggcgccttgtagcactaccgctgttgacgacagcgcagaaaagccttctgggtccgtggaaagctcccctgagatcctcaaaaatgaagactttagcagctctcgggccatcaccctgtacaaagacaaacgacaggagtccgtggatcagttgagcctgatcttgtcatacgagtgccagattagtcagaagctttatattcctagatctactgctacggccgctctgggcgcagcggcccgcctggcaaccagccgttcactgttacattggtatccctcagtgaagaggatggaggcctag

SEQ ID NO: 24181 - DNA, 648 bp, synthetic construct
  source 1..648: mol_type = other DNA; note = Synthetic coding sequence
atgagcgccaagcgggccgagctgaagaagacccacctggtgaaggaaaggcactgttggaccagtaaaaattacaaggctgtgtgtctggagcttaagcccgagccgaccaaaacattcgattataaagccgttaagcaggaagggcgattcaccaaggctggggtgacccaggatcttaaaaacgagttgcgggaagtgcgcgaagaacttaaggagaaaatggaagagatcaagcagattaaggacctgatggataaggacttcgacaaactccatgagttcgtggaaatcatgaaagagatgcaaaaagatatggatgaaaagatggacattttaatcaatactcagaagaactacaaactcccattgagaagagcacctaaggagcagcaggagctgcgcctgatgggcaagacccatcgcgagccccagctgcggcccaaaaagatggacggagcttccggagtcaatggcgccccatgtgctctgcacaagaaaacgatggcgccccaaaaaactaagcaggggtctttggatccattgcaccactgtggtacctgctgcgagaagtgcttactgtgtgccctgaagaataactacaaccggggtatctatgcagccgtcggcctcctggacctctggtag

SEQ ID NO: 24182 - DNA, 606 bp, synthetic construct
  source 1..606: mol_type = other DNA; note = Synthetic coding sequence
atgagcgccaagcgggccgagctgaagaagacccacctgagcaagaattataaggctgtatgcctggagcttaaacctgagcccacaaagaccttcgattataaagcagtcaagcaggaaggcagatttacaaaggcaggagtcacacaggaccttaaaaacgagctgcgcgaggtcagggaggaattgaaagagaagatggaggagattaaacagattaaagacctgatggacaaagactttgataaactccatgagtttgtggaaatcatgaaagagatgcagaaagatatggatgaaaaaatggacatcctcattaatacccagaagaattacaaactcccacttaggagagcgccgaaggaacagcaggaattgcgtctgatgggcaaaacccacagggagccacagctgagacctaagaaaatggatggcgcatctggggtgaatggggctccttgcgcacttcacaagaaaacaatggcaccacagaagacaaagcagggaagtttggatcctctccatcattgcgggacctgctgtgtttccgagaccctgcctgagcccagtaccggggccagacccctcgcccccgccccctggtag

SEQ ID NO: 24183 - DNA, 300 bp, synthetic construct
  source 1..300: mol_type = other DNA; note = Synthetic coding sequence
atgagcgccaagcgggccgagctgaagaagacccacctgagcaagaattataaggcagtatgcctggagctgaagcccgaacccacgaaggtgcggtcccctttcgaggccatgcaggctgcgaggcctgaaattcacggtgaggtgacccggtcacagggaagttttgccgatccaagcggacaggatctctcccagacattcgattataaagccgtcaagcaggaaggcagattcactaaggcaggtcgcaccccccgactgttggaggaactgtcgctgctgcttctccctttgtag

SEQ ID NO: 24184 - DNA, 639 bp, synthetic construct
  source 1..639: mol_type = other DNA; note = Synthetic coding sequence
atgagcgccaagcgggccgagctgaagaagacccacctgagcaagaactacaaagccgtgtgccttgaattgaagcccgaacctacaaagaccttcgactacaaagcagtgaaacaggaggggagatttacaaaggctggggtgacacaggatctcaagaatgagctgagagaagtgcgggaggaactgaaagaaaagatggaggaaattaaacagataaaggatttaatggacaaggacttcgacaagttgcacgaattcgtggagatcatgaaagagatgcaaaaggatatggacgagaagatggatattctgataaacacccagaagaattataagctgcctctgcggagagcccctaaggaacagcaggagctacgccttatgggcaaaacccatagggagcctcagcttagacccaagaagatggacggagcaagtggagtcaacggtgctccttgcgcactgcacaaaaaaacaatggctccacaaaagactaagcagggtagcctggatcccctccatcactgcggcacgtgctgtgaaaagtgccttttatgcgccctcaagaacaattacaatcgagcacagctgcagaacctgccggcggtgccaatccatcaccttcaggccccatag

SEQ ID NO: 24185 - DNA, 402 bp, synthetic construct
  source 1..402: mol_type = other DNA; note = Synthetic coding sequence
tgatacgagctgcgggaggagcacctggacaagatcttcaagcacagggaactgcaacagaaattggttgatgccaaattagagcaggcccaggagatgatgaaggaagccgaagaacgccacaagcgggaaaaagaatacctccttaatcaggccgcagagtggaagcttcaggctaaggtccttaaggaacaggaaacagtactgcaggcccaggttagaccaggcggaagagggatgggtgtgctgtcctctctatcccccgacaaaaaagctggggctaagggcggacaacaaaaatcctcatatgtcgccggggacggcggaatggggatcggtaacgaggaacagctgcacatctactcctacttccaagtaaagataaaggctcagtactattag

SEQ ID NO: 24186 - DNA, 687 bp, synthetic construct
  source 1..687: mol_type = other DNA; note = Synthetic coding sequence
atggccagcgaggagctgcagaaggacctggaggaggtgaaggtgctgctggaaaaagccacccggaagcgggtgcgagatgcactgactgctgaaaagtcaaaaatcgaaaccgagatcaagaataaaatgcagcaaaaatctcagaaaaaagctgagctattggataacgaaaaaccggccgctgttgttgcaccaatcactactggctatacagtcaaaataagtaattacggctgggaccaaagtgacaagttcgtgaagatttacattaccttgactggcgtgcatcaggtgccaacagagaatgtccaggtacactttactgaacgatcctttgatcttctcgtgaaaaacctgaatggcaagtcctattcaatgatcgtcaacaacctgctgaaacctatttcagtcgagggctcttcgaaaaaggtgaagacagatactgttctcattctctgccgcaagaaagtagaaaatacaagatgggattacttaacccaggtggaaaaagaatgtaaggaaaaggagaagccctcctacgatactgagactgacccgtcagagggtctgatgaatgtcctgaagaagatctacgaggatggcgacgatgatatgaaacggaccatcaataaggcatgggttgagtctcgggaaaagcaagccaagggggatacagagttctag

SEQ ID NO: 24187 - DNA, 558 bp, synthetic construct
  source 1..558: mol_type = other DNA; note = Synthetic coding sequence
atgcagcagaagagccagaagaaggccgagctgctggacaacgagaagcctgccgctgtcgtcgcacctatcactactggctacacagtcaagatatcaaactatggttgggaccaatccgacaagtttgtgaagatatacataacactgaccggggtgcatcaggtgccaactgagaatgtgcaagtacatttcaccgagaggtcctttgacctcctggtcaaaaaccttaatggtaagtcttactctatgatagtcaataatctgctgaagccaatctctgtcgagggatcgagtaagaaggttaagactgatacagtccttattctgtgcaggaaaaaggttgagaacacccgctgggactacctgactcaggtggaaaaagaatgtaaggaaaaggagaagccaagctatgatacagagaccgacccgagcgaggggctgatgaatgtgctgaaaaagatatatgaggacggcgacgatgacatgaaacgtaccatcaacaaagcctgggtcgaatccagagaaaaacaggcaaagggggacaccgagttttag

SEQ ID NO: 24188 - DNA, 1134 bp, synthetic construct
  source 1..1134: mol_type = other DNA; note = Synthetic coding sequence
atggagcagctgcccgacctgcacagccacttcagcgacctgaacctcgaggctcatatgtacgcatcccagtggtttttgactctgttcactgccaagttccccctatgcatggttttccacataattgacttattgctgtgtgagggactgaacattatctttcacgtggctcttgctcttctgaagaccagtaaggaggacctactgcaagctgactttgagggcgccctcaagttttttcgagtacagctgccgaagaggtatcgggccgaggaaaacgcccgccgcctgatggaacaagcctgcaacatcaaagtgcccaccaaaaaactgaagaagtacgagaaagagtaccagaccatgagggaatctcagctgcagcaggaggatccaatggacaggtataaaagggagaatcgacggctgcaagaggcctctatgaggctagaacaggaaaacgacgacctggcccacgagttagtgacctccaagatcgccctgagaaacgacctggaccaggctgaggacaaggctgatgtccttaacaaggagctcttgctgacaaagcagaggctggttgagaccgaggaggaaaagcgaaagcaggaagaagagaccgcacagttaaaagaagtgttcaggaagcagctggagaaagcagagtacgagataaaaaagaccaccgcgattattgccgaatacaaacagatctgttcccagctgtccacccgcttggagaagcagcaagcggcttccaaagaggagctagaggttgtgaaaggaaagatgatggcttgtaaacattgtagtgatatattttctaaggagggagccctgaaacttgctgcaaccggacgagaggaccagggcattgaaaccgacgacgaaaaagactccctcaagaagcagctcagggagatggagctggaacttgcccaaaccaagttgcagttggtggaagcaaaatgcaagatacaggagttggagcaccagcggggagccctcatgaatgaaattcaagccgcaaagaattcgtggttttctaaaacactaaacagcatcaaaacagccacgggtacccaacccttgcagcccgctccagtgacacagccacccaaagaaagcacatag

SEQ ID NO: 24189 - DNA, 762 bp, synthetic construct
  source 1..762: mol_type = other DNA; note = Synthetic coding sequence
atgatcgagaacagcagctggagcatgaccttcgaggagcgggagaaccggcggctgcaggaggcaagtatgaggctggagcaagaaaatgacgatctggcccacgaactggtcaccagcaagatcgccttgcggaacgacttagaccaggctgaggacaaagccgacgtgctgaacaaggaactgctgcttacaaaacaacgactggtggagaccgaagaagagaaacgtaagcaagaggaggaaacagcccagctcaaggaagtctttagaaagcagctggagaaggccgaatacgaaattaagaagacaacggctatcattgcagagtataagcaaatttgtagccagttgagcaccaggctggaaaaacaacaggctgcctctaaagaagagctggaagtagtgaaaggaaagatgatggcatgcaaacactgctctgatatcttttctaaggagggagccctaaaactggccgccaccggccgcgaggaccagggcattgaaactgatgatgaaaaggactccctgaagaaacaattaagggagatggagctcgagctcgctcagactaagctccagttggtggaggcaaagtgtaaaatccaggaactggaacatcagaggggcgccttgatgaatgagatccaggccgccaagaatagttggttttctaagactctgaactccattaaaaccgcaacgggaacacagccactgcagcctgcaccagtgactcagccccccaaggaatccacatag

SEQ ID NO: 24190 - DNA, 759 bp, synthetic construct
  source 1..759: mol_type = other DNA; note = Synthetic coding sequence
atgggcaagagctacgacggccgggcctacgtgatcaccggcatgtggaatccaaatgccccagtgtttttggccttaaacgaggagacccccaaagataaacaagtgtatatgacggttgccgtggacatggtcgtcacggaggtagttgagccagtgcggtttctgcttgagacggtagtacgggtttaccccgccaatgaaaggttctggtatttctctcgcaagactttcacagagacgttctttatgcgccttaaacagtctgaaggaaagggccacacaaatgccggggacgcaatttacgaggtcgtcagtttgcagagggagagcgacaaagaggaacctgtcacccccacctccgggggtggcccaatgtcgccgcaggacgacgaagcagaagaagagtcagataatgagctgtcaagtggcacaggcgacgtgagtaaagactgcccagagaagattctgtacagctggggggaactcctcggcaaatggcactcaaatttaggggctagacctaagggtctttctactcttgtgaagtcaggagtccctgaggcgctcagggcggaggtgtggcagctattagcgggctgtcatgacaaccaggccatgttggacagatatcgcatcctgatcactaaggtgtgttggagcctgcttgaggttcacagtcgcccctgcctccctgggtaccaccagtggaagctgcagaatagcaagtattgcagaatggctaacgtcgcagcatag

SEQ ID NO: 24191 - DNA, 2484 bp, synthetic construct
  source 1..2484: mol_type = other DNA; note = Synthetic coding sequence
atggaggtgcgggccagcctgcagaaggtgagcggcagcagcgactctgtcgccactatgaattccgaggagttcgtcctcgttccccagtacgctgatgacaacagcactaagcatgaagagaagccgcaactgaaaatcgtgtccaacggcgatgagcagttggaaaaggccatggaggagattctgcgtgattccgaaaagagaccctcatcacttctggtggactgtcagtcttctagcgagatatctgatcacagctttggtgacattcccgcaagccaaacaaataaaccctcgttacaactaattttagatcctagtaacaccgaaatttcaaccccccggccatcaagtcctggagggttgccagaagaggacagtgtgcttttcaataagttgacctacctcggatgtatgaaggtctcttccccccggaacgaggttgaagccctgcgggctatggccacaatgaagtccagtagccagtatccattcccagtcacactctatgtccccaatgtccccgaggggtctgttcgcatcatagatcagtctagtaatgtggagatcgcctcatttcctatctacaaagtgctgttttgtgcgagggggcatgatggcacgactgagagcaattgcttcgcattcacagagagttcccacggcagtgaggaattccagatccacgtgtttagctgcgaaataaaggaagcagtgtcgaggatcctgtatagcttttgcacggccttcaagcggtcttcccgtcaagtctccgacgtgaaagattcggttattcctaccccagacagtgacgtatttacgttcagtgtaagcctagaagtgaaagaagacgacggcaagggcaatttccgtctgcttgtgatcccaattcccttcgagtacttctcccccgtccctaaagaccgggacaagttttacttcaaactcaaacagggcattgagaagaaggtggtgataactgtgcagcagctctccaacaaagagcttgcaattgagagatgtttcggcatgctccttagtccgggccggaacgtgaaaaactctgacatgcacttactggatatggaatctatgggcaagagctacgatgggagggcttacgtgataaccggaatgtggaaccccaatgcccccgtgttcctggcactcaatgaagaaacacctaaggacaaacaggtgtacatgaccgtggcggtggatatggtggttacagaggttgttgaacctgtgcgcttcctgcttgagacagtcgtgcgcgtgtaccctgcaaacgaacgtttttggtattttagcaggaaaaccttcacagagaccttcttcatgagactgaagcagtctgaggggaaaggacataccaatgccggcgatgccatttatgaggtggtgtcactccagagggagtcggacaaggaagagccggtgactcctacatcaggcggaggaccaatgtccccccaggatgatgaagccgaggaagagagtgacaacgaactgtcttctggaacaggcgatgttagcaaagactgtcccgagaaaatcctttacagctggggcgaactgttaggcaaatggcattctaatctgggcgcacgcccaaagggcctgagtaccctcgtgaaatctggcgtgcccgaggccctgagagccgaagtttggcagctattggctggctgccatgataaccaggctatgttagataggtaccggatcttgataactaaagatagcgctcaggagtcagttattacaagggacatccaccggaccttccctgcccatgactatttcaaggataccgggggcgacggtcaggagagcctatacaagatctgtaaggcctattccgtttatgatgaggatattggatactgccagggacagtcttttctggctgcagtgcttctactccatatgcccgaggagcaggcattttgcgtcctggtgaagattatgtacgactacggtctgagggacctttatcgcaataatttcgaagacctgcactgcaagttttaccagctggagagactgatgcaggaacagctccctgacctgcacagtcacttctccgacttgaacttggaagcacacatgtatgcaagtcagtggttcctaactttgtttaccgctaaatttccactgtgcatggttttccatatcatcgatctcctactgtgtgaagggttgaacattatttttcatgtcgccttagcactgctgaagacatctaaggaggacttactgcaagcggactttgagggcgccttaaagttctttcgggtccagctacccaaaagataccgagcagaggaaaatgctagacgcctcatggagcaggcctgtaatatcaaggtgcctaccaagaaactgaagaagtatgagaaggagtaccagacgatgcgggagtctcagttacagcaggaagaccctatggacagatacaagttctttttcctgtag

SEQ ID NO: 24192 - DNA, 2580 bp, synthetic construct
  source 1..2580: mol_type = other DNA; note = Synthetic coding sequence
atgggcaaccgggagatggaggagctgatccccctggtgaaccggctccaagacgccttttcagcattgggacagtcttgcctccttgaattgccacagatcgccgtcgtgggtggccaatccgccgggaagtcatcggtattagagaactttgtgggcagagattttctcccccggggtagtggcatcgtgaccaggagacctctcgtactccagcttgtgacaagcaaggccgaatatgcagaatttctccactgcaagggcaaaaaatttaccgattttgacgaagtccgcctcgaaattgaagctgagacggatcgtgtgacaggcatgaacaaggggatttcctccatccccataaacctgcgcgtttattccccgcatgtattgaatttaactttaattgacctgccaggcataacaaaagtgccggttggagatcagccccctgacatcgagtaccagatccgggagatgatcatgcagtttatcacccgtgagaactgcctcatacttgctgtcacgcctgccaacacagaccttgccaactctgatgcgctgaagctcgccaaggaagtcgacccccagggcctgcgaacgatcggcgtgatcacaaagcttgacctgatggacgagggaactgatgcccgtgacgtcttggagaacaagctgcttccactcagaaggggctatgtgggcgtcgtgaataggtcacagaaagacatcgacggaaagaaagatataaaggcagctatgctcgctgagcggaaatttttcctcagtcaccccgcctacaggcatattgccgatagaatggggaccccacatctgcagaaggttcttaatcagcagctgacaaatcatattagggacacgctgcctaatttccggaataagttacagggccaactcctaagtatagagcacgaggtggaagcttataagaactttaagcctgaggacccgacacgcaagacaaaggcattgctacaaatggttcagcagttcgctgtggattttgaaaagagaattgaagggagtggagatcaagtggatacattagagctctccggtggtgcgaagattaatagaatctttcatgaaaggttcccgttcgagatagtaaagatggagtttaatgagaaggaattacgcagggagatctcctacgcaattaagaacattcatggcatccggacagggctgttcactccagacatggcctttgaagcgattgtgaaaaaacagattgtgaaactgaaaggccctagcctcaaaagcgtggatttggtcatccaggagctgatcaacacagtgaagaaatgcactaagaagctcgctaattttccgcgcctgtgcgaggaaacagagaggatcgtcgctaaccacatcagagagcgcgagggcaagacgaaggaccaagtgctgcttctgattgacatccaggtgtcgtatataaatactaaccacgaggattttattggatttgcaaatgcccagcagaggtcttcccaagtgcataagaagactactgtcggcaaccaagttatacgcaagggctggctcaccatctcaaacataggcattatgaagggcggttccaaaggctattggtttgtgctgaccgcggaatccctgtcctggtataaggatgatgaagagaaggaaaagaaatacatgctgcctctcgataaccttaaagtgcgggacgtcgagaaatcgttcatgtcaagcaaacatatcttcgccttattcaacaccgaacagcgaaatgtgtataaagattacaggtttttagaacttgcctgtgattcacaggaggacgtcgactcctggaaggcttccctgttacgcgcgggggtgtatcctgataagtctgtcgccgagaacgacgagaatgggcaggccgagaacttcagtatggatccgcaattggaacgacaggttgaaacgatacgtaatcttgtcgacagctatatgtccattataaacaaatgcatccgtgatttaatcccaaagacaatcatgcatcttatgattaacaatgtgaaagattttattaactcagaactgctggcacagctgtactccagcgaggaccagaatacactgatggaggaaagcgcagagcaagcgcagcgcagagatgaaatgctgaggatgtaccaggctctgaaagaggctttaggcattatcggcgacataagcacagctactgtgtctacacccgcgccacctcccgtagacgactcatggattcagcactcccggcggagtccacctccgtcccctacaacacaacgacgccctaccctcagcgcaccgctggcacgtcctacctccggcaggggccctgcgccagccatcccgtctcccgggccgcattcaggcgcccctcccgtgccatttaggccggggccactccctcctttcccgtcttccagcgatagcttcggtgcccccccccaggtcccatctaggccaacaagagcaccgccttccgtcccttcacgccgtcctcccccaagccccacaaggcctactatcatccggccgctcgagagctcactcctggattag

SEQ ID NO: 24193 - DNA, 1761 bp, synthetic construct
  source 1..1761: mol_type = other DNA; note = Synthetic coding sequence
agcgagagcctgagcagcgccgtgttcgtggagggcctgaagcggcagggaggttgtgcacggctggaagaagcatgtttgagcgaggctggtgaagatctcacgggtgtaagattcagcctgcccgggaaaaacttcccctgtggatcatctagctcatcttctcgaagtaggaactcaagcagctccaactctagctcatcgagcagtaccacgaccaccacgacatccagttccggggctcaggacagaatgcctgtactggaacggtattttcaccccgcggagctcggcagaaggtggaccggccctgagggagtcctaccctctagcccaggctcccggcccggttgtcagcagggccccctgccgtgggatctgcctgaaatgatacgaatggtgaagttagtgtggaagtctaagtccgagctccaagctactaaacagcgcggaatactggacaacgaagacgccctccggtcttttcctggcgatattcggctcaggggccaaaccggcgtgagggcagagagacgaggctcatacccatttatcgactttcgattgcttaatagtacaacctactccggcgaaatcggcacgaagaagaaagtcaagcgactgctgtccttccagaggtacttccatgcatccaggttgctgaggggaataatacctcaggcccctctgcacctcttggatgaagactatctgggtcaggcaaggcatatgctgagcaaggtgggtatgtgggactttgacatattcctcttcgaccggttaacaaatggaaattcgctggtcacacttctgtgtcatctctttaacacccacggacttattcaccattttaagttggatatggtcaccctgcaccgtttcctggttatggtccaggaagattatcactcacagaatccctaccataacgcagttcacgccgccgacgtcacccaggctatgcattgctacttaaaggagccaaaacttgcatccttcttgacccctctagacataatgctcggcctgctggctgcagcagcacatgacgtcgatcatcctggtgttaatcagccattcttaattaagaccaaccaccatttggcgaatctttaccagaacatgtctgtgctggaaaatcatcactggaggtccacgatcggaatgttacgcgagtcaaggcttctggctcatttgcccaaagagatgacgcaagatatcgaacaacaacttgggtctctcatattagctaccgacattaaccgccaaaacgaattcttgacccggctgaaggctcacttgcataataaagacctgcgcttggaagacgcccaggaccggcactttatgcttcaaattgccctgaaatgcgccgatatctgcaatccctgccgaatctgggagatgagcaagcagtggtccgaacgggtatgcgaagagttctacagacaaggtgaactcgagcagaaattcgagctggagatttcccccttatgtaatcagcagaaggattctattccatctatccagatcggcttcatgagctacatcgttgagccactgtttcgcgagtgggctcactttaccggcaacagcaccctgtccgagaacatgctaggacatctggcccacaataaggcacaatggaagagtttattgccgcgacagcaccgctctagaggatcctccggtagtggacccgatcacgaccacgcgggccaaggcaccgagtccgaagagcaggaaggcgactcgccatag

SEQ ID NO: 24194 - DNA, 525 bp, synthetic construct
  source 1..525: mol_type = other DNA; note = Synthetic coding sequence
atgaccaccaagaacctggagaccaaggtgaccgtgaccagcagccccataagaggtgcaggcgacggcatggaaacagaagaacctccaaaatcggtggaggttaccagcggcgttcagtcccgaaaacatcactccctgcagagcccctggaagaaggccgtgccatccgagtctcccggtgtcttacaactcgggaagatgctcaccgagaaagccatggaggttaaggctgtgagaatcctggtgccgaaagcggccattacccacgatatccccaataagaatacaaaggttaaaagtttggggcaccataaaggtgaatttttgggacagtccgagggggtgattgagcctaataaagagctatctgaagtgaagaatgtgctcgagaagctgaagaacagcgaacgcagactgctgcaggataaagaaggcctcagcaaccagctgcgcgttcagaccgaagtgagacgcgctctgattgacaaaatgagtaccactctctacgtgtggaccttttag

SEQ ID NO: 24195 - DNA, 1203 bp, synthetic construct
  source 1..1203: mol_type = other DNA; note = Synthetic coding sequence
atgaccaccaagaacctggagaccaaggtgaccgtgaccagcagccctattagaggtgctggggacggaatggagacggaggagccccccaagtcggtagaagtgacaagtggcgtccagtctcgcaaacaccacagcttacaatctccgtggaagaaagcggtgcccagtgagagtcctggggtcctgcagctcggcaagatgcttaccgagaaagcaatggaggtgaaggccgtgaggattcttgtccccaaggccgcgatcacacacgatatacccaacaaaaacactaaagtaaagagtctgggacatcacaagggagagtttctgggacagtcagagggcgtgattgaacccaacaaagagctgtcagaagttaagaacgtgcttgagaagctgaagaactcagaaagaagattgctgcaagataaagaaggtcttagtaatcagctccgcgtccagacagaagtgaatcgagaattaaaaaaactgctggttgcttcagtgggcgacgatcttcagtaccactttgagagattggccagggagaagaaccagctaatactcgagaatgaggctttggggcgcaatacagcgcagctgtccgaacagctggaacggatgagcattcagtgcgacgtgtggcggtccaaatttctagcaagtcgcgtgatggctgatgaactgaccaactcacgcgctgctctccagcgccaaaatcgcgatgcccacggagcaatccaagatttactctccgagcgtgaacagtttaggcaggagatgattgcaacccagaagcttctcgaagagctgcttgtgagcctccagtggggcagagagcaaacgtactcaccatctgttcagccacattctacagccgagctcgccctgacaaaccacaaactcgcaaaagccgttaactcccacttacttggaaacgttggcatcaataatcagaagaaaatcccatccaccgtggaattctgttcaactcccgccgagaaaatggccgaaactgtcctgaggatcctcgatccagtcacctgtaaggaaagcagcccagataatcctttctttgagtctagtcctactaccttgctggccactaagaagaatatagggcgcttccatccctatactagatacgaaaatatcacatttaactgctgtaaccactgccgaggagaactgattgccttgtag

SEQ ID NO: 24196 - DNA, 276 bp, synthetic construct
  source 1..276: mol_type = other DNA; note = Synthetic coding sequence
atggacgccgacagcgacgtggccctggacatcctgatcaccaacgtggtgtgcgtgttcaggacccgctgtcaccttaacctgcgaaaaatcgcactggagggggccaacgtcatctacaaaagagatgtcggcaaggtcctgatgaaactacggaaacccagaataacagctacaatttggtccagtggcaagatcatctgcactggggcaacatctgaagaggaagccaaatttggagcgcgtagactagccagaagcctgcagaagctctag

SEQ ID NO: 24197 - DNA, 492 bp, synthetic construct
  source 1..492: mol_type = other DNA; note = Synthetic coding sequence
atggacgccgacagcgacgtggccctggacatcctgatcaccaacgtcgtgtgtgtgttccgcacaaggtgccatcttaatctgcgcaagattgcactggaaggcgctaacgtgatttacaaacgggatgtgggcaaagtgctgatgaaactgcggaagccccgaattactgcaactatctggagctcaggtaaaattatctgcactggagccacttccgaggaagaagctaaatttggcgcgagacgcctggcacggtcattgcaaaagctaggtttccaagtcatttttacagatttcaaggttgtcaacgtgttagctgtatgcaatatgccattcgagattcgtctgccagagttcaccaagaacaaccgtccccacgcctcctatgagccggaactgcatccagcagtctgctaccggattaagtcactgagagccaccctgcaaatatttagtaccggctccataaccgttacagggattctgtag

SEQ ID NO: 24198 - DNA, 1023 bp, synthetic construct
  source 1..1023: mol_type = other DNA; note = Synthetic coding sequence
atgctggaggcccccggccccagcgacggctgcgagctgagcaacccctcagcatcgagggtctcttgtgcgggacagatgttagaggtacagcctgggctgtattttgggggcgcagccgctgttgctgagccagatcatctccgcgaggcgggaatcactgcagtgctgacggtggactcggaagagccttctttcaaggctggacctggagtagaggatctgtggcgtctgttcgtccccgctttagacaaacccgaaaccgatcttttgtcacatctggatcgctgcgttgcgtttattgggcaagctagagcagagggccgagcagtgcttgtgcattgccacgctggagtctccagatccgtggccattatcaccgccttcctcatgaaaacagaccagctgcctttcgagaaggcctacgagaaacttcaaattctcaagcctgaagcgaaaatgaatgaaggcttcgagtggcaattgaaactatatcaagcgatgggctatgaggtggacactagcagtgccatatataagcagtaccggctacagaaggtaaccgagaagtaccctgaactgcagaacctgccccaggaactgtttgccgtcgaccctaccacggtgagtcagggactgaaggatgaggtgctgtataagtgccgcaaatgtcggagaagcttgttccggtcttcaagcatccttgaccatagagagggctccggacccattgccttcgctcataaacggatgacgccgtctagtatgttgactaccgggaggcaagcgcagtgtacttcctactttattgagcctgtacaatggatggaatctgcacttctcggagtcatggacggacaactgctctgcccaaaatgctcagccaagctgggcagtttcaattggtatggggagcagtgtagctgtgggcgttggatcacccccgcgtttcagattcacaaaaaccgggttgacgaaatgaaaatcctgccagttctaggatctcagacaggcaagatttag

SEQ ID NO: 24199 - DNA, 807 bp, synthetic construct
  source 1..807: mol_type = other DNA; note = Synthetic coding sequence
atgtggcccctgaccgccctgctgctgctggccaccctggagaagcctatcctgtctctgcatcccccgtggaccaccatcttcaagggggagcgtgtcaccttgaagtgcgatggataccaccctctgctgctggagttgcagcccatctcaacactgtggtatttgggccatctactgctaccttcgcacaagaagtctattgaagtgcagacacccggcgtgtatagatgccagacaaggggggccccagtgtcagacccaatccatcttagtgtgtctaatgactggctgatcttgcaggtaccttacgctccagtgtttgagggagagccactggtcctgagatgcagggggtggtacgacaaggttgtgtataagcttcactattatcatgacggccaggccgtgagatatttccatagctctgccaattatacggtactgcaggctcgggccagtgactcaggaagataccagtgttccggaacaatgcggatcccagtcgaaagtgcaccaatgttttccgctaaagtggccgtgacagtgcaggaggccagacacgcggcagccgtaagagtgctgcaggtgcagcctagaggagcacccctgcgcctgggacggagagtacattcaccaggtgcccgaggccgcggcgctagaatcgtgctagtacggggaggataccggcaccctcagtgccctgagacacaatccgtcgcagctgccccaggggcagggttctctcccggacctggccttcaccaccggccttcctccatgggcagatccttaggctcatggtag

SEQ ID NO: 24200 - DNA, 936 bp, synthetic construct
  source 1..936: mol_type = other DNA; note = Synthetic coding sequence
atgtggcccctgaccgccctgctgctgctggccaccctggagaagcctattctatctcttcatcctccctggactacgatcttcaaaggcgaacgggtgaccctcaagtgcgacggatatcaccccctgttgttagagctgcagcccatttccaccctgtggtatttgggacatcttctgctgccaagtcacaagaagagcattgaggtacagactcccggtgtgtaccggtgtcagactcgtggggcgcccgtgtcagacccaatccacctcagtgtgtccaacgattggctaatcctgcaggtgccgtacgctccagtttttgagggtgagccactggtcctgagatgtagggggtggtatgacaaagtcgtatacaagttgcattactatcatgatgggcaggccgtgagatactttcactcttcagcaaattacacagtcctgcaggcccgcgcttcagactctgggcgctaccagtgttcaggcacaatgcgcattcctgtggaatctgctcctatgttcagtgctaaggtggccgtgactgtccaggccgcccggtgtgcggccagcacgggcgctccctctacacagagccggtccccccgaagtagaagttcgaacaggactggcgcccgcagactgcctcctccggcagtgagcggtaatgcggtccgggggtgctcctctaggggccgagtgctcccctggacacgtcccccacctcccccacagcttcacggcccccaaccctggctgttggtgataggacgttttcctagcgagtcaccccgttgccccgaccgcagcagatggtctcccccctctggaactcctccacccccaggttgttcatcccggcgggcagcgccacggctgcgcgggcatcctcctgcactgcgcagacggccctggaacaataggctggagccctag

SEQ ID NO: 24201 - DNA, 957 bp, synthetic construct
  source 1..957: mol_type = other DNA; note = Synthetic coding sequence
atgtggcccctgaccgccctgctgctgctggtgcccagcagcggccaggctgcaaccctagagaagcctatcctgtccctgcaccctccctggacaacgattttcaaaggcgagcgagttaccctgaagtgcgacggataccatccactgcttctcgaactgcaacctattagtacgctttggtatctggggcacctcctgctgccatcacataagaagtctattgaggtgcagacacctggcgtttacaggtgccagacacggggcgccccggtctccgatcctatccacctcagcgtgagcaacgactggctcatactgcaggtaccctacgcaccggtgttcgagggcgaaccattagtcctccgttgcagagggtggtacgacaaggtggtctacaagctccattattaccatgatggacaagctgtacgctactttcacagctccgctaactatacagtgcttcaggcaagagccagcgattctggtcgctaccaatgctccggcaccatgaggattccagtggagtctgcgcccatgtttagtgcaaaagtcgccgtcaccgttcaggccgcccggtgtgctgcgtccacaggtgctccatccacacagagccgttccccacgctcccggtcttcaaatagaacaggagcacggcgcctaccaccacctgctgtaagcggcaatgcagtgagagggtgctcttccagagggcgagttctgccgtggacccgccctccaccaccccctcagctccacggaccccaaccttggctattagtcatcggccggtttcccagcgagagcccccggtgtcccgatcgtagtaggtggagtccaccctcaggcaccccacccccacccggctgcagcagccgccgggctgctccaaggctgagaggccatcctcccgctctccgtagaaggccatggaacaatcgtttggagccatag

SEQ ID NO: 24202 - DNA, 1281 bp, synthetic construct
  source 1..1281: mol_type = other DNA; note = Synthetic coding sequence
atgtggcccctgaccgccctgctgctgctggtgcccagcagcggccaggctgccaccctggagaagccaatacttagcctgcatcctccctggacaacgatctttaagggagaacgggtcaccctgaaatgtgacggatatcatcctttgttgctggaacttcagccgatttctactctctggtacttaggtcacttgttgctgccaagccacaagaagagcattgaagtgcagacacctggtgtgtacaggtgccagacccgtggagcacccgtttctgatcccattcacctcagcgtgtcaaacgattggctcatcctgcaggtcccatatgcccccgtgtttgagggggagccacttgtcctccgatgccgtgggtggtacgacaaggtggtctacaaactgcattattatcatgatggccaggcggtgaggtactttcattccagcgccaactacactgtgttgcaggcgcgggcctcagacagcgggcggtaccagtgctctggcactatgcggatcccggtcgagagcgctcccatgttcagcgcaaaggtggccgtaacagtgcaggagctgtttcgcgcccccgtgctgcgagtgatggggccaagggaggctaggggcgccgctctcggcggggtggtgctgaggtgtgatacacgtctacacccccagaaaagagatactcccctccagtttgccttttacaaatatagcagggcagtaaggcgcttcgactggggcgccgaatacactgtgcctgaacccgaggtggaggagctggagtcctactggtgtgaggctgctaccgcaactcggagtgtgagaaaacgtagcccttggctgcagctgccaggcccaggctcgccactggatccagccagcaccactgcacccgccccctgggccgcagcactcgcgccaggaaatcgtccccttagcttcagaaagccgccggtctcaaggtccgttccgttggtgacgtccgtgaggaatacaacttccacgggtctgcaatttcctgccagcggcgcccctaccgcaggcccaccggcgtgtgctccccccacacctctggagcagtccgcaggggctcttaaaccagatgtagacctcctcttgagagaaatgcaactgctgaagggcctgttgtccagagttgtgctcgagctaaaggaaccgcaggcactccgcgagctgcgcggtacccccgaaacaccaacaagccatttcgcggtctcgcccggtacgcctgaaactaccccagttgaaagctag

SEQ ID NO: 24203 - DNA, 369 bp, synthetic construct
  source 1..369: mol_type = other DNA; note = Synthetic coding sequence
atggccggcggctgccgggcccccagcagcgcccccaccgtgagcctcccagagttgagatcgctgttggcgagtggacgggccaggctgttcgacgtcagatcccgagaagaagcggccgccggcaccatcccaggagccctgaacatccctgtgtccgagctggagtcggctctgcagatggagccagctgccttccaggcgctgtatagcgccgagaagccaaaattggaggacgaacacctcgttttcttctgtcagatgggtaagcgggggctccaggccacacagctggccagaagcctggggtatactggcgctcgcaactatgcaggagcctatcgcgagtggctcgagaaagagagctag

SEQ ID NO: 24204 - DNA, 225 bp, synthetic construct
  source 1..225: mol_type = other DNA; note = Synthetic coding sequence
atggccggcgtgagcgagctggagagcgccctgcagatggagcccgctgcatttcaggccttatattcagcggaaaagcctaaattggaagatgagcacctagtcttcttttgtcagatgggcaaacggggcctgcaagctacccagctcgctcggtccctgggctacacgggggccagaaattatgcaggcgcttaccgcgaatggttggaaaaggaaagctag

SEQ ID NO: 24205 - DNA, 1794 bp, synthetic construct
  source 1..1794: mol_type = other DNA; note = Synthetic coding sequence
atgagcagcaagggcagcagcaccgacggccggaccgacctggccaatgggagtctaagcagcagccctgaagaaatgtctggtgccgaggaggggcgcgaaacaagctccggaatcgaggttgaggccagtgatctgtccctttctctgactggcgatgacggggggcccaatagaactagtactgaatcaagaggtaccgacacagaaagctccggcgaagataaggactctgacagtatggaggataccggtcattactctatcaatgacgaaaatcgtgtccatgaccgtagcgaggaggaggaggaggaagaagaagaggaagaggaggagcaaccgcgacgtcgtgtgcaacgtaagcgggccaatcgtgaccaggatagctctgacgacgaacgggctctggaggattgggtcagttctgaaacaagcgcactgccacggcctcgatggcaggctctcccagccttgagagaacgtgaactgggctctagcgccaggtttgtctacgaagcttgcggggcccgcgtgttcgtccagcgtttccggctgcagcacggcctagaagggcatacagggtgcgtgaatacactgcattttaatcaacgcggcacatggcttgccagtggatcggacgacttaaaagtggtggtttgggattgggtcagaagacagcctgtcctggatttcgagtccggacacaagtccaatgtcttccaggcaaaattccttccaaacagtggagattctacgctggccatgtgcgcgagggatggtcaagtgcgtgtggctgaactgtccgctactcagtgctgcaagaataccaagcgggtggcacaacataagggggcctctcacaagctggcccttgaaccagattccccttgcacgtttctctccgccggtgaggacgctgtggtatttacaatcgacctgaggcaggatcgtccggcgtccaaactggtggttaccaaagaaaaagaaaagaaggtgggtctgtacactatctatgttaacccagccaatacccaccagtttgcagttgggggacgagatcagttcgtgcgcatttacgatcagcgcaaaattgatgaaaatgagaacaatggcgtcctcaagaaattttgtcctcaccatcttgtgaatagcgaaagtaaagcgaatatcacttgcctggtgtacagtcatgatggcacggagttactggcatcctataatgacgaagatatttatctcttcaatagttcccacagcgatggcgcccagtacgttaaacgctacaaagggcaccggaacaatgctacagtcaagggcgttaacttttatggccctaagagcgagttcgtggtgagcggctcagattgtggacacatcttcctgtgggagaagagctcttgccaaattattcaatttatggagggcgataaggggggggtcgtcaactgtcttgaaccacacccgcacctcccagtgctggccacatcaggcctcgaccacgacgtgaaaatttgggcgcctacggccgaagctagtaccgagctgacgggccttaaggacgtaatcaaaaaaaacaagcgcgagagggatgaggatagtctccatcaaacagacctgtttgatagccacatgctgtggttcctgatgcatcatctgaggcagcgccgacaccacagacgatggagagagccaggcgtgggagctacggatgctgactcagatgaatctccaagcagctcagataccagcgatgaagaggagggcccagatagagtccagtgtatgccatcatag

SEQ ID NO: 24206 - DNA, 1794 bp, synthetic construct
  source 1..1794: mol_type = other DNA; note = Synthetic coding sequence
atgagcagcaagggcagcagcaccgacggccggaccgacctggccaacggttcattgagctctagcccggaggaaatgtccggagctgaggagggcagagaaacctccagcggaatagaggtggaggcctctgacctgagcctcagcctgacaggcgacgatggcggtcctaatcggacgagtaccgagtccagaggcacagataccgaaagctccggtgaagataaggattccgatagtatggaggataccggacactactccattaacgacgagaacagggtccacgatagaagtgaagaggaggaggaagaggaggaagaggaagaggaggaacagcccaggcggagggtacaacggaaaagggccaaccgcgaccaagatagttctgatgacgaacgtgcactggaagactgggtgtcgagcgagacaagcgcccttccgcgaccccgttggcaggcacttccagccttacgggaaagagagctggggagttccgcacgattcgtgtatgaagcctgcggcgccagggtttttgttcagcgcttcagactgcaacacggtttggagggtcataccggatgtgtgaacaccctgcacttcaaccagcgtggcacttggctagccagtggctcggatgatttaaaagtagtggtgtgggactgggtgcggaggcagcccgtcctcgacttcgaaagtggacacaagagcaacgtttttcaagccaaattcctcccaaactcaggggactcaacactggccatgtgcgcaagagatgggcaagttagggttgctgagctgagcgccactcaatgctgcaaaaataccaagagagtggcccaacacaagggagcctcacacaagctcgctcttgaacccgactccccctgcacgttcctgtcagcgggtgaagacgccgtcgttttcaccatcgacctgaggcaggaccgacccgcctccaagctggtggtgaccaaggagaaggaaaaaaaggtcgggctgtataccatttacgtaaatccagcaaatacgcaccagtttgcggtgggtggccgggaccagtttgttcgcatctacgatcagagaaagatagacgaaaacgagaataacggcgttctcaagaagttctgccctcaccacctggtgaacagtgagagtaaggcaaatattacttgtctggtatactcccatgatggtacggaattgctggccagctataacgatgaagatatttacctgttcaactcatctcactcagatggtgcacagtacgtgaagagatataaggggcaccgcaataacgcgaccgtgaagggtgtcaacttctatggacctaaaagtgaatttgtggtcagtggctcagattgcggccacattttcctatgggaaaaatctagctgccaaataatccagtttatggaaggagataagggcggcgttgtgaactgtttggagccacatcctcacctgccagtgttggccacatcaggtctggatcacgatgtgaaaatttgggctcctacagccgaagctagtacggagttaacgggcctcaaggatgtgatcaagaagaataaacgggagcgcgacgaagattccctgcatcagacagacctatttgactcacacatgctgtggtttctgatgcatcacctgcgccaacgcagacaccaccgccggtggagggagcccggcgtgggggctaccgatgccgatagtgatgaatctccatccagcagtgacacttccgacgaggaagaaggccccgatagagtacagtgcatgccatcctag

SEQ ID NO: 24207 - DNA, 453 bp, synthetic construct
  source 1..453: mol_type = other DNA; note = Synthetic coding sequence
atgggcgtgcagccccccaacttcagctgggtgctgcccggccggctggctgggctggcactgcctcgtctgcctgcacactaccaattcctgttggacctgggggttcgccatcttgtatccctgacagagaggggtcctcctcattcagacagttgtccaggtctcacgctccaccggctgcggatcccagatttctgtcctcccgcccctgaccaaatcgaccgattcgtgcagattgtggacgaagcaaacgcacgtggggaggcagtgggcgtccattgtgccttaggtttcgggagaactggcaccatgctggcatgctatctggtgaaggagagaggtctcgctgccggagacgctatagccgagattaggaggttaaggccaggcagcatcgagacgtacgaacaggagaaagccgtgttccagttttatcagcgcaccaagtag

SEQ ID NO: 24208 - DNA, 453 bp, synthetic construct
  source 1..453: mol_type = other DNA; note = Synthetic coding sequence
atgggcgtgcagccccccaacttcagctgggtgctgcccggccggctagccggattagctcttccccgattgcccgcccattatcagtttttgttagatctgggtgtgcgtcatctcgtgtctcttacagaacgaggaccgcctcacagcgactcctgtcctggcctgaccctgcacagactaaggattccagatttctgtcctcctgcccccgatcagatcgatcgtttcgtgcagattgtggatgaggcgaacgctcgcggagaggcagttggagtccattgtgctctaggattcgggcggaccggaactatgttagcatgctaccttgtgaaggagcgaggtctggccgcaggggatgccattgcagagatccgacggcttcgacccggctctattgagacttacgaacaggagaaagccgtctttcaattttaccagcggactaagtag

SEQ ID NO: 24209 - DNA, 453 bp, synthetic construct
  source 1..453: mol_type = other DNA; note = Synthetic coding sequence
atgggcgtgcagccccccaacttcagctgggtgctgcccggccggctcgctggactagctctgccgcggctgcctgctcattatcaattcctgctggaccttggggtgaggcacttggtgagcttgacagagcgaggtccgcctcatagtgactcatgtcccgggctgactctgcatcgactgcgcattcctgatttctgtcctcccgcccccgaccagattgataggttcgtgcagatcgtggatgaggccaacgcccgcggcgaggcggttggcgtccactgtgccctcggattcggccggaccggaaccatgctggcctgctatctagtgaaagaacgggggctcgcagctggcgacgctatagcggagatccgccggctgcgccctggttccattgaaacatatgaacaggagaaagcagttttccagttctaccagcggacaaagtag

SEQ ID NO: 24210 - DNA, 4866 bp, synthetic construct
  source 1..4866: mol_type = other DNA; note = Synthetic coding sequence
atggagggctgcatgggcgaggagagcttccagatgtgggagctgaataggcgattggaggcgtacctggcaagggtcaaagcgctggaagagcagaacgaactgttgagtgctgaactcggaggattgcgagcccagtcagcagacacaagctggagggcgcacgccgatgacgaactcgcggcactcagggccttggtggaccagcgctggcgggagaaacatgctgctgaagtcgcccgcgataatctcgcagaagagttggagggagtcgcggggaggtgtcaacagctgaggctcgccagagagagaactacagaagaggttgctaggaaccgccgggcggtggaggccgagaaatgcgccagggcatggctgtcttcacaggtcgctgagttggagcgtgagctggaggcactgcgcgtggcgcacgaggaggaacgagtgggcttgaatgcccaggctgcatgcgccccaaggtgcccggcaccgccaaggggccctccggcccctgcccctgaggtggaggagctggcacgccgcctcggcgaagcctggcggggtgctgttcgtgggtaccaggaacgcgtagcgcacatggaaaccagtctaggccaggcgcgggaacggttagggagggccgtccagggggctcgggaagggagactcgagctccagcaactccaggcagagcgaggcgggctgctggagcgtagggccgcattagagcagagactcgaaggtcgctggcaggaacgtcttcgcgccacagaaaaatttcagcttgcagtggaagctctggagcaggagaaacagggcctgcagtcacagattgcacaggtcctggaggggcggcaacagcttgcccatttgaagatgagcctttcactggaggtggccacatatagaacactgctcgaagcagagaactcccggctgcagacaccagggggaggttccaagactagtctctcattccaagatccaaaattagagctacaattcccccggacaccggaggggaggcgtctgggcagtcttctccccgtgctttctcccacatccctgccatcacctttacctgctacactcgagacgccggtcccagccttcctgaaaaatcaggaattcctgcaggccaggacgcctaccctggcatccaccccaataccaccgacgcctcaggctccaagtcccgccgtcgacgctgaaatcagggcccaggacgctccgttaagccttctacagacgcagggcggccggaagcaggcgccagaaccactcagagcggaagccagagttgcaattccggcgtccgtactgcctggccctgaagaaccaggggggcagagacaagaggcgagcacaggccagagccctgaggaccatgcctcgttggcccccccccttagcccggatcactcctctttagaggcgaaagatggagaaagtggcggctcccgtgtcttttcaatttgccggggtgagggcgagggccaaatttggggtttggttgagaaagagaccgcaatcgaggggaaggtcgtgtcctctctgcagcaagaaatatgggaggaggaagacctcaatagaaaagagatccaagattcgcaggtgcccctggagaaagagacactgaaatctctgggcgaagaaattcaggagagcctgaagactttagagaaccagtcccacgaaacacttgagagggaaaatcaagagtgcccacgtagtctggaggaggatcttgaaactctgaagtcgctcgaaaaagaaaacaaggaactgctcaaagatgtagaggtggtgagacccttggagaaggaagccgttggccaactcaagccgactggcaaagaggacactcagaccctccagtccctccagaaagagaaccaggaactgatgaagagccttgagggcaatttggagacctttctctttcctggaacagagaaccaagagttggtctcttccttgcaggagaatctcgagtctttaactgccctcgagaaggagaatcaggagccactcagaagtcctgaggtcggggatgaggaggctttacgaccgctgaccaaagagaaccaagagcccctgcggtcgcttgaggatgaaaacaaagaggcgttcagatccctggagaaggaaaaccaggaaccattaaaaacgttggaagaagaggatcagtccatcgttcggcccttggaaacggaaaaccacaagagccttcgatcactcgaggagcaggatcaggaaacactgcgtacgctggagaaagagacacaacaacgccggagatctttaggggaacaggatcagatgaccctgcggccccctgagaaggtagatttggagccgctgaaatcactcgatcaagagatcgctcgccccctggagaacgaaaatcaagagtttctgaaaagtctaaaagaggagtcagtcgaagccgtcaaatccctagaaacagagatcctcgaaagcctgaaatcagccggacaggagaatctggaaacattgaaaagtccagagacccaggctcctctctggaccccagaagagattaaccagggagctatgaacccacttgagaaggagattcaagagccccttgagtcggtggaagtgaatcaagagacattccgactcttggaagaggagaaccaggagagtctgcgatcactgggagcgtggaacctggaaaacttacggagcccggaggaggttgataaagaaagccagcgcaacttagaggaagaagagaatcttggaaagggggaatatcaggaaagtcttcgcagcctagaggaagagggccaggaacttccccagtctgccgatgtgcagcgttgggaggacaccgtggagaaagaccaggaactggctcaagagagccctcccggaatggcaggtgtcgaaaacgaggacgaggccgagcttaatttaagggaacaggatgggttcactggcaaagaggaagtggtggagcagggagaactgaacgccacagaagaggtctggattcctggtgagggccatccagaatctcctgagcctaaagaacaaagagggttggtggagggggcctcggttaaagggggtgctgagggcttgcaagatcccgaagggcagtcccagcaggtgggagcccctggtctccaagcccctcagggacttccggaggctattgagccactggtcgaggacgacgttgcacccggaggtgatcaggcttctcccgaggtcatgctcggatctgagcccgcaatgggcgagtctgcggccggagctgaacctggccccggacagggcgtgggcggactgggagaccctgggcatttgacgcgggaagaagtgatggaacctcctcttgaagaagagtctttggaggccaagagagttcaaggcttggagggtccaaggaaagatcttgaggaggccggcgggttgggcaccgaattctcagaactgcccggaaagtcccgagacccatgggagccccctagggagggaagggaagaaagcgaggccgaagctccacggggcgcggaagaggccttcccggcagagacacttggtcatacagggagcgacgcacctagcccatggccactgggaagtgaggaggccgaagaagacgtgcctccggttctcgtgtccccatcaccaacgtatacccctatccttgaagatgcgccagggccccagccccaggcagaggggagccaagaggccagctggggagtgcaggggcgcgcagaggcactgggaaaggtcgagagtgagcaggaagagctaggaagcggagaaatcccagaaggcccccaggaagaaggagaagaaagccgggaggaatctgaggaggatgaactgggtgagaccctgcctgactctaccccactgggattctatctccgatcacccactagtccacgatgggatccaacaggggaacagagacctcctcctcagggagaaacaggcaaggaagggtgggacccagccgttctggcctctgagggccttgaggccccccccagcgagaaagaggagggcgaggaaggcgaagaggaatgtggacgggactctgacctaagcgaggaattcgaggacctgggcactgaagcgcccttccttccaggcgtgccaggcgaggttgctgaaccgttagggcaggtaccccagctgctcctggaccccgccgcatgggaccgagatggggagtctgatgggttcgctgacgaggaagagtctggagaggagggcgaagaagaccaggaggagggtcgagaacccggggccggacgatgggggccaggaagctcagtgggttcactgcaggccctgagcagctctcagaggggggaattcctcgagtccgactctgtctcagtaagcgtcccctgggacgattccttacgcggcgcggttgcgggcgcgccgaagaccgctctcgagaccgagtcccaggactctgccgaaccctcaggttccgaggaggagtccgatcctgtgtcacttgaacgggaggataaggtccctgggccgttagagattccttctggtatggaggatgcaggccccggagctgatatcattggcgtgaacggacaagggcctaatcttgaagggaagtctcagcacgtgaacgggggggttatgaacggcctggagcagtcagaggaagtgggccaaggaatgcctctcgtgagtgaaggagatcgaggctccccatttcaagaggaggagggtagtgccctgaagacatcatgggccggtgccccggtgcacctggggcaagggcagttcttaaagttcacccagcgagaaggagacagggagtcttggagctccggcgaggactag

SEQ ID NO: 24211 - DNA, 378 bp, synthetic construct
  source 1..378: mol_type = other DNA; note = Synthetic coding sequence
atggagcggcacaccagccaccccaaccggaaggtgcccgccaaggaggaggccaacgcagtgccgctttgtcgggcgaaaccatccccgagttacattaaccttcaggcttcatcacccccagccacattcctgaatatccagacaactaaacttccgagcgtggatcacaaacctaaggaatgtttaggactcctcgagtgtatgtacgccaatttgcagcttcagacgcagctggcccagcaacagatggctgtattggaacacctgcaagcctctgttacccagctcgcccccggcagaggatcaaacaacagctcccttcccgctctcagccctaacccactactgaatcacctgccacagttttctaagtag

SEQ ID NO: 24212 - DNA, 378 bp, synthetic construct
  source 1..378: mol_type = other DNA; note = Synthetic coding sequence
atggagcggcacaccagccaccccaaccggaaggtgcccgccaaggaggaagcaaatgctgttccgctttgccgggcaaagcccagtccaagttacattaacctccaggcgagctctcctccagccacctttctgaatatccagacaaccaaactgcccagcgttgaccataaaccgaaggagtgcctgggccttctggagtgtatgtacgcaaatttgcagctccaaacccagctagcgcaacagcagatggcagtgttagaacacttacaggcctctgtgacacagttggctccgggccggggctcaaataattcctcgctgcctgccctctctccaaatccactcctgaatcatctccctcagttcagtaaatag

SEQ ID NO: 24213 - DNA, 378 bp, synthetic construct
  source 1..378: mol_type = other DNA; note = Synthetic coding sequence
atggagcggcacaccagccaccccaaccggaaggtgcccgccaaggaggaagctaatgctgtccccctttgcagggctaagccaagccccagttacataaatcttcaggcctcttccccgccagcaacattcctgaacatccaaacaaccaaactgccatccgtcgaccacaagcctaaggaatgtctggggctcctggagtgtatgtatgctaatctccaactgcagacccagctggcgcaacagcagatggccgtattagagcacctgcaggcatccgtgacgcaattggcaccaggccggggtagtaacaattcttccctaccagccctttcacctaaccccctgctgaatcacttgccacagttctcaaaatag

SEQ ID NO: 24214 - DNA, 378 bp, synthetic construct
  source 1..378: mol_type = other DNA; note = Synthetic coding sequence
atggagcggcacaccagccaccccaaccggaaggtgcccgccaaggaggaggccaatgcagtgcccctgtgccgcgctaagccaagcccatcatatataaatctgcaagcttcatccccccccgccacctttcttaatatccagaccactaagcttcccagtgtagatcataagcctaaagaatgtttagggttgctagaatgtatgtacgccaaccttcagctccaaacacaattggctcaacagcagatggcagttctggagcatctgcaggcctctgttactcagcttgcccctggacgtgggtcaaataactcgtcacttccagccctgagtccgaacccgctgctgaaccatcttccccaatttagtaagtag

SEQ ID NO: 24215 - DNA, 378 bp, synthetic construct
  source 1..378: mol_type = other DNA; note = Synthetic coding sequence
atggagcggcacaccagccaccccaaccggaaggtgcccgccaaggaggaagctaatgccgtcccgctctgtcgagctaaaccaagcccaagctacatcaatctccaggcaagctctccaccggctacgttcttgaatatacagacaacgaagctaccatctgtcgatcacaagcccaaagagtgtctcggactgttggagtgtatgtatgccaacctccagctacaaactcagctagcacagcaacaaatggctgtgctcgaacacttgcaggctagtgttacccaactggccccaggtcggggatccaataattcgtctctcccggcactgtcgcctaacccactacttaatcatctgccccaattctcaaagtag

SEQ ID NO: 24216 - DNA, 624 bp, synthetic construct
  source 1..624: mol_type = other DNA; note = Synthetic coding sequence
atggccgaggccagcagcgccaacctgggcagcggctgcgaggagaaacgccacgaggggtcttccagtgaaagcgtaccccctgggactacgatttcacgggtaaagctgctggataccatggtcgatacattcctgcagaaactggtggcagccggctcctccccgctgttacactgggacggctctgccggcccaagactgccatccggcggacaatccgtgaagcaagccttttcatgggccgcctgtcggctgccccagggcaggaaagaagagatctccgacatcaaggaggaaggaaatcttgaggccgtgctgaacgcacttgataaaattgtggaggaggggaaagtgcgcaaggagcctgcatggcggcccagtggtatacctgagaaggatctgcacagtgtgatggcaccgtactttttgcaacagagagacacactgcggcgtcacgtccagaagcaggaggcagagaatcagcaattagccgacgcggtgctggccggtcggcggcaggtcgaggagcttcagcttcaagttcaggcccagcagcaggcatggcaggcactgcatagagagcagcgtgagctggttgccgtgctgcgcgagccagagtag

SEQ ID NO: 24217 - DNA, 618 bp, synthetic construct
  source 1..618: mol_type = other DNA; note = Synthetic coding sequence
atggccgaggccagcagcgccaacctgggcagcggctgcgaggagaagcggcacgagggatctagctccgaaagtgttcctcccggaacaacgatcagcagagtgaaactcctagatacaatggtagatacctttctgcagaaattggttgctgctggaagttaccagcgttttactgactgctacaagtgtttttatcagcttcagccggccatgactcagcaaatatatgacaaattcattgcgcagttgcagacctctatacgagaggagatctctgacatcaaggaagagggtaatctggaggcagtcctgaatgcactcgataaaattgtggaagagggaaaggtacgcaaggagcctgcatggcgcccctcagggatccctgagaaagaccttcatagtgtcatggcaccatatttcctccagcagagagatactcttcgcaggcacgtgcagaagcaggaggctgaaaaccagcagctggctgacgctgtgctggcagggcgaaggcaggtcgaagagttgcagctccaggtccaggcgcagcaacaggcctggcaggctctgcatagggaacagcgggaattagtagccgtgctgcgcgaacccgaatag

SEQ ID NO: 24218 - DNA, 543 bp, synthetic construct
  source 1..543: mol_type = other DNA; note = Synthetic coding sequence
atggccgaggccagcagcgccaacctgggcagcggctgcgaggagaaacggcacgagggaagcagcagtgagagtgtgccaccaggtaccacaatcagtcgtgttaaactgcttgatacaatggtggatacatttctgcagaagctggtagctgcaggcagttatcagcggttcactgactgttacaaatgtttttaccaattgcagccagccatgacccaacagatctatgataagtttattgcacagctgcaaacctctattagagaagagataagtgatattaaggaggaggggaaccttgaggctgtcctgaatgcccttgataagatcgtggaagagggtaaggttcgcaaagagccagcatgcaacggaactccttgcggcgccatgtgccggaatcgtaggcccaggacatcatcctggcagatgccgtcttggcagggcggtggcagatggcggagctgctcctaccgctcccgaccctcttccagaccggggcgcctgtataccgagaatagaggtagctggctcttgtgttag

SEQ ID NO: 24219 - DNA, 2253 bp, synthetic construct
  source 1..2253: mol_type = other DNA; note = Synthetic coding sequence
atggaggacctgttcgagaccttccaggacgagatgggcttcagcaatatggaggacgatggccctgaagaggaggagcgtgtggctgagccccaagccaacttcaacacaccgcaagccctacggtttgaggagttactggccaacctcctgaatgagcagcatcagattgccaaggagctatttgagcagctgaaaatgaaaaagcccagcgcgaagcagcagaaagaggtggagaaggtaaaacctcagtgcaaggaggtgcatcaaactctcatcctcgaccctgctcagcggaagcggctgcaacaacagatgcagcagcacgttcagcttctgacccagatccacttgctggccacctgcaaccctaacctgaacccagaggcatctagcaccagaatctgtctcaaagagttgggcacttttgcacagtcttcgatcgctctccaccaccagtataatccaaaattccagaccctgtttcagccatgtaacctgatgggcgcaatgcagctcatcgaggatttcagtacccacgtgtcaatcgattgctccccccataaaacggtcaagaagaccgcgaacgagttcccttgtctaccaaaacaggtcgcttggattctggcaacatcaaaagtatttatgtaccctgaactactcccagtgtgtagcctcaaggccaaaaacccccaggacaaaatactgttcacaaaagctgaggataacctgttagccctaggtttgaaacacttcgaggggaccgaatttctgaaccctctgatcagcaagtatctactcacatgcaagaccgcccgccagctgacggtgagaattaaaaaccttaacatgaacagagctcctgataacattatcaagttctataaaaagacaaaacagcttcctgtgctgggcaaatgctgtgaagagatccagccccaccaatggaaacctcccattgaaagagaggagcatcggcttcccttctggctgaaagccagcctcccctcaattcaggaagaactgaggcacatggcagatggagcccgggaagttggaaatatgacgggaacgacggagatcaatagtgatcaaggcctagagaaggacaactctgagcttggctctgagacaagatacccgcttttattgccgaaaggtgtggttctcaagttgaagcccgtggctgatcgcttccccaagaaggcctggcgccagaagcgctcaagcgtgctgaaacccctgctgattcagcccagcccttctttgcaacccagcttcaaccccggcaaaactcctgcccaatccacgcactctgaggccccacccagcaagatggtactcagaattccccatcctattcagccggcgaccgtcctgcagaccgtgcctggcgttcctcccctcggcgttagcggaggcgagtctttcgagtctccagccgctctacccgccatgccgcctgaggcgcgcaccagttttcccctgtccgagtcccagacactcctatcgtctgccccagtccctaaagtgatgatgcctagtcccgcatcatcaatgttccgcaaaccttacgttaggcgaaggccatctaagcgacgtggagctagggctttccgctgcatcaaacccgcccccgtgattcatccggctagtgtgatcttcactgtgccagctacgactgtgaagatcgtcagtctgggtgggggctgcaacatgatccaacccgtcaacgccgccgtcgcccagtctcctcagactatccctattgccaccttattggtgaacccaacctcgtttccctgccccctgaatcagccccttgtcgcttctagtgtctcaccgctaatcgtgagtggtaatagcgtgaatctcccaataccctcaacacccgaagacaaggcacatatgaacgttgacatagcatgcgctgtagccgacggagaaaatgcttttcaaggcctggagcctaagctggagccacaggagctctcgccactgagtgcaacggtgtttcccaaagttgagcactcccccgggccacccccagttgataaacagtgtcaggaaggcctgtctgagaactctgcctatcggtggacagtggtcaagactgaggaggggagacaggctctggagcccttgccccaggggatccaagaatccctcaataattcctcaccaggcgacctggaggaagttgtgaagatggagccggaggacgcaacggaagaaatttcagggtttctttag

SEQ ID NO: 24220 - DNA, 2667 bp, synthetic construct
  source 1..2667: mol_type = other DNA; note = Synthetic coding sequence
atggccggcgtgggccggagcggcggcccctggggccggacccggggcgggagatcagggaggctgggtgttagcctaggagctctttcctccctcccgctggaggaactgccccgccccctgtgctgcagacggtgcaggagacactttggatttgccctgcggggcgaaaccatccctgttagtgtcgccggctctgcttcaagccagtttgccccgctggctttacaccttagcctcttactgagcaggatttccgcatcacggctcacacggtggccccctcctgacaaaagggaggggtccgccgtggatcccgggaaacgtcgcagtctggctgccacaccgagttcctccctgccttgtaccttaatcgcactggggttgaggcatgaaaaggaagctaatgagctgatggaagatctctttgagacatttcaggacgaaatgggatttagcaacatggaagacgatggaccagaggaagaagaacgggtcgcagagccccaagcaaatttcaacaccccacaggctctgcgcttcgaggaactgctcgcaaatctcctaaacgaacagcaccaaatcgccaaagagctgtttgagcaactgaagatgaaaaaacctagcgccaagcaacagaaagaggttgaaaaggtgaaaccacaatgcaaggaagtgcatcagacactgattctcgaccccgcccagaggaagcgcctacagcagcaaatgcagcaacacgtacagctgctgacccagatccacctattagctacttgtaacccaaacttgaaccctgaagcttcttccaccaggatttgtcttaaagagctgggaactttcgcccagtcctcgattgctctccatcatcagtacaatcccaagtttcagactctgtttcagccttgcaacctgatgggcgcaatgcagctcatagaggatttttcgacccacgtctccatcgactgttctcctcataagaccgtgaagaaaactgccaacgaatttccttgcttgccaaagcaggtggcttggatcctggccacatctaaagtctttatgtacccagagttgttgccagtctgttctctaaaagccaaaaacccacaggacaaaatcttgttcaccaaagccgaagataatctgctggccctcggtttaaagcacttcgaggggacagagttcctaaatcctctgattagcaaatatctgcttacctgtaagacggcccgccaactgactgtgagaattaagaatctgaatatgaatcgcgcacccgacaatatcatcaagttctacaaaaaaacgaagcagctgcctgttctgggtaagtgctgcgaagagattcagccacatcagtggaagccacctattgagcgtgaagagcaccgcctccctttttggcttaaggcatcccttcctagtatacaggaggagctgcggcatatggctgatggtgctcgcgaggtaggaaatatgacaggcaccacagagataaactccgatcaggggttggaaaaggataacagcgaactgggcagcgaaactcgatacccgctcctgctgccaaaaggcgtcgtgttaaagttaaaacccgtcgcagatcgatttcccaagaaggcttggcgtcaaaagagatcctctgtcttgaaaccccttctgatccagccaagcccttctctgcaaccctcgtttaaccccgggaagacaccggcccaatcaacacattctgaggccccaccgtcgaaaatggtgttgcggattccacaccccatacagcccgccactgtcctacagactgttccaggtgtgccacctctcggagtaagcgggggggagtccttcgaaagcccagccgcccttcccgccatgcctcccgaagctagaacctcttttcccttaagcgagagccagacacttctgagcagcgcccctgttcctaaagtcatgatgcccagcccagcgtccagcatgttcagaaaaccatacgtacgccgccgccccagtaagagacggggggcccgcgccttccgctgcattaaaccagcaccggtaatacatccagccagcgttattttcactgtgcccgcaacaacagtcaagattgtctccctcggtggcggatgcaatatgattcagcctgtgaatgctgctgtagcccagtccccccagaccatacccattgcaacactgctcgtcaatccaacctctttcccatgtccacttaaccaacctttggtagcctcaagtgtgagccctctaatcgtgtccggcaattcagtaaacctcccaatcccatcaacacctgaagacaaggcccatatgaatgtggatatcgcttgcgcggtcgccgatggcgaaaacgcattccagggcttggagcctaagctggagccgcaggagctgagcccgctgagcgcaacggtgttccccaaggtcgagcactctcccggacctccccccgtggataagcagtgccaagagggactgagcgagaactctgcctaccgttggaccgttgtgaagacagaggaaggtcgtcaggctcttgagcccctaccacagggcattcaagagtctctgaacaactccagcccaggagatctagaagaggtagtcaaaatggagcctgaggacgctacagaagagatatccggattcctatag

SEQ ID NO: 24221 - DNA, 2607 bp, synthetic construct
  source 1..2607: mol_type = other DNA; note = Synthetic coding sequence
atggccggcgtgggccggagcggcggcccctggggccggacccggggtggccgtagcggacgactgggcgtgagccttggcgcattaagctctttgcccttagaggaactgccaaggccattgtgttgccggaggtgtcgtcggcactttggcttcgctctcaggggggagacaatccccgtatctgtggccggatctgctagtagtcagttcgctcctcttgctctgcatctgtccctcttgctatctcggatctccgcgtctcgcctgactagatggccaccccctgacaaaagggagggatcagcggttgatccaggaaagcggagatcactggctgcaaccccctcctcttcgctcccttgcacactcatcgcccttggtctccggcatgaaaaagaggccaatgagttgatggaggacttattcgagacctttcaggacgagatgggattcagcaatatggaggacgatggccccgaggaagaagagcgtgtggcagaaccccaggctaacttcaacacgccccaagccctgcggtttgaggaattactagccaacctgttaaacgaacaacatcagattgccaaagaactcttcgagcagcttaagatgaagaagccctccgccaaacaacagaaagaggttgaaaaggtgaaaccacaatgcaaggaggttcaccaaacactgattctggaccctgcgcaacgcaagagactccagcagcagatgcagcagcatgtccagctcctgacccagatccatctgttggccacttgcaaccctaatctcaaccccgaggcatcatcaaccagaatctgcctcaaagagctcggaacattcgcacagagtagtatcgcactgcatcaccagtataatccaaaattccagacactcttccagccatgcaacctcatgggggctatgcaactaatcgaagatttcagcacacacgtgtctatcgattgctccccccataagactgtcaagaagacggctaatgagttcccgtgcctcccaaagcaggtggcttggatattggccacaagtaaggtatttatgtaccccgaactacttccagtgtgctcccttaaagccaagaatccacaagataaaatactctttaccaaggctgaggacaacaagtatctattaacatgcaaaaccgcccgccaactgacagtgagaattaagaaccttaatatgaaccgcgcccctgataacattattaagttttataaaaaaacaaagcaactgccagttctgggaaaatgctgtgaagagattcagccacatcaatggaaaccccctattgagagggaggaacaccggctgccgttctggctgaaagcatccctgccatctatccaggaagaactgcgccacatggccgacggcgcacgcgaggtgggaaatatgaccggcactacagagatcaactcagaccagggattggagaaggataactccgaattgggttccgaaacaagatatcccctgctgctccccaaaggagtcgtgctcaagcttaaaccagtcgccgaccgtttcccaaagaaagcctggagacagaagcgaagcagtgtgctgaagcctctgctaatacagcccagtccatccctgcagcctagctttaacccagggaagacgcccgcacaatccactcactccgaggcccccccctctaaaatggttctgcgtatcccccacccgattcagcccgcgacagtcttgcaaacggtcccaggggtgccacccctgggtgtgtctggtggcgaaagttttgaaagccccgccgctcttccagccatgccacctgaggcaaggaccagcttcccactttctgaatcacagacgttgctgtcttccgcgccggtcccaaaggttatgatgccatctcctgcaagttccatgttccgaaaaccctacgtgagaagacggccttccaagcggcgaggtgctcgcgcattcaggtgtattaaacctgccccggtcatccatccagctagtgtgatctttaccgtccccgctacaactgtcaagatcgtctctctggggggggggtgcaacatgattcaaccggttaacgccgcggtcgcacagtctccccagaccattcccattgctactctgctggttaaccccacttcttttccgtgtcccctgaatcagccactggtggcgtccagcgtttccccgttgatagtgtctggtaatagtgttaacctgcctattcctagcacacctgaagacaaggctcatatgaacgtggacatagcttgcgcggtagcagatggagagaatgcctttcagggactggagccaaaactcgagcctcaggagctgagtcctctgtcagcaaccgtctttccgaaggtggagcatagcccaggtccccctccggtcgacaaacagtgtcaggaggggcttagtgagaatagcgcctacaggtggacagttgtcaagacagaagaaggacgccaggcgctggagcccctgccccagggaattcaggaaagcctgaataactccagtccgggcgatctggaggaagtggtgaaaatggagcctgaagacgcaactgaggagatcagcggcttcctgtag

SEQ ID NO: 24222 - DNA, 1575 bp, synthetic construct
  source 1..1575: mol_type = other DNA; note = Synthetic coding sequence
atggccggcggcgcccgggaggtgctgaccctgcagctgggccacttcgctggctttgtcggagcccattggtggaaccagcaggatgctgctctgggccgcgccacagactccaaggagcctcccggcgagctctgccccgatgtactatacagaacaggccggactctccacggacaggagacctacacaccgaggctcattctgatggatcttaaaggctcattgtcttctctgaaagaagaggggggtctgtatcgggacaagcagctcgatgcagccatcgcctggcaaggcaagttgaccacccataaaggaagctctccactgcccaccgcaaccacccccaaacccctgattcctacagaagcatctattcgcgtttggtcagattttttgcgggtgcatcttcatccaaggagcatctgcatgatccagaagtacaaccacgatggtgaagccggcagactggaggcctttggtcaaggcgagtccgttctgaaggagcccaaatatcaggaggaattggaagataggttgcacttctacgtcgaggaatgtgactatctgcaggggttccagatattatgtgacctgcacgacgggttcagtggcgtcggggctaaggccgctgaactcctacaggatgaatattccggacgaggcataattacctggggccttttgcccggtccctatcaccggggtgaggctcagagaaatatctacaggctgctgaatacagctttcggcctggtccacctgactgcacatagctccttggtttgcccactcagcttgggcggctctctcgggttgcggccagagcctcctgtcagcttcccttacctccactatgacgcaactcttccttttcattgcagtgcaatcttggcaacagccctagataccgtgacagtcccttatcgactatgttcctcacccgtcagcatggtgcacctcgcagatatgctgagcttttgtgggaaaaaagtggtgacagctggcgccataatcccttttccccttgcccccggacaaagtttacctgactcactcatgcagttcgggggcgcaacaccatggacccccctcagcgcatgtggtgagccatcaggaacaaggtgcttcgctcagtccgttgttctcaggggaattgaccgggcctgccacaccagccagctgactcccggcacgcctcccccctctgctctgcacgcttgtaccacaggcgaggaaattctcgcgcagtatctgcagcagcaacagcctggcgtgatgagtagctcacatctgttactcaccccatgccgcgttgctccaccctacccacatcttttctccagctgttctcccccagccgtggagagtattccggtgttcggggccctttgttcaagttcctccctgcaccagacgctggaggcgctggcccgagacctaaccaaattagacctgcgccgatgggcttctttcatggatgctggcgtggagcacgacgacgtcgccgagctccttcaggaactgcagtccctggctcagtgctaccagggaggcgattctcttgttgactag

SEQ ID NO: 24223 - DNA, 1479 bp, synthetic construct
  source 1..1479: mol_type = other DNA; note = Synthetic coding sequence
atgccccccacctgcagccccggcctgcggcggcaggactgggcccccggtcgctgtgccggtctgcacctgccccccagggcccctagtagtcctgccctgcaagccttggccggacaggctggcgtgcggtcctcctggagctttgccggtgtcccgggtgctcagcggctgtggatggccgaagcgcagtcaggcaccggccaactgcaagaacaaaagaaggggctgcttattgctgtgtccgtgagcgttgacaaaattatctctcactttggcgctgcacgcaatttagttcagaaggctcagttaggcgacagccgcctgtcgcctgatgtgggtcatcttgtcttaacaactctttgtcctgccctgcatgccctggtggctgatggcttgaagcctttccggaaggacctcataactggccagcgcagatcttcaccctggtccgtggtcgaagcctctgttaagcccggaagttccacacgttcccttgggacgctgtattcacaagtaagccgcctcgctcccctctctagctcaagatccagatttcatgcctttatcctgggtttgctgaatactaagcagttggagctgtggtttagctcactccaagaggatgcgggactgctaagtttgttatatctgccaaccggatttttcagcctggctcggggaggctgccccagtctgagtacagaacttcttctgctgctacagcccttgtcagttctgacgttccacttggatctgctcttcgaacaccatcaccaccttcctctgggccctccccaagcacccgcacctcccggaccccctcctgctcttcaacagaccatgcaggccatgctacactttgggggccggctggcccagtcactccgggggacttccaaggaagctgcatccgacccttccgatagtcctaatctaccaacgcctggctcctggtgggaacagctcacgcaggcctctagggtgtacgctagcggcgggaccgaaggttttccactctcccgctgggcacccggaagacacggaacggctgctgaggaaggcgctcaggaacgacccctgcccacggacgaaatggcgccgggaagaggattgtggctgggtcggttattcggcgtcccaggggggccagctgagaatgaaaacggtgcccttaaaagccgacgcccatctagttggctgcctcctacggtcagcgtgctcgctctcgtaaaacgtggagcaccaccagaaatgcccagcccccaagagctggaagcttcggccccgaggatggttcagacacacagggctgtgcgcgctctgtgcgaccatactgccgccaggcccgatcaattgtcctttaggcgtggtgaggtattgagagttattaccacggttgatgaagactggctccggtgtggccgggatggcatggagggactggtgcctgttggctacacttccttggtactgtag

SEQ ID NO: 24224 - DNA, 1302 bp, synthetic construct
  source 1..1302: mol_type = other DNA; note = Synthetic coding sequence
atggccgaggcccagagcggcaccggccagctgcaggagcagaagaagggactgctcattgcagtctcagtcagtgtcgacaagataatttcccacttcggggccgcccgcaatctggtgcagaaggcccagctaggagacagcagactgagccccgatgtagggcatctggtgttgacaacgctttgccctgccctgcatgccttggtcgccgacggtctgaagcccttcagaaaagatctcataaccgggcaacggcgttcttctccgtggtcggtcgtggaggcctctgtcaagcctgggagcagtacccggagcctgggcacgctgtactcccaggtttcccggctcgcccccctgagttcctctcggtctcgatttcacgcttttattctaggtctcctaaataccaagcagctggagctctggttcagctccctccaggaagacgctggcctcctgtctttactgtatctccctactggttttttctctcttgcgagaggcggctgcccctccctgtcaacagaattacttctactgctgcagcctttaagtgtgctgacatttcacctggatctcttgttcgagcaccaccatcacttgccactcggacctcctcaggctccggctccacctggccctccccccgccttgcagcagacgatgcaagctatgttacatttcggaggcagactggcccagagcctccgagggacgtccaaagaggcagcgtcagatccaagcgactctcccaacttgcctaccccaggttcttggtgggaacaactgacgcaggcgagccgcgtgtacgcgtccggcggtaccgaaggctttcctttgtcccgctgggcacccgggcggcacggcacagcggctgaggaaggtgcacaggagcggcccctccctactgacgaaatggcaccgggccgtgggctctggctgggacgactgtttggcgtgcctggtggtcccgccgagaacgagaacggggcgttgaagagccggcgcccatccagttggctgccacccaccgtcagcgtgttagctttagtgaagcgaggggcccccccagaaatgccatccccgcaagaactagaagcatccgctcccagaatggtgcaaacccaccgcgccgtcagagccctttgcgaccacaccgctgccagaccagaccagcttagttttagaagaggtgaggtactgcgggtgataactacagtggacgaggattggctaagatgtggcagagacggtatggaaggcctggtcccggttggctacacaagcttagttctgtag

SEQ ID NO: 24225 - DNA, 2709 bp, synthetic construct
  source 1..2709: mol_type = other DNA; note = Synthetic coding sequence
atgctgagcccccagcgggccctgctgtgcaacctgaaccacatccatctgcaacacgtcagcctcggactgcatctgagccgtcgcccggaactgcaggaggggccactatcaacgccccctccccccggagacacaggcggcaaggagtccaggggcccttgctccggcacactcgtcgatgccaattccaactcaccagctgttccatgtagatgttgccaagagcatgggcctggcctggagaaccgacaggacccgtctcaagaggaggagggggccgctagtccctcagaccccggctgtagctctagtctgtctagttgcagcgatctcagtccagacgagagccccgtctcagtgtacctacgcgatttgccaggggatgaggacgcacaccctcagccatccattatacctctcgagcaggggagccctttggcctccgccggccccggcacttgctcccctgatagcttttgctgttccccagacagttgtagtggcgcatccagttcccccgaccctggcttggactcgaattgcaacgcactgaccacctgtcaagacgtcccatcccctggtcttgaggaggaggatgagagggccgagcaggacctgcccacgtctgagttactggaggcagatgatggcaagatcgacgccgggaaaacagagccctcttggaaaattaaccctatctggaagattgacaccgagaaaaccaaagctgagtggaaaactacggaaaacaataacactggatggaagaataacggaaacgtcaattctagctggaaaagcgaaccagagaaattcgattctggttggaagactaacactagaattaccgattctgggtccaagaccgatgccgggaagatcgatgggggttggcgatccgatgtttccgaagaacctgtgccacatcgtacaatcacgtccttccacgagctggcgcagaaaagaaaacgtggtcccggactgcctctcgtgccccaagctaagaaggatcgctccgattggttgattgtgttttctcccgataccgaactacccccttcaggcagccccggaggctctagtgcgccaccaagggaagtaacaacatttaaggaattgagatctcggtctagagcgccagcccccccagtgccccccagagatccacctgtcgggtgggcgctggtaccgccgcgcccaccacctccgccagtcccaccaagaaggaagaaaaatcgaccagggcttcagcctatagccgagggtcaatcggaggagggcagagcagtctccccggcggctggtgaagaggctcccgctgccaaagaaccaggggcacaggcgggcctggaggttcggtcttcttggtcatttgcaggcgtccccggcgctcagagactctggatggctgaggcccaatccggcactgggcagttgcaggaacagaaaaaggggctgctaattgccgtctccgtgtcggtagacaaaatcatcagccattttggcgcagctcgtaacctggtgcagaaagcccaattgggcgatagtagactgtcccccgatgttggtcacctggtgttaaccactttatgccctgccctgcatgccctggtggccgatgggttgaaacccttcaggaaggacctgatcactggccagcgtcgatcttctccttggtctgttgtggaggcaagcgtgaaacccggatcttcaacacgctctcttgggacactgtatagccaagtgtcgaggttagctccactgagctcctcccgatcaaggtttcacgcgttcatcttgggcctgctcaacaccaagcagttggaactctggtttagttccttgcaagaagacgctggattattgagtctgctatatctaccgacagggttcttttccctggctcgcggcgggtgcccaagcctgtcaacagaactccttctgttattacagccactgtcggtgttgacatttcatctggacctgcttttcgagcaccatcaccatctgcctttagggccgccacaggcacccgcgccacccggtccccccccggccctgcaacaaactatgcaggccatgttacattttggcggaagactcgcgcagtcccttagaggcacctcgaaggaagccgcttcggacccctctgattcaccaaatctgcctactccaggaagctggtgggaacagctgacgcaagctagccgcgtctacgcctccgggggtacagaagggttccccttgtcccggtgggctccaggaaggcacggcaccgctgccgaagagggcgctcaggaacggccccttccaactgacgaaatggcaccgggtcgagggttatggctgggccgcctgttcggcgttcctgggggcccagccgagaacgaaaacggagccctgaaatccagaaggccgagcagttggctgccccctacagtctccgttcttgcccttgtaaagagaggcgcaccccctgagatgcccagcccacaagagctcgaggcaagtgccccaagaatggtccaaacacaccgggctgtacgggctttgtgtgaccacacagcagcaagacccgatcagctctcattccgtcgcggtgaggtgctgcgggttattaccactgtcgatgaagactggctcaggtgcgggcgggacgggatggaaggcctggtgcccgtgggctacacttccctggtactgtag

SEQ ID NO: 24226 - DNA, 2391 bp, synthetic construct
  source 1..2391: mol_type = other DNA; note = Synthetic coding sequence
atgctgagcccccagcgggccctgctgtgcaacctgaaccacatccatctccagcatgtgtccctcggccttcacctgagtaggagacctgagttgcaggaagggccgctaagcactccacccccccctggggataccggggggaaagagagccgcggtccttgcagtggaactctggtcgacgccaattccaattcaccggccgtaccttgcaggtgctgccaggaacatgggcctggcttagaaaacagacaagacccgtctcaggaggaagaaggcgcagcttcgccttccgacccaggctgttcatcttcgctgtccagttgctctgatttgtcacctgacgagagtccggtgtccgtgtacttaagagatctaccgggagatgaggacgctcacccgcaaccgtctatcattcccctggagcaggggtcccctctcgctagcgccggccccggcacatgctcacctgactccttttgttgtagccctgatagctgttctggggcaagtagcagccctgatccaggattagacagcaattgtaatgccctgaccacctgccaggacgttccttcacccggcctggaggaggaagacgagagggctgagcaggacctgcccacctccgagttactcgaggccgatgacggcaagatcgacgcgggcaaaacagagccttcgtggaaaatcaaccctatctggaaaattgatacagagaaaaccaaggctgaatggaaaacaaccgaaaacaacaacactggctggaagaacaacggcaatgtgaattccagctggaaatctgagcctgaaaagtttgacagtggttggaagacaaacacgcgcattaccgacagcggctccaagaccgatgctggcaaaattgatgggggctggcggtcagacgttagcgaggagccagtgccccaccgtactattacatcctttcacgagttggcacagaaacgaaagcgcggccctgggctgccactagttcctcaggcgaaaaaggacagatcagattggcttattgtgtttagcccggataccgagctgccaccttccggcagtcccggaggctcaagtgctcccccaagagaagtgactacattcaaggaacttagatcccgaagcagggcgcctgccccccctgttcctccgcgcgacccccccgtggggtgggctcttgttcccccccgcccgccgcctccgcccgtccctcctcgacggaaaaaaaatagaccagggctgcagccaatcgcagagggtcaaagtgaggagggcagagctgttagccctgctgcgggggaggaagctcccgccgccaaggaaccaggtgcacaagctgggcttgaggtgcgcagctcttggtcttttgcgggggtacctggggctcagaggctctggatggctgaggctcaatctggcaccgggcagctgcaggagcagaaaaagggcttgctcatcgccgtttccgtttccgtggataaaattatcagccatttcggggcagccagaaatttggtccagaaggcccagctgggcgactcgcgcctgagtcccgatgtcggacaccttgtcctgactaccctgtgccctgcactgcatgcactggtcgccgatggtctcaagccctttagaaaagatctgatcacaggccagcgtaggtcatcaccctggtcagttgtggaggcctctgttaagcccggcagtagcacgagaagtttgggaaccctgtattctcaggtgtcccgcctcgccccacttagctcatcccggtcccgtttccatgcattcatactcggccttttaaacaccaagcagcttgaattatggtttagttcgctccaagaggacgcaggcagttggtgggagcaactcacacaggctagccgggtgtatgctagcggaggcacagagggctttcccctttcaaggtgggcaccagggcggcacggtacagctgccgaggagggggcccaggagcgacctcttccgacagacgagatggcccccgggcgcgggttatggctgggcaggttattcggagtgcccggcgggcctgcagagaacgagaatggcgcgctgaagtctcgccgaccatcctcttggttaccccctacagtaagcgtgttggccctggtaaaacgaggggctccgccagagatgccctcccctcaggaactggaggctagtgctcctcggatggttcagacacatagggctgtgagagcactatgtgatcacaccgcggctagacctgatcagctctctttccgtaggggagaagtcctgcgagtcatcaccacagtggacgaggactggctcaggtgtggacgcgatgggatggaaggactagtgcccgttggctatacgagccttgtcctgtag

SEQ ID NO: 24227 - DNA, 513 bp, synthetic construct
  source 1..513: mol_type = other DNA; note = Synthetic coding sequence
atggccagcgtgagcagcgccaccttcagcggccacggcgcccggagccttctgcagttcctgcggctggttgggcagctgaaacgggtgccacggaccgggtgggtgtatcggaacgtccaaagaccagagtccgtgtctgatcacatgtaccgaatggctgtgatggccatggttattaaggacgaccgcctcaacaaagatcgcgaggccatgaagcaaattacgcagctgctgccagaggaccttcggaaggaactctacgaactgtgggaggaatatgaaacacagtcgtctgcagaggcaaaatttgtaaaacagttagaccagtgtgagatgatactgcaggcttcagaatacgaagatttggaacacaagccgggtcgcctgcaggatttctacgattcaacggcaggcaagtttaaccacccagagatcgtgcagctagtgtccgaactagaagcagaacgcagtaccaatattgcggccgccgcctcagagccccacagttag

SEQ ID NO: 24228 - DNA, 396 bp, synthetic construct
  source 1..396: mol_type = other DNA; note = Synthetic coding sequence
atggaggcccaggcccagggcctgctggagaccgagcccctgcagggcactgatgaagacgcggtagcgagtgctgacttttcctctatgctcagcgaggaagaaaaggaggagcttaaagccgaactcgtccagttagaggacgagatcactaccctgcggcaggtgctgtccgctaaagagagacacctagtcgaaattaagcagaagctgggcatgaatttgatgaacgagctgaagcagaatttttcaaagagctggcacgacatgcaaacaactaccgcatataagaaaacccacgaaaccctgtcccacgccggtcagaaggctactgcggctttttctaatgtgggcaccgctatctcgaagaagttcggagacatgcgaagaaagtag

SEQ ID NO: 24229 - DNA, 435 bp, synthetic construct
  source 1..435: mol_type = other DNA; note = Synthetic coding sequence
atggaggcccaggcccagggcctgctggagaccgagcccctgcagggcacagatgaggatgccgtggctagcgctgattttagctctatgctgtccgaggaggagaaagaggaactgaaagccgaacttgtccagctggaggacgaaatcaccactttgaggcaggttctgagtgctaaagaaagacatctcgttgaaataaagcagaaactcggtatgaacctgatgaacgagctcaagcagaatttcagcaagtcctggcacgatatgcagactaccaccgcatacaaaaaaacacacgaaaccctgagccacgccggacagaaggccacagcggccttctccaacgtcgggacagccatctccaagaagttcggcgatatgagttatagtatcagacattccataagcatgccagctatgagacgtaagtag

SEQ ID NO: 24230 - DNA, 948 bp, synthetic construct
  source 1..948: mol_type = other DNA; note = Synthetic coding sequence
atggccagctgccccgacagcgacaacagctgggtgctggccggctccgaatccctgcctgtcgaaaccctcggcccggccagcaggatggatcctgagtccgaaagggctctccaggcgcctcacagcccttccaaaactgatggcaaggaactggcagggacaatggatggcgagggcacgctttttcagaccgagagcccacagtcagggtcaatcctgaccgaagagactgaggtcaaagggactctggaaggcgacgtctgtggggttgaaccaccaggtcccggcgatacagttgtgcagggagacctgcaggaaacaacagtcgttacaggtctgggaccagatacccaggaccttgagggccagtctcccccacagtctctcccctccacccctaaggctgcctggataagagaggaaggccgatgttcctcaagcgacgatgacaccgatgtggatatggagggtctgcgacgtcgtcgtggacgggaggccgggccccctcaacccatggtccccctcgccgtggagaatcaagcaggagggggcttatcagagtccgagacaggaccaatggaggaggtcgaacggcaagtgcttcctgaccctgaggtcttggaggctgtgggggacagacaggacgggctcagagagcagttgcaggctcccgtgccaccggactcagtgccctccctgcagaatatgggattactgctggacaaactagccaaagagaaccaagacatcaggctactccaagcacagttacaggtgggcacaggccgccgtgggtgggcccgggtgacccacttgggccaggcctcagtcctggcgtccagtccgaagcgtaatgtgtcttacctccccacccatcccgatcctcctctgtcccattattcgcaaggcgtgtttcctgtgttgggttcccacccattatgctag

SEQ ID NO: 24231 - DNA, 2196 bp, synthetic construct
  source 1..2196: mol_type = other DNA; note = Synthetic coding sequence
atggccagctgccccgacagcgacaacagctgggtgctggccggcagcgagagccttccggtggaaacgttaggcccagcttctaggatggaccccgagagcgaaagagccctgcaggctccccatagtcccagcaagaccgacggaaaggagctggcagggacgatggacggtgagggcaccctctttcagaccgaatcaccacaatcgggaagcattctgaccgaggagacagaggtgaagggcacattggaaggggacgtctgtggggtcgaaccccccgggccaggggacacagtggtgcagggggatttgcaagaaaccacagtggtgacagggctaggtcccgatacacaggatctcgagggacagtcacctcctcagtccttgccatcgacacccaaggccgcttggatcagggaagagggaagatgttccagctctgatgatgatacagacgtggacatggaggggttgcgcagacgaagagggagggaggctggtcctcctcagccaatggtgccgctggcagtggagaatcaggccggcggtgagggtgccgggggcgaactggggatttctctcaacatgtgtcttctcggtgccctggtcttactgggcctaggtgtcttactcttctctggaggtctctccgaatccgagaccggtcctatggaagaagtggagcgacaagtgctcccagaccccgaggttctagaggctgtgggagaccggcaggatggactccgtgaacagctgcaagcccccgtgcctcctgatagtgtgcctagcctgcaaaacatgggtctcttacttgacaaacttgcaaaggaaaaccaggacatccgactgctgcaagcccagcttcaggcacagaaggaggaactgcagtctctcatgcaccagcccaaggggctggaggaggaaaatgcacagctgcgaggtgctctgcagcaaggggaagcattccaacgggcccttgaatccgaattgcaacagctgagggcaagactgcaaggcctggaagctgactgcgttcgagggcccgatggagtctgtctgtctgggggacgaggaccacaaggggataaagcgatacgggaacagggaccacgggagcaagagccagaactgagttttttaaagcaaaaggagcagctggaagcggaagcccaagctcttagacaagaactcgagagacagagacgactgctaggctctgtacagcaagacctcgagcgttctttacaggacgcctctcggggagaccctgcccacgcagggctcgccgaattgggccataggttggcccaaaagctccagggtcttgagaactggggacaagatccaggagtgagtgctaacgccagcaaagcttggcaccagaagagccacttccagaacagtcgcgagtggtccggcaaagaaaagtggtgggatggccaacgagaccgaaaggctgagcactggaaacacaagaaggaagagtccggccgggagcgcaaaaaaaactggggcggacaggaggaccgcgagcccgccggtagatggaaagaaggtaggcctcgagtcgaagagtcgggttctaaaaaggagggtaagcggcagggacccaaagaacccccacggaagtccggtagctttcatagcagcggagagaagcagaaacaaccccgatggcgtgaaggaaccaaggattcgcatgaccctctgccttcctgggctgagctattacggcccaagtacagggcccctcagggctgttcgggagttgatgaatgtgcccgccaggaaggcttaacttttttcggaacagagctcgccccagttcgccagcaggaactcgcttctctgctcagaacctatctggccagactaccttgggctggccagctcacaaaagaactgccactgagccctgccttctttggtgaggatgggatcttccggcatgataggctgaggttccgtgattttgttgacgcccttgaggactctctggaggaagtagctgtccagcagaccggcgatgatgacgaagttgatgacttcgaagactttatcttcagtcactttttcggggacaaggcacttaaaaagcgttccggcaaaaaggataagcactcacagtccccacgggctgcaggtcctcgtgaaggccatagccactcacatcatcatcatcatcgcggatag

SEQ ID NO: 24232 - DNA, 2109 bp, synthetic construct
  source 1..2109: mol_type = other DNA; note = Synthetic coding sequence
atggaccccgagagcgagcgggccctgcaggccccccacagcccctccaaaacagacgggaaagagctggccggcactatggatggagaaggcaccctattccagacagagtccccacagtctggcagtattctgaccgaggagaccgaagtcaaggggactctggaaggagatgtttgcggagtcgagcctccaggccccggcgataccgtcgtccaaggcgatcttcaagagactactgtggtgaccggactgggccccgacacccaggatctcgaaggccagtccccacctcagagcttgccatccacacctaaggcagcctggatcagagaggaggggcgctgctcaagctccgacgatgacacggacgtggatatggagggcctgagacgccggaggggacgcgaagctggccctccgcagcctatggtaccactggctgtggaaaatcaagcaggaggggaaggggcaggcggagagctcggcatttctttaaatatgtgcttgctgggcgcccttgtgctgctgggtctcggcgtgctgctgttcagtggcggcttgagcgaatccgagaccgggcctatggaggaggttgagcgacaggttttaccggatcctgaagttttagaggcggtgggagatagacaggacggtcttagggagcagttgcaggctcctgtgccccctgatagcgtcccatcattgcaaaacatgggcctcctcctggacaaacttgccaaggagaatcaagatatacggctgctgcaggctcaattacaggcccaaaaagaggagttgcagtcacttatgcatcagccgaagggcttagaagaggagaacgctcagctccgaggggcactccagcagggggaggcctttcaacgtgcactggagagcgaactccagcagctgcgagccagacttcaaggcctggaggctgactgcgtgcgaggcccagacggcgtatgcctgtcgggagggagaggaccacagggcgataaggccatacgcgagcaggggcctagggagcaggagccagaactgagctttctgaagcagaaagaacagcttgaagccgaggcccaggcgctaaggcaggagttagagaggcagaggagattgttggggtcagtccaacaggacttggaacggtctctccaggacgcttcccggggggatccggcccacgcaggattggccgagctcggtcaccgattggcccagaagttgcagggccttgaaaattggggccaggacccaggagtgagtgccaacgcgagcaaggcctggcatcagaagtcacatttccagaactctagggagtggtccggcaaagaaaagtggtgggatggacagagggacaggaaggcagaacattggaagcacaagaaagaagagagtggtcgcgagaggaagaaaaattggggaggtcaagaagatcgagagcctgcgggccgctggaaagagggtcgtccacgagtggaggagagcggtagcaagaaagagggcaaacggcagggacccaaagagccaccccgcaaaagcgggtccttccactcgtccggcgaaaagcagaagcaacctaggtggagagagggcaccaaggatagccacgacccattgccttcttgggcagagctcttgaggcctaagtaccgggcacctcagggatgtagtggagttgatgagtgtgctcggcaagagggactgaccttcttcggtaccgagctggcacctgtgaggcagcaggagctcgccagcctcctgcgcacatacttagcccgtttgccatgggcaggccagctgaccaaggagttgcctctaagtccagcgttttttggagaggacggaatattcaggcatgaccgactacgttttagggactttgttgacgcgttggaggactccctggaggaagtagctgtgcagcagaccggagacgatgacgaggtcgatgatttcgaggacttcatattcagtcacttcttcggggacaaagccctgaaaaagcgctcaggaaaaaaggataagcattcccagagcccaagggctgctggtcctcgggaagggcatagccacagtcaccaccaccaccatcgcgggtag

SEQ ID NO: 24233 - DNA, 2427 bp, synthetic construct
  source 1..2427: mol_type = other DNA; note = Synthetic coding sequence
atgatctggcggaacaactggaagagcaccaccggccggctgaacgttaaacttcaaagcgataagctgcaacatggatgcgggcccgattactcttctgcatggctgcccgccaatgagagcctgtggcaggccacgaccgtacctagtaatcatcggaataatcacatccgaaggcatagcatcgccagcgatagtggggacacaggaatcgggacctcatgctctgactcggtggaggatcactcaacctctagcggcactctgtctttcaagccttcccaatctctcattactctgccaaccgcccatgtgatgccatctaactcttctgccagcattagcaagcttagagaatctttaactccagacggatccaaatggtcaacctccttgatgcagaccctggggaaccattcacggggggagcaggattcctcacttgatatgaaagatttccgcccactgcggaaatggtcttcattgtctaagctgaccgctccggataattgtggacagggcgggactgtgtgccgagaagagagccgaaacgggctcgaaaagattgggaaagcaaaggcactcacatctcaacttagaaccatcgggccctcctgcctccatgattctatggaaatgttaagattggaagacaaagaaataaataagaaaaggtcctctacacttgactgcaagtataagtttgagtcgtgttcgaaagaagatttccgagcttctagtagtaccctccgaaggcagcccgtggatatgacatacagcgcactcccggaatccaagcctatcatgacctcctctgaggcatttgagcccccaaagtatttaatgctgggccagcaggcagtcggaggcgtgcctatccagccctccgtgcggacacaaatgtggctcaccgaacagctacgtacaaatcccctcgaggggcgtaataccgaggacagctatagccttgccccctggcagcaacagcagattgaggactttcgccaaggatcggagaccccgatgcaggttctaaccggcagttcgcgccaatcatactcacctggataccaggatttttctaagtgggaatccatgctgaagataaaagaaggactgttgagacagaaagagattgtcattgacagacagaagcagcagatcactcatttgcatgagaggatcagggataacgaactacgggcgcagcatgccatgttagggcattatgtaaattgcgaggattcatacgtagcaagtctccagccccagtacgagaatacttctttacagactcctttctccgaggagtccgtctcccacagccagcagggggagttcgagcaaaaacttgcaagtaccgaaaaggaggtgctgcagttgaatgagtttctgaagcaacgacttagcctttttagcgaagagaagaaaaaactggaggaaaagctgaagactagggacagatatattagttctctcaagaaaaagtgtcagaaggaatcagaacagaataaagaaaagcagcggcgcatcgaaactttggagaaatacctggcagatctgcctacgctggacgacgtccagagccagagtttacagcttcagatcctcgaggagaagaataagaatctccaggaggccctaattgataccgaaaagaagctggaagaaatcaagaaacagtgtcaagataaagagacccagctgatttgtcagaaaaaaaaagaaaaggagctcgttaccactgtacagtcccttcaacagaaggtagagagatgtttagaggacgggatccggttgcccatgctggacgctaagcagttgcagaatgagaacgacaacttacgacaacaaaatgaaaccgcttccaagatcattgattctcagcaggacgagatagacagaatgattttagagatacaatctatgcagggcaaactgtcaaaggagaagctgactacccagaaaatgatggaggaactggagaaaaaggagcggaatgtgcagagactcactaaagcgctgttggagaatcagcgtcaaaccgatgagacatgttcactcttggaccagggacaggaacccgatcagagcagacagcagaccgtgctcagcaagcgccctctgttcgacctaacggtcattgatcagctgttcaaggaaatgtcgtgctgcctctttgatctcaaggctttatgtagcatactgaatcagcgcgctcagggtaaggaacccaatcttagcttactgctgggaatccgttccatgaactgttccgcagaggaaaccgagaatgaccattccacggagacactcactaagaaactgtcagacgtgtgccaactaagaagagatattgacgagctcaggaccacaattagtgataggtacgcccaggacatgggagataactgcatcacgcagtag

SEQ ID NO: 24234 - DNA, 2418 bp, synthetic construct
  source 1..2418: mol_type = other DNA; note = Synthetic coding sequence
atgtggggccggttcctggcccccgaggccagcggccgggacagccctggcggagctcgcagcttcccggctggacctgactacagttctgcttggctgccagcgaacgagagcttgtggcaggctacaaccgtcccgtcaaaccaccggaataatcacatcaggcgccactccatcgctagcgactctggggacactggcataggcacctcttgcagtgactcagtagaagaccactccaccagtagcgggacactctcatttaaaccaagtcagagtctgattactctgccaaccgcacatgtgatgcctagcaatagctcggcctccatctctaagctgcgggaatcactgaccccggatggttcaaagtggtccacgagtttaatgcagactctgggtaatcattcgcgcggcgaacaggacagttcactggacatgaaggatttcagacctttacggaaatggagtagcctgagtaagctgacagctccggataactgtggtcagggagggactgtttgtagggaggaaagcaggaacggactcgagaagattggtaaggcaaaagctttaacatctcagctccgcactatcggaccaagttgcctgcacgacagcatggaaatgctacgcttggaggacaaagagatcaataagaagagatctagtactctggattgcaagtataagtttgagagctgctcaaaggaggattttagggcaagctctagcaccctgcggcgccagccagtggatatgacttattctgcccttccagagtcaaagccaatcatgacttcttccgaagcattcgaacctcccaagtatctaatgttgggacaacaggctgttggcggcgtgccaattcagccttccgttagaactcaaatgtggttgacagagcagttgcgaacgaaccctctcgaagggcggaataccgaggacagttactccctggccccatggcaacaacaacagattgaggactttcgacaaggctctgagacgccaatgcaggtactgactggatcaagtaggcagtcgtacagccctgggtatcaagacttttcgaaatgggaaagcatgttgaaaatcaaggagggcctgctgaggcagaaggagatcgtaattgatagacagaagcagcagatcactcatcttcatgagagaatccgcgacaacgaattgagagctcaacacgcaatgctcggccattatgttaactgtgaagattcttatgttgcaagtctgcaacctcagtatgaaaatactagtctgcaaactccattttcggaggagtcggtctcccatagccaacagggggagttcgagcagaaactagccagcaccgaaaaagaagtgttgcagcttaacgagttccttaagcagagactctccctgttctcagaagaaaaaaagaaactggaagagaaactgaagacccgcgaccggtacattagcagtctcaagaaaaagtgccagaaagaaagcgaacaaaataaggaaaagcaacgccgcatcgagactctggaaaagtacctggcagaccttcctactctcgatgatgttcagtctcagagcctccagttgcaaatcttggaggagaaaaataagaacttgcaggaggctctcatagatacagaaaaaaaattagaagagatcaaaaaacagtgtcaggacaaagagacccagctgatttgccagaagaaaaaggaaaaggaactcgtcactacggtccagtccttgcagcagaaagtcgaacggtgcctggaagatggtattcggttgcccatgctcgacgctaaacagctgcagaatgaaaatgacaacctgcgacagcaaaatgagactgcaagcaaaattattgattcacagcaagacgaaatcgacaggatgatcctggaaatccaaagtatgcagggcaaactatcaaaagaaaaactgactacccagaagatgatggaagagctcgagaagaaggagcgcaatgtccaaaggttaaccaaagccctgctagagaatcagaggcaaacggatgaaacctgcagtttgcttgaccagggccaagaacctgatcaatcacgtcagcagacagtgttgtcaaagagaccgctttttgatcttaccgtgatcgaccagttatttaaagaaatgagctgttgcctgtttgatctaaaagccttgtgcagcattttgaatcagcgcgcccagggcaaggagccaaacctgagcctcctgctcgggattaggtctatgaactgcagcgccgaagagacggaaaacgaccactccaccgaaacactgactaagaagctctcagatgtttgtcagttaagacgcgatattgatgaacttcgtaccaccataagtgatcgctatgctcaggacatgggtgacaattgcattacccagtag

SEQ ID NO: 24235 - DNA, 1488 bp, synthetic construct
  source 1..1488: mol_type = other DNA; note = Synthetic coding sequence
atggtggaggagcacgagctgcggaaggagcggatccaggaggactataacgataagtactgggatcagcgttacaccatcgtgcaacagcagattccatcttttcttcagaagatggctgataagattctctccaccgggaagtacctcaatgtggtgcgtgaatgcgggcacgatgtgacttgccccgtggccaaggaaatcatttacaccctcaaagagagagcctacgttgagcagattgagaaggcattcaattacgcatcaaaagtccttttagactttctcatggaggagaaagagttggtggcccacctccgaagcataaagagatactttctcatggatcaaggcgatttctttgtgcattttatggacctagcggaggaagaattgcggaagcctgtggaggatatcaccccccctaggttggaggccttgctcgagctcgcccttaggatgagcaccgccaacaccgacccttttaaggacgatctcaaaatcgacttaatgccccacgacctaatcacccaattgcttagagtgctagctattgagacaaaacaagaaaaagctatggcgcatgcagatcctacggagctcgcactgtcagggttggaagcattttccttcgattacatcgtgaaatggccactctcgttaatcataaaccgcaaggccctgacaagatatcagatgttgtttagacacatgttctactgcaaacacgtagagcggcagctttgcagcgtgtggatatctaataagaccgcaaaacagcacagcctgcattccgcccaatggttcgccggagctttcaccctaagacagcgcatgctgaatttcgtgcagaatatccaatactatatgatgtttgaggtgatggagcccacttggcatatcttggaaaagaatctcaaaagcgcctccaacatcgatgatgtgctagggcatcataccggctttctcgacacgtgcctgaaagactgtatgttgactaacccagagctgctgaaagtgttctcaaagctcatgagtgtatgcgtcatgttcacgaactgtatgcagaagttcacacagtcgatgaagctggacggggagcttgggggacagacactggagcatagtactgtgcttggacttccagctggcgcagaggaacgtgcacgcaaggagctggcgcgaaagcacctggccgaacacgccgacacggttcagttagtgagcggatttgaagccaccatcaacaaatttgacaagaatttcagtgcccatctgttggacttgctggctcgcctttcaatttattctaccagcgactgtgaacatggaatggcctccgtaataagccgcctggactttaacgggttctatacggaaaggctcgagagactgtccgccgagaggtcccagaaggccacgccacaagtgcctgtgttgagaggcccccctgcgcccgctccccgggtggctgtgaccgcacagtag

SEQ ID NO: 24236 - DNA, 2709 bp, synthetic construct
  source 1..2709: mol_type = other DNA; note = Synthetic coding sequence
atgagcgagttccggatccaccacgacgtgaacgagctgctgagcctgcttcgagtccatggaggtgatggtgcagaggtgtacattgacctcctgcaaaaaaatcgcactccatacgtgactaccacagtttctgcccactccgctaaagtgaaaattgcggaattctcgcggaccccagaggactttctgaagaaatatgacgaattgaagtccaagaacacacgtaatctggaccctttggtgtatttattgtctaaactgactgaagataaggagacgttacagtacctgcaacaaaacgcaaaggagagggctgaactcgctgccgccgcggtggggagttccaccacgagcatcaatgttccggctgccgcctctaagatttccatgcaggaactcgaagagctgcggaagcagttaggctcagtggcgacagggtcgaccctgcaacagtctctggaacttaagagaaaaatgctccgagacaaacagaacaagaagaactcgggccaacatctgcccattttccccgcatgggtgtatgaaagacctgcacttattggcgatttcttgatcggggctgggatttcgacggacaccgctctgcctattggcaccttgccactggccagccaggaatcagctgtagtggaagatttactatatgttctggtcggcgtggatggccgctatgtttccgctcagcctctggccgggagacaaagccgaacattcctggtggacccgaacctcgatctgtccatcagggagctggtacaccgcatcctaccagtggccgccagctactctgccgtgacgcgctttatcgaagaaaaatcctcgtttgagtatggacaggttaaccacgccctagccgccgccatgagaaccctggtcaaggaacatttgatcttggtgtcccagctggagcaactgcatcggcagggcctgctgagcctgcagaaattgtggttctacatacagccagccatgcgaactatggacatactggcctccttggccacttcggtggataagggcgaatgcctgggtggtagcacacttagtctgctacatgatcgctcgttcagctacaccggcgactctcaagcacaggaactttgtctgtacctaaccaaagctgcatcagccccttacttcgaggtcctagagaaatggatctaccgcggcatcattcacgatccttattccgaattcatggtcgaagagcacgagttaagaaaggagcggatccaggaggactacaatgataaatattgggatcagcggtatacgatagttcaacagcaaataccaagctttctgcagaagatggccgacaaaatcctgtccactggaaaatacctcaatgtggtgcgggaatgtggacatgatgtaacctgccctgttgccaaagaaattatctatacattgaaggagagagcttatgtggagcagattgaaaaagcgtttaactacgcatcaaaagtcctcctggattttttaatggaggagaaagagttagtggcccatctgcgtagtatcaaaaggtacttcctgatggaccagggagacttcttcgtgcatttcatggacctcgccgaggaggaattgagaaagcccgttgaggatatcacccccccgcgactagaggctctgttggaattggcacttaggatgagtacggctaataccgatccattcaaagacgatctaaaaatcgatcttatgccgcacgacctgataacacagctcctgagggtgctggctatagagacaaaacaggagaaagctatggcccacgccgacccaactgagcttgccctatccggcctcgaggctttcagctttgactatattgtaaagtggcctttgtcgctgatcataaatcggaaagccctcacaaggtaccagatgttgtttcggcacatgttttactgcaaacatgtagaacgccaactgtgcagtgtctggatttccaacaagactgccaagcaacacagccttcactccgctcaatggttcgccggggccttcacacttcgccaacgtatgctgaacttcgtgcaaaacatccagtactacatgatgttcgaagttatggagcctacatggcatattctcgagaaaaatctgaagtcagcatcaaatattgacgacgtgctggggcaccacaccgggtttcttgacacctgcttaaaggactgtatgctgaccaacccagaactcctgaaagtgttttccaaactgatgtccgtttgcgtgatgtttaccaactgtatgcagaaattcacccagtcaatgaagttggacggtgagctgggcggccagaccctggaacactcaaccgtgctggggttgcctgccggggccgaagagcgcgcaagaaaagagctggcgcgcaagcacctagccgagcatgccgatactgtgcagctggtcagtggctttgaggcaacaataaataaatttgacaaaaatttctccgcacacctcctcgacctcctggccagactcagtatctattcgacatccgactgcgaacacggaatggccagcgtcatctcccgattggattttaacgggttctacactgaaagactggagcgattgtccgctgagcgcagtcagaaggctacgccgcaggtcccggtgctgcggggtcctcccgcccccgcaccgcgagtagccgtgaccgctcagtag

SEQ ID NO: 24237 - DNA, 1620 bp, synthetic construct
  source 1..1620: mol_type = other DNA; note = Synthetic coding sequence
atggacgccatggccagccccggcaaggacaactaccggatgaagtcctataaaaataaagcgctgaacccacaggagatgagacgccgacgggaagaggaaggaattcaattgaggaagcagaaaagggaggagcagctattcaagaggcggaatgtctacttgccgcgcaatgatgaaagcatgctagagtcacccatccaggatcccgacatctcttctacggtaccaattccagaagaggaggtcgttactaccgatatggtgcaaatgatcttttctaacaacgcagaccagcagttaacagcgacccagaaattccgcaagctattatcaaaagaaccaaaccccccaattgatcaggtgatccagaaaccaggagtagttcaacgatttgtgaagtttttggagcggaacgaaaactgtactttgcaattcgaggctgcttgggccttaacaaacatcgccagtggaaccttcctccatacaaaggttgttattgagacaggggctgtacctattttcattaagcttttaaacagcgaacatgaggatgtgcaagaacaggccgtgtgggcactgggcaatatagcaggagataacgcagaatgtagggacttcgttctgaattgtgagatcctcccaccacttctggaattgctgacaaattctaatcggctcaccacgaccaggaatgctgtctgggccctcagcaacctttgccggggtaaaaatccacctcccaacttttctaaggtttccccttgcctgaatgtgctgagtcgtctgcttttttcctcagaccctgacgttctggccgacgtctgctgggccttatcttacctgtccgatggcccgaatgataaaattcaggctgtgattgattccggggtatgtcggcgactggtcgaactgctcatgcacaacgactataaggtcgtatccccagctttgcgggccgtcggaaacattgtgaccggcgatgatatccagacacaggtgatactcaattgcagcgcgctgccttgcctcctgcaccttttgagtagccctaaagaaagcattaggaaggaggcttgctggaccgtgtctaatattactgccggcaaccgcgctcaaattcaggctgtgatcgacgcaaatatttttcctgttctgattgagattctgcaaaaggcagagtttagaacgcgcaaggaggcagcttgggcgattactaacgctacaagcgggggtactccggaacaaatcaggtacctggtggccctgggctgtatcaagccgttgtgcgacctcctgactgtgatggattctaagatcgttcaggtggcgctgaacggcctggagaacattttgaggctgggcgaacaagagtcaaagcaaaacggcataggaatcaacccctactgcgcccttatagaggaagcatatggattagacaaaattgagttcctacagagtcatgagaatcaggagatctaccagaaggccttcgatctcatcgagcactacttcggagtggaagaggacgacccaagcattgtgcctcaggtggacgaaaatcagcagcagttcattttccaacaacaagaggctcccatggatggtttccagctgtag

SEQ ID NO: 24238 - DNA, 453 bp, synthetic construct
  source 1..453: mol_type = other DNA; note = Synthetic coding sequence
atgcggggcgaccggggccggggccggggcggccggttcggcagcagaggaggccccgggggtggctttcggccatttgtccctcacatcccatttgatttctatctgtgtgagatggccttcccccgggtgaaacctgcacctgacgaaacctccttcagcgaagctcttcttaagagaaaccaggaccttgctcccaattctgcagaacaagcgagcatattgagtttagtgaccaaaatcaacaatgtgattgacaatctgatcgtggcccccggtacgttcgaggttcagatcgaggaagtgcgacaagttgggagctacaagaagggcacaatgacgactggtcacaatgtggccgacctggtggttattcttaaaatcctgccgacctgcgagtgtgcctgcttctggagctgggaacagaacatcgcgctgggcctgggagtgtag

SEQ ID NO: 24239 - DNA, 348 bp, synthetic construct
  source 1..348: mol_type = other DNA; note = Synthetic coding sequence
atggccttcccccgggtgaagcccgcccccgacgagaccagcttcagtgaggcgctcctgaaacggaaccaggacctggcccccaattcagctgaacaggcttctattctcagcctggttaccaaaataaataatgtgatcgacaacctgatagtggcccctggcacgttcgaggtccagatcgaggaggtgcggcaggtggggtcttacaagaaaggcacaatgaccacgggtcataacgtagccgatttggtggtgatcttgaaaattcttcccacactggaagccgtggccgcattgggcaataaggtggtggaatcattgagagcccaagatccatccgagtag

SEQ ID NO: 24240 - DNA, 312 bp, synthetic construct
  source 1..312: mol_type = other DNA; note = Synthetic coding sequence
atgagcgactgctacaccgagctggagaaggccgtgatcgtgctggtcgaaaacttttacaaatatgtctcaaagtacagcctagttaagaataaaatctctaaaagcagcttcagggaaatgctccagaaagagctaaaccatatgttgagcgatactgggaatcgtaaagccgcagataaactgattcagaatttggacgccaatcatgacggccggatctcttttgatgaatattggacactaatcgggggcattaccggtccgattgcaaaactgattcatgaacaggagcagcaatcgagcagctag

SEQ ID NO: 24241 - DNA, 312 bp, synthetic construct
  source 1..312: mol_type = other DNA; note = Synthetic coding sequence
atgagcgactgctacaccgagctggagaaggccgtgatcgtgctggttgagaatttttataaatacgtatccaaatacagccttgttaagaataaaatttccaaaagttcctttcgcgaaatgttgcagaaagaactcaaccacatgctgtctgataccggtaaccggaaagctgctgataaactgattcagaacctggacgctaaccatgacggtcggatatcctttgatgaatattggacactgataggcggcatcacgggtccgatagctaaacttattcatgagcaagaacagcagagcagctcctag

SEQ ID NO: 24242 - DNA, 312 bp, synthetic construct
  source 1..312: mol_type = other DNA; note = Synthetic coding sequence
atgagcgactgctacaccgagctggagaaggccgtgatcgtgctggtcgaaaatttctacaaatatgtaagcaaatattctcttgtgaagaacaaaataagcaagtccagtttccgtgagatgcttcaaaaggaactaaatcacatgttgagtgatacgggaaatcgcaaagccgcagataagttgatccaaaacttggatgccaaccacgacggaagaattagtttcgacgagtattggacacttatcgggggtatcactgggccaatcgctaaactcattcacgagcaagaacagcagtcctctagctag

SEQ ID NO: 24243 - DNA, 312 bp, synthetic construct
  source 1..312: mol_type = other DNA; note = Synthetic coding sequence
atgagcgactgctacaccgagctggagaaggccgtgatcgtgctggttgagaacttctataaatacgtctccaagtactccctcgtgaaaaataagataagcaaatcatcattcagggagatgctccagaaggagctcaaccacatgctgagtgatactgggaatcggaaagctgctgacaagctgattcagaaccttgacgctaatcatgacggaaggatatcgttcgatgagtattggacacttattggcggcatcaccggtcccatcgccaagctcatccatgagcaggagcagcagtcttcttcctag

SEQ ID NO: 24244 - DNA, 306 bp, synthetic construct
  source 1..306: mol_type = other DNA; note = Synthetic coding sequence
atgagcaacacccaggccgagcggagcatcatcggcatgatcgacatgttccacaagtacacaggacgtgatggcaaaatcgagaagccaagtctgttgaccatgatgaaggagaattttcctaacttcctcagcgcctgtgataagaaggggattcactacctagccacggtgtttgagaagaaagataaaaacgaagacaagaagatcgacttctccgaatttttgagccttctgggcgatatcgccgccgactaccataaacagtctcatggtgccgctccttgctccggtggttctcagtag

SEQ ID NO: 24245 - DNA, 306 bp, synthetic construct
  source 1..306: mol_type = other DNA; note = Synthetic coding sequence
atgagcaacacccaggccgagcggagcatcatcggcatgatcgacatgttccacaaatacacaggccgggatggaaaaattgaaaagccttcgcttttgacaatgatgaaagagaattttccaaatttcctgagcgcctgtgacaaaaaggggatccactaccttgccacggtcttcgagaagaaggacaaaaatgaggataagaagatcgatttctcagaattcctgtctctgcttggcgacatcgccgccgattatcataaacagagccacggtgccgcaccttgttcaggcggcagtcaatag

SEQ ID NO: 24246 - DNA, 222 bp, synthetic construct
  source 1..222: mol_type = other DNA; note = Synthetic coding sequence
atgagctaccagcagcagcagtgcaagcagccctgccagcccccccccgtttgtccaacaccaaagtgccctgagccttgcccaccccccaaatgccccgagccgtatctgccacctccctgcccgcccgagcattgcccacctcccccttgccaggataaatgtcccccagtccagccatatcccccttgccaacagaagtatccacctaagtctaaatag

SEQ ID NO: 24247 - DNA, 219 bp, synthetic construct
  source 1..219: mol_type = other DNA; note = Synthetic coding sequence
atgagctaccagcagcagcagtgcaagcagccctgccagccccccccggtgtgtccaaccccgaagtgtcccgagccctgcccacccccaaagtgcccagagccttgtcccccacctaagtgtccacaaccgtgtcctccacagcagtgccaacagaagtgtcccccagtaactccctcccctccatgtcagcctaagtgcccccctaagtccaagtag

SEQ ID NO: 24248 - DNA, 219 bp, synthetic construct
  source 1..219: mol_type = other DNA; note = Synthetic coding sequence
atgagctaccagcagcagcagtgcaagcagccctgccagccccccccagtctgccccactcctaaatgtccagagccatgtcccccacctaagtgtcccgagccatgcccccctcccaagtgcccccagccctgcccaccccagcagtgccagcaaaagtgtcctcctgtgacaccatctcctccctgccagccgaagtgcccacctaagtctaaatag

SEQ ID NO: 24249 - DNA, 219 bp, synthetic construct
  source 1..219: mol_type = other DNA; note = Synthetic coding sequence
atgagctaccagcagcagcagtgcaagcagccctgccagcccccccctgtttgcccaactcccaagtgtcccgagccgtgtcctcccccgaagtgtccagagccgtgcccatctcctaaatgtccccagccttgtcctccacagcagtgtcagcagaaataccccccagtcaccccctcccctccttgccagccaaaatgtccccccaaatccaaatag

SEQ ID NO: 24250 - DNA, 219 bp, synthetic construct
  source 1..219: mol_type = other DNA; note = Synthetic coding sequence
atgagctaccagcagcagcagtgcaagcagccctgccagcccccccccgtctgccccacgcctaagtgtccagagccttgtccccccccaaagtgtcctgaaccctgtccaagccctaaatgcccccagccatgcccgcctcagcaatgccagcagaaataccctcccgtcacaccgtcacctccctgccaacccaaatgtcccccaaagagtaagtag

SEQ ID NO: 24251 - DNA, 219 bp, synthetic construct
  source 1..219: mol_type = other DNA; note = Synthetic coding sequence
atgagctaccagcagcagcagtgcaagcagccctgccagccccccccagtatgccccacacctaaatgtcccgagccctgcccaccacctaaatgcccagagccttgtccttcgccgaagtgcccacaaccgtgcccccctcaacaatgccagcaaaagtacccacctgtcacaccctcccccccatgccaacctaagtgtccacccaagtctaaatag

SEQ ID NO: 24252 - DNA, 8553 bp, synthetic construct
  source 1..8553: mol_type = other DNA; note = Synthetic coding sequence
atgcccaagctgctgcagggcgtgatcaccgtgatcgacgtgttctaccagtacgccacccagcacggcgaatatgatacactcaataaggccgaactgaaggagctgcttgagaacgaatttcaccagatcctaaagaacccaaacgacccagacactgttgatattatcctgcagtccctggatagagatcataacaagaaggttgacttcactgagtaccttctgatgatctttaagctcgtacaggctaggaacaaaataatcggcaaggattattgccaggtttcaggatccaagctccgcgacgatactcatcagcatcaagaagagcaagaagagacagaaaaagaggaaaataagaggcaagaatcctctttcagccatagctcctggtctgctggcgagaatgatagctatagtcggaacgtgagaggcagcctgaaaccggggaccgagtctatttcacggcgcctcagtttccagcgggatttttctggtcagcacaatagctatagtgggcagtcatcttcttacggcgagcagaacagcgattcccaccagtctagcggacggggccagtgcggttccggttccggccagtcgccaaattatgggcagcatggcagcggctctggacagtcctcctctaacgatactcatggcagcggaagtggtcaaagctcggggttctcccagcataagagcagttccggccagtcctccgggtatagtcagcacggcagcggttctggccattcttctggttatggccagcacggctctcgttcggggcaatcatcccgaggagagaggcatcgaagttcttcaggttcgtcctcgtcttatggccaacacggttcagggagccgtcagtctctcgggcatggacgtcaaggtagtggctcgagacagtcaccctctcacgtgcgacatgggagtgggtcgggtcactcatcatcacacggccaacacggttctggttccagctactcatatagccggggacactatgagtctggctccgggcagacatcggggtttggtcagcatgagtctgggtccggacagtcttctggatacagtaagcacggaagcggctctggccacagctccagtcagggtcagcatgggagcactagtggtcaggcgtcttcatccggccagcacgggagctcatctcgccagtcatcctcatacggacagcacgaatctgcatcaagacacagcagcggacgcggccagcatagttctggatcaggtcagtcccctggccacggtcagcgagggtctggctctgggcagtcccctagttctgggcagcatggtacagggtttggacggtccagctcttcagggccttacgtgtctgggagcggctattccagcgggttcgggcatcacgagagtagcagtgaacacagctctgggtacacgcaacatggaagtggatcgggccactcctccgggcatggccagcatggatcgagatccggtcagtcatcccggggagagcggcagggatcctccgccgggtccagctcaagctacggccagcatggatctggtagcaggcagagtctgggccatagcaggcatggtagcggcagtgggcagtcaccctctccttcccggggaagacacgaatccgggagccgacagtcctcgtcctacgggccccacggttacggctccggtagatcctctagcagaggtccttatgagagcgggtccggccatagtagcgggctgggccatcaagagtcaaggagcggccaatcctcgggctacggccagcatgggtcatctagcggccactcaagcactcatgggcagcacggcagtacctccggccagagctcctcctgcggccagcatggtgcgacctccgggcaatctagcagtcacggacaacacgggtccggctcttcgcagtccagtagatacggtcagcaaggctcaggctcaggacaatcaccctctcgtggccggcatgggtccgattttgggcatagctcatcgtatggtcagcacggttccgggtccgggtggtcatcttcgaacggacctcacggctccgtctccggtcagtccagcggttttggccacaaatccggcagcggacagtctagtggatattctcagcacggctccgggtcctctcatagcagtggttacaggaagcacgggtcacgtagtggccagtcctctaggtccgagcagcacggaagcagttctgggttgtcctcatcttacggacagcacggctcaggaagccaccagtcctccggccacggtagacagggatccggatccggtcatagcccgtcacgagttcggcatggttcctcatctggacactcatcctcccatggtcagcacgggagcgggacctcctgttcgtcaagttgtggccactacgagtcagggagtggtcaggcctccgggttcgggcagcacgaatcaggctcagggcagggatatagtcagcatggatccgccagcggtcattttagctctcagggccggcatggatccaccagcgggcagagttcaagctcaggacagcacgatagtagttctggccagtcttcttcgtatggacaacacgaatcggcctcccaccacgcgagcggccggggcaggcatgggtcaggatcggggcagagccctggacacgggcagcgtggcagtgggtctggacagtcgccgagctacggacgccatggcagcgggagcggcaggagctcttcatcaggaagacacggcagtggcagcggacagtcttctggcttcggacataaatcaagctctggacagtcttcgggctacactcagcatggaagcggatcgggtcactcctcctcctatgagcaacacggctctcgtagtggacagtcgtctagaagtgaacagcatggatcttctagtgggtctagctcctcctatgggcagcacggaagtggatcgcggcaatccttgggacacggacagcacgggtccgggagtggccagtcaccctcgccatccagaggacggcacgggagtgggagtgggcagagttcatcctacgggccctaccggtcaggctctggatggtcatcctcacgtggcccatatgagtctggtagcggccattctagtggacttggccaccgcgagagccggtccgggcaaagtagcggctacggtcaacacgggagctcatccggacactcctcaacgcatggccagcatggtagcacctctggccaatcatcctcttgcggtcagcatggcgcctcttcaggacaaagctcatctcatggccagcacgggtctggctctagtcagtcttccggttatggccgacagggctccggctctggacagtcgcccggccatggccagagaggcagcgggagccggcagagcccatcctatggtagacacggctccggctccggtcgatcttcatcatctggccagcacgggagcggacttggtgaatcttctggattcgggcaccacgagagcagcagcgggcagagttcttcttattcccagcacggctctggtagcggacacagcagtgggtacggccagcacggcagtcggtcaggtcaatcctccaggggggaacggcatgggagctcttcagggtcatcctcacactacggacagcatggctccgggagccgacaatccagcgggcacgggagacagggctccgggtcgggccattccccctcccgaggccggcatggatccggccttgggcacagctcctctcatggacagcacggctccgggagcggcagatctagcagccgagggccttacgagagccgttccggacacagttccgtttttggccagcacgaaagcggaagtggccattcgtctgcctactcccagcacggtagcggaagtggccatttttgctcacaaggacagcatggtagcactagtggacagagcagtaccttcgaccaggagggcagctccacaggtcaaagctcctcttacggacaccgagggtctgggtcctctcagagtagcgggtacggccggcacggcgcaggtagtgggcagtccccaagccggggccggcatgggtctggttcaggacatagtagttcctacggacagcacggctcaggctccggctggagctcttctagtggtcgacatggatcaggttctggtcaaagcagtggtttcgggcaccatgagagcagttcctggcagagcagcgggtgtactcagcatggctctggatcaggccacagtagctcctatgagcagcatggctcaagatcgggccagagctcccggggtgagcggcatgggtcgtcctccggcagcagcagctcttacggccagcatggctcgggaagccgtcagtcactgggccatggccagcatgggtccgggtccgggcagagtccatctccgtctagaggccgacacgggagtgggtccggccaaagcagttcctatagcccatatggctctgggtccgggtggtcaagctcaagggggccttacgagagcggctccagtcatagtagcggtctgggacaccgcgagtctcgatcgggacagtctagtggctatggccagcatggctcctcgtctgggcactcatccactcatgggcagcacgggagcaccagcgggcaatcctcctcttgcggccagcatggcgctagtagcgggcaatctagctcacacggccagcacggatctggcagctcccagagctcagggtacgggcgccaaggcagcggctccgggcagtctcctggacatggtcagagaggctctgggagtcggcagtctccctcatacggcagacacggatctggatctggcaggagcagttcatcgggccaacacggcagcgggctgggtgaatccagcggttttggccatcacgagtcaagctccgggcagagcagtagctactctcaacatggcagcgggagcggacatagttccgggtatggccaacacggttcacgtagcggacagtcctctaggggcgaaaggcacggtagctcatcccgctcatcctctaggtatgggcagcatggcagcggttcgcgccagtcctccggacatgggagacagggctctggttccggccagagcccttctcgtggcaggcacgggagcggcctggggcactcgagttcgcacgggcaacacggatcaggcagcggtcgctcttcttcaaggggtccatacgaaagtagaagcggccactcctcagtgttcgggcagcacgagtccggctcaggacattcctcagcatactcccagcacgggagcggaagtggccacttctgtagccagggtcagcacggttctacttcaggacagagctcaaccttcgaccaggagggttcttctacaggccagtcatcttcgcacggccagcacgggtcaggcagcagccagtcctcttcttatggacagcaaggctccggctccggccagtctccctcccgaggtagacacggatccggttccggccacagttccagttatggccaacatggttctggctcaggctggtctagcagcagtggtcgccacggcagtggatccggccagtcaagcggctttggacaccacgagtctagttcctggcagtcttctggatatacacagcacgggagcgggagtgggcactcaagcagctacgagcagcacggttctcggtcaggccagtctagcaggggtgagcagcatggctcttcctctggctcctcgtctagttacggccagcacgggtctgggagtaggcagtccttaggccatggtcagcatggaagtggcagcggacagtctcccagcccctcccgtggaagacatggttctggctcaggccagtcctccagctatgggccttatggctcaggaagcggttggagcagcagccgaggcccatatgaaagtgggagtgggcacagctccggcttgggccatcgggaatctagatcaggccagtcgtccggatacggacagcacggtagctcatcagggcattcctctactcacggccagcacggctcggcttcagggcagagctcgagctgcggacagcatggtgcttcttctggacaaagctcaagccatggccagcacggctcaggctcaagccagagttcgggatacggccgccagggaagcggaagcgggcagagccctggtcacggacagcggggcagcggtagccgccagtctccctcttacggcagacatggttcagggtctggccggtcttctagcagcgggcagcatggcccggggttgggtgagtcttctggattcggacatcacgaatcttccagcggccagagttcgagctattcgcagcacggctctgggtccggacattctagcggctacggacaacatggctctcgttctggccaaagcagccgcggagaacggcacggctccagcagcggctccagcagcagatatgggcagcatggctccggtagccgccagagcagcgggcatgggaggcaaggatcaggaagcgggcactctccatctcgcgggcgccacgggagtggaagcggccattcatcttcccatggacagcacggctcgggcagtggaagatcatcaagccgcggcccctacgagtcgcgctccggacactcgtccgtgtttggtcagcacgagagtgggagcggccactcctcagcctactcacaacatggcagcggtagcggtcacttctgttcacaggggcagcatggctcaacatccggacaatcttccacttttgatcaggagggtagctcaacaggacagtcctcttctcatggccagcacggttctggctcttcccaatcttccagttacggccagcaggggtccggctcaggacagtcacccagtaggggacgccacggatccggatcagggcatagctccagctacgggcagcacggaagcgggtctggatggtcaagctcaagcggccgccacggctcagggtctggtcagtcttccggtttcggacatcacgagtcctcatcttggcagtcttctggctatacacagcatggctctggaagcggacatagctctagctatgaacaacacggcagccgaagcggccagtcctcacggggagaacggcacggtagttccagtggatcatcgtcatcttacgggcagcatggatctgggagtcgtcagtcactgggccatgggcagcacggctctggtagcggccagtctccttcaccctctagagggagacatggatctggaagtggccagtcttcctcatacagtccctatggtagcggtagcgggtggtcctcatcccgtggaccctatgaatcggggtcagggcactctagtggactgggacacagggaatcaagatccgggcagtcctccggatacggtcagcacggatcttcctcggggcacagctctacccatggacaacatggatctacttcaggacagtctagcagctgcggacagcatggcgcctctagcggccagagcagtagccacggccagcatgggtcagggtcaagccaaagctctgggtatggccgccagggatccggatcaggtcagagtcccggacatgggcagcgcggcagcgggagccgacagtcacctagctatggcagacacggttcaggcagcggaaggtcgtcctcctcagggcagcacggctcaggcctcggagagtcttctggcttcggccatcacgagtctagctccggccagtccagcagctattcccaacacgggagcggctctggccatagctcgggttacgggcagcacggctcaaggtcaggtcaaagctccagaggggagcgccacggcagcagtagcggtagtagttcccactatggtcagcacggttcagggtcccgtcaatcctcaggccacggacgacaggggtctggctccgggcagagcccctcgcgcgggcgacacggatccggattgggacatagctctagccacggccagcatggctccggctctggaagatctagttcaaggggaccttacgagtccaggctgggccactcatctgtatttggtcagcatgaatcggggagtggccacagcagtgcttactcgcagcacggaagcggctccggtcatttttgttcgcaaggtcaacatggcagcacctctggtcaaagctctaccttcgatcaagaggggtcatccacaggccaaagctcctcatacggtcacagaggctctggctcctcccaaagttcagggtatgggaggcatggcgctggcagtggccagtccctcagccatggccgccacgggagcggatccggtcagtccagcagctacggccagcatggctctgggagcggccagtcctccggttattcccaacacggtagtggaagtggacaagacggctactcctattgtaaggggggtagcaaccacgatgggggttccagtggttcttacttcttgagcttcccatcatcgacctcaccatacgaatacgtgcaggaacagagatgttacttttaccagtag

SEQ ID NO: 24253 - DNA, 876 bp, synthetic construct
  source 1..876: mol_type = other DNA; note = Synthetic coding sequence
atgagcagcggcgccgacggcggcggcggcgccgccgtggccgccagatccgacaagggatctccgggagaagacggcttcgtgccatctgcgctcggtaccagagagcactgggacgctgtctacgaaagagagttacagacgtttcgggaatatggtgatacgggagaaatctggtttggagaagaatccatgaacaggctgatccgatggatgcagaaacacaagattcctctagacgctagcgtgctagatattggcactggcaacggggtatttctcgttgagcttgccaagtttggatttagcaacatcaccggcatcgattattcgccgtcagccatccagctctcaggttccattattgagaaagagggcctgtctaacattaagctgaaggtagaagatttccttaatctgtcaactcagctgtctggcttccatatctgcattgacaagggaaccttcgacgccatcagccttaaccccgataatgctattgagaaacgtaagcagtacgtgaaaagtctgagtagagtgctgaaagtgaagggattcttcctcattacatcctgcaattggacaaaggaagagctactcaacgaatttagtgaagggtggagtactgtggccggcttttggctcacggccgctctgacttcttgggcccaggccatattttccacctcagcctctagggttggcggtacaacaggaacacatcaccacgcgtggatcatcttcgtgttcttggccgagactcgcttctgtcacgtagtacaggctgggctggagttgctggggtctagcgatagccctacatggcctccgaaggtcctcggtttgtaccatgcccggcctagcctcgcattttag

SEQ ID NO: 24254 - DNA, 633 bp, synthetic construct
  source 1..633: mol_type = other DNA; note = Synthetic coding sequence
atggccccctggggcaagcggctggccggcgtgcggggcgtgctgcttgatattagtggtgtgctgtacgatagcggagcaggcggcgggaccgctatcgcagggtcagtggaagcagtcgctagactgaagcggagtcggctgaaagtgcggttttgtactaacgaaagccagaagtcaagggcggagctggtggggcagttgcagcggctaggatttgatataagcgaacaggaggtgacagcccctgctcccgctgcctgtcagatactcaaagagcaaggattgcgaccttatctgttgatccatgatggggtccgctccgaatttgaccagatagacacttctaacccaaactgtgtggtcatcgcggacgcgggagaaagcttttcttaccagaatatgaataacgcgttccaggtgttaatggaactcgagaagcccgtccttatctcactgggcaaaggtcggtactataaagagacgagcggtttgatgctggacgtgggcccatatatgaaggccctggagtatgcatgtgggatcaaagccgaggttgtcggtaaaccatcccccgagttcttcaagtcagccctgcaagcgataggggtcgaggcccaccaagcccaatag

SEQ ID NO: 24255 - DNA, 813 bp, synthetic construct
  source 1..813: mol_type = other DNA; note = Synthetic coding sequence
atggccccctggggcaagcggctggccggcgtgcggggcgtgctgttggacataagcggcgtgctctacgatagtggagccggcgggggtacagccatcgctgggtctgttgaagcagttgcgagactcaagaggagtcgtctcaaggttcggttctgcaccaatgaaagtcagaaatctcgcgctgagctggtgggccagcttcagaggctcggatttgatatttctgagcaggaagtgaccgccccagcgccagctgcttgtcaaatcctgaaggagcaaggtctaaggccatatctcctaatccacgacggcgtaaggtctgagtttgaccaaatcgataccagcaaccccaactgcgtggtgattgctgatgctggggagtccttcagttatcagaacatgaacaatgccttccaagtgcttatggaactggaaaaaccagtcctcatcagtctagggaaaggccgttattataaagagacatctgggctgatgcttgatgtgggcccatatatgaaggcccttgagtatgcctgtgggattaaagcggaagttgtaggcaagccttctccagagttttttaaatccgctttgcaggccatcggggttgaagctcaccaggccgtcatgattggagatgacatcgtgggtgatgtggggggcgcacagcggtgtggcatgcgggcccttcaagtcagaacagggaagttcagaccatccgacgaacaccacccagaagtcaaggctgatggttatgttgacaaccttgcggaggccgttgacctactgctgcagcatgccgataaatag

SEQ ID NO: 24256 - DNA, 3948 bp, synthetic construct
  source 1..3948: mol_type = other DNA; note = Synthetic coding sequence
atggccgacaccgacctgttcatggagtgcgaggaggaggagctggagccctggcaaaaaatttctgatgtcatagaagactcggtggtcgaagattacaattccgtggacaaaacaaccacagttagtgtatctcagcagcccgtgtcggcaccggtgcctattgctgcccatgctagtgtggcaggccacctttccacctcaacaaccgtgtcgtcttccggagctcagaacagcgatagtacaaagaagactctcgtgacactcatcgccaacaacaatgccccaggcacccagttcgtgaagccgacagtgggagttccccaagtgttcagccagatgacccctgtgagacctggatccacgatgcccgtgcggccgaccaccaatacttttaccacagtcattcctgcgacccttaccatccgctctactgtgccacagtcccagtcacagcagacaaaaagtactccatcaacatcaacgactccaacagctactcagcccaccagtttagggcaattggccgttcaaagcccaggtcaatcaaaccagaccacaaaccctaagcttgcaccctccttcccctctcctcctgctgttagcatcgcatcgttcgtgacagtgaagagacccggagttaccggggaaaatagcaatgaagttgcaaaactggtaaatactcttaataccattccatccctcggacagagtcccgggcccgttgtcgtctctaacaactcctctgcccatgggtctcagcgcactagcggccccgagagttccatgaaagtcacatccagcataccagtcttcgacctgcaggacggggggcgtaaaatctgtccccggtgtaatgctcagttccgagtgacagaagctctaagaggccatatgtgctactgctgtccagagatggtcgagtaccagaagaaaggcaagtcattggattctgagccttcagtgcctagcgcggctaagcccccctcccccgaaaagacagcccccgtcgcttcaacaccaagcagtacgccaattcccgccctgtcaccaccgacaaaagtcccagagccaaatgaaaatgtgggagatgcagtacagactaagctcatcatgttggtggacgacttttattatggcagagacggaggtaaagtcgcccagctcacgaattttcctaaagtggccacctcatttaggtgtcctcactgtacaaagaggttgaaaaataatatcaggttcatgaatcatatgaagcaccatgtggagctagatcaacagaatggggaagtcgacggtcatactatctgtcagcactgctacaggcaattttctacgcccttccagcttcagtgccacttagagaacgttcactctccatacgagagcacgactaagtgtaagatttgtgagtgggccttcgagagcgaacccctgtttctccagcacatgaaggacactcacaaacctggcgagatgccatacgtttgtcaggtgtgtcagtatcggtccagtctgtattcagaggtggacgtccatttccgtatgatccacgaagacacccgccaccttctgtgcccctactgcctgaaggtgttcaaaaatggcaacgcattccaacaacattatatgaggcaccaaaagagaaatgtgtaccattgtaacaagtgtaggttgcagttcctgtttgccaaagacaagatcgaacacaagctgcagcatcacaagaccttcaggaagcccaagcagctagaagggctgaagccgggtactaaggtgactattcgagcgtcaagaggtcagccccgcactgtccctgtgagttctaatgacaccccaccatccgccctacaagaggctgctcctttaacctcatctatggaccctttaccggtgttcctttacccccccgtgcaacgctctatacaaaagcgcgctgtccgcaagatgtcggtgatgggtcgtcagacttgtctcgagtgttctttcgaaatacctgattttccaaaccattttccaacatacgttcactgttctctttgccggtacagcacttgctgcagtagagcctatgccaaccacatgattaataatcatgtgccccgcaagtcacccaagtatttggctctctttaaaaattctgtgtccgggattaagctggcctgtacctcctgcactttcgttacaagcgtaggagacgcgatggccaaacatctagttttcaacccttcccaccggtcatcctccatcctgccgcggggcttgacctggatcgcccattctaggcacgggcagaccagggacagagtgcacgatagaaatgttaagaacatgtatccgcccccctcatttccaaccaataaagctgcgactgtgaaaagtgccggggccacacccgctgagccagaggagcttctgaccccactagcccctgccttgccttcccccgcatctaccgctacccccccccccacacctacccatcctcaggcgttagcattgcctcctctcgcaaccgagggtgcggaatgcttaaatgtggatgatcaggatgaaggatcacccgttactcaggagcccgaactggcatctggggggggagggtccgggggcgttgggaagaaggagcagctgtcagttaaaaaactgcgtgtggtcctgtttgctctgtgttgtaataccgaacaggctgctgagcacttcagaaacccacaaaggaggattagaagatggttgagacgattccaggcttcacaaggagagaacttggaggggaagtacctgtctttcgaggctgaggaaaaactggccgagtgggtactgacccaacgggaacagcaattgcccgtgaatgaagaaaccctgtttcagaaggcaactaagattgggagatccttagagggaggcttcaaaatatcatatgagtgggctgttcgcttcatgcttaggcaccatttaacaccccatgcccgccgagccgtcgcacataccctcccaaaagatgtcgcagagaatgctggtctgtttattgacttcgttcaaaggcaaatccacaaccaggatctgccactgtccatgattgttgctattgacgaaatctccctatttctcgatacggaggtgctctcctctgacgatcgaaaggaaaacgccctccagactgtgggcaccggtgaaccctggtgcgatgtcgtgctggccatcttagcagacggaactgtgctgccgaccctggtgttctaccgaggccagatggatcaacctgctaatatgcccgactctatcctactggaagctaaggagtcaggctattccgatgatgagataatggagttatggagtactcgcgtgtggcagaaacacactgcatgccagcggagcaagggcatgttagtaatggactgccataggacgcatctgagtgaagaagtcttggcgatgctttccgcttcttccactctgcctgcagtggtcccggccggatgttcttctaagatccagcccctcgacgtatgcatcaagaggacagtaaagaattttctgcataagaagtggaaggagcaagcccgggaaatggctgacacggcttgcgatagtgatgtgttattgcagttggtcctagtatggctcggcgaggtccttggcgtgatcggcgactgtccagaactggtgcagcggtcattcctggtcgctagtgttctgcccgggcccgacgggaacataaactccccgactcgcaatgcggacatgcaggaagagctaatcgcatcgctagaggaacaactgaagctctccggggagcactcagagagtagcaccccacgcccacgatctagtccagaagaaaccattgagccagaaagtttgcaccaactctttgagggagagagtgaaaccgagtctttctacggttttgaggaagctgatctggatctcatggaaatatag

SEQ ID NO: 24257 - DNA, 2406 bp, synthetic construct
  source 1..2406: mol_type = other DNA; note = Synthetic coding sequence
atgggcgacaccgtggtggagcccgcccccctgaagcccaccagcgagcccacttccgggcctcccgggaataacggcgggtcgctcttgtccgtcattactgaaggggtaggtgagttatccgttatcgatcccgaagtggctcagaaggcctgtcaagaagttctggaaaaggtcaagttgctgcacggtggggtcgctgtgagcagtaggggcaccccgttggaattggtgaacggggacggggtcgactccgagatacgatgcctcgatgaccctcctgcccaaatcagggaggaagaggatgagatgggcgctgccgtggcttctggcactgctaaaggcgcaagacggcgccgccagaataactcagccaagcagtcctggctactgcggctgtttgagtcaaaactgtttgatatttccatggctatcagctacctgtacaattcgaaggagccaggggttcaggcctacatcggtaaccggcttttctgctttcgcaatgaagatgtcgatttttaccttccacagcttctgaatatgtatattcatatggatgaggatgtaggcgacgcgatcaagccttacattgttcaccgctgccgccagagcatcaatttcagcctacaatgtgcattgctgctaggcgcctatagcagtgacatgcacataagtacacaaagacactcacgcggtaccaaactgcgcaaactaatcctgtcagacgagctcaagcccgctcataggaagagagagctcccaagtctctcgccagcacccgatacaggcctgagccccagtaaacgtactcaccaacgatcaaagagtgatgctactgctagcatttcactgagcagtaatctgaagaggactgcaagtaaccccaaagtggaaaatgaagacgaacctgttaggttagcacccgaacgggagtttatcaaatctctgatggctatcggtaagcgactcgctactctgcccacaaaggagcaaaaaactcagagactgatatctgaactgagcctcctgaatcacaagttgcccgctagggtgtggttgcctactgccggattcgaccatcacgtcgtccgggtgcctcacacacaggcagtggtgctcaactccaaggacaaagccccctatctaatctacgtcgaagtcctggaatgcgagaactttgacacaacctcagtgccagcccgcatccctgaaaatcggatccgtagcactcgatctgttgagaacctcccagagtgtggcattacacacgagcaacgagccgggtccttttccactgtgcccaattatgacaatgacgatgaggcttggtctgtggatgacataggtgagctgcaggtcgaattgcccgaagtgcatactaactcatgtgataacatcagtcagttctcagtggattccatcacctcgcaggaaagcaaggagccggtctttatagctgcaggcgacatccgtaggcgactatcggagcagctggcgcatacccccacggcgttcaagcgggacccagaggacccaagcgcagtggccctgaaggagccatggcaagaaaaagtccggcgcattcgagaagggagtccatatgggcacctacctaactggcggctcttaagcgttattgtgaagtgcggggacgacttgcggcaggagctgcttgcattccaggtcctgaaacagctgcaaagcatatgggagcaagaacgggtgcctctgtggatcaaaccctacaagatcctcgtaatctcagcagattctggcatgattgagcccgtggtgaacgctgtctctatccatcaagtgaaaaagcagtctcaactaagtctgctggattatttcctacaagaacacggttcctacacaaccgaagcctttctgtcagctcagcgaaatttcgtgcagtcctgtgctggctattgcctcgtttgttacctgctccaggtgaaagacaggcacaacggtaacatcctgttggatgccgagggacacattatccacattgacttcgggttcatcctcagttcgtctcccaggaaccttgggtttgaaacctcagcgtttaagctgaccactgagtttgtcgacgtgatgggagggctcgacggcgacatgtttaactattataagatgctgatgctgcagggcctgatcgcagcaagaaaacacatggacaaggtcgtgcagatagtcgagatcatgcagcagggtagccagctgccctgttttcacggctccagtaccattcgtaacttgaaagagaggtttcatatgagtatgaccgaggagcagcttcagctgctggttgaacagatggttgacggaagcatgaggtctattactaccaaactctatgacggattccagtatctgaccaacggaattatgtag

SEQ ID NO: 24258 - DNA, 2451 bp, synthetic construct
  source 1..2451: mol_type = other DNA; note = Synthetic coding sequence
atgggcgacaccgtggtggagcccgcccccctgaagcccaccagcgagcccacatccgggccgcctggaaacaacggtggctctcttctgagcgtgataacagagggcgtgggggagcttagtgtgatagatcctgaagtggctcagaaggcctgccaggaagtgctggaaaaggtgaaactgttgcacggaggggtggcagtcagctcacggggaaccccccttgagctcgttaacggagacggggtggactcagaaattcgctgcttggacgatccaccagcacagatcagggaggaggaggatgagatgggtgccgctgtggcttcaggcacagcaaagggggcacggcgtcgccgccagaacaactccgccaagcagtcctggctgctgagactgttcgagtccaaactgttcgatattagtatggctatcagctatctttataactctaaagagccgggcgtccaggcatatataggtaacagactcttctgtttccgaaatgaggatgtggacttttacctgcctcaattactaaatatgtacatccacatggacgaggatgtgggtgatgcaatcaaaccgtacattgtccatcggtgccgccaatcaattaatttcagtctccagtgcgccctgctgctgggggcctatagttccgatatgcatatctccactcagcgacactcgagaggaaccaagctcaggaagctcatcctgagcgacgaattgaagccagcccaccgcaagcgcgagcttccaagcctctcgcccgctcccgacaccggcctctctccttctaagagaactcatcaaagatcaaagtctgacgcgacggcatccatttcccttagtagtaacctgaagcgaacggcgtcaaaccccaaagtggaaaacgaggatgaagagctgtcttcttccactgaatccattgataactctttttcgtctccggtgcgcttggctccagaaagggaattcatcaagtctctgatggcgattggaaaacggctagctactctaccaactaaggagcaaaagacccagcggttgattagcgaactttcgctcctgaatcataaactgcccgccagggtgtggctcccaaccgccggatttgaccaccatgtggttagggtgccccacacccaggccgtggttctgaacagtaaggacaaggcgccatacctgatatatgttgaagtcttagagtgcgaaaacttcgacacaacatctgtgcccgctaggatccctgagaaccggataagaagcacacgctccgtggaaaatttacccgagtgtggcatcactcatgaacagcgagcaggaagctttagcacagtacctaattacgacaatgacgatgaagcctggagcgtggatgatatcggagagttacaagtagagcttccagaagtccacaccaactcttgcgacaacataagccagttttctgtggacagtatcacatcccaagaatcgaaagagccagtgttcattgcggccggagatatcagacggaggctctcagaacagctcgcgcacacacccaccgcattcaagagggacccagaagacccttctgccgtcgccctcaaagagccctggcaagaaaaggtgcgtagaatccgggagggttcaccatacgggcacctgcctaactggagactcttgtctgttatagtcaaatgcggcgacgaccttcgacaggaactgcttgctttccaagtcttgaaacagctgcagagtatttgggagcaggaaagagtgcccctatggattaaaccatataagatcctagtgatctctgccgactccggcatgattgagcccgtggtgaacgccgtgtctattcaccaagtgaagaagcagtcgcaactttctttgctggactacttcctacaggagcatggatcttacactaccgaagctttcctgtccgcccagcgtaattttgttcaaagttgtgccgggtactgcctcgtctgttacctgctgcaggttaaggacagacacaacggcaacatcctcctcgacgctgagggacacatcatccatatcgactttggttttattctgtcaagcagcccaagaaacttggggtttgagacttccgccttcaaactgacaactgagttcgtagacgtaatgggggggctcgacggcgatatgtttaactactataagatgctgatgttacagggcctgattgctgcgcgcaaacacatggacaaggtcgtgcagattgtggagattatgcagcagggttcccaattaccatgctttcatggatcatcgacaatcaggaaccttaaagagcgctttcatatgagtatgacggaagagcaacttcagttacttgttgagcagatggtggacggctcgatgcgcagtataacaactaagctgtatgatgggttccagtatctgacgaacggcatcatgtag

SEQ ID NO: 24259 - DNA, 2406 bp, synthetic construct
  source 1..2406: mol_type = other DNA; note = Synthetic coding sequence
atgggcgacaccgtggtggagcccgcccccctgaagcccaccagcgagcctaccagcggcccccctggcaacaacggcgggagcctgctgagcgttatcactgagggggtcggggaactgtccgtgattgatccggaggtggctcagaaagcttgtcaggaggtcctggagaaggtgaagttgctccatggcggagtcgctgtgagtagtcggggcacccccttggagctcgtgaacggtgacggcgtggattcagaaattcggtgtctggatgatcccccagcccagattagagaagaggaagatgagatgggggccgcagtggcttctggtacagcaaagggcgccagaagacgacgtcagaataactccgctaaacagtcatggctactccggctattcgagagcaaactgttcgacattagtatggctatctcctacctgtacaattccaaagagcccggcgtgcaggcatacatcggaaatagactgttttgcttcaggaatgaggacgtcgacttctacctacctcaactcctcaacatgtacatccacatggacgaggacgtgggcgatgctatcaaaccttatatagtgcacaggtgtcgccagtcgatcaactttagcctgcagtgtgcacttctgctcggggcctactcaagcgacatgcacatctcaactcaaagacattccaggggtaccaagttgaggaaactgatccttagcgacgagctgaagcccgcacatcgaaagcgggaactgccatctctgtcccccgccccagacaccggtcttagtccatctaagcgcactcatcagcgcagtaaatccgatgccaccgcgagtatatctctcagctccaatcttaaaaggaccgcttcgaatccgaaggtggagaacgaggatgaaccagtccggctggctccagagcgggagttcattaagtcgctgatggcaatcggaaagcgactggctactttaccgacaaaagaacagaagacacaaagactcatctctgagctgtccttactgaaccataagcttccagccagggtttggctccctaccgccggattcgatcatcacgtcgtccgggtcccacacacacaggccgtggttctgaattctaaagacaaagccccttacctcatatacgtggaagttctggaatgcgagaactttgatacaactagcgtgcccgcccggatacctgagaacaggataagaagcactaggagcgttgagaacctccccgagtgcggcatcacacacgagcagcgggcaggctcgtttagcaccgtcccgaactatgacaatgacgacgaagcatggtcagtagatgatattggggaactgcaggtagagttgcccgaggtacacaccaatagctgtgataatatctctcagttttctgtcgactctatcaccagccaagagagtaaagaacctgtcttcattgctgccggggatatccggaggcggttgagtgaacagttggctcatacacccacggcgtttaagcgcgatcccgaggatccctctgcagtggcgctgaaagagccctggcaggaaaaagtgaggcggattagggagggtagcccctacgggcatctccccaattggcggctgttgtctgtgattgtgaagtgcggggatgatctgcggcaggaactgctcgcgttccaggtgctcaagcagctgcaatcgatttgggagcaggagagggttccactctggatcaaaccatataagatacttgtgatctccgccgactccgggatgattgagcccgtcgttaatgcagttagcatccatcaggtaaaaaagcagtctcagcttagcctcttggactactttctgcaggagcacgggagctataccacagaagcgtttttatccgcccaacgcaattttgttcagtcctgtgccggttattgcctggtttgttatcttcttcaggtgaaggaccgccataacgggaacattctgctcgacgctgaggggcacatcatccacattgacttcgggtttattctgagcagttcaccaaggaatctcggatttgagacatccgcttttaagttgaccacagagttcgtggatgttatgggtggcctggacggtgacatgtttaattactataaaatgctcatgctgcagggcctgatcgctgccaggaaacacatggacaaggttgtgcagatcgtggagatcatgcagcagggatctcagctgccctgtttccatgggtcatccactattcgtaatctgaaggagcggtttcatatgtccatgacggaagagcagctgcagctgctggtcgagcagatggtggacgggtcgatgagaagtataactacaaaattatatgatggttttcaatacctgaccaatggcatcatgtag

SEQ ID NO: 24260 - DNA, 2487 bp, synthetic construct
  source 1..2487: mol_type = other DNA; note = Synthetic coding sequence
atgcggttcctggaggcccggagcctggccgtggccatgggcgacaccgtggtggagcctgcccctctgaaacccacctctgaaccaacctcagggccgccaggcaacaatggaggctcgttactgtctgtgattacggagggggtgggcgaattatctgtgatcgatccagaggtcgcacagaaagcctgccaggaggtccttgagaaggttaagcttctgcacggcggagtcgccgtttccagcagaggtacacctttagagttggtcaatggggacggagtggacagcgagattcggtgtctggacgacccacctgctcagattcgcgaggaggaggatgaaatgggcgcagctgtggcctccggaaccgctaaaggtgcgcggcggcgcagacaaaataactcagccaaacagtcatggctgctcaggctattcgaatcaaaattgttcgatatttccatggctatatcttatctgtacaactccaaggagcccggtgtgcaggcctatatcggcaataggcttttttgtttcagaaatgaagacgtggacttttatctcccacagttactgaatatgtatattcacatggacgaggacgtcggggatgccataaaaccttatatcgtgcatcggtgtcgacagagtataaacttttcgctgcagtgtgctctcctgctgggagcctatagctcggacatgcacatcagtacacagaggcactctaggggcaccaagctgcggaaactcatcctgtctgatgagctgaagcccgcccaccgaaagcgtgaactcccatcactatctcctgccccggataccggcctatcccccagcaaaagaacccatcaaagatccaagagtgacgctaccgcctccattagcctcagctcgaacctcaaacgtactgcttccaatcctaaagtggaaaatgaggacgaagagctgtcctcttcaaccgaaagcatagacaatagcttcagtagccctgtacggttagctcctgagcgtgaatttatcaagagcctgatggcgatcggaaagcgcctcgcaacgctgcccaccaaggaacagaaaactcagcgcttgatatctgagttgagtctgctgaatcataagcttcccgcccgtgtctggctgcctaccgccgggtttgaccaccacgtggtacgtgtcccgcacacccaggctgttgtcttgaacagcaaagacaaagctccttacctcatctacgtggaagtattagaatgtgaaaatttcgatactacttcggtcccggcgcgcatacctgaaaaccgtattaggtcaactagatcggtagaaaacctgcctgagtgtgggattacacacgagcagagagccggatcattcagcacagttcctaactatgataatgacgacgaagcctggtctgttgatgacatcggagaactacaagtggaattgccggaggtacacactaactcctgcgataatatttctcagtttagtgtagactccattacaagccaggaaagcaaagagcctgtttttatcgcagcaggcgacattcggaggaggctctctgaacagctggcacacacccctacagcattcaaacgagacccagaggacccctctgcagtggcactgaaggagccttggcaagaaaaggtgaggagaatccgggagggcagcccctacggccatcttcccaactggcggctcctctcggtcatagtcaagtgcggagacgatttacgtcaggagttgctggccttccaggttctcaagcaactgcagagcatctgggaacaagagcgagtgcccctctggatcaagccatacaagatactggtgatatccgcagactcaggaatgatcgaaccggttgttaatgccgtgagtatccaccaggtgaagaagcaaagccagctgtcacttctggactacttccttcaggaacacggctcttacaccaccgaggcattcctcagtgctcagcgtaacttcgtgcaaagctgcgctggctattgtctggtctgctatctgcttcaggtgaaggacagacataacggtaacatcctgctggacgccgaaggacacattattcacattgacttcggttttattctcagctcttctcctagaaacttgggtttcgaaacgagtgcattcaaactgacgacagagttcgtggacgtcatgggaggcctggatggagacatgttcaattattacaagatgcttatgctgcaaggattaatcgctgcaagaaaacatatggataaggtggtccagatcgtcgaaatcatgcagcaggggtcacagctgccttgttttcatgggtcctccacaatacgaaatctcaaagagagatttcatatgagtatgactgaggagcaattgcaactgctcgtggagcaaatggtggacggctcgatgcgctcgatcaccaccaaactctatgacgggtttcagtatctgacaaatggcataatgtag

SEQ ID NO: 24261 - DNA, 1143 bp, synthetic construct
  source 1..1143: mol_type = other DNA; note = Synthetic coding sequence
atggtgctggagagcaccatggtgtgcgtggacaacagcgagtacatgcgaaatggagatttcctgcccacacgtctgcaagcccaacaggacgccgttaatatcgtgtgtcacagcaagactaggagcaaccccgaaaataacgtcgggctgatcaccctcgccaacgattgtgaagtgcttacaacgctgactcctgatacggggagaatcctctccaagctccacacggtacaacccaagggcaagattaccttctgtactggcattagagtggcacacttagctttgaagcaccgccagggcaagaatcacaagatgaggatcatcgcattcgttgggagccctgtagaagataacgagaaggatctagtgaaactggcaaaaaggctcaaaaaggagaaagtcaacgttgatataatcaattttggggaggaggaagtcaataccgaaaagctcaccgcatttgtgaatacactgaacggcaaggacggaaccggttctcacctagtgaccgtcccaccaggcccttccttggcagatgccctgatttcttccccaatccttgctggggaagggggagccatgctagggctgggagcttcagattttgagtttggggtggacccgtctgccgaccccgaactggccctggcccttcgggtctcaatggaagaacaaagacagagacaggaggaagaagcaaggagggcagccgccgcgagcgctgcagaggccggtatcgccactacaggaacagaaggcgagagagattccgacgacgcgttactgaaaatgaccatcagccaacaggagtttggccgaactgggcttcccgatctgtcaagcatgaccgaagaggaacagatcgcttatgctatgcagatgtctctgcaaggcgctgaattcgggcaagccgagtccgcagacatcgatgctagctcagccatggatacctccgagcccgctaaggaagaggacgattatgacgtgatgcaggaccccgaattcctgcagagtgtcctggaaaatttacccggtgttgaccctaataatgaagccatacgcaacgccatgggcagcttagcctcccaggctacaaaggacggaaagaaagataagaaagaagaagacaaaaagtag

SEQ ID NO: 24262 - DNA, 1134 bp, synthetic construct
  source 1..1134: mol_type = other DNA; note = Synthetic coding sequence
atggtgctggagagcaccatggtgtgcgtggacaacagcgagtacatgaggaacggtgattttttgccgacgcggctccaagcacagcaggacgctgtgaacatcgtgtgtcattcaaaaacacgctctaatcctgaaaataatgtaggactgataacgcttgccaatgactgtgaggttttgaccacccttactcccgacactggacggatcctctccaagctgcacacagtccagcccaagggaaaaattactttctgcactggcattagagtggctcacctggctctgaaacaccgccagggcaaaaatcataagatgagaattatcgcattcgtggggtctcccgtggaagacaatgaaaaggatttagtgaagttagctaagaggctcaagaaggagaaagtgaatgtggatattatcaactttggcgaagaggaggtcaacactgagaagctgactgccttcgtcaacacccttaatgggaaggacggaacaggctcccacctggtcacagtgcctcccggtccttcactggcggatgctctgatctcctccccaatactagctggcgaagggggggccatgctggggctcggggcctccgactttgagtttggggttgatccaagcgctgaccctgagctggcattagctctacgcgtgagtatggaagagcagaggcagaggcaggaggaagaggctcgccgggcggccgccgcctccgcagctgaggcagggattgcaaccaccggcaccgaggatagtgatgacgctcttctcaagatgaccatcagccagcaggagttcggtcgaactgggttgccagacctctcctcaatgacagaagaagaacagatcgcctatgccatgcagatgtctctgcaaggcgcagagttcggccaggcagaaagtgccgacattgacgcctcttccgcaatggacaccagcgagccggccaaagaggaagacgactacgatgtgatgcaggaccccgagttcctccagtcggtgctggaaaatctgccgggcgttgacccaaataatgaggcaatcaggaacgctatgggtagcttagccagccaggccaccaaagacgggaaaaaggacaaaaaggaggaagataagaagtag

SEQ ID NO: 24263 - DNA, 933 bp, synthetic construct
  source 1..933: mol_type = other DNA; note = Synthetic coding sequence
atgcggcccgcccggcactgggagacccggttcggcgcccgggactttggcggatttcaggattgcttttttcgagacagattaatggacacggctaggatcgctgttgtgggagcaggtgtcgtgggcttgtctacagctgtttgcatctctaagctggtaccgcgatgcagcgtcacaattatcagcgataagtttacgcccgacactacttctgacgtggccgccggtatgctgatcccccatacatatcctgatacgcccatacacacccagaaacaatggttcagagaaacctttaaccaccttttcgcgatcgcgaactctgccgaagccggggacgctggggttcatctggttagcggcattaagggtagcggggggtggacccttacacgacgtattgaagatctttgggagctccatccaagtttcgacatagttgttaattgctcaggacttggctcgcggcagctggccggcgacagtaagatctttcccgtgagggggcaagtcctccaagtccaggcaccctgggtggaacatttcatccgggatggatccgggctcacttacatctatccaggtacaagtcacgtgaccctcgggggcacccggcagaaaggagattggaatctgagccccgacgccgagaactcccgggagatcctgtccagatgctgtgccctcgagccatccctacacggagcctgcaacatccgtgaaaaagtgggcctccggccatacaggccgggagttcggcttcagacggaactcttagccagagatggacagcgcctgccagttgtccaccactacgggcatggcagcggcggtatctctgtgcattggggaactgcactggaagctgcacggctggtcagtgaatgcgtacatgccctccgcacgccaatccctaaaagtaatctctag

SEQ ID NO: 24264 - DNA, 1110 bp, synthetic construct
  source 1..1110: mol_type = other DNA; note = Synthetic coding sequence
atgcggcccgcccggcactgggagacccggttcggcgcccgggacttcggagggttccaggattgcttcttccgtgacaggctgatggacactgctaggattgcggttgtcggcgctggtgtggtggggctgtctaccgcagtctgtattagcaagctggtcccgagatgctcggtgacaatcatttcagacaaatttactcccgacacaacttcagacgtcgctgctggcatgctgatcccgcatacttatcctgacacaccaatccatacacaaaaacagtggttcagagagacattcaaccacctttttgccatcgctaattctgctgaagctggagatgcgggggtgcacttggtttccgggtggcagatcttccaaagcacccctaccgaggaagtcccattctgggctgacgtagtcctcggctttcggaaaatgacggaagccgaactcaaaaagttccctcagtatgtgtttggacaggccttcaccacgctgaagtgtgaatgccctgcttatctaccgtggctcgagaaaaggattaaaggtagcggcggatggacattgacccgtcgaattgaggacctgtgggagctgcacccatcgttcgacatcgtcgttaattgcagcgggctgggtagcagacagttggcaggggatagcaaaatctttccagtgagaggccaggttcttcaggtacaggcgccgtgggttgagcattttataagggatggaagcggcctgacgtacatctatccgggcacttcccatgtgaccctcggcggcactcgccaaaagggggactggaatcttagtcccgacgccgagaatagccgcgaaattctgtcccgctgctgcgctctcgagccgtctcttcacggcgcctgcaatattcgagagaaggttgggctccggccatatagaccaggcgtaaggctgcagaccgagcttctagctcgtgacgggcagaggttgcccgtggttcatcactacggccatggctcaggaggaatatccgtccactggggtacggccctggaggcggccaggctggtatccgaatgcgttcatgctctacggacacccataccaaaatctaatctttag

SEQ ID NO: 24265 - DNA, 1026 bp, synthetic construct
  source 1..1026: mol_type = other DNA; note = Synthetic coding sequence
atggacaccgcccggatcgccgtggtgggcgccggcgtggtgggcctctctaccgcagtatgcattagcaagctagtcccgcgctgtagcgtgaccatcatatctgataaatttacaccagatacaacctcagatgtcgctgccggtatgctgatcccacatacatatcccgacacgcctattcacactcagaagcaatggttccgggaaacttttaaccacctgtttgcaattgccaactcagctgaggcgggcgatgccggggtgcacctggtgtctggttggcaaatctttcagagtactcctacagaggaggtgcccttctgggctgacgtcgtcctgggtttccgcaaaatgaccgaggcggagctgaagaagttcccacagtacgtgttcggccaggccttcactaccttgaagtgcgagtgtcccgcataccttccttggcttgaaaagaggatcaaggggagcggaggctggacccttacaaggaggattgaggacctatgggaacttcatccttcattcgacatcgtcgtgaattgttctggcttaggctctcggcaactggccggcgactctaaaattttcccggtgcgaggacaagtgctccaggtgcaggctccttgggtcgagcattttattagggatggctctggcctaacgtacatttaccctggtactagccacgtcactcttggaggtacccgacagaagggagactggaatttgagccccgacgccgagaactctcgggaaatcctctcccgatgctgcgcactggagccaagcttacacggagcatgcaatatcagagaaaaggttggcctgaggccatacaggcccggagttcggttgcagacggagctcctcgcccgtgatggccaaagactcccggtcgtgcaccactatggccacggtagcggcggcataagcgtccactggggcaccgctctcgaagccgcaaggctagtgagcgaatgtgtgcatgcactgcgaactcctatacccaagtccaatctctag

SEQ ID NO: 24266 - DNA, 1074 bp, synthetic construct
  source 1..1074: mol_type = other DNA; note = Synthetic coding sequence
atgggcaccatccaggaggccggcaagaagaccgacgtgggcgtgcgggaaatcgccgaggcccccgaactgggagcagcccttcgccacggtgaactagaactgaaggaggagtggcaggacgaagagtttccccgcttgttaccggaggaagccggcactagcgaagatccagaggatccaaaaggcgatagtcaggcggctgccggaactcctagcactctggctctttgcggtcaacgacctatgagaaagcggttgtccgcccccgagctccggctgtccctaaccaaaggtcccgggaacgacggggcctccccgacacagagcgccccatcctccccagacgggtcgtccgaccttgaaatcgatgaacttgagactcccagtgatagtgagcagctggacagcggacacgagtttgagtgggaagatgagctgccacgagctgaaggtcttggcacgagcgagacggcagagcgactcgggaggggttgcatgtgggacgtgaccggggaagacggtcaccactggcgcgtgttcagaatgggtccgcgcgaacaacgggtcgatatgaccgtgatcgagccatataaaaaggtcctgtcccacggtggctaccacggtgatggattaaacgcagtcatcctctttgctagctgttaccttcctaggtcttccattcccaattatacgtatgtcatggaacacttgtttcggtacatggtaggtacccttgagctgttagtggccgagaattaccttttagttcatctgagcggcggaacatccagagcacaggtcccccctttgtcctggatccggcagtgttatcgtaccctggaccgtagacttcggaagaatctacgcgcactggtggtagtccatgcgacctggtacgtcaaggcctttcttgcacttcttagaccattcatcagctctaaattcacccgcaaaatcaggttcctcgacagcctcggagaactggcccagctcatctccctggaccaggttcatatccctgaagcagtgagacagcttgatagagatttacacggcagtggcggaacatag

SEQ ID NO: 24267 - DNA, 1269 bp, synthetic construct
  source 1..1269: mol_type = other DNA; note = Synthetic coding sequence
atgctgaagttcctggccaagggcgaggtgcccaagggcagctgcgaagacgagccgatggacagcacaatggatgacgccgttgctggtgacttcgctctcataaacaagctggacatccaatgcgaccttaaaaccctctctgatgatattaaggagagtctggagtccgaggggaaaaacagcaagaaagaagagccacaggaactcctgcagtcgcaggacttcgttggcgaaaagctaggctccggcgaacccagccattctgtcaaggtgcatacggtgcctaagcccggcaaaggagctgacctgtctaagcccccttgtaggaaggctaaggagattcgcaaggagcgaaaacgtctgaaactgatgcaacaaaaccctgcaggagaactcgagggcttccaggcccagggccatcctcctagtctgttccctccgaaggccaaaagtaatcagccaaaatctcttgaggacctgattttcgagtctttaccagaaaatgcctcccataagttggaagtccgacttgtacctgtgtcattcgaggaccccgagttcaaatcctccttctctcagtctttctcactctacgttaagtaccaagtggcgatccatcaggatccacccgatgaatgtggcaaaactgaattcactagattcttgtgtagttcacctcttgaggccgagacacctcctaacggccccgattgcggctacggtagtttccaccagcagtattggcttgacggaaagattattgccgtgggagtcattgacatcctgcctaactgcgtgtctagcgtctatctgtactatgatcccgattatagtttcctgagccttggtgtgtatagtgccctcagggagattgcattcactaggcagcttcacgagaaaacctctcagttgtcgtattactacatggggttctatattcacagttgccctaaaatgaaatacaaaggtcagtacagacccagcgatctgctttgtccagaaacttacgtctgggtcccaatcgagcaatgtttgccaagtctggagaatagcaaatattgccgctttaaccaagatcctgaggctgtcgacgaggatcggtcgacagagccagataggttgcaggtgttccacaagcgggcaattatgccttatggcgtctataaaaagcagcagaaagacccatccgaggaggctgccgtattacagtacgcttctttggtaggccagaagtgttccgaaagaatgttgttgttccgtaactag

SEQ ID NO: 24268 - DNA, 1557 bp, synthetic construct
  source 1..1557: mol_type = other DNA; note = Synthetic coding sequence
atggccttctgggccggcggcagccccagcgtggtggactacttccccagcgaggacttctacaggtgtgggtactgtaagaatgaaagcggttcgcggtccaacggcatgtgggcacacagcatgactgttcaggattatcaggatctcatcgataggggctggcgcagaagtgggaagtacgtatacaagccagtgatgaatcagacttgctgcccgcagtacactatccgatgccggcctctccagtttcagcctagtaagagccacaagaaggtgttgaagaagatgttgaagtttctcgcaaagggtgaagtgccgaaaggttcttgcgaagatgaacctatggattccactatggatgacgccgtggctggcgattttgcccttataaacaaacttgatattcaatgtgacttaaagaccttgtccgacgacatcaaggagtccctggagagtgagggcaagaatagcaaaaaggaggaacctcaggagttgctacagtcacaggattttgtcggggagaaacttggcagtggggagccctcccattcagttaaagtccacaccgtccccaagccggggaagggtgccgacctgagtaaaccaccctgcaggaaagctaaagagattcgcaaggaacgcaaaagactcaaactcatgcagcagaatcccgctggtgaactggaggggttccaggctcaagggcatcctccctccctgtttccaccaaaagccaagtcaaaccagcccaagtctctggaggatcttatatttgagtccctgccggagaacgctagccacaaattggaggtgcgcctcgtcccagtgagctttgaagatcccgagttcaaaagttcattttctcagagcttctcactgtacgtgaagtaccaggttgccattcaccaggatccacccgacgagtgtgggaaaactgagtttacgcgctttctgtgttccagtccactcgaagcggaaacaccacctaacggccccgactgcgggtacggaagctttcatcagcagtattggttggacggaaagattattgctgtgggcgtgatcgacatattacccaactgtgttagttctgtttatctgtactacgaccccgattatagctttctaagccttggcgtgtactccgccctgagggagatagccttcactaggcagctacacgagaaaacctcacagctgagctactactatatggggttttacattcactcctgccccaaaatgaaatataaggggcagtacagacccagcgatctgctttgcccggagacatatgtctgggttccaattgaacagtgcttaccatcactagagaactccaagtactgtagattcaaccaggatccagaggctgtcgatgaggatcggagtacggagcctgaccggctccaggtatttcataagcgggctatcatgccatacggcgtatacaaaaagcagcagaaggacccctccgaggaagccgctgtactgcagtacgctagcctcgtgggacagaaatgctcagaaaggatgctgctgtttcggaactag

SEQ ID NO: 24269 - DNA, 3003 bp, synthetic construct
  source 1..3003: mol_type = other DNA; note = Synthetic coding sequence
atggccgagcggaagcccaacggcggcagcggcggcgccagcacctccagctctggaaccaacctcctttttagcagttctgctaccgaattctcctttaacgttcccttcatccccgtgacacaggcctcggctagccctgcctcccttctgttaccaggcgaagactctacggatgtgggggaggaagattcttttttgggtcagacctccatccatacctccgcaccccagactttttcctatttctcccaggtgagctcttcaagcgacccatttggaaacattggccagtcccccctgacgaccgcggccacaagtgtggggcagagcgggttcccaaaacctcttacagccctgccattcaccactggctctcaagacgtgagtaatgcattcagtccaagtatttccaaagctcagccaggagccccgcctagctccctgatgggcattaactcctacctcccctcgcagccgtcatccctccccccttcctactttgggaaccagccgcagggcattcctcaacccggctataacccctaccggcacacccccggatcttccagggccaacccctacatcgccccgcctcagttgcaacaatgtcagacccctggtccaccggcgcaccccccacccagcggccctccagtccagatgtaccagatgccaccggggagtctgcccccagtgccctctagtgtgcagagccccgcgcagcaacaagtccccgcacgaccaggcgctccttccgtgcaggtgccaagccctttcctgcttcagaaccaatatgaacctgtacagcctcactggttctattgcaaagaagtggagtacaagcagctgtggatgccattttctgttttcgatagtctaaatctggaggagatatataatagcgtgcagcccgaccctgagtcagtcgtgttaggaaccgatggcggccgctatgatgtgtacttatacgacagaatccggaaggctgcctactgggaggaggagccggcagaggtacgccggtgtacctggttctacaagggggatactgacagtcgtttcatcccttacacggaggagttttccgaaaaacttgaagcagaatacaagaaagcggtgaccacaaaccagtggcaccgcagactagagttcccctcaggagagaccattgtaatgcataatcctaaagttatcgttcagtttcagccaagcagcgtacccgacgaatggggcaccactcaggacggtcagacacgcccacgcgtcgtcaaaaggggcatcgatgataacctcgacgagatacctgacggcgaaatgccacaggtggaccacctggtatttgttgtccatgggattggccctgtgtgtgaccttcgatttaggtctattatagagtgcgttgacgactttagagtggtgagcttaaaacttctacgtacacactttaagaaaagcttagacgacgggaaggtctctcgggtggaatttctgcctgtgcattggcactcatccctcgggggggatgccacaggagtcgatagaaatatcaaaaaaataaccctgccctctattggccggttccggcattttacaaacgagacactgctggatatcttattctacaacagcccaacatactgccagaccattgtagaaaaagtcggtatggagatcaaccatctgcacgcgctcttcatgagtaggaaccccgacttcaaagggggcgtgagcgtggccggacactccctggggtccttaatcttatttgacatcctgtctaatcagaaggacctcaacctttctaagtgccccggccccttggctgtagcgaacggggtggtaaaacagcttcactttcaggaaaagcagatgcctgaggagcctaaactcacgctcgacgaaagctatgatctggttgttgaaaataaggaggtgctgacccttcaggaaacattggaagcactgtctctttccgagtacttttcaacttttgaaaaagaaaaaattgacatggagtccctgcttatgtgtaccgtggacgacttaaaggaaatgggcattcctttggggccccgcaagaagatcgccaattttgtcgagcacaaagctgctaagttgaagaaggctgcttctgagaaaaaggctgtggccgctaccagtactaagggacaagaacaatctgctcaaaaaactaaagacatggccagcctcccttctgagtccaacgaaccgaagcggaaactgcctgtcggcgcatgcgtgtcttccgtttgcgtgaattatgagtccttcgaagttggggcagggcaggtcagcgtcgcgtataattccctagactttgaaccggaaattttcttcgccctggggagccctatcgctatgttcttaacaatccggggagtggatagaatcgacgagaactactccctccccacatgtaaaggcttcttcaatatttatcatcccctcgatcccgtggcctacagattggaacccatgatcgtgcccgatttagacctcaaagcggtcctgattccacaccacaaaggccgcaagcggctacatctggagctgaaggagagtctgagccgaatgggctctgacctgaagcagggatttatcagctctcttaaaagtgcctggcagacactgaatgagtttgcaagagctcatacatcttctacccaactccaggaggagttggaaaaggttgcgaaccaaattaaagaagaggaggagaagcaagttgtggaggctgagaaggtggttgagagcccagatttcagcaaggatgaagattatctcggcaaagtcgggatgctgaatggcggtaggagaatcgactacgtcctccaggagaaacctatcgaatccttcaatgaatacttgtttgcattgcaatcgcacctctgctattgggagtctgaggacacagcccttctgctgctgaaggagatctatcggacaatgaatatctctccggagcaaccgcaacattag

SEQ ID NO: 24270 - DNA, 495 bp, synthetic construct
  source 1..495: mol_type = other DNA; note = Synthetic coding sequence
atggtgaacagcgtggtgttcttcgacatcaccgtggacggcaagcctctgggacgcatttcaataaaattgtttgctgataaaatactgaagactgccgaaaatttccgagccttgtctactggcgaaaaggggttccgatacaaggggtcatgctttcatcgaataattccaggattcatgtgccagggcggcgattttacgcggcataatgggacaggtgataaaagcatctacggagaaaaattcgacgatgagaacttgattcgcaaacatacaggctctggaattctttccatggcgaacgcaggccccaacaccaacggctcgcagttttttatttgtgccgctaaaaccgagtggttggacgggaaacatgtggcattcggcaaagtgaaggagagagtgaacatcgtcgaagctatggaacatttcggttatcgcaactctaagaccagcaaaaaaatcaccatcgccgattgtggacagttctag

SEQ ID NO: 24271 - DNA, 426 bp, synthetic construct
  source 1..426: mol_type = other DNA; note = Synthetic coding sequence
atgaagatcctggacgtgggctgcggcggcggcctgctgaccgagcccggaggtagcctgtttattacaacaataaataagacccagctctcatatgctctgggaatcgtcttctcagagcaaattgccagtatagtcccaaagggtacacacacttgggagaaatttgtaagcccggaaacgttggaaagtatcctcgaatcaaacgggctgtctgtccagacagtggtggggatgctatataaccccttctccggttactggcattggagcgaaaacaccagtctgaactacgcggcctacgctgtgaagagccgcgtgcaggaacatcctgcttccgcagagtttgttctgaagggcgaaaccgaggagttgcaggccaatgcctgcacaaatccagcagtgcatgagaaactgaaaaagtag

SEQ ID NO: 24272 - DNA, 426 bp, synthetic construct
  source 1..426: mol_type = other DNA; note = Synthetic coding sequence
atgaagatcctggacgtgggctgcggcggcggcctgctgaccgagcctggaggttcactgtttataaccacaatcaataagacccaactttcctacgctctcggaatagtgtttagcgagcaaatcgcgtccatcgtgccaaaaggtacccatacatgggagaaattcgtgagccccgaaacactggaatcaatcctcgaaagtaacggtctaagcgtccagacggtggttggtatgctgtataacccgttttccggctactggcactggtccgagaacactagcctgaactacgcagcatatgcggttaagagtcgggtgcaagagcacccagcctctgcagaatttgttctgaagggagagactgaggagctgcaggctaatgcatgcaccaaccccgctgttcatgagaagctcaaaaagtag

SEQ ID NO: 24273 - DNA, 2157 bp, synthetic construct
  source 1..2157: mol_type = other DNA; note = Synthetic coding sequence
atgctgatgaccctggagatgaccgagctgaccgacccccaccacactatgggggattacaaagtcgcgcatcctcaggacccccaccaccccagtgaaaagcctgtgatacattgccacaaatgtggagaaccatgtaagggtgaggtgcttcgcgtccaaacgaaacacttccatatcaagtgttttacatgcaaggtgtgtggctgtgacctagctcagggcggcttctttatcaagaatggggagtacctttgtacgctggactaccaacggatgtacgggacaagatgtcacgggtgtggcgaattcgtggaaggcgaggtcgtgaccgccttggggaaaacctaccaccccaactgctttgcttgcactatctgtaaacggccttttccacccggggatagagtgactttcaatggtcgcgactgtctgtgccagctctgcgcccagccgatgtctagttcccctaaggaaacaacattttcttccaattgtgcgggttgtggcagagatatcaagaacggccaggctcttttggctctcgataagcagtggcacctgggctgtttcaagtgtaaaagctgcggcaaagttctcaccggcgagtacatttcaaaagacggggccccttactgcgagaaagattaccaaggcttgtttggggtgaagtgcgaggcttgtcatcagtttattaccggaaaagtgctggaggcgggggataaacattatcatcctagctgcgccaggtgcagccggtgcaaccaaatgttcaccgagggagaggaaatgtacctccagggtagcactgtgtggcaccctgactgcaaacagtccactaaaacagaggaaaagttacggccaacacgcacaagctccgagtccatttactctagacctggcagttctattccgggaagtcctggtcacacaatttatgcaaaagtggacaatgagatactcgattataaggacctcgccgcgatccccaaggtgaaggccatttatgatatcgaacggcctgatctaatcacatatgaacctttctacacgagcggctacgacgataaacaggaacgacaatccctgggagagtctccacgcaccctgagcccgactccatcagctgaaggctaccaggacgtccgcgataggatgatccacaggtccacgagccagggcagcattaatagtcctgtttattccaggcattcttatacccctacaacctcccgctctccccaacattttcacagacccggcaatgaacccagctcaggcagaaatagcccactgccatatagacccgatagtagacccctgactcccacctacgcccaggcaccaaaacattttcacgttccagaccagggcattaacatctacaggaagccccctatctataagcagcacgcagcactcgccgcacagtcaaaaagcagtgaggacataatcaaattctcaaagttccccgctgcccaggctcctgatccttcagagacaccaaaaatagaaaccgaccattggccaggaccccctagcttcgctgtggtggggccagacatgaagcgtcgctctagcgggcgggaggaggatgacgaggagctgctgagacgaagacagcttcaggaagagcagctcatgaaattaaacagcggcctggggcagctcatccttaaagaggaaatggagaaggaatctcgggaacggtccagtctgctggccagtcgctacgactctcccattaattccgcgtcgcacattcccagctcgaaaaccgccagtctgccaggatatgggagaaatggcctccaccgccccgtaagcactgactttgcccagtataacagttacggtgatgtcagcggcggggtgagagactatcagacactgcctgatggacatatgccggccatgagaatggacagaggcgtgtccatgcctaatatgcttgaaccaaagatcttcccgtatgagatgctgatggtgactaacagaggcaggaataaaatcctgcgcgaggtcgacagaactcggctggaacggcacctggcacccgaggtctttcgggaaatatttggcatgtctatccaggaattcgatagactgccattgtggcggcggaatgatatgaagaagaaagcaaagctgttctag

SEQ ID NO: 24274 - DNA, 1593 bp, synthetic construct
  source 1..1593: mol_type = other DNA; note = Synthetic coding sequence
atgttcaccgagggcgaggagatgtacctgcagggcagcaccgtgtggcaccccgattgcaaacagtcaacaaaaacagaggaaaagctgcggctgccgaacatcagacgaagttcttccgacttcttctactccaaatcacttattcggcgtactggaaggagcccctcgctacagcccacacgcacatcatcagagtccatctactcgcgacccggtagctcaattccaggcagtcccgggcacacaatctacgcgaaagtggacaacgagatccttgactacaaggaccttgccgccatacctaaggtgaaggcgatctatgacatagaacggcctgacctgattacctatgaacccttttatacgagtggatatgatgataagcaggagaggcagtctctgggagagagcccaaggaccctcagcccaacaccatcagctgaggggtaccaggacgtgagagatcgtatgatccatagatcaacgagccagggttctattaactcaccagtgtactcaaggcattcttacacacctacaacctcacgttcgccccagcattttcacagacccgaactgctgtcaccaggggtccaacggctatcatatctaagaactagcagtctcagcccaacccattccgactcccgaccaaacccccctttcaggcaccactttatcccccatatcaaaggaaatgagccttctagcggaagaaattctcccctgccctacaggcctgactccagaccactcactcccacctacgctcaggcacctaagcattttcatgtgccggaccaagggatcaatatttacaggaagccgccaatctacaagcagcatgcagcgttggctgcccagtcaaagagctcagaggacatcattaaattttcgaaattccctgcagctcaggcacccgatccatcagagactccaaaaatagagactgatcattggcctggtccacccagctttgcagttgtggggcccgacatgaaacgccgatcctctggtcgggaggaagacgacgaggagctacttaggcgccggcagttacaggaggagcagctaatgaaactgaacagtggtctgggtcagctgatcctgaaagaggagatggagaaagagagcagggagcgcagtagccttttggcgagtaggtatgacagccctatcaattcggccagccacattccgagctcaaaaaccgctagtctgcctggctacggacgaaatgggcttcatcggccagtctccactgactttgcacagtataactcatatggcgatgtttctggaggagttcgagattatcaaaccctgcccgatggacatatgccagcaatgcggatggaccgcggcgtttccatgcctaacatgcttgagccaaagatctttccatatgagatgctgatggtaaccaaccgtggcaggaataagatcctgagggaggtggaccggacacggctggaaagacacctggcccccgaggtctttcgagagatttttggaatgtctattcaggagtttgatcgactccctctgtggagacgaaatgacatgaagaagaaagctaagctgttttag

SEQ ID NO: 24275 - DNA, 2109 bp, synthetic construct
  source 1..2109: mol_type = other DNA; note = Synthetic coding sequence
atggtgaaggagaaggtggcccacccccaggacccccaccaccccagcgagaagccggtaatccattgtcacaaatgcggcgagccatgtaagggtgaggtcctgagagtgcagaccaaacacttccacattaagtgtttcacatgtaaagtgtgtgggtgcgacctggcacagggcggcttttttattaaaaatggtgagtacctttgtacacttgactatcagagaatgtacggtacacggtgtcatggatgcggggagtttgttgagggcgaagtggtgaccgctctgggcaagacgtaccatccgaactgttttgcctgtaccatatgcaagcggccgtttcctccgggggatagagtcacatttaacggaagagactgtctttgtcagctgtgtgctcagccaatgagcagcagtcctaaagagacaacattttcatcaaattgtgcaggctgtggaagagacataaaaaacggccaagcccttctcgccttggataaacaatggcatctcgggtgcttcaagtgcaagtcgtgtgggaaagttctgacaggcgagtacatcagcaaggatggcgccccgtactgcgaaaaggactaccagggcctgttcggagtgaagtgtgaagcctgtcaccagttcattactgggaaggtgctggaagcgggggacaaacattaccatcccagctgcgcccggtgctcaagatgcaatcagatgttcacggaaggagaagagatgtacctccagggctctacggtgtggcatcctgactgcaaacagtccacaaaaactgaagaaaaactgcgacccaccaggacgagcagtgagagcatttactccagacccgggtcttccatacccgggtcgccaggccacaccatttacgctaaggtggacaatgaaatcttagattataaggatctcgccgccataccaaaggtgaaggccatatacgacatcgagaggcctgatttaattacttacgaacccttttatacaagcggctacgacgataaacaggagagacagagcttgggggaatcaccccggacacttagccccactccttcagccgaaggctaccaagatgtgagagataggatgatccaccgctcaacctcacagggaagcataaacagccccgtgtacagtcggcacagctatacccccacaacatcccgtagtcctcaacattttcatagacctggcaatgaacccagcagtggccgtaacagccccctcccctatcggccggatagtagacccctgacaccgacatatgcccaggcccccaagcattttcacgtccccgaccaaggcattaatatatacaggaaaccccccatttacaagcagcacgcagctttggcggcccagtcaaaatcaagcgaagatatcataaaattctctaagttcccagccgcacaggcgcctgatccttctgagaccccaaagatagagacggaccattggccagggccaccatctttcgccgtcgtgggccctgatatgaagaggcggagctcaggccgggaagaggacgacgaggagctcttgcgccggcgacaactgcaggaggagcagctgatgaagctgaactcggggctgggccagctgatccttaaggaggagatggagaaagagtctcgcgagaggagcagccttctggcatcccgttatgactcgcctataaattctgcatcccacattccatcttcaaagacagctagcctgcctgggtacggccggaatgggcttcatcgccccgtttctaccgatttcgcacagtacaacagctacggggacgtgtcaggtggcgtgcgggactaccaaactttgcctgatggccatatgccggccatgagaatggatcgcggggtgagcatgcctaatatgctggaaccgaagatctttccatacgagatgttaatggtcacgaacagaggtcgaaacaagatcttaagagaggtagaccggacccggctggagcgacacttagcaccagaagtgtttcgggagattttcggaatgtctatacaggagtttgatcgattacctctctggagacggaatgatatgaagaagaaggcaaagctattctag

SEQ ID NO: 24276 - DNA, 1206 bp, synthetic construct
  source 1..1206: mol_type = other DNA; note = Synthetic coding sequence
atgttcaccgagggcgaggagatgtacctgcagggcagcaccgtgtggcatcccgattgcaaacaatccacaaaaacggaggaaaaactaagagctaaagtggataacgagatattagactacaaggatttagccgccatccccaaggtgaaggctatatatgacattgaaagaccggatctaattacctacgaaccattttatacctccgggtacgacgacaagcaggagagacaatctctgggagagagcccccggacactgagtcctacgccttcagccgagggctatcaggacgtccgggaccgtatgatccacaggtctacgagtcaaggaagcattaacagccctgtgtacagccggcacagctatactcctacgacgagccgcagtccgcagcacttccaccgcccagatcagggaattaacatatacaggaagcccccaatctataaacagcatgccgccctcgctgcgcagagtaaatccagtgaggacatcattaaattctccaagtttccagcagctcaagcccccgacccgtctgaaacgcctaagatagagacggaccactggcccggaccacctagtttcgccgttgtgggcccggatatgaaaaggaggtccagcggtcgggaggaggatgacgaggaattgttaagaaggcgccagctgcaggaagagcagctgatgaagctcaactctggcctcggccagttgatacttaaggaagaaatggaaaaagaatcaagggagaggagctcattgctggctagcagatatgattccccgatcaattcagcatcacatattccaagctccaaaaccgcctcgcttcctggatacgggcgaaatgggctccaccggcccgtgagcaccgacttcgcgcaatacaattcctacggggatgtgtctggaggggtacgggattatcagaccctccccgacggacacatgcccgccatgagaatggacagaggcgttagcatgccgaatatgctggaacctaaaatttttccatacgagatgcttatggtgacaaaccgaggccgcaataagatcctcagagaggtggatagaacaaggctggagagacacctcgcccctgaagtgttccgggaaatttttggcatgagtattcaggaattcgatcgcctgcctctgtggcggcgaaacgacatgaagaagaaagccaaactgttctag

SEQ ID NO: 24277 - DNA, 1968 bp, synthetic construct
  source 1..1968: mol_type = other DNA; note = Synthetic coding sequence
atggtgaaggagaaggtggcccacccccaggacccccaccacccctcagaaaagcccgtgattcattgccataagtgtggggagccctgtaagggggaggtgcttcgcgttcagactaaacattttcacattaagtgcttcacctgcaaagtctgcgggtgcgatctggcacagggtggcttctttataaagaacggcgaatacttgtgtaccctcgattaccagagaatgtatggtactcggtgccacggatgtggggaattcgtcgaaggagaggtggttacggctctaggaaaaacctatcaccccaactgtttcgcttgcaccatttgcaaacgcccctttcctcccggggatcgcgttacctttaatgggagagattgcctctgccagctctgcgctcagcctatgtccagttcaccaaaggaaactacattcagcagcaattgcgcaggatgcggcagggacatcaagaacggccaagcattgctagcactcgacaagcagtggcatttgggctgttttaagtgtaagtcgtgtggtaaagtgcttacaggcgaatatatctccaaggacggcgcaccctattgcgagaaagactaccagggcctatttggagtcaagtgcgaagcttgccaccagttcatcactggcaaagtcctggaggccggcgataagcactatcatcctagctgtgcccgttgttcccgatgtaatcaaatgttcactgagggagaggaaatgtacctccaggggtcgaccgtgtggcatccggactgtaagcaatcaaccaaaactgaggagaaattaaggccaacaagaacaagcagtgaatccatctatagcagacccggttcgtccatcccaggctcccccggtcacactatctatgccaaggtggacaacgagatactcgattacaaggacctggccgcaatccctaaggtgaaagccatctatgacatcgagaggccagacctgatcacctatgaacctttttatacgtctgggtacgacgacaaacaagagcggcagagtctgggcgaaagtcctcgaaccctgtccccgactcccagcgcagagggttaccaggatgtaagggatcggatgattcatcgcagtaccagtcagggctctattaacagtcccgtgtatagtaggcatagctacactcctacgacctcaagaagcccgcagcacttccaccgtcccggcaacgaaccctcctcgggacgcaattcgccactgccttacagacccgatagcaggcccctcaccccaacctacgctcaggcgcctaaacatttccacgtccctgatcagggtatcaatatttatcgcaagccaccgatttacaaacagcacggcccagatatgaaacgacgctcatctggacgagaggaggacgatgaggaactgctgcgtcggcgacaactccaagaggaacagctgatgaagttaaattctggcctggggcagttgattctgaaggaagagatggaaaaagagtcccgtgaacgatccagtttgctcgccagccgctatgactcccccatcaattcggccagtcatatccccagcagcaaaaccgcctccctgccaggttacgggagaaatggcctacatagaccagtcagtaccgattttgcccaatataatagttacggcgatgtgtctggtggcgtcagggacttccagactctcccagacggtcatatgccagccatgcgcatggacaggggagtttctatgccaaatatgcttgagcccaagatctttccgtacgagatgttgatggttacgaatagggggagaaataagatcctgagggaggtggatcgaacgcgtctggaaaggcatctggcccccgaggtcttccgggagattttcggaatgagcatccaggagtttgaccgcttgcccctgtggcgccgcaatgatatgaagaagaaagcgaagctgttctag

SEQ ID NO: 24278 - DNA, 2541 bp, synthetic construct
  source 1..2541: mol_type = other DNA; note = Synthetic coding sequence
atgcccgccttcctgggcctgaagtgcctgggcaagctgtgcagcagcgagaaatctaaggttacctcctccgagcgcacgagtgccaggggcagcaaccgaaagcgtctgatcgtggaagatcgacgagttagtggcactagttttacggcccatagaagggcaacgattacacatttactgtacctgtgtccaaaggattattgcccacgcggacgcgtgtgtaactccgtggacccatttgttgcgcatccccaggaccctcatcacccctccgagaaaccagtgatccattgtcataagtgtggggaaccatgtaaaggagaggtgctgcgggtgcagacaaagcatttccatattaagtgcttcacctgcaaagtgtgtggatgtgatctggcccagggtggattctttattaagaatggagagtacttatgtaccttggactaccaaaggatgtacggcacgagatgccacggatgtggcgagttcgtggaaggggaagtcgtgacagctttggggaagacgtaccacccaaattgctttgcctgcaccatctgtaaaagacctttcccgcccggcgatcgcgtcaccttcaatggaagggactgtctgtgccagctgtgcgctcagcctatgtctagctctcctaaggagactaccttctctagtaactgcgccggctgcgggcgggatattaaaaatggccaagcactgttggccctggacaagcagtggcaccttggatgtttcaaatgcaaaagttgcggaaaagtcctcactggtgaatatatctctaaggacggtgccccgtattgtgaaaaggactatcagggtttatttggcgtgaaatgtgaagcctgccaccagttcataactggtaaggtgctagaggccggcgacaagcactatcaccctagctgcgctcggtgctcccgttgtaatcagatgtttacggagggcgaggagatgtatctgcagggatccaccgtatggcatcccgattgcaagcagtccacaaagacagaggagaagcttcgcctgccaaatatccggcgctcttcatcagacttcttctacagtaaaagtctgattaggcggacaggcagatcccccagcctccagcccacaagaactagctcggaatccatttactcacgcccagggagtagtattccagggtcaccaggccatacaatctatgccaaggtcgataatgaaattttggattacaaggatctagccgccatcccaaaggtgaaagctatctatgacattgagcgcccagacctgatcacatacgagcccttctatacatctggatatgacgacaagcaagaaagacagtccctcggtgaatcaccgaggacacttagcccgaccccctccgctgaaggatatcaggacgtgcgcgatagaatgatacatcgctcaacgtcacagggctcaatcaactcacctgtgtattcaagacatagttacacaccaaccacttctagatccccccagcattttcatcggccagagctcttgtctccaggcgtgcaaagactgtcatatttaaggacctcttcgctttctcctactcattctgactcccggccaaacccgcccttccggcaccacttcatccctcacataaaagggaacgaaccttcctccggacgcaattcgcccctgccgtacagaccggactccagaccgcttacccctacatatgcgcaggcgcccaaacactttcacgttcccgatcaaggaataaatatctatagaaaacctcctatttataaacagcacgccgcgttggcagcccagagcaagagctcagaagatattattaagtttagtaaatttcccgctgcgcaggccccagatccatccgagacacctaaaatagaaactgaccactggcccgggccacctagctttgctgtggtggggccagatatgaaacgcaggtcatcaggacgggaagaagatgatgaagagctcttaagaaggcgccaacttcaggaagagcagttaatgaagctgaacagcgggctgggccagttaatcctgaaagaagagatggagaaggagtcccgcgagcggtcttccctgttggcgtcacgctatgattccccgatcaactccgcctcacacattccctcctcaaagaccgcttcactgcctggctatgggagaaatgggctgcatcgccccgtatccactgactttgcgcagtataactcatacggagacgtcagcggcggcgtgagagagtaccagacgctgcccgatggtcacatgcccgctatgagaatggaccgcggcgtttccatgccaaatatgctggagccaaagatttttccatatgagatgttgatggtgaccaatcggggcagaaacaagatactcagggaggttgacaggacccgcctcgaacgccatctagccccagaggtatttcgagagatcttcggcatgtccattcaagagtttgacagactgccactctggcgcaggaacgatatgaagaagaaggctaaactgttctag

SEQ ID NO: 24279 - DNA, 2109 bp, synthetic construct
  source 1..2109: mol_type = other DNA; note = Synthetic coding sequence
atggtgcccgaccccgtggcccacccccaggacccccaccacccctcagagaagccagtgattcattgccacaagtgtggcgaaccctgtaaaggagaagtcctccgggttcagactaaacatttccatattaagtgctttacttgcaaggtgtgcgggtgtgatctggctcagggaggattcttcatcaaaaatggagagtatctgtgcaccctggattatcagcggatgtacgggaccaggtgccacggatgcggtgagttcgtggaaggcgaggtcgtgactgctctcgggaagacttatcatccgaactgctttgcttgcaccatttgtaaaagacccttccctcccggcgaccgcgtcacctttaatgggcgggactgtttatgccagctttgcgcccaacccatgagttcttcacccaaagagaccacgtttagctctaattgtgcagggtgtggacgcgacatcaagaacggacaagctttgttagctttagataagcaatggcatctggggtgtttcaaatgcaaaagctgtgggaaagtgttaaccggtgagtacatttccaaagacggcgccccttattgcgagaaagactatcaagggctgtttggcgtgaagtgcgaggcttgccatcaattcatcaccggaaaagtgctcgaagcaggggacaagcattaccatccaagctgtgcccgttgcagtaggtgcaaccagatgttcacagaaggcgaagaaatgtacctgcagggctcgaccgtttggcatcccgactgtaaacaatccactaaaacagaagagaaactcagaccgactcgcacgtccagtgagtcgatctatagcagacctggatcaagcatacccggctccccggggcacacaatttatgctaaagtcgataacgagatactcgattataaagatttggccgctatacctaaggtgaaagcaatctacgatatcgagcgccctgacctgatcacctacgagcccttctacacctcggggtacgacgacaagcaagagcggcagtctttgggagagtccccccgcaccttgagccccaccccgtccgcagagggttatcaagacgtgcgtgacagaatgattcaccggtctacaagtcagggtagcattaatagcccggtctactccagacattcctacactccgacaacatcacgctcaccacagcactttcatcgacccgggaacgagccaagtagtggacgcaactctccactcccatataggccggattccagacctttgacacctacatatgcacaagcacctaaacacttccatgtacccgatcagggcatcaatatttaccggaaaccaccgatctacaagcaacacgctgccctggccgcccagagtaagagtagtgaagacatcataaaattttctaagttccctgccgctcaggcacccgaccctagtgaaacccccaagattgagaccgaccattggcctggccctcctagttttgccgtcgtggggcctgacatgaaaagacggtctagcgggcgcgaggaagatgacgaggagctccttagacggagacagctccaggaagaacaattgatgaagcttaattccggcctgggccagctgattctaaaagaggaaatggaaaaagagtcacgtgagagaagcagtttgctcgcaagtcggtacgactctccgatcaacagtgcctcacatatcccaagcagcaagactgcctctctacctggttatggcagaaatgggcttcatagaccggtgtctactgatttcgcacaatacaactcatacggcgatgtgtctggaggagtgagagaataccagaccttgccagatggacatatgccagccatgcgtatggacagaggggtgtctatgcctaacatgttagagcccaaaatattcccatacgaaatgctgatggtgacaaatcgggggaggaacaaaatcctaagagaggtcgatagaacacgcctagaacgacaccttgcccccgaggtttttagagaaatcttcggtatgtccatccaggagttcgatcgactaccactgtggcgccgcaacgacatgaaaaaaaaagctaaactcttctag

SEQ ID NO: 24280 - DNA, 1368 bp, synthetic construct
  source 1..1368: mol_type = other DNA; note = Synthetic coding sequence
atgttcaccgagggcgaggagatgtacctgcagggcagcaccgtgtggcatcctgactgtaagcaaagcaccaaaactgaggagaagcttaggctgcctaatattcgtcggagtagcagcgacttcttttacagcaagtccttgattcgccggaccggacgctcacctagtctccagcctacccgtacatcaagcgaaagcatttactcacgaccaggatctagcatcccaggctcccctggccacacaatctatgccaaagttgataacgagatccttgattacaaagatctggctgccatacctaaagttaaggcaatctacgatatagagagacccgacctcatcacctacgagccgttctatacatcaggctacgacgacaaacaggagagacagagcctgggcgaaagccccagaacactcagtccaaccccgtccgctgagggctatcaggacgtaagggataggatgattcaccggtcgacctctcagggctctatcaacagtccagtgtactcccggcattcatacacacccaccacctctaggagcccccagcactttcacagacccgatcagggcattaatatctacagaaaaccccccatttataagcagcatgccgctctggcggcacagagtaagagctccgaggatattatcaaatttagcaaatttcccgctgcccaagctcctgacccctcagagacacctaagattgagacagaccattggcccggaccaccaagcttcgctgtagtgggcccggacatgaagcggagaagtagcggaagggaagaggatgatgaagagcttctcagaagaaggcagcttcaggaggagcagctgatgaagcttaacagcggattgggccagctgatcttgaaagaagagatggagaaggagtcccgcgaacggagctcgctcctggctagccgctatgatagccctatcaattctgccagtcacataccctccagcaaaacggcttcactgccaggctatgggagaaatggtctgcaccgcccagtttcaacagattttgcacaatataactcctacggggatgtttcaggtggggtgcgcgacttccagacactgcctgacggacatatgcctgcaatgcgtatggatcggggagtgtccatgccaaacatgctggagcctaagattttcccatacgagatgctgatggtgacaaataggggccggaacaagatcctcagggaggtggaccgtaccagattggaacggcacctggccccggaggtctttcgtgagatctttggcatgagtattcaggaattcgaccgcttacccctttggaggcgaaacgacatgaaaaagaaagcaaagctattctag

SEQ ID NO: 24281 - DNA, 2241 bp, synthetic construct
  source 1..2241: mol_type = other DNA; note = Synthetic coding sequence
atgctgatgaccctggagatgaccgagctgaccgacccccaccacacgatgggagactacaaggtcgcccacccacaggacccacatcatccctctgaaaaacccgtgattcactgtcataaatgcggagagccgtgtaagggagaggtcctccgagtgcagacaaagcattttcatatcaaatgttttacgtgcaaggtgtgcggttgcgacctcgcccagggaggtttttttattaagaatggcgaatatctctgcacgctcgattatcagagaatgtacggcacaaggtgccatggatgtggggaattcgtagagggagaagttgtgaccgcacttggcaagacataccacccaaattgctttgcctgtaccatatgcaaacgaccctttcccccaggcgatcgagtcacatttaacggccgcgactgcctgtgccaactgtgcgcgcaaccaatgtcatcatccccaaaggaaaccacttttagtagcaattgcgctggctgtggaagggacatcaaaaatggtcaggctctccttgcattggacaagcagtggcacctcggctgtttcaagtgcaaaagttgtgggaaagtattgacaggcgagtacatctccaaggatggagctccctactgtgaaaaggattatcaggggctcttcggtgtgaaatgtgaggcatgtcatcaattcataaccggaaaagtactggaggcaggcgataagcactaccacccatcttgtgccaggtgctcaagatgcaaccaaatgtttacagaaggagaggagatgtatttgcagggatccaccgtctggcatccagattgtaagcagtcaactaaaactgaagaaaagcttcggctccccaacatcaggcgatcaagctcagactttttctactccaaatccttaattcggcgcacaggccgaagccccagtctacaaccaacccggacgagttccgaaagcatctactccaggccagggtcaagtatcccaggaagccctggacacacgatctacgctaaggtcgacaatgagatccttgattataaggatctcgcagcgatccctaaggttaaagctatatacgatatagagagacctgatcttatcacctatgagccattttacacatccggctacgatgataaacaagagagacagtcactgggcgagagtccccgtactctgtcaccaaccccgagcgcagagggctaccaggatgtaagagacaggatgatacaccggtcaacatctcaagggtcaataaattctcccgtgtattcccggcactcgtatacccctaccactagccgctcgccacagcacttccacagacccggaaacgaaccgtcaagcggccgtaactcccctctgccttacaggccggactctaggccacttaccccaacttatgctcaggccccaaaacacttccacgtcccggatcagggcatcaacatctaccgcaaaccgcccatctataaacagcatgctgccctggctgcccagtcaaagtcatccgaggacattattaaattttccaaatttcctgccgcccaggccccggacccctccgagacccccaaaattgagacagatcactggcctggaccaccttcctttgccgttgtggggcccgacatgaaaagacggtctagtgggcgcgaagaggatgacgaggagctcctgcgaaggcggcagctacaagaggaacaactgatgaagctcaattcaggactcggccagctcatcctgaaagaagagatggagaaggagagtagagagagatcatcactgctggcaagccggtatgattcgcccataaacagcgccagtcatatccccagtagcaaaaccgcctccctacctgggtacggacgcaacggcctgcatcggcctgtcagcacagacttcgctcaatacaactcatatggcgacgtaagtggaggggtacgcgattttcaaaccctgcctgacggccacatgcccgcaatgcggatggatcgaggcgtttcaatgccaaacatgctcgagcctaaaattttcccatacgagatgttaatggtgacaaatagaggccggaataagatacttagagaagtcgacagaaccaggctagagagacacttagctccggaggtatttagggaaattttcggtatgtcgatacaggagttcgatcggttacctctgtggcgacgtaacgacatgaagaagaaagcaaagcttttctag

SEQ ID NO: 24282 - DNA, 915 bp, synthetic construct
  source 1..915: mol_type = other DNA; note = Synthetic coding sequence
atggccgaggccagcgccgccggcgccgacagcggcgccgccgtggccgcacacagattcttttgccatttttgcaagggcgaggtttcaccaaagctgccggagtatatttgcccaagatgcgaaagtggatttatcgaagaggtcacagatgattcctcctttctggggggcggaggttcaagaattgataacaccactacgactcacttcgctgagctttggggacacctggaccacaccatgttctttcaggactttagacccttcctgagcagcagccctctggaccaggacaacagagcaaatgaacgggggcatcaaacccataccgacttctggggagctaggcctcctagactgcccctggggcgcagatatagaagtcgtggatccagccggcctgaccgctccccagcaatagagggaattttgcagcatatttttgcgggatttttcgcgaattccgcaatacctggcagtccacacccttttagctggtctgggatgctgcacagtaaccccggggattatgcctgggggcagactgggcttgatgcaattgtcacccagctgctgggccagctcgaaaacacagggcctccaccagctgacaaagaaaaaatcacatcgctgcccaccgttactgttactcaggagcaggtagatatgggactggaatgccccgtgtgcaaggaggattatactgtggaggaggaagtgagacaactgccctgtaatcacttttttcacagctcatgcattgttccatggttagagctccacgatacatgcccagtttgccgcaaaagcctgaacggagaagattccacgaggcagtctcagtctactgaagcttccgcaagcaacaggttttctaacgactcgcagctgcacgacagatggacgttttag

SEQ ID NO: 24283 - DNA, 636 bp, synthetic construct
  source 1..636: mol_type = other DNA; note = Synthetic coding sequence
atgagctgcaccatcgagaagatcctgaccgacgccaagaccctgctcgaaaggctgagagaacacgatgccgctgcggaaagcctggtagaccagtcagctgctttgcataggagagtggccgctatgagggaagcgggcaccgccctgcccgatcaggtgcgccagcggtaccaggaggacgctagcgatatgaaggacatgtcaaaatacaagccgcacatactcctttcacaagagaatacccagatcagagatcttcagcaggagaaccgggagctttggatatccttagaagaacaccaggatgctctcgaactcattatgagtaaatatcggaagcagatgctccagctgatggttgcaaaaaaggccgtcgacgccgagccagtgcttaaagcccaccagtcacattccgctgaaatagagtcacaaatcgaccgaatttgcgagatgggcgaggtgatgcgcaaggctgtgcaagtggacgatgatcagttctgcaaaatccaggagaaactggcccaactcgaattggaaaacaaggagctgagggaactgcttagcattagcagcgaatcccttcaggcccggaaagagaactcaatggacacggcttctcaagccatcaaatag

SEQ ID NO: 24284 - DNA, 2451 bp, synthetic construct
  source 1..2451: mol_type = other DNA; note = Synthetic coding sequence
atggtgctgatgttccagatccggtacatcagccagacccagggcttacccgcagaatacctgctatcggcaggaaccaagaccacacgtttctttaatcgggaccctaatctgggctaccccttatggcggttaaaaacccccgaggaacatgagctcgaaacagggattaaatccaaagaggctcgaaaatatatttttaactgccttgacgacatggcccaggtgaacatgtctactgatctggaggggaccgatatgctggctgagaaggctgatcggagagaatatatcgacctcctgaagaagatgttgacaatcgacgccgataaaagaatcactcccctgaagacgctcaaccaccagtttgtcaccatgacacacttgctcgacttcccgcactcaaatcacgtgaagagttgttttcagaacatggaaatctgcaagcgaagagtccatatgtacgatacagtgtcccagatcaagagcccctttactacccacgtggctcccaatacgtctacaaacctcacaatgtcctttagcaaccagctgaacactgttcacaatcaggcttcagtcctcgcctcgtcctcaaccgccgcagctgcgaccttatccttggccaatagcgatgtgagcctgctgaactaccaaagcgccctttatccctcctccgccgccccagtgccgggggtcgcacagcagggggtttcactgcagcccggaacaacccagatttgcactcaaaccgacccatttcagcagacattcatagtgtgcccccccgcctttcagaccgggctgcaggcaaccaccaagcactcaggattcccagttagaatggataacgcggttcccatagtgccacaggcccccgcagcgcaaccgctgcagatccagtccggagtgctgacccaagggtcctgcacccccttgatggtggctactctccatccccaggtcgccactataacgcctcagtatgcggtccccttcactttgtcatgtgccgccggacggccggcactagtggaacagaccgccgctgtgctgcaagcttggcccgggggcacccagcagatcttactaccttccacctggcagcagttaccaggcgtggccctgcataactcagtccaacctactgccatgattcccgaggcaatgggaagcggtcaacagctcgccgattggagaaacgcccactcccacggtaaccagtactctacaattatgcaacagccgtccttattgactaaccacgtgactctggccactgctcagccactcaatgtgggggtagcacacgtcgtcagacaacagcagagctccagcctaccgagcaagaagaacaagcagtcggcccccgtgtccagcaagagctccctggacgtgctcccgtcccaggtgtattctctcgtgggttcttccccgcttcggacgacttcatcctataactctctcgtgccagtgcaagatcagcaccagccaatcatcatccctgatacaccatcccctccggtgagcgtcattacaattcgcagcgacaccgacgaggaggaggacaataagtacaaaccatcctcctctgggcttaaaccccggtcaaatgtgattagttatgtgaccgttaacgacagccctgattccgattcttcactgtctagcccttattccaccgatacgctgtctgccttgcggggcaacagcggctcggtacttgaggggcccggacgggtcgtggctgacggtaccggcaccaggactatcatcgtgcctcccctgaaaacccaactgggagattgtactgtcgctacccaggcttctggattattgagcaacaagaccaaaccagtcgcatctgtttcaggccagtctagtgggtgttgcatcacacccaccggttacagagcccagagagggggcacctcggccgcccaaccgctgaatttaagccaaaaccagcagtcaagcgctgcccccacatctcaagaacggtcttcaaatccagcccccaggcgacaacaggcctttgttgccccactgtctcaggcgccttatacttttcagcatggaagccccctccattccaccggccacccccaccttgccccagcacctgcacatttgccctcccaggcccacctctacacatatgctgctcctaccagcgcggccgcactgggcagcactagctccattgcacatctttttagccctcaggggtcatcccgccacgccgcagcgtataccacccatccgtccaccctggttcatcaagtgccagtgagcgtcgggccctccctgttaaccagtgcttccgttgcccctgcacagtaccagcatcaatttgccacccagtcttacatcggatcgtcgcgtggaagcaccatttatacaggctaccctctctcacctacaaagatttctcagtatagctacctttag

SEQ ID NO: 24285 - DNA, 3498 bp, synthetic construct
  source 1..3498: mol_type = other DNA; note = Synthetic coding sequence
atggccagccagctgcaggtgttcagcccccccagcgtgagcagcagcgctttctgtagcgccaagaaactgaagattgaacccagcggctgggatgtcagtgggcagtctagcaacgataagtattacactcactcaaagacactgcccgctacccagggccaagcaaactcatctcaccaagtagctaacttcaatatcccggcttacgaccaggggctactgttacctgccccagcagtggagcatatcgtagttacagcagccgatagctccgggtccgccgccacaagcacattccagagctcacagactctgactcaccgaagtaatgtgagcctgctggaaccttatcagaagtgtggtcttaaacggaagtccgaagaggtcgactccaacggatccgtgcagatcattgaggagcacccgccactgatgctccagaatcgcactgtggtcggggcagctgccacaaccactaccgtgacaaccaagagtagttcgagctctggagaaggggactaccagctcgtacaacacgagatactatgttccatgactaactcctatgaggtcctggaatttcttggaagagggacctttggccaggtcgctaaatgttggaaacggtccacaaaagagatagttgcgattaagatattgaaaaaccacccgtcatatgcgaggcagggccagattgaagtgagcattctcagcagactgtcttctgaaaatgctgatgagtataattttgtccgcagttatgagtgcttccagcacaagaatcatacgtgtcttgtgtttgagatgctcgagcaaaatctttatgactttctaaagcagaacaagttctctcccttgccactgaagtacatcagacctattctgcagcaggtcgctacggccttaatgaagctgaaatcattgggcttgattcatgccgacctcaagcctgagaacataatgctggtggatcccgtccgccaaccgtaccgtgtgaaggtcatcgacttcgggtccgcctcccacgtttctaaagccgtttgctctacttatctgcagagccgttactatcgcgcccccgaaatcatacttggactgcccttctgtgaggccatagatatgtggtctcttggctgtgtgatcgctgagttgtttctgggctggccactgtaccccggggcctccgagtacgaccaaatccggtacataagtcaaacacaggggctgcccgcggaataccttttgagcgcagggacgaaaactacacggttcttcaatcgggaccccaatctgggctacccgctctggcggctgaagacacccgaggaacacgaactcgagactggtattaaaagcaaagaagcaagaaagtacatcttcaattgtcttgacgacatggcacaggtcaacatgtcaactgacctggaaggcaccgatatgctcgcagagaaagctgaccggcgagagtacatagacctattgaagaagatgcttacaatcgacgcggacaagcgaataactcccctgaaaacgctcaatcaccagttcgtgacgatgacacacttgcttgacttcccccattccaaccatgtcaaatcatgtttccagaatatggaaatttgtaagaggcgcgtgcatatgtacgacacagtcagtcagatcaaaagcccttttactacacatgtggcccccaatacctccaccaacctcactatgagcttttctaaccaattgaacacagttcacaaccaggcttccgtgctggccagctcttcaacggctgctgcagctacactgagtctagctaattccgatgttagcttactgaattatcagtctgccttgtacccctcctcagcagcaccggtgcctggcgttgcccagcagggcgtgtccctccagccgggcacaacccagatctgcactcagaccgaccctttccaacaaacgtttattgtgtgtccacctgcattccaaacaggccttcaggcaaccacaaagcactcgggcttcccggtacgaatggacaacgccgttccaatcgtgccacaggctccagctgcacagccccttcagatccagtcaggggtgttaacacagcaggcctggccggggggcacacagcagatcctactgcccagcacctggcagcagctccctggagtggctcttcataattctgttcagcctactgccatgatccctgaggcaatgggttccgggcaacaacttgccgattggaggaacgcccacagccacggaaaccaatacagcaccatcatgcagcagccttccctattgacaaatcacgttacactggctaccgcacaacctttaaacgtcggggtggctcacgtggtccggcaacagcagtcctcctcactgccgagtaaaaagaataaacagtctgcccctgtctcatccaagagttcgttggatgtgcttccttcacaggtatattccctggttggaagctctcctctccgcactacatccagttacaacagcttggtgccagtgcaggatcagcaccaacccatcatcattcccgacacacccagccctcccgtatctgtaattaccatccgttctgacacagacgaagaggaagacaacaaatacaaacccagtagtagcggcttaaagcccagatccaacgttataagctatgttaccgtcaacgatagccctgactcagacagctcgttgtcatccccctattctaccgacacgttgtcggctttgcgggggaacagtggaagcgtgctcgaggggcctgggcgagtggtggcagatggaacaggaacaagaactatcatagtgcctcccttgaagactcagctaggggattgtacagttgctacccaggctagtgggctgttatcaaacaagacaaaacccgtagccagcgtcagcgggcaaagttccggctgttgcataacacctaccggctatcgggcccagcgtggtggaacctctgctgctcagccactaaacctgtcccagaaccagcagtcatccgccgctccaacaagccaggaacgaagttccaatccagctcctaggcgtcagcaggccttcgttgcccccctaagtcaggctccctacacctttcagcacgggagtcctctacattcaaccggtcatcctcacctggcccccgcaccagcccatttgcctagtcaagcgcacttgtatacttatgccgcacccacgagcgctgctgcactgggatccacctcatccattgcccatcttttttctccacaggggtcttctaggcatgccgccgcctataccactcacccttctacgctcgtgcaccaggtccccgtgtctgtgggacctagtttgctgacctccgcaagtgtcgccccagctcaataccagcaccagtttgccactcagtcttacataggctcctcacgcggttcaacaatctatacaggatacccacttagcccaaccaaaataagccagtattcctacctttag

SEQ ID NO: 24286 - DNA, 3498 bp, synthetic construct
  source 1..3498: mol_type = other DNA; note = Synthetic coding sequence
atggccagccagctgcaggtgttcagcccccccagcgtgagcagctctgccttctgcagcgcaaaaaaactgaaaattgaaccaagcgggtgggacgtaagcggacagtctagcaatgacaaatattatactcattccaagacacttccagcaactcagggacaggccaattcttctcaccaggtcgctaactttaacattccagcctatgaccagggacttttgttgccggcaccagccgtagagcatatcgtcgttacagctgcagactcatctggtagtgctgcaacctcaacatttcagagctcacagaccctaacacatcgctcaaacgtcagtttactggaaccctaccaaaagtgcgggcttaagcgcaagtctgaagaggtagactcaaacggctctgttcagatcatcgaggagcatccacctctgatgcttcaaaaccggaccgttgtcggagcagcggctacaactacaaccgtgaccacaaaaagttcctcctcctcaggcgaaggagactatcagcttgtgcagcacgaaatcctgtgttccatgactaactcttacgaagtcttggagtttctaggtaggggaacttttggacaggtggctaagtgttggaagagatccacaaaagagatagtcgctattaaaatcttgaaaaatcacccgtcttacgcgaggcagggccagatcgaggtttccattcttagccggctctcctcagaaaacgccgatgaatacaacttcgttcgatcctatgaatgcttccagcataaaaaccacacctgcctggtcttcgagatgctcgagcagaatctctatgacttcctgaagcagaacaagttttcgccactgcccctaaaatatatccgccccatcctccaacaggtcgccaccgccctaatgaaactgaagtctctggggctcatccatgcggatctgaagccagagaacattatgttggttgatcccgttcgccagccttatcgagtgaaggtgatcgactttgggtcggcaagccatgtgtctaaagcagtgtgtagcacctacctgcagagtcggtactacagggctcctgaaattattcttgggctgccgttttgcgaggccatcgatatgtggagcctcgggtgtgtgattgctgagctttttcttggctggcccctataccccggggcaagcgaatacgaccaaattcgatatatctcacaaactcagggcctgcctgccgagtacttactgagcgccgggaccaagacgactaggttttttaacagagaccctaacttaggatacccattatggagactgaagacccccgaagaacacgagctcgaaaccgggataaagtctaaagaggcccgaaaatacattttcaattgcttggatgacatggcccaggtgaacatgtccaccgatctggaggggacagatatgcttgctgaaaaggccgatcgtagggagtatatcgatctgcttaagaagatgcttacaatcgatgccgataagcgcattacacctctgaagactttgaatcaccagtttgtcacaatgacccaccttttagactttcctcacagcaatcacgtgaagtcctgttttcagaacatggagatctgcaaacgacgggtgcatatgtacgatacagttagccagatcaagagtccatttaccacacatgtggcccccaatactagcacaaatctgacaatgtcttttagtaaccagctgaatactgtgcacaaccaggcctctgtcctggccagcagttcaacggcagcagctgccaccttgtccctggccaactcagatgtgagtcttctcaactaccaatccgcactatatccttctagcgcagcccctgttccgggagtcgcccagcagggggtgtcattacaacctggcactacgcagatctgtacccaaacggacccgtttcagcagacctttatcgtgtgtccccctgcgttccagaccggactgcaagccactactaagcatagcggctttcctgtgcgtatggacaatgccgtgcccatcgtgccacaagcgccagcagcccagccgttacagatccaatcaggggtgttgacacaacaagcgtggcccgggggaacccagcagattttgctgcctagtacttggcagcagctccccggggtcgcattacacaattcagtccaacctactgcaatgatcccagaggccatgggatctggccagcagctcgctgattggaggaacgcccatagccacgggaatcagtattcaactataatgcagcagcccagcctgctgactaatcacgtgacactggctacagcccagcctttaaacgtgggcgtagcccacgtagtgaggcagcagcagtcctccagccttccttccaagaaaaacaaacagtccgcaccggtgtcttcaaaaagttccctggatgttctgccatcccaggtttactccctggtgggcagctccccactgagaacgacgagctcctacaactctctagtgcccgtacaggatcaacaccaacccattatcatccccgacaccccaagcccccctgttagtgttatcacgatccgctctgatacagatgaggaagaagataataagtacaaacccagttcctctggcctgaagccacggagtaatgtgatatcttatgtcaccgttaacgattcacctgatagcgatagcagcctatcctcgccctatagtaccgatacactgtccgctctgcggggcaatagcggatcagtactggaagggccagggagggtagttgcagacgggacagggacccgcacaatcatcgttccgcccctaaagactcagttgggcgactgtacagtggccactcaagcatcaggcctcttgtcaaacaagactaaacccgtggccagcgtaagcggacagtccagcggatgctgcattactcctactggatatagggctcaacgtggaggcactagtgcagctcaaccactgaacctgagccagaaccaacaatccagcgccgctccaacgtctcaggagcgcagcagcaatcctgcaccacgcagacagcaagctttcgtggctccactgtctcaggccccatacacctttcagcacggaagcccactccactccacgggtcaccctcacctggctcccgcgcctgcccacctgccctcccaagcccacctgtacacctacgcagcgccgacctcagcggctgcgctggggagcaccagtagcatagcccacctattctccccccagggaagttcacgacatgctgcggcctacacaactcatccatcaaccctcgtccaccaagttcctgtgagcgtcggcccttctctcctaacatcagcttctgttgcacccgcccagtaccagcatcagtttgcgacccagagctacataggatccagccgggggtctacaatatacacgggatatcctttgagtccaactaagatctcccaatattcctatctatag

SEQ ID NO: 24287 - DNA, 3633 bp, synthetic construct
  source 1..3633: mol_type = other DNA; note = Synthetic coding sequence
atggccagccagctgcaggtgttcagcccccccagcgtgagcagcagcgcattttgttctgctaagaagctcaaaatcgaaccttcaggctgggacgtgtctggtcagtcgtccaatgataagtactacacccactctaagaccctccccgcaactcagggccaggccaactcttcacatcaagtcgcaaatttcaacatcccggcctacgaccaagggttgctgcttcccgccccggccgttgaacatattgtagtcacagccgcggatagtagtggtagtgcggccacctccaccttccagtcttcacagacactgacccatcggtctaacgtgtcgctgctggaaccataccagaaatgtgggctcaagcgtaagagtgaggaggtagactccaatggatctgtacagatcattgaggagcaccctcctctgatgctccagaaccggactgtggtgggagccgctgctacaaccaccacggtcactacaaaatcttctagttcatccggcgagggcgattatcaattggtccaacacgagatactgtgttcaatgacgaactcctacgaagtccttgaattcctgggccgggggacattcggtcaggtggcaaaatgttggaagcgctctaccaaggaaatagtggccatcaagatcctgaagaaccatccatcttacgctaggcagggtcaaattgaggtgagtatcttatctcgcctgtcttctgagaacgcagacgagtacaactttgttcgaagctatgaatgcttccagcacaaaaatcacacctgcttagtgttcgagatgctggaacagaatttgtatgacttcctcaagcagaacaagttctcaccattacctttaaagtacatccgccccattttgcaacaggtggcgacagcactgatgaaactgaaatctctgggacttattcacgccgatctcaagcctgaaaatattatgctggtggaccctgtgaggcagccctatagagtgaaagtaatcgacttcggctcagccagccatgtgagcaaagctgtctgctctacttacttgcagtcccggtattatcgtgctcccgagattatcttgggactgcccttttgcgaggcaatcgacatgtggagtttgggatgtgtcattgctgagctctttctcggctggccgctctatccaggagcctcagaatatgatcagatcaggtatatttcccagacccaagggctccctgcggaatatctcctgtctgctggaacaaaaactactcgcttcttcaacagagatccaaatttgggctaccccctatggcgtctgaagacccccgaagagcacgagctggagacaggcatcaagtccaaggaggccagaaaatacatcttcaactgcttggacgacatggcccaggtaaatatgagcactgacttggaaggtaccgacatgttggcggagaaggccgaccggagggagtatattgatcttctgaagaaaatgctcacgatcgatgcagacaagcggatcacacctctgaaaacccttaaccatcagtttgttaccatgacccatctgctcgatttcccccattcgaatcacgtcaaatcctgtttccagaacatggaaatctgcaagagacgtgtgcatatgtacgataccgtgtcccagatcaaaagtcctttcacgacccacgtagcccctaatacatccaccaacttgacgatgagcttttccaatcagctgaacacagtgcacaatcaggcatccgtactcgcgtcttcatccactgctgccgcagctactttgagcctcgcaaactccgacgtgtcccttctgaattaccaaagcgctctctacccatcaagcgctgcaccagtcccgggcgtggcgcagcagggggtgagtctgcagcctggcaccactcagatatgcacccagactgatccatttcagcagactttcattgtatgccctcctgcattccagactggactccaggcaactactaagcatagcggatttcctgtgagaatggacaatgcggtgcccatcgtcccgcaagcccccgctgcccaaccacttcagattcaaagtggagtgctgactcagggctcatgtaccccgctcatggtggcaactctgcatccccaggtggcgaccatcacaccccagtatgcggtgccgttcactctttcctgcgcagctgggcgcccagcactggtggagcagaccgcggctgtgctgcaagcatggcccgggggcacccagcaaatccttctgccaagtacatggcagcaactgccaggtgtggccttacacaacagcgtgcagccaactgctatgattcccgaggctatgggctctgggcagcaactcgctgattggcgaaacgcccattcacatggaaaccagtacagcacaatcatgcagcagccttccctcctcaccaatcacgtgaccctggctacagcccagccactgaacgtgggcgtggcccacgtcgtgcgacagcaacagagctcatcactgccctccaagaagaacaagcagagcgcacctgtctctagtaagtcctccctggatgtcctgcccagccaggtctattccctggtcggcagcagcccattgcgaacgacctcttcttataactccctggtgcctgtgcaagatcagcatcaaccaatcatcattcctgacacaccgagtcctcctgtctccgtaattacaatccggagcgatacagacgaagaagaagataataagtacaagccatcatcttccgggttgaagcccaggagtaatgtgattagctacgtcactgtgaacgattctcctgattctgatagctcgctgtcctcgccttatagtactgacaccctctctgccttgagaggcaattcgggctcagtgctggaaggtcccggtagagtggtggcagacgggacaggaacaaggactattatcgtacccccactgaaaacccagctgggcgactgcaccgtcgctactcaggcatccgggttattgagtaacaaaaccaaaccagtggcatctgttagcggccagtcatccggatgctgtattacaccaacgggttaccgcgcccagagaggtggcacctcagcagctcagccattaaacttgtcacagaatcagcagagtagcgcagctccaacatctcaggaacgttcgtccaacccagcaccacgtcgccagcaggccttcgtggctcctttaagccaggccccctatacgttccaacacggctcccctctccactctacaggccaccctcatctcgctcccgcccccgctcacctacccagccaagcccatctgtacacctacgcagctccaacatctgctgccgctcttgggtcaacatctagtattgcccatttattcagtccgcagggcagcagtcgacacgctgccgcttacacaacacatccttcaaccttagtacatcaagtccctgtctccgtcgggccatctctcctgactagcgcttctgtcgcccccgcccagtaccagcatcagtttgccacccagagctacatcggatcatcacgcggctcaaccatttacactggatatcccctgtctccgactaagatcagccagtattcctatttgtag

SEQ ID NO: 24288 - DNA, 3228 bp, synthetic construct
  source 1..3228: mol_type = other DNA; note = Synthetic coding sequence
atggccagccagctgcaggtgttcagcccccccagcgtgagcagctccgctttttgctcggcaaagaagctcaaaattgagcccagcggctgggacgtgagcggtcaatcgtctaacgataagtactatacccactcgaaaacactgcccgcaacccaggggcaagccaacagttctcaccaggtcgctaacttcaacatccccgcctacgatcagggacttcttctccctgcaccagccgtggaacacatcgtggtgacagccgccgattcctcaggatcagcggcgaccagtaccttccagagttctcagaccctaacccataggtcaaacgtctcattactggaaccctaccagaagtgtggtttaaaacggaagtcagaggaggtcgattcaaatggatcagtccagattatcgaggaacacccccctcttatgctacagaatcggacagtggtcggcgctgccgcaacaactaccactgtgaccactaagagttcgagcagcagcggtgagggggactaccagctggtgcagcatgagatcctatgcagtatgacaaacagctatgaggtcctggaattcctcggtcgggggaccttcggccaagtggcgaagtgctggaaacggtccacaaaagagatcgtcgcaattaaaattctgaagaatcacccttcttatgcacgtcagggccaaatcgaagtttccatcttgagcagattatcctccgagaatgctgatgagtataattttgtgcgatcttacgagtgttttcaacataagaaccacacctgcctggtttttgagatgctggagcagaatctatacgacttcctcaaacagaataaattcagcccactccccttaaaatacatccgtcctatcctgcagcaggtcgccactgctctgatgaaactgaaaagtctaggtctcattcacgctgatctcaaaccagagaatatcatgctcgtggatcccgttcgtcaaccgtacagagtgaaggtgatcgatttcggatccgcttcccacgtgtcgaaagctgtctgttctacgtatcttcagtcacgatactacagggcccccgagattatcctaggtttgcctttttgtgaggccatcgatatgtggagtctgggctgtgttattgcagaactttttctgggctggccactctaccctggagcctctgagtacgatcaaattcgatatatttcccaaacgcaggggctacccgccgagtacctactgagcgccggtacaaagacaactcggttttttaacagggaccctaatctcggttaccccctgtggagactgaaaacgccggaagagcatgagctcgagaccggcatcaaaagtaaggaagctaggaaatatatttttaactgtctggatgacatggcccaagtgaatatgagcacagacctggaaggaacagatatgttggccgaaaaggccgaccgtcgggaatacatcgacctgctcaaaaaaatgcttactattgacgccgacaagcgcatcacgcctctgaagactcttaaccatcagttcgtgacaatgacccacctcctggacttcccacatagcaatcatgtcaagtcatgcttccagaacatggagatttgtaaacgacgggttcatatgtatgacaccgtttcacagattaaaagccccttcacaactcacgtggcacctaatacaagtacaaatctcacaatgagctttagcaaccagttgaacaccgtccataatcaggcctccgtgctcgcctcgtcctcaacggccgcggctgctacactgtccctcgcaaactccgatgtatctctgctgaattatcagtcagcactataccccagtagtgcagcacccgttccaggcgtcgcacagcagggcgtgtcactgcaaccggggactacgcagatttgtacccagacagaccccttccagcagacatttatcgtctgcccaccggcatttcagactggattgcaggccactaccaagcatagtggtttcccagtccgaatggacaatgccgtgcccatagtcccccaggcccctgccgcacagcccctccagatacagagcggtgttcttacgcaagggtcctgcaccccacttatggtcgccacccttcatccgcaagtcgccacaatcacaccacagtacgctgtcccatttacattaagttgtgctgctggacgacctgcattggtcgaacagacggcggctgtgttgcaagcctggcccggcggcacgcagcaaattttactaccatctacatggcaacagctgcccggcgtggccttacacaactccgtgcagcccaccgccatgatcccagaggcaatgggcagtggacagcagctggcagactggcgaaacgctcattcccacggaaatcagtattcaactattatgcagcaaccctctctcttgactaatcatgtgaccttggccacagcgcagccgcttaacgtgggggtcgctcatgtggtgagacagcagcagtcatcctctttgccgtctaagaaaaataagcaatccgcccccgtgtcctctaagagtagcctcgatgtcctgccttcgcaggtttacagcctcgtgggatcctcacctctaagaaccaccagttcttataactccctggtccctgttcaggaccagcaccagcctatcatcattcccgacacacctagtcctccagtgtccgtgatcactatacgctccgatactgatgaggaggaggacaacaaatacaagccaagcagtagcggcctgaagccacgatcgaacgtgatttcatatgtgaccgtcaacgactcacctgatagcgactctagtctcagctctccttactctacagacactctgtccgctttgaggggtaactctggaagcgttctcgagggacctggtcgcgtggtggcggacggtacgggtactcggactatcatcgtacccccacttaagactcaactgggggattgcaccgttgcgacccaagcaagcggtctgttatcgaacaaaaccaaacccgtcgcctcagtgagcggtcagtcctcaggatgttgtataacaccaactgggtaccgcgcacaaaggggaggtacgagcgctgcccagcctttaaacctctctcaggtatctgcgatgggctactgtctactgttcggcccgtgtacggtcgtgactttctggcgtacactcctcctcgccggttgttag

SEQ ID NO: 24289 - DNA, 543 bp, synthetic construct
  source 1..543: mol_type = other DNA; note = Synthetic coding sequence
atgcaggccgagggccagggcaccggcggcagcaccggcgacgccgatggcccgggcggtcccggaatccctgacgggcctggcggcaatgcaggcggtcctggtgaggccggcgcgaccggcgggcgggggccgcggggcgctggagccgctcgcgcctccggaccgaggggtggcgccccgcgcggccctcatgggggggccgcctccgcccaggacggacggtgcccctgcggcgcaagaaggccggattcacgcctactacagttacatattactatgccgtttagtagcccgatggaggccgaactggtgcgtcgtattcttagccgcgatgcggcacccctcccgaggccgggcgctgtgctgaaagattttactgtgtcaggtaacctgctgttcattaggctgacggccgccgaccacagacagctgcaactcagtattagcagctgtttgcaacagctgtcactgcttatgtggataacacagtgttttctgcctgtgtttctggcacaggctccctccggacaaaggcggtag

SEQ ID NO: 24290 - DNA, 717 bp, synthetic construct
  source 1..717: mol_type = other DNA; note = Synthetic coding sequence
atgagcgaggacctggccaagcagctggccagctacaaggcccagctgcagcaagtggaggcagccttgtccggtaatggcgaaaatgaagatctcctcaagctgaagaaggacctgcaggaagtgattgagttgaccaaagacctattgtccacacaaccctctgagaccttagcctcctctgacagcttcgcctctactcagcctacccattcctggaaggtgggagacaagtgcatggcagtctggagtgaagatgggcagtgttacgaggcagaaatcgaggagatcgacgaggaaaacggcacagctgctattacgtttgcggggtacgggaacgcagaagtgaccccactgctgaatctgaagcctgtggaggaaggacgaaaggcgaaagaagactccgggaataaaccaatgtctaaaaaggaaatgatcgctcaacaacgtgagtacaaaaaaaagaaggccctgaagaaagctcagaggattaaggagctggagcaggaacgcgaggaccagaaggtcaaatggcagcaattcaacaaccgagcttactcgaaaaataagaaagggcaggtaaaacgctctatttttgcctctccagaatccgtaaccggaaaggtgggggtggggacttgcggcattgcagacaaacccatgactcagtatcaggatacgtccaagtacaacgtgcggcacctgatgcctcagtag

SEQ ID NO: 24291 - DNA, 717 bp, synthetic construct
  source 1..717: mol_type = other DNA; note = Synthetic coding sequence
atgagcgaggacctggccaagcagctggccagctacaaggcccagttgcaacaggtggaagccgccctctccggaaacggggaaaatgaagatctgcttaagctaaagaaggatctccaggaagtgatcgagttaacaaaggacctgctgtccacccagccctccgaaacactcgctagttccgatagttttgcatcaacacagcctactcacagctggaaggtcggggataagtgtatggccgtgtggagcgaagacggccagtgttatgaagcagaaatagaggagatcgatgaggagaacggtacagccgctatcacgtttgcggggtatggtaatgccgaggtaactccccttcttaatttaaaacctgtggaagagggacgcaaagcgaaggaagattcaggcaataagcccatgtcaaagaaagaaatgatcgcacagcagagggaatacaaaaagaagaaggctctgaagaaggcccagcgcatcaaggaactagagcaggaacgggaagaccagaaagtgaagtggcagcagttcaataaccgggcatattcgaagaataagaaggggcaggtcaagcggtctatcttcgcatcccccgagagtgtgaccgggaaggtaggtgtcgggacatgtggcattgctgataagcccatgacccagtatcaggacacctcaaagtacaacgttagacacttaatgccacagtag

SEQ ID NO: 24292 - DNA, 2229 bp, synthetic construct
  source 1..2229: mol_type = other DNA; note = Synthetic coding sequence
gacctgagcagcggcggcggcatcgagccccagtgcagcagcgaggtctacttccgggctcgggaaagggggtgtgagaacgttgcatggagtctgggcttacgctcacactgctttctcgaggccgaacttcatcccctcccctggttcctcccaactaatgtttgctctccactgcctggcgccgcacataaactagtttgttattttacgaactgggcacactctcgccccgggcctgcatcaatcttaccgcacgacctcgatcctttcctttgtacccatctgatctttgcttttgctagcatgaataataaccagatagtggcaaaagacctgcaggacgagaaaatcctttatccggagtttaacaagttgaaagagaggatgtggcagcagctccccactggcgttaaaaatccagcgcatcagccctctttgtcacaccacagaaaccgggaactgaagacgctgctcagcatcggtggttggaactttggcacgtccaggtttaccaccatgctgagcacgttcgcaaaccgcgagaagtttatcgcctccgtcataagtctgctacggacacatgactttgacggcttagatctcttcttcctctaccccggactccgtgggagccccatgcacgatcggtggaccttccttttcctcatagaggagctgctgtttgctttcaggaaagaggctctgctgactatgcgccctaggttacttttgtctgccgccgtgtctggcgtgccacacatcgtccagacttcctatgacgtgcggtttctggggaggctccttgactttataaacgtgctgtcctatgatctgcacggctcatgggaacgattcaccggacataactctccacttttctccctccctgaggaccctaagagttctgcttatgcaatgaactactggaggaagctgggggcaccctcggagaaactcattatggggatacccacgtatggtcggacattccgcttactgaaggcatcaaaaaacggactgcaggctagggccatcggtcctgctagcccaggaaaatataccaaacaagagggcttcttggcctacttcgaaatctgcagctttgtctggggtgcaaagaagcattggatagactaccagtatgtaccttatgcaaacaaaggaaaggaatgggttggttacgataacgccattagctttagctataaagcatggtttattcgacgggaacactttgggggagccatggtttggacactcgacatggatgatgtgcggggcaccttctgtggcaccggccctttcccactagtctatgtcctgaatgatattctggttagagccgagttctcctccacctccctgccccagttctggctctcttctgcagtgaattccagctcaaccgaccctgagcggttggccgtaactaccgcatggaccactgattccaagattctgccgcccggtggggaagccggcgttacagagatccatgggaaatgcgaaaacatgaccatcacgccacgtggcacaaccgtcacgcctacgaaggaaaccgtgtctcttggcaaacatactgtcgcccttggggaaaagacagaaataactggggccatgacaatgactagtgtcggccaccaaagcatgacccctggtgagaaagccttaacaccggtgggtcaccagtccgtgaccactggacagaaaaccctgaccagcgtgggctaccagtccgtgactccaggggagaagacccttacgccagtgggccaccagtctgttacccccgtctcgcaccaaagtgtcagccctggggggaccacaatgacccctgtgcattttcagacagaaaccctccggcagaacacagtagccccacgacgcaaggccgtggcaagggagaaagttaccgtcccttctagaaacatttccgtcacgcctgaaggacagacaatgccacttcggggtgagaacctgaccagtgaggtgggcacacacccacggatggggaacctgggacttcagatggaggcggagaatcgtatgatgctcagcagcagcccagtgatccaactgccagagcagacccctcttgcctttgataaccggtttgtcccaatttacgggaaccatagtagcgtgaacagtgtcacaccccagacgagtcccttgagcctcaaaaaagaaatacctgagaatagcgcggtggacgaggaagcttag

SEQ ID NO: 24293 - DNA, 2037 bp, synthetic construct
  source 1..2037: mol_type = other DNA; note = Synthetic coding sequence
atgtggaagctgctgctgtgggtgggcctggtgctggtgctgaagcaccatgacggcgcagcacataagctggtctgctatttcactaattgggcacactctcgcccgggacccgccagtattctgcctcatgatctcgatccattcctgtgcacgcacctgatctttgccttcgcatctatgaataacaatcagatcgtcgctaaggacctgcaggacgagaagatactgtatcccgagtttaataagctgaaggaacgaaatcgcgaactgaagactctactgtcaatcggaggatggaatttcggtacttctagatttacaaccatgttaagcacctttgccaatcgggaaaagttcattgcatccgtgataagcctcctcaggactcacgactttgacggacttgatcttttcttcctgtatcctggcctcagggggtcccccatgcacgaccgctggacatttcttttcctcatcgaggagctgcttttcgccttcagaaaggaggcgctactcaccatgcgccctcggcttctgctctctgcggcggtcagtggagtgccgcatatcgtgcaaacatcatacgacgtgaggttccttggacggctattggatttcatcaatgtactgtcctatgatttgcatgggagttgggagcggtttactggccacaatagccctttattcagcctgccagaggaccctaaatcatccgcatacgccatgaactactggcgcaaactgggcgccccctctgagaaactgatcatgggaatccctacatatgggcgcacgttcaggctcctgaaggcaagcaagaatggcctgcaggcacgcgcaatcggaccagcctcgcccggcaagtatacaaaacaggagggttttttagcatattttgagatctgcagcttcgtgtggggtgcgaaaaagcactggatcgactatcagtacgttccatatgcgaacaaggggaaagaatgggtcggatatgacaatgccatttctttttcgtacaaagcttggtttatccggagagaacacttcggcggagctatggtctggacactcgacatggacgatgtgagagggacattttgcgggactggcccttttcctctagtgtacgtgctcaacgatatcctcgttagggccgaattctcttccaccagtctccctcagttctggcttagctcagccgtgaatagcagcagcaccgacccagaaaggttggcagtgactaccgcttggactacagactcaaagatattgcctcccggaggagaagccggggttaccgagattcatggtaagtgtgaaaacatgacaatcacccctagagggactactgtgaccccaaccaaggaaaccgtttcactgggaaaacacacagttgctctcggagaaaaaacagaaatcactggggcaatgactatgactagcgtgggacaccagtccatgacgccaggtgagaaagcgctcactcccgtcggtcaccaaagcgtcaccacaggccagaaaactttaaccagtgtaggataccagagcgtaaccccaggggaaaagacactcactccagttggacatcagtctgtgacacccgtatcccaccagtctgtcagcccaggaggtacaaccatgacccctgtccactttcaaaccgagaccttaaggcagaacaccgtggcccctcgaaggaaggccgtggcgcgcgaaaaggtgaccgtaccctcacgtaacatttcagtgacacccgaaggccagacaatgcccctgcggggtgagaatctcacgagcgaagtggggacacaccctagaatgggaaaccttggcttgcagatggaggccgagaatagaatgatgttgtcatcctctccggtaatacaattgcctgagcaaacgcctctggcctttgataacagatttgtgcccatttatggcaatcatagttcggtgaattccgtgactccccaaacctctcccctgtctctgaagaaggagataccagagaattccgcagttgacgaggaagcatag

SEQ ID NO: 24294 - DNA, 1005 bp, synthetic construct
  source 1..1005: mol_type = other DNA; note = Synthetic coding sequence
atgggcggcgccgtgagcgccggcgaggacaacgacgagctgatcgacaatttaaaggaagcccagtacatacgcaccgaattagtggagcaggcattccgggccattgaccgtgcagactactacctcgaggagtttaaagagaatgcttataaggatttggcgtggaagcacggcaacatacatcttagcgccccctgcatctactccgaagttatggaggcactggatttgcaacctggtttgagctttctgaatttggggtccggaactggctacctgtcaagcatggtcggcctgattttgggaccctttggggtaaaccacggagttgaattgcatagcgacgtgatcgagtatgctaagcagaaattagactttttcatacgcacgtccgattccttcgacaagtttgatttctgcgagccatccttcgtgacaggtaactgcctcgagatcagcccggattgtagtcagtatgatcgggtgtactgcggcgccggtgtccagaaggagcatgaggagtacatgaagaatcttctgaaagtaggggggattctcgtcatgcccctggaagagaaaccttgccatagcgagagcggcaagagtagactggtccagcttccacccgtagcggtccgaagcctccaggaccttgctagaatcgctatccgcggaaccatcaaaaagattatacatcaagaaactgtgtctaagaatggtaacggtttaaaaaatactccgcggtttaagcgccgccgcgtacgacgtcgccgaatggaaacaatagtgttcctggataaagaggtattcgcctcccgcatttctaacccctctgatgataattcatgtgaggatctagaggaggagcgacgcgaggaggaagaaaagacccctcctgaaaccaagcccgaccctccagttaactttctcaggcagaaggttttgtcactgcctttgcccgaccccttgaagtactacctgctgtactatcgggaaaaatag

SEQ ID NO: 24295 - DNA, 1785 bp, synthetic construct
  source 1..1785: mol_type = other DNA; note = Synthetic coding sequence
atgagccggcccagcagccgggccatctacctgcaccggaaggagtactcccagaacttgacgagcgagcccacactgcttcagcaccgcgtcgaacatctaatgacctgtaagcagggctctcaacgggtgcagggtcctgaagacgcactgcagaagctgttcgaaatggacgcccagggccgggtttggtctcaggatctgattcttcaagtaagggacgggtggcttcagttacttgacattgaaacgaaggaagagctcgactcttaccgactggattccatccaagccatgaatgtcgcgctaaatacttgctcttacaatagcattctgtcaattactgtccaggaaccaggtcttcccggcacatcaaccctcttgtttcagtgccaggaagtgggagcagagagactgaaaacctcactgcagaaggctctcgaggaggaactggagcaaagccgtccccggctgggcgggcttcagccaggccaggataggtggaggggacctgctatggaaagaccactcccaatggagcaggcgcgctatctagaacccggaatcccacctgaacagccacatcagcgaaccctcgaacacagcctccctccctctccccggccgcttcctcgtcacacgagtgcgcgagagccatcagcgttcaccctacctcccccccgcagatcctccagcccggaggaccctgaaagggacgaagaggtcctgaaccacgttcttcgggacattgagctgttcatgggcaaacttgaaaaagcccaagctaagacatcacgcaagaagaagttcggcaaaaaaaataaagatcagggtggtctcactcaagctcagtatatcgattgtttccagaaaataaaacactcatttaatcttcttggacgacttgccacgtggctgaaagagaccagcgctcctgagctggtgcacattttgttcaaatcgcttaacttcatcctagccagatgtccagaggcagggctcgctgcccaggtgatcagtccgctgttaacaccaaaggccattaatttgctacagtcatgcctctccccacctgaatctaacttgtggatgggactgggccctgcttggactacctcacgagccgattggactggggatgaaccactaccataccagccaactttctccgacgattggcagctgcctgagccgagcagccaggctccactgggataccaagatccggtttctctgagaagagggtcacacaggctggggagcacatcacattttcctcaggagaagacacataaccacgaccctcagcctggtgaccctaatagccggccatcttcgcctaaacccgcccagccagctctaaaaatgcaggtgttatacgagtttgaagcccgaaaccctcgggaacttacagtcgttcaaggtgagaaactcgaggtgctggaccattctaagcgctggtggttggtcaagaacgaggctggccgcagcggctatatcccatccaacatccttgaaccactgcagcccggcactccggggacacaaggccaatctccatcacgcgtgcctatgcttcggttgtcttcacgaccagaagaggtgactgactggctgcaagctgaaaacttcagtacagcgactgttcgtaccttagggagcctgactggtagccagttactgagaattcgacccggagaactccagatgttatgtcctcaggaggcacctcggattctgtccagacttgaagccgtgcgccgtatgctcggaatttctccatag

SEQ ID NO: 24296 - DNA, 1500 bp, synthetic construct
  source 1..1500: mol_type = other DNA; note = Synthetic coding sequence
atgagcttcggcagcgagcactacctgtgcagcagcagcagctaccgtaaggtgtttggagatggctcgcgcctgagcgctaggctaagcggagccggcggcgccggcgggtttcggtcgcaatcgttatccaggagcaacgtggcttcttccgccgcctgtagctcagcctcttctctgggattggggcttgcgtatcgtcgtcctcctgccagtgacggtctggatctttctcaggctgcggcccgcaccaacgagtacaaaatcattcgaactaatgagaaggagcagctccagggacttaacgacagatttgcggtatttatcgagaaagtccaccagctggagacccagaatagagccctggaggccgagctagccgctctgcgacagcgacatgctgagccttcacgggttggggagcttttccagagggagctgagagacttacgggcgcagcttgaagaagcatcttcggcccggagtcaagcattgctggaacgagacgggctggcggaagaggtccagcgcctgcgtgccagatgtgaagaagaaagtcgcgggcgggaaggtgcggagcgggccttgaaggcccagcagcgcgacgttgatggcgcaaccttggctcgattggacctcgagaagaaagtggaatccctgttggacgagctcgcttttgttagacaggttcatgatgaagaagtggcggagctcctggccacactgcaagcgtcctcccaggctgctgccgaggtggatgttaccgtggcaaaacctgacttgaccagtgctctgagggagatccgagctcaatacgaatctctcgccgcgaagaacctccagagcgctgaggagtggtacaaatcaaaatttgctaatctaaatgaacaggccgccagatccaccgaagctatccgggcttccagggaggagatccacgaatatcgaagacaactgcaggcccggacaatcgagatagagggccttcggggggccaatgaaagcctcgagcgtcagattctggagctggaggagcgccattctgccgaagttgccggatatcaggattctattggacagttggaaaacgacctccggaatacaaaaagcgaaatggcccgacatctccgcgaataccaagacctgctcaacgtgaaaatggcactggacatcgagattgctgcttacagaaaactcttggaaggcgaagagactaggttctctacaagcgggctgagcattagcggactcaaccccctgcccaatcctagctatctgctgcccccgcggatcctgagtgcaaccacatcgaaagtcagctcaacaggactgtcgctgaaaaaagaagaagaagaggaagaggccagcaaggtggcttctaaaaaaacttctcagatcggggagtcttttgaagagatcctggaagaaaccgtaattagcaccaagaagactgagaagtcaaatattgaagagacaaccatctcctcccagaagatatag

SEQ ID NO: 24297 - DNA, 1131 bp, synthetic construct
  source 1..1131: mol_type = other DNA; note = Synthetic coding sequence
atggagagctacgacgtgatcgccaaccagcccgtggtgatcgacaatggcagcggagttattaaagccggatttgccggagaccagatcccaaagtactgctttcctaattatgtgggtaggccaaaacacgtgagggttatggctggggcattagaaggcgacatctttattggcccaaaggccgaagagcaccgtggcttgttgtcgatccggtatcctatggaacacggtatcgttaaagactggaacgacatggagcgtatatggcaatatgtgtattctaaggatcagctgcagacattctccgaggaacatccagtccttttgacagaggccccacttaatcctaggaaaaatcgggagagggctgccgaagtttttttcgagaccttcaacgttcctgctttgtttataagcatgcaggcagttttatctctctacgctaccggcaggactaccggtgtagttctggacagcggcgacggagtgactcatgccgttcctatctatgagggctttgccatgccccatagcatcatgcggattgacatagccgggcgggacgtgtcgcgtttcctgagactctatttacgtaaagaagggtatgactttcactctagctccgagtttgagattgtgaaggctattaaggagagggcttgctacctgagcatcaatccacagaaagacgaaacccttgagacagagaaagcccagtattacctgccggacgggagcacaattgaaattggcccctcccgatttcgggcacctgagctgctcttccgcccggatcttatcggcgaggagtctgagggaatacacgaggtcctggtattcgctatacaaaagagcgatatggacctccgcaggacacttttttcaaatatcgtccttagcggcgggtcaaccctgtttaagggcttcggcgatcgccttctgagcgaggtgaagaagctggcccctaaggatgttaagatcagaatctccgcccctcaggagcgcctgtacagcacttggataggcggaagcattcttgcgtccctggataccttcaagaagatgtgggtatccaaaaaagagtatgaggaagatggagcgcggagcatacatcgcaagaccttttag

SEQ ID NO: 24298 - DNA, 783 bp, synthetic construct
  source 1..783: mol_type = other DNA; note = Synthetic coding sequence
atgagcctgcagaagaccccccccacccgggtgttcgtggagctggtgccgtgggccgaccgtagccgcgagaataacctagcctccgggagggagactttgcctggcctgcgacaccctttgagctcaacacaggcccaaacagctacacgtgaagtgcaagtctctggcaccagtgaggtcagtgcagggccagaccgcgcccaggttgttgtacgagtctcctcaactaaagaagcagccgcagaggctaagaagtcggtgtgtcgccgcctcgactacatcacacagtccttgcagcagcagggcgtgcaggccgaaaatataaccgtgactaaagacttccggcgcgtggagaatgcctaccacatggaagccgaagtctgtatcacctttacggaattcggcaaaatgcagaatatctgcaattttctggtcgagaagctcgattcgtcagtcgtgatcagtcctccccagttctatcacactcccggctcagtggaaaatttgcggcgacaggcctgtctggtggccgtggaaaacgcctggagaaaagcacaggaagtctgcaatctggtcggtcagaccctgggaaaaccacttctgattaaagaggaagagaccaaggagtgggaggggcaaatcgatgatcaccaatcaagtcgtctctccagcagccttacagtgcaacagaaaattaagagcgctacaattcatgcagcttccaaagtcttcatcacattcgaggtgaagggcaaagaaaaaaggaaaaaacatctgtag

SEQ ID NO: 24299 - DNA, 891 bp, synthetic construct
  source 1..891: mol_type = other DNA; note = Synthetic coding sequence
atggagcccagcggcggcgagcaggagcccggcgccgtgcggttccttgacctgccctgggaggacgtgttgctgccccacgttcttaacagggttcctctgcgccagttactcagactgcaaagggtatcccgggcctttcgcagcctggtacagctccacttggctggccttaggagattcgacgccgcccaggtggggccccagattcctcgcgccgccctggccagactgctgcgcgatgccgaagggctgcaagaactggccttggccccatgtcacgagtggctgtccgatgaggatctagtgccggtactggcccggaaccctcagctcaggtctgtggccctaggcggttgtgggcaactttctagacgggccttaggagccttggcagaagggtgcccacgcctccagcgcctgtccctagcacattgtgattgggtggacgggcttgcactgagaggcctagctgataggtgccccgccctggaggaattggatctgacagcttgccggcaacttaaggacgaggctattgtctacctggcccagcgtcgtggcgccggtctacgcagcttgagtctggcggtgaacgccaatgttggagacgcggccgtacaggagctggctaggaattgcccagagctccaccacctggatctaacaggatgcctgcgcgtaggaagcgacggagtgcgaaccctggccgaatactgcccagtccttcggagtttgcgagtcagacactgccatcatgtcgcagagagttctctatcccgtttgcgaaagcgaggtgtggacatcgacgtggaaccaccgctccatcaggctttggtcctgctgcaagacatggcaggtttcgccccgttcgtcaatctccaggtctag

SEQ ID NO: 24300 - DNA, 2100 bp, synthetic construct
  source 1..2100: mol_type = other DNA; note = Synthetic coding sequence
atggccgacgccggcatccggcgggtggtgcccagcgacctgtacccactcgtcctcggcttccttcgcgacaaccagctaagtgaggtcgcaaacaagtttgctaaagctaccggagcgacccaacaggatgctaatgcatcctctttactagatatctacagcttttggctgaagagcgccaaggtccctgaaagaaaactacaggccaacggccctgtcgccaagaaagccaaaaaaaaggcaagcagttccgactcagaggacagttctgaagaggaagaggaagtgcaggggccgccggcaaaaaaggccgcagtgccggcaaaaagggttggactgccgcctggcaaggctgcggcgaaggccagtgagtcatccagctcagaggaatcttctgacgacgacgatgaggaggaccaaaagaagcagcccgtgcagaaaggcgtcaaacctcaggctaaggctgcaaaggcccctccgaagaaggccaaatcgagcgactccgactctgatagctctagcgaggatgaaccgcctaaaaatcagaaacctaagatcacacccgttactgtgaaagcccagactaaggcccctcctaagccagcacgtgccgcgcctaagatagccaatggcaaggccgcttcctcaagctcctcaagcagttcatcgtcatcaagcgatgactctgaggaggagaaggccgcggctaccccaaaaaaaaccgtaccaaagaaacaggtggtagcaaaggccccggtgaaagcagcaacgacacccactaggaaatcatcctcctctgaagactctagcagcgatgaagaggaggaacaaaagaagccaatgaaaaacaaacccggtccttacagttcggtgcccccaccgtcagcaccaccaccaaaaaaaagcttagggactcagcccccaaaaaaggctgtcgagaaacagcagccagtggaaagcagtgaagattcctcagacgaatctgacagttccagtgaggaagagaaaaaaccacctacaaaggccgtcgtgtctaaggccacaactaagcctccccccgcaaaaaaggccgcggagagtagttctgacagctcggattccgactcaagcgaagatgacgaggcgccctctaagcctgccggcacgacaaagaatagcagcaataaacccgctgttaccaccaaaagccctgcggttaaacccgcagccgcccccaagcagccagttgggggggggcagaaattgcttacacgtaaagccgatagttctagcagcgaggaagaatcctcatccagcgaggaggaaaaaaccaaaaagatggtcgctaccaccaagccaaaggctaccgctaaggccgccctgagtctgcctgctaagcaggcaccccagggatctcgcgattcaagtagcgacagtgatagctcctcttccgaggaggaagaagaaaagacctcaaagagcgctgtaaagaaaaagccccaaaaggtcgcaggcggagcagccccctcaaagcctgcatccgccaagaaggggaaggccgaaagtagcaacagcagtagctccgatgattctagtgaggaggaagaggagaaattgaaggggaaaggctcacctagacctcaggcccctaaggctaacggaacaagtgccctgaccgctcagaatgggaaggctgctaagaattccgaagaggaagaagaggaaaaaaagaaggctgcagtggtcgtcagcaagtccggtagccttaagaagaggaagcagaatgaggccgcaaaggaagccgagaccccccaggccaaaaagatcaagttacagacacccaatacctttcccaaacggaagaaaggcgaaaaacgcgcctcaagcccatttaggcgggtgcgagaggaagaaatcgaagttgactctcgggtggccgacaactcctttgacgccaaacgaggcgcagccggtgactggggagaacgagctaatcaggtccttaaatttacaaaaggcaaatctttcaggcatgaaaagacaaagaagaagaggggtagttaccgaggcgggagcatctcggttcaggtcaatagtatcaaattcgacagcgaatag

SEQ ID NO: 24301 - DNA, 1275 bp, synthetic construct
  source 1..1275: mol_type = other DNA; note = Synthetic coding sequence
atggaggagaacaacctgcagtgcagcagcgtggtggacggcaacttcgaggaagtaccgagagagacagctatccagtttaagcctcctttgtatcgacagagataccagttcgtgaaaaacctcgtcgaccaacacgagcctaaaaaagtagcagaccttggctgtggggatacatccctgctccgacttctgaaggtcaatccttgcattgagctgctggtcggagttgacatcaatgaagataaactgcgctggaggggtgactccctggctccctttttgggagacttcctgaagcccagagacttgaacctgacgatcaccctctaccatggatcagtggttgagagagattctcgactacttggtttcgacttaatcacttgtatcgaactgattgagcacctcgatagcggtgatttagcccggtttccagaagtagtgttcggttaccttagtccctctatgatcgtgattagtactcccaactcagaattcaaccccctttttcctagcgtgacactgagggattccgaccataagttcgaatggacgcggatggagttccagacatgggccctgtatgtagccaataggtacgattacagtgtagaattcaccggggtcggcgaaccccctgcaggcgcagagaatgtgggatattgcacacagatcggtatttttagaaaaaatggaggaaaagcgactgagtcttgcctgtccgagcagcatgatcagcacgtgtataaggccaggcaagggctcactatgctccctagacttgtcctgaattttcatcctcaggccatactcctaccccatttgcctaagatgctgcggcttcaggtgttcaccacaagctaccctagtctgcagcaagagaggttttttaagttggtattagtgaatgaggtatcccagcaggtggagagcctgagggtgagccatctcccacgccgcaaggagcaagcaggcgagcggggcgacaagcccaaagacataggtgggagcaaggctcccgtgccttgtttcggaccagtattcacagaggtagaaaaagccaagattgagaattcgcctacgccattctgcgtgggcgacaaatttttcgtgccattgcagaggctcttagcttatcccaagcttaaccggctgtgcgcaaacgaagagatgatgcgatccgtgattgcagacagtatccccttgagttccgatggctctgctgtggtggcagacttgagaaattactttgacgaacaatttgagttctag

SEQ ID NO: 24302 - DNA, 1182 bp, synthetic construct
  source 1..1182: mol_type = other DNA; note = Synthetic coding sequence
atggaggagaacaacctgcagtgcagcagcgtggtggacggcaacttcgaggaagtgcccagagagacagccatacaatttaaaccacccttataccgtcagcgctaccaatttgtgaagaatctggtggatcagcatgaacctaagaaggtggctgatcttggatgtggcgacactagtttactcaggttgctcaaagtcaacccgtgcatcgagctcctcgtcggcgtcgatatcaacgaagataaactccgctggcgaggtgatagcctcgcaccatttctcggcgacttcctgaaaccacgggacctgaacctgactatcaccctgtaccacggatctgtcgtagagagagactcgcggttgttgggctttgatcttatcacatgcattgaactcatagaacatttagatagcggcgacttagctagattcccagaggtggtgtttggttatctgagcccgtctatgattgtgatttctacacccaattcagagttcaaccctctgtttccaagcgtcactttgcgagattccgaccacaaattcgagtggaccaggatggaattccaaacatgggccttgtatgtcgccaatcggtacgactactctgtggaattcaccggcgtgggtgaaccgcccgctggggcggagaacgtgggttattgcacccagatcggtatcttcagaaaaaatggcgggaaagccacagaatcatgcctcagcgagcagcacgaccagcatgtctataaagcagtttttaccacctcttatcctagccttcaacaggaacgctttttcaaattggtcctcgtgaatgaggtgtctcagcaggtggagtccttgagagttagtcacctgccaagacgaaaagagcaggccggcgagaggggtgataagcctaaggacatcggcggcagcaaggccccggtcccctgttttggtcccgtcttcacagaggtggaaaaagccaagatcgagaattcaccaactccattttgtgtcggcgacaagttctttgtgcccctgcagcgtctgttggcttaccctaaacttaataggctatgcgccaatgaggagatgatgcgcagtgtaatcgccgattctatcccactctcctcagacggtagcgcggttgtcgccgacttgaggaactattttgatgaacagttcgagttctag

SEQ ID NO: 24303 - DNA, 1701 bp, synthetic construct
  source 1..1701: mol_type = other DNA; note = Synthetic coding sequence
atgagcgccagcaccggcggcggcggcgacagcggcggcagcggcggttcctcgagctcctcccaggcgtcctgcggaccagagagcagcggctccgagctggctctcgctaccccggtcccacagatgttacaggggctgctcgggagcgatgacgaagaacaggaggaccccaaggattactgtaagggcgggtatcatccagtgaagattggggatgtgttcaatggacggtatcatgtggtgcgcaaactcggttgggggcacttctcaactgtgtggctctgctgggatatacaaaggaaacggtttgtcgccctgaaggttgtgaagagtgctgggcattacaccgagacggctgtcgatgaaatcaagttactgaaatgcgtacgggattccgaccccagcgatccaaagcgggagacaattgtgcagctcattgatgacttcaggatcagtggagttaatggcgtacacgtgtgcatggtgctagaggtgcttggccaccaactgctcaagtggattatcaagagtaactaccaaggcctgcctgttccctgtgtgaagtcgatcgttcgacaggttctccatgggctcgattatttacataccaagtgcaagataattcacacagatattaagcccgagaatatcctgctctgcgtgggcgacgcttacattagacggctggccgctgaagccaccgagtggcaacaggccggggcccctccaccaagccgttcaatcgtttctaccgctccccaagaagtgcttaccggaaaactgtccaaaaataagaggaagaaaatgcggcggaagagaaaacagcagaagcggttgctcgaagagcgcctaagggatttgcaaaggctggaagccatggaggctgccacacaggctgaggacagcggccttaggttggatggtggtagtggttcgacttcttcctcaggttgccacccaggaggagctagagcaggcccgtcgcctgcatcgagtagccctgcccccggaggaggccggtctctgtccgctggctcccaaactagtggcttttcagggagtctgttttcccctgccagttgctctatactttcaggatcttccaatcagcgtgagacaggtggcctgctgtcaccgtctaccccattcggtgctagcaacctcttggttaacccattggagccccagaatgctgacaaaatcaaaattaaaatcgcagacctgggaaatgcctgttgggtgcataagcacttcaccgaagatattcagactagacagtatagggctgtcgaggtgttgatcggtgcggaatacgggccacccgcagacatctggtcaactgcatgcatggctttcgagctcgccactggggactacctgttcgagcctcactctggggaggattactctcgggacgaggaccatattgcgcatattgtggagttactcggtgacatacccccagcatttgcgctgagcgggaggtactccagagaatttttcaaccgacgaggagaactccggcatattcacaatcttaagcattgggggttatatgaggtgctgatggaaaaatatgagtggcctctggaacaagctacgcaatttagcgccttcctcttgcctatgatggaatatatccctgagaaaagggccagcgccgcagactgtttgcagcatccgtggctgaatccttag

SEQ ID NO: 24304 - DNA, 150 bp, synthetic construct
  source 1..150: mol_type = other DNA; note = Synthetic coding sequence
atggccggcccccgggtggaggtggacggcagcatcatggagggcggaggacagatcttacgcgtcagtactgccctctcttgtttacttggcctgcccctcagagttcagaaaattcgagcaggcaggtcaacaccagggcttcgttag

SEQ ID NO: 24305 - DNA, 1101 bp, synthetic construct
  source 1..1101: mol_type = other DNA; note = Synthetic coding sequence
atggccggcccccgggtggaggtggacggcagcatcatggagggcggaggccaaattctgagggtgagtaccgccttatcctgcttattggggctgcccctccgtgtgcagaagatacgggccgggcgaagcacacccgggcttaggccccagcatctgtctggactggagatgatccgcgacttatgcgacggacaactggagggggccgaaatcgggtctaccgagattactttcactccggagaagatcaaggggggcatccacactgcagacaccaaaaccgccggcagcgtttgtctgctgatgcaggtcagcatgccatgcgtgctgtttgctgcttccccttcagaattgcacctaaagggggggacaaacgcggaaatggctccccaaattgattacacagtgatggtcttcaaacccatagtggaaaagttcggtttcatattcaattgtgatattaagacgagaggttactaccccaagggcggcggcgaagtgatcgtgagaatgtcccccgttaagcagcttaaccctatcaatttgacagagagaggatgtgtgacaaaaatctatggccgagcattcgtcgccggtgtgctcccctttaaggtagctaaagatatggctgctgccgcggtgcggtgcattaggaaagagatccgagacctttatgtaaacatacagcctgttcaggagccaaaggaccaggctttcgggaacggaaacgggattatcatcatagcagagacatcaactggttgcctgttcgccggctccagtctcggcaagaggggcgtcaacgctgacaaggtaggcatcgaggctgccgagatgttactcgccaatcttaggcatgggggtaccgtggatgaatacctccaagaccagctcattgtgtttatggccctggccaacggtgtgtcccggattaaaacaggtcccgtcacactccacactcaaactgcgatccattttgccgaacagatagcaaaggcaaagttcatcgtaaagaagagcgaagacgaagaagacgccgcgaaggacacatacatcatagaatgtcagggcatcggcatgactaatcccaacctttag

SEQ ID NO: 24306 - DNA, 1155 bp, synthetic construct
  source 1..1155: mol_type = other DNA; note = Synthetic coding sequence
atggagggcctgggccggagctgcctgtggctgcggcgggagctgtctcctccaaggccccgactgctactgttggattgccggtcgcgagagctctatgagtctgcacgcatcgggggggctctgtccgtggcacttcccgctctattgctccggagacttaggcgtggatcactgtcagtgcgggcattgctgcccggacctcccctccaacctcccccgccagcacccgtgctcctttacgaccaaggaggcggacgcaggcgccgaggtgaggccgaggccgaggccgaggagtgggaagccgaatccgtgcttgggaccctgctgcagaagctgcgggaagaggggtatttagcgtactacctgcagggaggatttagtcggtttcaagctgagtgtccccatctatgtgaaacttcactcgcaggacgtgcggggagttccatggcaccagtgcccgggccggtacctgtagtgggattaggatctctctgcctcggttctgactgctccgacgccgaatctgaagcagatcgggatagtatgtcctgtggccttgacagcgaaggtgcaacccctcctccggttggtcttcgcgccagctttcccgtacaaattcttccaaacctatatctcgggagcgctcgggattctgccaacctcgagagtctggccaaacttggcatacgctatattctgaacgtgacacctaacctgcctaactttttcgagaaaaatggcgacttccactacaaacagatcccaatttctgatcactggagccagaatctcagcaggttctttcccgaagccattgagtttatcgacgaggctttgagccaaaattgtggggtcctagtgcactgtttagccggcgtgagccggagcgtgacagttactgtagcatacctgatgcagaaactgcatttatcgctcaatgatgcatacgatctcgtgaaacgcaaaaagtccaacatctcgccaaacttcaactttatgggacagctgcttgactttgagaggtctctccgcctcgaggagcggcatagccaggaacagggttccgggggccaggcctctgcagcctctaaccctccgtctttctttaccactcctaccagtgatggagcctttgagttggcacccacctag

SEQ ID NO: 24307 - DNA, 804 bp, synthetic construct
  source 1..804: mol_type = other DNA; note = Synthetic coding sequence
atggccgagcccgtgcaggaggagctgagcgtgctggccgccatcttttgtcgccctcacgagtgggaggtgttatcacgatcagagaccgatggaactgtctttcgcattcatacaaaagccgaaggtttcatggacgttgatattcctcttgaacttgtcttccatctgcccgtaaactatccgtcatgcctgcccggcatcagtattaatagtgaacagctcacgcgggcccagtgtgtcactgtgaaagagaatctgctggaacaagctgaaagcttgctgtctgagcctatggtgcacgaactggttttgtggatacagcaaaatctcagacatattctgtcacagcctgagactggctcagggtcagaaaagtgcaccttcagcaccagcacaaccatggatgatggcttgtggatcactctccttcacctggaccacatgagagcgaagacaaaatacgtgaaaattgtggagaaatgggcgtccgatctccggcttactggacgcttgatgttcatgggcaagatcattcttattctcctgcagggcgataggaataatttgaaagagtatttaatcctgcaaaagacatccaaggtggatgtcgacagttcaggcaagaagtgcaaggagaaaatgatatccgtactgttcgagacgaaagtgcagacggagcataaacggttcctagcattcgaggtgaaggagtactcggcgctggacgaactgcagaaagaattcgagaccgccggcttaaagaaactgttctcagaatttgttctggccctcgtgaagtag

SEQ ID NO: 24308 - DNA, 2010 bp, synthetic construct
  source 1..2010: mol_type = other DNA; note = Synthetic coding sequence
atggccatcgtgcagaccctgcccgtgcccctggagcccgcccccgaagccgcaactgcaccacaggctcctgtgatgggaagtgtgagttctctgatctctgggagaccctgtcctggtgggcccgcgccccctagacaccatgggccgcccggtcccacttttttccgacagcaggatggtttgctccgaggagggtatgaagctcaggagcccctgtgtcccgctgtgccaccgcggaaagcagtgcctgtaacttcatttacgtacattaatgaagactttcggaccgagtcacctccaagcccgtcctctgacgtcgaagacgcccgggagcagcgtgcccacaacgcacaccttcgaggccctccacctaagctcataccggtcagcgggaaacttgagaagaatatggaaaagatcctgataagaccgacagcttttaagcccgtgttgcccaagccccgcggcgctccttccctcccatctttcatgggcccacgggccacagggttgtccggctcccagggaagcttgacacagctgttcgggggacctgcttcgtcttcctcgtcttcttctagttcatccgctgctgataagcccctggccttctccggatgggcctccgggtgcccttctggaacgctcagtgacagcggtagaaatagtctgagcagcctgcccacttatagcactggaggagccgagcctactacctcttctccgggcggccacctaccctctcatggatcaggcagaggcgcactgccaggtcccgcgcgaggggtcccaactggcccttcccacagcgacagtgggaggtcatcttccagcaagtctactgggtcgctcggggggagagtagccggcggcttactgggtagcggcacacgggcgtctccggattccagctcttgtggtgagagatcacccccacccccaccgccacccccctcagacgaggcccttctccattgtgtcctggagggcaagctcagggatcgcgaggctgaactgcagcagttgcgagactctctggatgagaacgaggcgaccatgtgccaggcttatgaggagagacagcgccattggcagagggagcgagaggccttgcgcgaggactgtgctgcccaagcccaacgagcccagagggctcagcagctcctgcaactccaagtcttccagctgcagcaggaaaagcgccagctgcaagatgattttgcacagctgttgcaagagagggaacagttagagagacgctgcgccactctcgagagagagcagagggaactaggcccccggcttgaagagaccaaatgggaggtgtgccaaaagtcaggagagatctccctgctcaagcagcagctgaaggagagccaggcggaactagtccagaagggctccgaactcgtagcgctgcgcgtggcgctacgggaggcacgcgctacgctaagagtgtccgaagggagagcccggggccttcaggaggcagcccgggcacgcgaactcgaactggaggcctgttctcaagaactgcagcgccatagacaggaagccgaacagctaagggaaaaggccggacagctggatgccgaggcggctggtttgagagaacctccagttcccccagcaactgcagacccatttctactggcagagagcgatgaagccaaggtgcagcgagctgctgcgggggtggggggatctttacgcgcccaggtggagaggttaagggtcgagttacaacgagagcgcagacggggagaggagcagagggattccttcgaaggagagcgcctggcttggcaggcagaaaaggaacaagtgatccgatatcagaaacagctccagcacaattacatccagatgtaccggcggaatcggcagctggaacaggagcttcagcaattgagcctggaactggaggccagggaactggcagatctgggcctggcggaacaggccccatgcatatgcctggaggaaatcactgccacagagatctag

SEQ ID NO: 24309 - DNA, 2010 bp, synthetic construct
  source 1..2010: mol_type = other DNA; note = Synthetic coding sequence
atggccatcgtgcagaccctgcccgtgcccctggagcccgcccccgaggctgcaacagccccccaagcacccgtgatggggtctgtgtctagtctcatttcaggacgcccatgtcccgggggacctgcaccgccccgccaccacggaccacctggaccaaccttctttcgccagcaagacggcctgttgcgaggcggctatgaggcacaggaaccactctgtccagccgtgccccctcgaaaggctgtgccagtgacatcgttcacctatataaacgaggacttcaggactgagtcacctccgtcaccttctagcgacgttgaagacgctcgcgagcagcgggctcacaatgcacacctccggggtccccccccgaaactcattcccgtttcgggtaagttagaaaaaaacatggagaaaatcctgatccggcctacagcctttaagcctgtgctgcctaagccccgcggcgcaccttctctcccctcatttatgggtcccagggccactgggctctctggctcacagggatcccttactcagctctttggcggccccgcgagcagttcctcttcctcctcctcttcttcagccgctgacaaacctctggccttctccggctgggcctccggctgcccttctggtaccctgagcgattccggtcgcaacagcctgtccagtctgccaacctacagcaccggcggggccgagcccaccacctccagcccgggaggacacttgccatctcatggcagtggcaggggcgctttgcccggaccagccaggggggtgcctaccggtccgtcacattccgattctggccgcagtagttctagcaagtcgacaggctcactgggggggagagtggctggcggattgctgggttctggaactagagcctcacccgacagcagtagctgcggcgaacgcagccccccgcccccccctccaccaccgtccgatgaggccctccttcactgcgtgctcgaggggaagcttcgcgacagagaagctgagctgcagcagcttagggattccttggatgagaatgaagcaaccatgtgccaagcgtacgaagaaagacagaggcactggcagcgggagagagaagcacttagagaagattgcgccgcacaggcgcagcgggctcagcgggctcagcaactgctgcagcttcaagtgtttcagctacaacaggaaaaacggcagctacaggacgacttcgctcagctgctgcaagagcgggagcagctggaacgcaggtgtgctacattggaaagggaacagcgggagcttggtccccggctcgaagaaaccaagtgggaggtgtgccagaagagcggtgaaatatcgctcctaaaacagcagctgaaggaaagtcaagcagaattagtccagaaaggctccgagctggtggcccttcgcgtcgcgctcagagaagcccgggccaccttgcgcgtctctgagggaagggctcgcggcctccaggaagctgcccgcgctcgagaattggagctagaggcatgcagccaggaattgcaaagacatcggcaagaggccgagcagctgagggagaaggccggccagctggacgcggaggcagccggacttcgcgaacctccggtgccacctgctactgccgatcctttcctgctggccgagtcagacgaagccaaggtgcagcgggcggccgccggggtgggcggatctctgcgagcacaggtagagagacttcgggtggaactgcagcgggagcgccgacggggcgaagaacagagagacagctttgagggcgagagattagcatggcaggcagaaaaggagcaggtcattagataccagaagcagcttcagcataattacatacagatgtaccgccgcaaccgccagcttgaacaggagctgcaacagctcagtctcgaactggaggctcgcgagcttgctgatcttggcctcgccgagcaggccccctgcatttgtctggaggaaattactgccaccgaaatttag

SEQ ID NO: 24310 - DNA, 1059 bp, synthetic construct
  source 1..1059: mol_type = other DNA; note = Synthetic coding sequence
atgaagctgaaggagctggagcggcccgccgtgcaggcctggagccctgcctctcagtaccctctgtatctcgcgacggggacatctgcccagcagttagatagtagctttagtacaaatggtacgttggagattttcgaagtcgatttccgcgacccaagtctggatctgaagcacagaggagtgctgtccgccctaagcaggttccacaaactagtgtgggggagttttgggtcggggctcctagagtcatccggggttatcgtgggaggaggcgataatggcatgttgatcctttacaatgtcacacacatcctatcatccggcaaagaacctgtcatagctcaaaaacagaagcataccggcgccgtgagggcactcgaccttaatccattccagggcaatcttctggcctcaggggcaagcgattcagagatatttatttgggacctcaataatttaaatgtccctatgactctgggctcaaagtctcaataccatgaacagcctcccgaagatatcaaggcactttcttggaacagacaggctcagcatattctgagtagcgcacacccttccggtaaggcagtggtttgggatctgcgtaagaatgaacctattatcaaggtgtctgatcactccaatagaatgcactgttccggtctggcatggcatccagatattgccacccagctggtgctctgctctgaggatgaccggttgcccgtgatccagctttgggatctgcggttcgcatcctcccctctgaaagtgctggagtcccattcacgggggatcctttcagtgtcctggagccaggccgacgcggagttgctgttgacctccgccaaagattcccagatattgtgcaggaatctgggaagcagcgaagtggtgtacaagttgccaactcagagcagctggtgctttgacgtgcaatggtgccccagggacccctccgtgttcagtgctgcctcatttaacggttggatcagtttgtactctgtgatggggcgcagttgggaggtccagcacatgcgccaggcagacaaggtgtag

SEQ ID NO: 24311 - DNA, 3540 bp, synthetic construct
  source 1..3540: mol_type = other DNA; note = Synthetic coding sequence
atgaagctgaaggagctggagcggcccgccgtgcaggcctggagcccagcgagtcagtatcccttgtatcttgccacaggcacctctgcccagcaactggattccagtttttccactaatgggaccctggagattttcgaggtcgattttcgagatcctagtctggacctcaagcatcgtggggttctttccgctttatcacgctttcacaaactggtttggggatctttcgggtctgggctgctcgaatccagcggagtgatcgttgggggaggcgataacgggatgctgatattgtacaatgtgacacacatcctgtctagtgggaaggaaccagttatagctcagaagcaaaagcatactggggccgtccgtgcattagatctcaatccattccaggggaatcttctcgcctctggtgcgtctgatagcgaaatctttatatgggatctcaataacttaaacgtgcctatgaccctgggatctaaaagccaacagccaccagaagatattaaggccctatcttggaaccgccaggcacaacatattcttagctccgctcaccccagtggtaaggctgtggtctgggatctcaggaagaacgagccaattattaaagtttccgaccattctaatcgtatgcactgttcaggactggcttggcatcccgatattgccacacaacttgtgctgtgctccgaagatgaccgccttcctgttatacagctgtgggatctgaggttcgccagcagtcccctaaaagtgctcgagtcacactcaagagggatactgagcgtctcttggtcccaggccgatgccgaactcctccttactagcgccaaggactcacagatcctctgtcgtaacctcgggagtagcgaggtggtttataagttgcccacccagtcctcttggtgttttgacgtgcagtggtgtccgcgcgacccatctgtgttcagcgccgcctcgttcaacggctggatcagcctgtacagcgtgatgggccgatcatgggaagtgcagcatatgcgacaggccgataagatttcaagcagctttagcaagggacagcctctgcctccgttacaagttccagagcaagtcgcccaagcccctctcataccacctctgaagaaacctccaaaatggatcagaagaccaaccggcgtttcattcgcttttgggggcaagctggttaccttcggccttcctagcactcctgcacacttggtgcctcagccgtgcccccgtctcgtattcatttcccaggtgacgacagagtctgagttccttatgcgctccgccgaattgcaagaagcccttggctcggggaacctgctgaactactgtcaaaacaaatcccaacaggctctactccagagtgagaagatgttatggcagtttctgaaggtcactctcgaacaggattctcgaatgaagtttctgaaactcctaggctactctaaggacgagttgcagaagaaagtggcgacctggttaaagagcgatgtgggtctgggggaatccccacaacctaagggaaacgacctgaacagcgaccgacagcaagccttttgcagtcaagcttctaagcacacaacaaaggaagcttctgcatcctccgctttctttgatgagctggtccctcagaatatgaccccttgggaaattcccatcacgaaagacatagacggcctgctgagccaggcactgcttctaggcgaattgggccccgcagtggaactctgcctcaaggaagaacgattcgctgatgccattatccttgcccaggcaggtggtaccgacttgctgaaacagacccaggaaagatatcttgccaaaaaaaagacaaaaatcagctcattactggcatgcgtggtccagaagaactggaaggacgtcgtctgtacctgttcactgaaaaattggcgcgaggcattggccttattgcttacctacagtggtacagaaaaatttccagaactgtgtgacatgcttggtactcgtatggagcaagagggatcacgggctttaacttctgaagcacggttgtgctacgtttgttcaggcagcgtggagcggttggtggagtgttgggcaaaatgtcatcaggcactgagtccaatggccttgcaggacctgatggaaaaagtgatggtgctgaacagatcccttgaacagttgcggggaccacacggagtatcccctggtcccgccacaacatatagagtgacacagtatgccaatctgcttgcagcacaaggttcgctggctaccgccatgtcctttcttccaagggactgtgcacagccaccggtgcagcagctgagggataggttattccatgctcagggctccgcagtattgggccagcaatctcccccctttccttttcctcgcattgtcgtgggtgctacgctccacagcaaagagaccagctcctaccgactgggcagccagccatcccaccaggttccaaccccttctccccgccccagggtgtttacaccacagagttctcccgctatgccgctggccccttcccatccctctccatatcagggccctcggacgcaaaacatttctgattacagagctccaggcccccaggccattcaaccattgccattgtcacctggtgtgcgacccgcgagtagtcaacctcaactgctgggcggacagcgagtccaagtacccaacccagtgggcttccctggcacatggcctctgcccggttctccgttgccaatggcttgcccggggattatgcggccgggctcaacatccttacccgaaactcctaggctgtttcctctgctgcccctccggccactcggacctggacgcatggtttcccatacccccgcgcctccggcgtccttcccggtaccgtaccttcctggagacccaggggctccatgcagtagcgtactgccaacaactggaattctcacacctcacccagggccgcaggattcatggaaagaggcccctgccccacggggcaacctccagcggaacaagctccctgagacatttatgccaccagctcccataacagccccagtcatgtccctgacacccgagctgcaaggaatcttacctagccaaccacccgtcagttccgtctcccatgcgccacccggggtacccggagaactctctctccagctgcagcatttgccccctgaaaagatggaacggaaagaattaccccctgagcaccagtcactcaagtcatctttcgaagcactcttgcagaggtgtagcttatccgcaactgacttaaagacaaagaggaaacttgaggaggctgctcagcgcctggaatacctgtatgaaaagttgtgtgagggtacactttcaccgcatgtcgtggccggactgcacgaggtcgcccgctgtgtggatgcaggatccttcgaacaggggcttgcggtccacgcccaggttgcaggctgcagctcatttagcgaagtgagctctttcatgcccatacttaaagcagtgcttatcatcgcgcacaagttactcgtctag

SEQ ID NO: 24312 - DNA, 1635 bp, synthetic construct
  source 1..1635: mol_type = other DNA; note = Synthetic coding sequence
atggacgacaagggcgaccccagcaacgaggaggcccccaaggccatcaagccaaccagcaaagaattcaggaagacttgggggttccgccggacaacaatcgccaaaagggaaggtgctggggacgccgaagccgaccctctcgaaccccctcccccacagcagcagcttgggctgagcctccggaggagtggacggcagccgaagagaaccgagcgggttgagcaattcctgactattgcacggagaagagggagacggtcgatgcccgtcagcctcgaagattcgggtgaacccacaagttgcccagctacggacgctgaaaccgcttcagagggaagtgtcgagagcgcgtctgagacgaggtcaggaccacagtccgcatcaacggccgtcaaggaacgacctgcctcttctgagaaggtcaagggtggcgatgatcacgacgatacgtccgattctgactctgacggccttaccctcaaggagcttcagaacaggctcagaagaaagcgtgagcaggagcccaccgaacgacccctgaaagggatccagagccgtctgaggaagaagagacgagaagaagggcctgctgagaccgtcgggtcggaagcctccgataccgtggagggtgtcctgcctagtaagcaagagcctgaaaacgatcagggcgttgtgtcccaagcaggtaaagacgaccgggaatccaaactcgaggggaaggcggcacaggatatcaaggatgaggaaccaggggatttaggccgccccaaaccagaatgtgaggggtacgacccgaacgccctctactgtatctgtcggcagccgcacaacaacagatttatgatctgctgcgatcggtgtgaggagtggtttcacggtgattgcgtcggaataagcgaagctaggggcaggctgctggaacggaacggagaggactacatttgcccaaactgcacaattctgcaagtccaagacgaaacacacagcgaaaccgcagatcaacaagaagctaagtggaggcctggcgatgctgatgggacagactgtacgtcaattggtacaattgaacagaaaagctccgaggaccagggtattaagggcagaatcgaaaaggcagccaatcctagcggcaagaagaagctgaaaattttccagcccgttattgaggcccccggcgcctcgaaatgtattggcccaggatgttgccatgtcgcccagccagactcagtgtactgctccaatgattgtatcctgaagcacgctgccgccacaatgaaatttctttcctcaggaaaggaacagaaaccaaagcccaaagagaaaatgaaaatgaaaccagaaaaaccaagcctgcctaaatgcggcgctcaggctggcatcaagatttcttcggtgcataagcgacctgcccccgagaaaaaagagacaaccgtcaagaaggccgtggtggttccggcaaggtcagaggccctggggaaggaggccgcatgcgaatctagtacaccatcatgggcctctgatcataactataacgccgtgaaaccagagaaaaccgcagctccgagccccagtctgctgtacaagtgcagtggaaaatactcctacagcttacaccccagcctcattgcctag

SEQ ID NO: 24313 - DNA, 1689 bp, synthetic construct
  source 1..1689: mol_type = other DNA; note = Synthetic coding sequence
atggacgacaagggcgaccccagcaacgaggaggcccccaaggccattaaacctacctccaaagaattccgaaagacatgggggtttcgcaggaccaccattgcaaagagagagggagccggggatgcagaggccgaccccttggagccgccaccccctcaacagcagctcggcttgtcattgaggagaagtgggcgtcagcctaaaaggacagaaagggtggaacagttcctgacaatagctagacgacgtggcaggagaagcatgcctgtgtcgttggaagacagcggggagcccactagttgccccgccaccgacgcagagaccgcaagcgaaggatcagtcgaatccgccagtgaaacgcgctccggtccccagtctgcctctactgcagtgaaagagagaccagcctcaagtgaaaaagtgaaaggcggggacgatcacgatgataccagcgatagtgattctgacggtctgactctcaaggagttacagaacagactgcgtcgcaaacgggagcaggaaccaacagaaagaccactgaagggtatacaatctaggttgagaaaaaaaaggcgtgaggagggacccgctgaaacagtgggttctgaagcctcggatacagtggagggggtgctaccctctaagcaggagcccgaaaatgaccaaggtgtagtctctcaggctggcaaggacgaccgtgagtcaaagctggagggtaaggccgcccaggatataaaagatgaagagccgggggacctaggccgcccgaagcccgaatgtgaaggctacgatcctaacgctttatactgcatctgtagacaaccgcataataaccgatttatgatctgttgtgataggtgcgaagagtggttccacggagactgcgtgggaattagtgaggctagggggagacttctcgaacggaacggtgaggattatatctgtccgaactgcacaatccttcaggtgcaggatgagacacactctgagacggccgaccagcaggaggctaaatggcgacctggtgacgcagacggaacggactgtaccagcatcggaacaatcgagcagaagagtagcgaagaccaaggcataaagggacgcatcgagaaggctgcaaacccctctggcaagaaaaagctgaaaattttccagcctgtgatcgaggctcctggcgcttcaaaatgtatcggcccagggtgttgccatgtcgcccaaccggactcagtctattgcagcaatgattgtatccttaagcacgctgcggcaacgatgaaatttttatcctcaggtaaggaacagaagcctaagcctaaggagaaaatgaaaatgaagcccgagaagcccagcctccctaagtgtggcgcccaagccggcattaagatctcatccgtccacaaaagaccggcgcccgagaaaaaagagactaccgtaaaaaaagccgtggtcgtcccggccagatccgaagctttgggaaaggaagctgcttgcgaaagcagcaccccaagttgggcgtccgaccacaactataacgccgtgaagccagagaagactgcggcgccgtctccttcgctcctatataagtgtatgtaccacctgggcgtcgggctactggatccctctagaagtttctggatcgctatcccttgggcttgcccagggctcggcgtggcggctctgtgctag

SEQ ID NO: 24314 - DNA, 1689 bp, synthetic construct
  source 1..1689: mol_type = other DNA; note = Synthetic coding sequence
atggacgacaagggcgaccccagcaacgaggaggcccccaaggccatcaaacccacatcaaaagagttcaggaaaacatggggattccgacgcactactattgccaagcgagagggcgcgggcgacgccgaggccgaccctctggaaccacccccccctcagcagcagctcggtcttagcctgcgcaggagtgggcgtcagcctaagcgcaccgagcgcgtggagcagtttctcactatcgcccgaaggcgcggcagaaggtcaatgcctgtgtccctggaagattccggcgaacccaccagctgtcctgctaccgatgccgagaccgcttctgaaggctccgtcgaatcggctagtgagaccaggagtggcccccagtccgctagcacggcagtcaaagagcgccccgcgtctagcgagaaagtgaaaggcggggatgatcatgacgacaccagtgatagcgactcagacggtctgaccctgaaggagctccaaaaccgcctacgccgcaagcgagagcaggagcctactgagcgccctctcaaggggattcagagccggctcaggaaaaaacggagagaggagggaccggcagaaaccgtcggcagtgaggcttccgatacagtggaaggagtgttaccatcgaaacaggagcctgagaatgaccagggagtcgtgagccaagctggaaaggatgatagagagagcaagcttgaaggaaaggctgcccaggacataaaggatgaggagccaggggatcttggccgccccaagccagagtgcgaaggttacgaccccaacgcactctattgcatttgccgacaaccgcacaataatcgcttcatgatctgttgtgaccgctgcgaggaatggtttcatggcgactgcgtcggcatcagtgaagcaagggggcgcctcctcgagagaaacggtgaggactacatctgtcccaattgcacaatcttgcaagtccaagacgagacccatagcgaaactgctgaccaacaggaggcaaaatggagacccggcgacgctgatggcactgattgcactagcattggcacgatcgagcagaaaagttcggaggatcagggcatcaagggccgtatagagaaagccgctaacccaagtggaaagaaaaaactgaaaattttccagcctgtaatcgaggcacccggcgctagcaaatgcattggtcccggatgttgtcacgtggcccaaccagatagtgtttactgctcgaacgactgtatcctgaagcacgctgctgctaccatgaaattcctttccagtggtaaagaacagaaacccaagccaaaggagaagatgaagatgaagcctgagaaaccttctctccctaagtgcggagcacaggccggcatcaagatttccagcgtccataagaggcccgcccctgaaaaaaaggagacgactgtgaagaaagccgttgtagtgccagcccgcagtgaggctctgggaaaagaggctgcatgtgaatcttctacgcctagctgggcatccgaccataattacaacgcagtgaaacccgaaaagacagccgctccctctccatcactgctgtacaaatgcatgtaccacctgggcgttgggctgctggacccctcacgaagtttctggattgctattccctgggcttgcccagggctgggggtggccgctctctgttag

SEQ ID NO: 24315 - DNA, 1272 bp, synthetic construct
  source 1..1272: mol_type = other DNA; note = Synthetic coding sequence
atggaggacaagcggagcctgagcatggcccggtgcgaggagcggaattcccgagggcaggaccatggccttgagagggtcccctttccaccgcaattacaaagtgaaacctatctccatcctgcagatccatcacccgcatgggacgatcctggctctacagggtcccccaaccttcgtctgttaacagaggagattgcctttcagccactcgccgaagaggccagtttcaggcgcccacatcccgacggggacgtgcctccccagggggaggacaatttgctgagtctccccttcccccagaaactgtggcggctcgtttcttctaatcagttctccagcatatggtgggacgatagtggcgcttgcagagtcattaaccagaaactctttgagaaggagattctgaaacgggacgtggcacacaaagtttttgccactacctctatcaagagtttctttaggcaactcaatttgtacggctttcggaaacgtaggcagtgtacctttcggacatttaccaggatcttttcagcaaaacggctggtcagtatcctgaataaactggaattttattgtcatccttactttcaacgtgacagccctcacctgttggtacgaatgaagcggcgtgtaggcgtgaaaagtgcacctcgtcatcaggaggaagataaaccagaggcggcaggatcctgcttggctcccgccgacactgaacagcaagatcatacgagcccgaacgaaaacgaccaggtgactccccagcatcgtgaaccagccgggcccaatacacagattcggtctgggagtgctcccccggcaacaccagtcatggtgccggatagcgccgtggcttctgataattcccctgtgacacagccagccggggagtggtcggaagggagtcaggcgcatgttacaccagttgctgcggttcccgggcccgctgcactgccatttctatacgtcccaggtagcccaactcaaatgaatagctacggccccgtcgtggcactgccaacagcaagccgctcaactcttgcaatggatacgactggcctgcccgcccccggtatgctgccgttctgtcacctgtgggtcccggttacccttgttgccgcgggggctgcacagccggccgcttccatggtgatgtttcctcatctgcccgccctccatcatcactgtccccattcccaccggactagccagtacatgcctgcttccgacggaccgcaggcttaccctgactacgccgaccagtcgacttag

SEQ ID NO: 24316 - DNA, 675 bp, synthetic construct
  source 1..675: mol_type = other DNA; note = Synthetic coding sequence
atgcccaccctgttcaagggcgtgtggggcgtggtggagcacagccgagccctggggaggttctgtccagcctgcctgccctcaggtcctcacctgcatactcagccagcgctgggtacagctgaaatgacactgctgagctcccagagctcttctttagtagcgccctccggcagcgtttcagcggagaatcctgagcagaggatgttggaaaaaagagccaaggtaattgaggagcttctgcagacagagagggattacatacgagatttggagatgtgtatagagcgcatcatggtacctatgcagcaagcccaagtacccaatatcgattttgaagggctgtttggcaacatgcaaatggtcataaaagtaagtaaacaactgctcgccgcactggaaatctccgatgcagtcggacctgtctttctggggcaccgtgatgaacttgagggcacttacaagatctactgtcagaatcacgacgaagccatcgctctgctggaaatttatgaaaaagatgaaaagatccagaagcatctccaggactcgcttgcagatctcaattcgctggtgctgaagaagggctgtaccaattatattaacctcggatctttcctcattaaacccgtgcagcgggtcatgagatacccgctgctcctgatggagctatag

SEQ ID NO: 24317 - DNA, 1878 bp, synthetic construct
  source 1..1878: mol_type = other DNA; note = Synthetic coding sequence
atgcggctgcccgagcggcacggcggcccccagggcagcctgtgcctgatggacccatgttgtcctctgtcacttgccctacaggacctggtcgagagggattgcaacggtgacactccaaatctctcattctatcggaatgaaatcagattcttgccaaatggatgtttcattgaggatatactccagaactggactgacaattacgatctcctagaggataaccactcctacatccaatggctctttcctctgcgcgagccaggggtgaactggcacgccaagccactgactcttagggaggtcgaagtgttcaaatctagtcaagaaatccaggagcgactggtacgtgcttacgagctaatgttggggttctatggcataagattggaggaccgtgggactggtaccgtcggacgcgcgcagaattatcagaagcggttccagaatctgaactggcggtcccataataatttgagaatcacgaggatactgaaatctttaggggagctgggcctggaacattttcaggccccactggtacgcttctttctcgaggagacactggtgcgccgggagcttccaggagtcagacagagtgcattagattatttcatgtttgccgttcggtgccgccaccagcgccgccagctcgtccacttcgcatgggagcacttcaggcctcgatgcaaattcgtgtggggccctcaggacaaacttaggagatttaaaccctcatccttgccacatcccctggagggctctcgtaaagttgaggaggaaggatcccctggtgaccccgaccacgaggcgagcacccagggcaggacctgcggccccgaacactccaaagggggcggtagagtggacgagggaccacagcccaggtctgttgagcctcaggacgctgggcctctggagaggtcccagggcgatgaagccggtggccacggagaggatagacccgaaccactcagccctaaggagtctaagaagcggaagcttgaacttagcaggagggagcagcccccaactgaacccgggccccagtctgcaagtgaggtggagaaaattgctctcaatttggaggggtgcgccctctcccagggatctttaaggactgggacacaagaggtgggggggcaagacccaggggaagccgtacagccttgtcgacaaccactgggcgcccgcgtcgcggacaaggtccgcaagaggagaaaagtggatgagggtgccggggactctgcggcggtagcttcaggcggagcacagacgctcgccctagcaggtagtcccgcacccagtgggcaccctaaggctgggcactctgagaacggtgtagaggaagataccgagggtcgaaccggccctaaggagggcactccgggaagtccttcagagactcctggcccctctcccgctggaccagctggagatgagcctgccgagtctccctccgagacgccaggccctcgacctgccgggcctgccggtgatgaacctgccgaatctccaagcgagacccccgggcccaggcccgccggaccagccggagatgagcccgcggagtctccgtccgagactcccggccccagccctgctggacctacccgcgatgaacccgcagaatccccatcagagactccaggccctcgacctgctggacctgcaggagatgaacccgctgagtccccatccgaaaccccaggcccacggccggctgggccggcaggcgatgagcctgccgagtcgccctcggaaacacccgggccctcacccgccggaccaaccagggacgagcccgcaaaggcaggagaggccgccgaactgcaggatgccgaggtagaatcttcagccaagtcaggcaagccctag

SEQ ID NO: 24318 - DNA, 1386 bp, synthetic construct
  source 1..1386: mol_type = other DNA; note = Synthetic coding sequence
atggacgaccccgactgcgacagcacctgggaggaggacgaggaggacgcagaagacgccgaggacgaagattgcgaagacggcgaggccgctggtgccagggatgcagatgctggcgatgaagatgaggagtctgaagaaccaagggcagctagaccctcatcattccagtcaaggatgactggatctagaaattggcgggcaacccgtgatatgtgccgttatagacacaactacccggatctggtggagcgggattgcaacggcgacacccctaacctcagcttctaccgcaatgagatacggtttctgcctaatgggtgttttatagaagacatcctgcaaaactggacggacaactacgacctgcttgaagataaccactcttacatccaatggctctttcctctcagggagcctggggtgaactggcacgccaagccattgacccttagagaggtggaggtgttcaagtccagccaggaaatccaggaacgtctcgttcgggcctacgaacttatgctcggcttctacggaattcggctggaggacaggggcaccggaaccgttggaagggctcagaattaccaaaagaggttccaaaatcttaattggagaagccacaataacttgcgcatcacccgcatcctcaaatccttaggggagctgggacttgagcacttccaagctcccctggttcggttctttctcgaggaaaccctagttagacgggagctgccaggtgtgaggcagtccgcgctggactattttatgttcgcggttcgatgccgccaccagcgccgccagctggtacatttcgcttgggagcattttagaccaagatgtaaattcgtttggggtccgcaggacaaactcagacgctttaagcctagttctctgccacatcctttagaagggagtcgtaaggtggaggaagaaggatctccaggggacccagatcatgaggcgtctacacagggtcggacatgcggaccagaacattccaaaggtggaggaagggtggacgaaggcccccagcctcggtccgtcgagccacaggacgccggccccttagaacgctcacagggtgatgaggcaggtggtcacggcgaggaccgaccggaacccttgagtcctaaggagagcaagaaacgcaagttggagctctcacggagagaacagccacccactgagcccggcccgcagagcgccagtgaggtagagaagatcgcactgaacttggagggttgtgccctgagccaggggtccctcaggacagggacccaggaagttggtggacaagatcctggagagtcatcctgtccatgctgcagaggatggggcctgcgatcttgttgcggactcccgagcggtagcgcatcctag

SEQ ID NO: 24319 - DNA, 1539 bp, synthetic construct
  source 1..1539: mol_type = other DNA; note = Synthetic coding sequence
atgcccagccccagccggagcggccggagccggtgcctgaaggccccacggcgatctagaagcggattatccgggcctacttcttcctgttgggcttccactatcaggctggaagatcgcggcactggaacagtgggaagagcacaaaactaccaaaagcgatttcagaaccttaattggcggtctcataacaacttaaggattacacgaatccttaagagtctgggtgagctcggcctggagcactttcaggctccgttggtgaggttctttctggaggaaaccctggtgcgcagggagttgcccggcgtgcgccagagcgctctggactattttatgttcgctgtgaggtgtcgacatcaacgcaggcaactggtgcatttcgcctgggagcatttcagaccaagatgtaagttcgtctggggcccgcaggacaagctgaggagatttaagccgtcatcacttcctcaccctctggagggaagccgtaaagtcgaggaggaaggctctcccggcgatcccgaccacgaagcttcgacacaggggcgcacctgcgggcccgaacattccaaaggggggggaagagtcgatgagggacctcagccgaggagtgtcgaaccacaagacgccgggcctctcgagaggagccagggcgacgaagcaggtggccacggtgaggaccgcccagaaccgttgtcacctaaagagagcaagaagagaaagctggaattgagccgccgcgagcagcctcctacagaacccggccctcagagcgcttctgaggtcgagaagatagcactgaatttggagggatgtgcactgtctcaggggtccctgcgaacaggtacccaagaagttggcgggcaggaccccggggaagcagtgcagccttgtcggcagcccttgggagctagagtggcagacaaagttcggaaacgtcggaaagtggatgagggggcaggtgacagtgccgcagttgcctcgggcggagctcagaccttggctcttgccgggtctcccgccccatcagggcatcctaaagcaggacattccgaaaacggtgtggaggaagacaccgaaggacgtaccggacctaaagaaggaacccctggttccccttcagagacccccggaccttctccagccggtcccgctggcgacgagccagcagaatctccatccgaaacccctggaccaagaccagctggacccgctggcgatgagcccgcagaatcaccgtcagaaacccctggaccttcccccgctggtcctactagggatgagcctgcagagagccctagtgaaacccctgggcctaggcccgccggtcccgctggggatgagcccgcagaaagtccaagtgaaaccccaggaccccggccagcgggacccgcgggcgatgagcctgccgagagtccgtcagagacgccaggtcctagtcccgctggacctactcgcgacgaacctgctaaggccggcgaagctgccgagctgcaggacgcggaagtggagagctctgcaaaatcaggaaaaccatag

SEQ ID NO: 24320 - DNA, 312 bp, synthetic construct
  source 1..312: mol_type = other DNA; note = Synthetic coding sequence
atgggccagcagagcagcgtgcggcggctgaagcggagcgtgccctgtgaaagcaacgaagctaatgaggcaaatgaagccaataagactatgccagaaacacccaccggcgatagcgaccctcagcctgcccctaagaagatgaagacgtctgagagcagcacaatcctcgtagtgcgctaccgccgaaacgtcaagagaacatcccccgaggagctggtaaacgatcatgcccgggagaaccggatcaacccagaccaaatggaagaggaggaattcatcgagataactaccgagagacccaaaaagtag

SEQ ID NO: 24321 - DNA, 1776 bp, synthetic construct
  source 1..1776: mol_type = other DNA; note = Synthetic coding sequence
atggagaaggccgtgaacgacggcagccacagcgaggagctgttctgccatctgaaaaccatcagcgagaaggaagatctgcctcggtgtacttctgagagccacctgtcctgcctgaaacaagacatcttaaacgaaaaaaccgagctagaagcaactctaaaggaggccgagctggtgacccacagcgtggaattgctgctgccactcttcaaagacacaatagagaagattaacttcgaaaatgctaatttgtcagccctcaatctgaagatatctgagcagaaagagatcctgatcaaagagctggatacatttaaaagcgtaaaacttgcactggagcacctgcttaggaagcgcgactataaacaaacaggcgacaacttatcttccatgctcttggagaatctaaccgataacgaatccgaaaacaccaatcttaaaaagaaagtgtttgagaaagaggcccacattcaggaactcagctgcctgtttcaaagcgagaaagcaaatactctcaaagcaaataggttttcccagtctgttaaggtggtgcatgagcggctgcaaattcagattcacaagcgcgaggcagaaaacgacaagcttaaggaatacgtcaagagcttggagacaaaaatagcaaaatggaatctgcagtctaggatgaacaaaaatgaggcaatcgtcatgaaggaagccagtagacagaagactgtggccctgaaaaaggcttccaaggtatataagcagcgactggatcattttacaggcgccattgaaaagctaactagtcagatccgggaccaggaggccaaactttccgagactatcagtgcctcaaacgcttggaagtcccactacgagaaaattgtgatcgagaagactgagcttgaggttcagattgagactatgaagaagcagataatcaacctgttggaggatttgaagaaaatggaagaccatggcaagaactcctgtgaggagatcctgaggaaggtgcactccatcgagtacgaaaatgaaactttgaacctggagaataccaagttgaaaaccacgctggccgccctaaaagatgaagtggtatctgtggaaaatgagctatccgaactacaggaagttgagaagaagcagaaaacactgattgaaatgtataaaacacaggtccagaagctgcaggaggccgccgaaatcgtgaagtcacgttgcgagaacctcctgcacaaaaataaccaaataactaaaacaaaaaataagaacgtcgagaaagtggatggaaaccataatctgctgactaagctttccctcgaggaggaaaactgccttatacagctgaagtgcgagaacctccagcagaagttagaacagatggatgccgaaaataaggaactcgaaaagaagcttgcgaatcaggaggaatgtcttaaacattcaaacctgaaatttaaggaaaagagcgcggagtacaccgcactggcccgacagctggaagctgccttagaggaaggacgtcagaaggttgcagaggagatcgagaagatgtcttctcgggaatccgcgctgcaaatcaaaattctggatctggagactgaacttcgtaaaaaaaatgaggagcagaatcagttggtctgcaaaatgaatagtaaggcccaacatcaggaggtttgcctgaaggaggtacagaactccctcgagaaatcagagaaccagaacgaatccattaaaaactacctgcagttcctcaagacctcttacgtgactatgttcgagtag

SEQ ID NO: 24322 - DNA, 1935 bp, synthetic construct
  source 1..1935: mol_type = other DNA; note = Synthetic coding sequence
atggagaaggccgtgaacgacggcagccacagcgaggagctgttctgccatctgaaaacgatctctgagaaggaggacctgccacgatgcacgtcagaatcacatctaagctgcttgaagcaagatatactaaacgagaagaccgaactcgaagccacactgaaggaggctgaattagtgactcactcagtggaactactgctgccacttttcaaggacaccattgagaaaatcaattttgagaatgcaaacctctccgctcttaaccttaaaatctccgaacagaaggagatactcattaaggaacttgatacatttaagtctgtgaaactggccctggaacacctacttagaaaacgggactacaagcagactggcgataacctgtctagcatgcttttggagaatctgacagataatgaatccgaaaatacaaatctcaagaaaaaggtgttcgaaaaagaggcacacattcaggaactctcttgtctttttcagtctgagaaagccaacacactgaaggctaacagattctctcagagtgtcaaggttgtgcacgaaaggctgcagatacagattcacaaacgagaggctgagaacgataagttgaaggaatatgttaaatcactggaaacaaaaatcgccaagtggaatctccagtccaggatgaacaagaacgaggctatcgtgatgaaggaagcatctcgccagaagacggtggcccttaaaaaagctagtaaagtctacaagcaacgcctcgaccatttcacgggggcaatcgagaaactgactagtcagatacgtgatcaggaggctaaactatcggaaacgattagtgcctccaacgcctggaaaagtcactatgaaaagattgttatagagaaaacagagctcgaggtccagattgagaccatgaaaaagcaaattatcaatctactggaggatctgaaaaagatggaggaccacgggaagaacagctgtgaggagattctgcgcaaggtgcactccatcgagtacgaaaatgagaccctgaatctggagaacacaaagctgaagaccacattggctgcacttaaagatgaggtcgtaagcgtggaaaacgaattgtccgaattacaggaggtggagaaaaagcagaagaccctcatcgaaatgtataaaactcaggtgcagaagctgcaggaagccgctgaaattgtgaaatctagatgcgaaaatctgctccacaaaaacaatcagattacaaagacaaaaaataaaaacgtggagaaaatgagaggacaaatggagagccatctgaaagagttagaaagagtttgcgatagtttgactgcggccgaacgcagactgcacgagtgccaggagagcctgcaatgttgcaaagggaaatgtgcggaccaagagcacaccatccgagagctgcaggggcaagtggacggtaaccataacctgctcacaaaacttagcctagaggaggagaattgtttgatccagctgaagtgcgaaaacctgcagcaaaaactagaacagatggacgccgaaaacaaagaactggaaaaaaagctggccaaccaggaggagtgccttaagcattcaaacctcaaattcaaagaaaaaagcgccgagtacacagcactggcaaggcagctggaagctgctcttgaggagggacggcaaaaggttgctgaggaaatcgagaagatgtcttcacgagagtctgccctacaaattaagatcctagacctggagacggaattgaggaagaagaatgaagagcaaaaccaactcgtctgcaagatgaatagcaaggcacagcatcaagaagtttgcttaaaggaggtgcagaatagcctcgagaaatccgagaatcagaatgaatccatcaaaaactacctgcagttcctcaagacctcatacgtgactatgttcgagtag

SEQ ID NO: 24323 - DNA, 2526 bp, synthetic construct
  source 1..2526: mol_type = other DNA; note = Synthetic coding sequence
atgatggccgacggcgccgccgccggcgccggcggcagccccagcctgcgggagttgcgggcccgaatggtcgcagccgccaacgagatcgccaaagaaagaaggaagcaagatgtggtgaaccgcgtagctacccacagttcaaatattcgctcgaccttcaaacccgtgatagatgggagcatgctcaaaaatgacattaagcagcgactggctagagaacgcagagaggagaagaggcggcagcaggacgcaaataaagagacccagctacttgaaaaggagcggaagacgaagctacagtatgaaaagcagatggaggagcgccagcgaaaactcaaggaaaggaaagagaaggaggaacagaggagaatcgccgctgaggaaaaaagacaccagaaagatgaggcccagaaagaaaagttcacagcaatcctgtacagaactctagaaaggcggcgccttgccgatgattaccagcagaaaagatggagttggggcggctccgctatggcaaactcagaaagtaaaactggaaagactgacaaagagcgcagcagctctctgaacaggagagattcgaatcttcatagctccacagacaaggagcaggctgaacgaaagcctcgagttactggtgtgactaactatgtcatgcagtacgttacagtaccgctcagaaagtgcacctccgatgaacttcgcgccgtcatgttccctatgagtacaatgaagatccctcctcagacaaaagtggaggaaagcccactagaaaaggtggagacgcccccaaaggcatccgtagatgcccccccccaagtcaatgttgaagttttctgcaacactagcatggaggctagtccaaaagctggcgtgggcatggcaccggaagtcagcacagacagctttcccgtagtctcagtggatgtatctcctgtggtctcaacatacgattctgagatgagtatggacgctagccccgagctgtcgatagaagcactgccgaaggttgatctagagaccgtaccaaaagtgagcatcgtcgcctctcctgaggccagcctcgaggccccgccagaggtttctctggaggccctccccgaagtaagcgtcgaagccgcccccgaaggatctctggaggccccacctaaagggtctgcggaagtggctccaaaggagtccgtgaaagggagtcccaaggagtctatggaggccagtcccgaagcaatggttaaagcttccccaaagacctccctggaggcatctatggaggcatcacccaaagcaaaggcccgagatgcacctaaaaaatctgagatggacaagcaggcactgattccaattgccaagaagagactcagctcctataccgagtgctacaaatggtcaagttccccagagaatgcctgcggactgcctagcccaatcagtaccaatcggcagatccagaagaattgccccccgtctcccttacctctcattagcaagcagtcaccgcaaactagcttcccatataaaattatgccaatacaacacactctctccgtgcagtctgccagttctacagtaaaaaaaaaaaaggagacagtgtcaaaaaccaccaacaggtgtgaagcgctgagccagaggcacatgatatacgaggagtcgggcaataagtctaccgcaggcatcatgaatgccgaagccgctaccaaaatattaaccgaactccgacgactagccagggagcaaagagaaaaggaggaagaggaacgccagcgagaggaaatgcagcagcgagtaatcaagaagtcaaaggacatggctaaagaggctgtcggaggccaggctgaggatcatctgaaactgaaagacggacagcagcagaatgaaacgaagaagaagaagggatggcttgatcaagaagaccaggaagcgcccctccagaagggggatgcgaagattaaggcacaagaagaagcagataagaggaaaaaagagcacgagcgcataatgttacagaaccttcaggagaggctggaaaggaaaaagaggatcgaggagattatgaaacgcacacgaaagactgatgtgaatgcgtcgaaagtgaccgagacctcgtcgcacgatatttacgaggaggctgaagcagataatgaagaaagcgataaggactcattgaacgagatgttcccatccgccattctgaatgggacaggcagccctaccaagttcaagatgccttttaacaacgcaaaaaaaatgacacataagctggtatttctggaggacggcaccagtcaggtacgaaaggagcctaaaacgtacttcaatggggacttgaaaaatttccgacagaaaagcatgaaggacacctctattcaggaagtcgtgtcaagaccatctagcaaaagaatgacttcacataccaccaagactcgcaaagctgacgaaaccaatacaacatctagatcttcagcacaaacaaagtctgaaggcttccacgatatcctccccaaatctagcgatacgtttcgccagtag

SEQ ID NO: 24324 - DNA, 2577 bp, synthetic construct
  source 1..2577: mol_type = other DNA; note = Synthetic coding sequence
atgaccagcccccgggtggccgccgccaacgagatcgccaaggagcgcaggaagcaggatgtggtgaatagggtagccacccattctagtaacatccgctctaccttcaaaccagtgattgatgggagcatgttgaaaaacgatatcaagcagcggctggcacgcgagaggagggaggaaaaaaggcggcagcaggacgccaacaaagagacgcagctgctggagaaagaaagaaaaactaagctgcagtacgaaaagcagatggaggagaggcagcggaaactgaaggagcgcaaagagaaggaagagcagagaagaatcgcggcagaagagaagcggcatcagaaggacgaggcacagaaggaaaaattcaccgcaatcttgtaccggaccttagagcgccgcagactggcggatgattatcaacaaaaaaggtggtcatggggaggctcagcgatggcaaactcggaaagtaagaccgcaaataaaagaagtgcaagtacagagaagcttgagcaggggacctccgccctcatacgtcaaatgcccctgtcatcagctggcctgcagaacagcgttgccaagaggaaaactgacaaggagcgctcctccagcctcaacagaagggacagcaatctgcattcttccacagacaaagagcaagcggaacgcaagccgcgagtgaccggcgtcaccaattatgtcatgcaatatgtgaccgtgccactcagaaagtgtactagcgatgaactgcgcgctgtgatgttcccaatgagcaccatgaagatccctccccaaactaaggtggaggaatctccactggagaaggtcgaaaccccaccgaaagccagtgtagacgcacccccccaagttaacgttgaagtgttctgtaacactagcatggaggcctcccctaaagccggagtaggaatggcccccgaggtgtctaccgatagtttcccggtggtatccgtcgacgtctcgccagtcgtttctacttacgattcggagatgtctatggacgcctcccctgagttgagcattgaggccctcccgaaggtcgatctggaaaccgtacccaaggtgagtatcgtggcatctccagaggccagtctggaagcccctcccgaggtctccctcgaggccttaccagaggtgtccgttgaagccgcaccagaagggtctctcgaggcgcccccaaagggatcggccgaggtcgctcccaaagaatccgtcaagggctcccccaaagagagcatggaggccagtcccgaggctatggtgaaagccagtccaaagacgtccctggaggcgtccatggaagccagtccgaaggccaaggccagagatgcccccaagaaatcagagatggacaaacaggctctcatcccaattgcgaaaaaacgactgtcaagctacacagagtgctacaaatggagcagctcaccagaaaacgcttgtggcctgccgtctcctattagcacgaatcgacagatccagaaaaattgcccaccttcacccctccccctaatctctaaacaaagtccccaaacttcttttccctataaaatcatgcccattcagcatactctgagcgtgcagtcagcttccagcacagtcaagaagaaaaaggagactgtatccaaaactaccaaccgatgcgaagcattgtctcagaggcatatgatttatgaggagtctggtaataagtcaactgcgggcattatgaatgcagaagctgctacgaagattttaacagagctgcgccgactggcacgcgaacagcgagaaaaggaagaggaggaacggcaacgcgaagagatgcagcagcgcgtcatcaagaaatccaaggacatggctaaagaggctgtggggggccaggcggaagatcacctgaaacttaaagacggacaacagcagaacgagacgaaaaagaagaagggctggctcgatcaggaagaccaggaagccccactgcagaaaggtgatgcgaaaataaaagcacaggaggaggctgataagcgaaagaaggaacatgagcgaataatgctgcagaatttgcaggagcgcctggaaaggaagaagagaatcgaagaaatcatgaagagaactagaaaaactgacgtaaacgccagtaaggttactgaaaccagctcacatgatatttatgaggaagctgaagccgacaatgaggaatcggataaagactctttaaatgagatgtttccaagtgcgatcctgaacggtaccgggtctcccacaaagttcaaaatgccctttaataacgcgaagaagatgacccacaaactggtctttcttgaggacggtacatcgcaggttcgtaaggagccaaagacctattttaacggtgacctcaagaacttcaggcaaaagtcaatgaaggacacttcaatacaggaagtcgtcagtaggccctcttcaaagcgaatgactagtcacaccacaaagacccgcaaagctgacgagacaaacacgacaagccgctccagcgctcagactaaaagcgaagggtttcacgatatcttgcccaaaagctcagacaccttcagacaatag

SEQ ID NO: 24325 - DNA, 948 bp, synthetic construct
  source 1..948: mol_type = other DNA; note = Synthetic coding sequence
atgcccctgaagctgcggggcaagaagaaggccaagagcaaggagaccgcgggcctggtagaaggcgagccaaccggagccggtggtggcagcttgtctgccagccgggcgcctgcacgccggctcgtctttcatgctcagctagcccacggaagcgcaaccggaagagtggagggcttttccagcatacaggaattatatgcgcaaatagccggtgccttcgagatctctccatccgagattctctactgcacactgaacacccctaagatcgacatggagcgcctgctgggggggcagctcggccttgaagatttcatttttgcccatgtgaaaggcattgaaaaggaagtgaatgtctacaaatctgaagacagcctgggactgactattaccgacaacggcgtcgggtacgcctttatcaagcgaataaaggacggtggtgtgattgacagtgtgaaaaccatctgcgttggtgatcatatagagagcatcaacggggagaacatcgttggttggcggcactatgacgttgcaaagaagctgaaagagcttaagaaggaagagttgttcactatgaaactgatcgagccgaagaaagccttcgagatcgagctacgctcaaaagcaggcaagagcagcggcgagaaaattggctgcggccgcgctaccctcagacttcgctccaaaggaccggcaaccgtggaagaaatgccgtccgagaccaaggccaaggccattgaaaagattgacgacgtgctggaactgtacatgggaatccgtgatatagatctcgccacaacaatgtttgaggctggaaaagataaggtgaaccctgatgagttcgcggtcgcattggatgaaacacttggagacttcgctttccctgacgaatttgtattcgacgtgtggggtgtaatcggtgatgcaaaacggagaggcctgtag

SEQ ID NO: 24326 - DNA, 2487 bp, synthetic construct
  source 1..2487: mol_type = other DNA; note = Synthetic coding sequence
atgaccggcagcaacagccacatcaccatcctgaccctgaaggtgctcccacactttgaaagcctgggtaagcaggaaaagatcccaaataaaatgtcggccttccgtaatcactgccctcacctggactcggtgggcgaaattacaaaggaggacttgatccagaagtctctggggacctgccaagattgcaaggtgcaaggccccaatctgtgggcctgcctggagaacagatgctcctacgttggctgtggggagagtcaggtcgaccactctacgattcacagccaggaaactaaacactacctgaccgtaaacctgacgactttgcgggtatggtgttatgcctgttctaaggaagtctttctggacagaaaactgggcactcaaccatccctaccgcatgtgcgtcagccacatcagatacaggagaattccgtccaggacttcaaaattcctagtaataccactctcaagacaccactcgtggctgtgtttgacgatctggacatcgaggctgatgaagaagacgagctcagggcgagggggctgaccggactcaagaacataggcaacacttgctatatgaacgccgcacttcaggcactgagcaactgtcctccccttacccagttcttcctcgattgcgggggccttgctagaacagataagaagccagcgatatgtaagagctacttaaagctgatgacagagctgtggcataaatcacggccaggctccgtagtcccaacaacattgtttcagggcattaagactgtgaatccgacgtttaggggttactcccaacaggacgcgcaggagtttttgcgctgtctcatggatctgcttcacgaggagctgaaggagcaagttatggaggtagaggaggacccacagactattactacggaggaaacaatggaggaagacaagtcccagtcggacgtggattttcagagctgcgaatcgtgctcaaacagcgaccgggcagagaacgaaaacggctcaaggtgtttctctgaagacaacaacgagactaccatgctgattcaggatgacgagaacaactctgaaatgtccaaggactggcagaaggaaaagatgtgtaacaaaatcaataaagtgaactctgaaggagagttcgacaaggacagagatagcatatccgaaactgtggaccttaacaatcaggagacggtcaaggtccagatccattcaagagcttccgagtacatcacagatgtgcattcaaacgatctgtctacaccccagatattaccctccaacgagggagtgaaccccagactcagcgcttcccctccaaaatccggaaacctatggccgggcctggctccaccgcataagaaagcccagtcagcaagccctaaacggaagaagcaacacaaaaaatatagatctgtcatctccgacatattcgatgggaccataattagctccgtgcagtgcctgacctgcgatcgcgtttccgtaaccctggagacattccaggatctcagtcttcccattccgggaaaagaagacctcgccaaattacattcctcttcacatccaacgtctattgtgaaggctggttcctgtggcgaagcctacgctccccagggctggatcgctttcttcatggagtacgttaaatcttggttctgggggcccgtggtaaccctgcaggactgcttggccgcgttctttgcacgggacgagctgaaaggagataacatgtactcttgcgagaaatgcaagaaactcagaaatggcgtgaaattctgcaaggtgcagaattttcccgaaatcctgtgtattcacctgaagaggttccgccatgagctcatgtttagcaccaagatttccacacacgttagctttcccctggaaggattggacctccagccattcctggctaaagactcacctgcgcagatcgttacgtacgatctgctctccgtcatatgccaccacggaactgcctctagtgggcactatatcgcatactgtagaaataatcttaacaatctctggtacgaattcgatgaccagagcgtgaccgaggtctcagaaagcacagtgcaaaatgcagaagcatacgtgctgttctatcgcaaaagttccgaggaggcccaaaaggagcgaaggaggatcagtaacctacttaacatcatggaaccttctctgctccagttctatatctccaggcagtggctaaacaagttcaaaaccttcgcagagcccggtccaattagcaataacgattttctctgtatccacggaggagtgccccctaggaaagctgggtatatcgaggacctggtactcatgctcccacagaacatctgggataacctatactcccgctatggtggagggcccgccgttaaccacctgtatatttgccatacctgccagatcgaagccgagaaaattgagaagagaagaaaaactgagctggagatctttattcgtgtgaagaagtag

SEQ ID NO: 24327 - DNA, 2829 bp, synthetic construct
  source 1..2829: mol_type = other DNA; note = Synthetic coding sequence
atgaccggcagcaacagccacatcaccatcctgaccctgaaggtgctgccacattttgagtcgctcggtaaacaggagaaaatccccaacaagatgtccgccttcaggaatcattgtcctcacttggatagtgtcggagagatcacaaaagaagatcttatacagaaaagtttgggaacttgtcaagactgcaaggttcaaggcccaaacctgtgggcgtgcctcgagaacaggtgctcttacgtcggttgcggagagtctcaggtcgatcacagcaccatacacagccaggaaaccaaacactacctgacagtcaacttaactactcttcgggtgtggtgctacgcctgctccaaggaggtcttcctcgaccggaagttaggcacccagcccagccttccccacgtgagacaaccacaccagatacaagaaaactctgtgcaggatttcaaaatcccttctaatacaacgctcaagactcccctggtagcagtgtttgacgacctggacattgaggcagatgaagaggatgagctgcgggccaggggtcttaccgggctgaaaaacatcgggaatacctgttatatgaacgccgccctgcaagctcttagcaactgtcctcctctgacacagttcttcctggattgtgggggtttggcgcgcactgacaagaaacccgctatatgtaagagctacctgaagcttatgacagagctgtggcacaagagtaggccggggtctgtggtgccgactacactttttcaggggataaaaacagtgaaccctacctttaggggttactcgcaacaggacgcccaggaattcttgcggtgcttgatggatttactgcacgaggagcttaaagaacaagtgatggaggtggaagaggatcctcagaccattacaacagaagaaactatggaagaggacaaatcccaaagtgacgtcgatttccaaagttgtgaatcctgcagcaatagcgaccgggctgaaaacgagaatggatcacgctgtttctcagaagacaacaatgagactaccatgcttatacaagacgatgagaacaactccgaaatgtccaaagattggcagaaagaaaaaatgtgtaacaagattaacaaggtcaactcagaaggggagtttgataaggaccgggattcgatttcagaaacagtcgacctcaataaccaagaaacagtaaaggtgcagattcacagtagagcatccgagtacataactgatgtgcattcgaacgacctgtcaacaccacagatcttaccatccaacgaaggtgtgaatccgcggctttccgcttccccccctaaaagcggcaatctgtggccaggccttgctccgcctcacaagaaggcccagtcagcctctccgaaacggaaaaagcagcataagaagtaccggagcgtgatttctgacatctttgacggtactattataagttcagtgcaatgcttaacctgcgatcgggtctccgttactttggaaacattccaagaccttagcttgcccattccagggaaagaggatctggctaagctgcactctagctcccacccgacttccatcgttaaggcaggatcttgcggagaagcttatgcaccccaggggtggatcgctttctttatggagtatgtcaagcggttcgttgtctcatgtgtgccaagctggttttggggtcccgtcgtcactctacaggattgtcttgctgccttctttgcacgggatgagttaaagggcgacaacatgtatagctgcgagaagtgcaagaagctgcggaatggggtgaaattctgcaaggttcagaacttccccgaaattttatgcatccacctaaagcggttcaggcacgaactcatgttttctaccaagatcagcactcatgtgtcctttcccctggaaggacttgacctccagccatttctcgccaaggatagtccagctcaaatcgtcacctatgacctcttaagcgtgatctgtcatcatgggaccgcttcaagcggtcattatattgcttattgcagaaataacctcaacaacctctggtatgagtttgatgaccagtctgtgactgaggtgtcagaaagcactgttcaaaatgctgaggcgtatgtgctgttctaccgtaagtcctcggaagaagcccagaaagaaaggaggcggatatctaacctgctgaacatcatggagccaagtcttctgcagttctatataagccggcagtggctgaacaagttcaagacattcgccgaaccaggtcctatctctaacaacgacttcctttgcatccacgggggagtccctccaaggaaagctggatacatcgaggacctagttctgatgttgccacagaatatttgggataacctctactcaagatacggcggagggcccgcagtgaatcatctgtatatctgccatacctgtcagattgaggctgagaaaattgagaaacggaggaagacggagctagagatcttcatccgtctcaatcgagcgttccagaaagaagatagcccagcaacattttactgcatctctatgcagtggttccgagagtgggagtctttcgtcaaaggaaaggatggggacccgccaggccctatcgacaacacaaaaatagccgttaccaagtgcggaaacgtgatgctcagacagggagctgacagcggacagatctccgaggaaacctggaacttcttgcaatctatttacggcgggggccctgaagtcattctgcgcccccccgtcgtgcatgtcgatcccgacattctacaggctgaagagaagattgaagtggagactcggagtttgtag

SEQ ID NO: 24328 - DNA, 2736 bp, synthetic construct
  source 1..2736: mol_type = other DNA; note = Synthetic coding sequence
atgagcgccttccggaaccactgcccccacctggacagcgtgggcgaaattaccaaggaagatttgattcagaaaagtttgggaacctgccaggattgcaaggtgcagggtccgaacctgtgggcttgtctcgaaaaccgatgctcatacgtgggctgcggtgagagccaagtggaccatagcaccatccacagtcaggaaaccaagcattacctgactgtgaatctgacgacactgcgggtttggtgttatgcgtgttcaaaggaggtgttcctggatcggaagctgggaacccagccttccttaccccacgtgcgacagccccaccaaatccaggagaacagcgttcaggattttaagatacccagcaatacaacactgaaaacgcctctcgtcgctgtgttcgatgatctcgacatcgaggccgatgaagaggacgaattacgcgcaaggggcctaactggactcaaaaacatcggtaacacctgctacatgaacgctgcattgcaggcactgagcaactgtccaccacttacccagtttttcctagattgtggcgggttggcaagaacagacaaaaaacccgctatttgcaaaagctatctgaaactgatgacggagctctggcacaaatctcgtcctgggtccgtggtgcctaccactctcttccagggaatcaagactgtgaaccctactttccggggctactcacagcaggatgcacaggaattccttagatgtttaatggatctgttgcacgaggagctgaaggagcaggtcatggaagtagaggaggatccacagactataacgaccgaggagaccatggaggaagataagtctcagagtgacgtcgattttcagtcctgtgaatcttgctcaaactcagacagagccgagaacgaaaacggttctcgttgcttttctgaggataacaacgagacaacaatgctcatacaggatgacgaaaacaattccgaaatgtcaaaggactggcagaaggaaaagatgtgtaacaaaataaataaggtcaactcagagggggaatttgacaaagaccgggatagtattagcgaaacagtcgatctcaataatcaagagacggtcaaagttcagattcattcaagggctagcgagtacatcacggatgtccattccaatgatctgtccacacctcagattctcccaagtaatgagggtgtcaacccgagactgagcgctagtcctccaaaatccggcaacttgtggcccggactggcaccgcctcacaaaaaggcccagtcagcttctcctaaaagaaagaaacaacataaaaaatatagaagtgtcataagtgatattttcgatgggaccatcatcagctccgtccagtgcctgacctgcgaccgagtaagtgtcactctggaaacatttcaggatctgtcgctgcctatccccgggaaggaagatcttgctaagctccactctagtagccaccccacatctatcgttaaagccggatcttgcggtgaggcatacgcacctcaaggttggattgctttctttatggagtatgtcaagcgatttgtggttagttgcgtaccttcatggttctggggccctgtcgtcactctgcaggattgcctggctgcatttttcgctcgcgatgagctgaagggtgacaacatgtatagctgcgaaaaatgcaaaaaacttaggaacggagtgaagttttgtaaggttcaaaattttcccgagatcctttgcatacatcttaagcggtttaggcacgagctgatgtttagtaccaagatctcgactcatgtaagctttccactggagggtctggatctgcagccttttttagcaaaggattccccagcccagatcgtgacctatgatctcctgagcgtaatttgccaccacggaactgcctcaagcggccattatattgcatattgccggaacaatctgaacaatctctggtacgagtttgatgatcagagtgtgaccgaagtatccgagagcactgtccagaacgccgaggcatatgtactcttttaccggaagtcgtcagaggaggctcaaaaagagcgtcgtcggatctccaatcttctaaatatcatggagccgtccctactccagttttatattagccgccaatggttgaataagtttaaaacattcgctgagccgggaccgatttcgaacaatgacttcctgtgcatccacggcggcgtgccgccccgaaaagctggatacatcgaggacctcgtccttatgctgccccagaatatatgggataacctgtactcacggtatgggggcggtcccgccgtgaaccatctgtacatctgtcacacctgccaaatcgaagctgaaaaaatcgagaaacggagaaagactgagctggaaattttcatacgtcttaatagggccttccaaaaggaggacagtccagcaacattttactgtatctctatgcagtggttcagggagtgggaatcttttgtgaaaggaaaagatggcgacccacccggccccatcgacaatactaagattgccgtcaccaagtgcggtaacgtcatgctgagacagggagccgactcaggacagatctcagaggagacgtggaacttcttgcagtcaatttacggcggaggcccagaggtcatcctcaggccacccgttgtgcacgtcgaccctgacatcctgcaggccgaggaaaagattgaagtggaaactcgcagtttatag

SEQ ID NO: 24329 - DNA, 465 bp, synthetic construct
  source 1..465: mol_type = other DNA; note = Synthetic coding sequence
atggccccccccgtgcggtactgcatccccggcgagcggctgtgcaacctggaggaaggcagtccggggtctggcacctacacccggcatgggtatattttcagtagcttagcaggttgccttatgaagtctagcgagaacggagctctgccagtcgtcagtgtggtgcgtgaaaccgaatcccagctcctgcctgatgtcggggccatagtcacttgcaaggttgaaatttataaatcctttcgccccggggatatcgtcctggccaaagtcatctctctaggcgatgcgcaatcaaactatctgttgacaacagccgaaaatgagctgggcgtggtcgtggctcactccgagagcggcatccagatggtaccaatctcttggtgtgagatgcaatgtcctaagactcatacaaaagaatttcgcaaagtggcacgggtccagccggagtttcttcagacatag
